United States Patent Application Publication US 2026/0337666 A1 - sequence listing, part 17

SEQ ID NO: 25201 - protein, 456 aa, Homo sapiens
  REGION 1..456: note = ENSP00000224337
MDKLNKITVPASQKLRQLQKMVHDIKNNEGGIMNKIKKLKVKAPPSVPRRDYASESPADEEEQWSDDFDSDYENPDEHSDSEMYVMPAEENADDSYEPPPVEQETRPVHPALPFARGEYIDNRSSQRHSPPFSKTLPSKPSWPSEKARLTSTLPALTALQKPQVPPKPKGLLEDEADYVVPVEDNDENYIHPTESSSPPPEKAPMVNRSTKPNSSTPASPPGTASGRNSGAWETKSPPPAAPSPLPRAGKKPTTPLKTTPVASQQNASSVCEEKPIPAERHRGSSHRQEAVQSPVFPPAQKQIHQKPIPLPRFTEGGNPTVDGPLPSFSSNSTISEQEAGVLCKPWYAGACDRKSAEEALHRSNKDGSFLIRKSSGHDSKQPYTLVVFFNKRVYNIPVRFIEATKQYALGRKKNGEEYFGSVAEIIRNHQHSPLVLIDSQNNTKDSTRLKYAVKVS

SEQ ID NO: 25202 - protein, 433 aa, Homo sapiens
  REGION 1..433: note = ENSP00000360218
MDKLNKITVPASQKLRQLQKMVHDIKNNEGGIMNKIKKLKVKAPPSVPRRDYASESPADEEEQWSDDFDSDYENPDEHSDSEMYVMPAEENADDSYEPPPVEQETRPVHPALPFARGEYIDNRSSQRHSPPFSKTLPSKPSWPSEKARLTSTLPALTALQKPQVPPKPKGLLEDEADYVVPVEDNDENYIHPTESSSPPPEKGRNSGAWETKSPPPAAPSPLPRAGKKPTTPLKTTPVASQQNASSVCEEKPIPAERHRGSSHRQEAVQSPVFPPAQKQIHQKPIPLPRFTEGGNPTVDGPLPSFSSNSTISEQEAGVLCKPWYAGACDRKSAEEALHRSNKDGSFLIRKSSGHDSKQPYTLVVFFNKRVYNIPVRFIEATKQYALGRKKNGEEYFGSVAEIIRNHQHSPLVLIDSQNNTKDSTRLKYAVKVS

SEQ ID NO: 25203 - protein, 121 aa, Homo sapiens
  REGION 1..121: note = ENSP00000466331
MDKLNKITVPASQKLRQLQKMVHDIKNNEGGIMNKIKKLKVKAPPSVPRRDYASESPADEEEQWSDDFDSDYENPDEHSDSEMYVMPAEENADDSYEPPPVEQETRPVHPALPFARGEYIG

SEQ ID NO: 25204 - protein, 65 aa, Homo sapiens
  REGION 1..65: note = ENSP00000465741
MDKLNKITVPASQKLRQLQKMVHDIKNNEGGIMNKIKKLKVKAPPSVPRRDYASDTCSLSWNPSK

SEQ ID NO: 25205 - protein, 299 aa, Homo sapiens
  REGION 1..299: note = ENSP00000391924
MDKLNKITVPASQKLRQLQKMVHDIKNNEGGIMNKIKKLKVKAPPSVPRRDYASESPADEEEQWSDDFDSDYENPDEHSDSEMYVMPAEENADDSYEPPPVEQETRPVHPALPFARGTASGRNSGAWETKSPPPAAPSPLPRAGKKPTTPLKTTPVASQQNASSVCEEKPIPAERHRGSSHRQEAVQSPVFPPAQKQIHQKPIPLPRFTEGGNPTVDGPLPSFSSNSTISEQEAGVLCKPWYAGACDRKSAEEALHRSNKYFGSVAEIIRNHQHSPLVLIDSQNNTKDSTRLKYAVKVS

SEQ ID NO: 25206 - protein, 404 aa, Homo sapiens
  REGION 1..404: note = ENSP00000397487
MDKLNKITVPASQKLRQLQKMVHDIKNNEGGIMNKIKKLKVKAPPSVPRRDYASESPADEEEQWSDDFDSDYENPDEHSDSEMYVMPAEENADDSYEPPPVEQETRPVHPALPFARGEYIDNRSSQRHSPPFSKTLPSKPSWPSEKARLTSTLPALTALQKPQVPPKPKGLLEDEADYVVPVEDNDENYIHPTESSSPPPEKAPMVNRSTKPNSSTPASPPGTASGRNSGAWETKSPPPAAPSPLPRAGKKPTTPLKTTPVASQQNASSVCEEKPIPAERHRGSSHRQEAVQSPVFPPAQKQIHQKPIPLPRFTEGGNPTVDGPLPSFSSNSTISEQEAGVLCKPWYAGACDRKSAEEALHRSNKYFGSVAEIIRNHQHSPLVLIDSQNNTKDSTRLKYAVKVS

SEQ ID NO: 25207 - protein, 355 aa, Homo sapiens
  REGION 1..355: note = ENSP00000373662
MKKFSRMPKSEGGSGGGAAGGGAGGAGAGAGCGSGGSSVGVRVFAVGRHQVTLEESLAEGGFSTVFLVRTHGGIRCALKRMYVNNMPDLNVCKREITIMKELSGHKNIVGYLDCAVNSISDNVWEVLILMEYCRAGQVVNQMNKKLQTGFTEPEVLQIFCDTCEAVARLHQCKTPIIHRDLKVENILLNDGGNYVLCDFGSATNKFLNPQKDGVNVVEEEIKKYTTLSYRAPEMINLYGGKPITTKADIWALGCLLYKLCFFTLPFGESQVAICDGNFTIPDNSRYSRNIHCLIRFMLEPDPEHRPDIFQVSYFAFKFAKKDCPVSNINKCCKQLLRHGALLTEILLFLQLFLNR

SEQ ID NO: 25208 - protein, 662 aa, Homo sapiens
  REGION 1..662: note = ENSP00000421768
MKKFSRMPKSEGGSGGGAAGGGAGGAGAGAGCGSGGSSVGVRVFAVGRHQVTLEESLAEGGFSTVFLVRTHGGIRCALKRMYVNNMPDLNVCKREITIMKELSGHKNIVGYLDCAVNSISDNVWEVLILMEYCRAGQVVNQMNKKLQTGFTEPEVLQIFCDTCEAVARLHQCKTPIIHRDLKVENILLNDGGNYVLCDFGSATNKFLNPQKDGVNVVEEEIKKYTTLSYRAPEMINLYGGKPITTKADIWALGCLLYKLCFFTLPFGESQVAICDGNFTIPDNSRYSRNIHCLIRFMLEPDPEHRPDIFQVSYFAFKFAKKDCPVSNINNSSIPSALPEPMTASEAAARKSQIKARITDTIGPTETSIAPRQRPKANSATTATPSVLTIQSSATPVKVLAPGEFGNHRPKGALRPGNGPEILLGQGPPQQPPQQHRVLQQLQQGDWRLQQLHLQHRHPHQQQQQQQQQQQQQQQQQQQQQQQQQQQHHHHHHHHLLQDAYMQQYQHATQQQQMLQQQFLMHSVYQPQPSASQYPTMMPQYQQAFFQQQMLAQHQPSQQQASPEYLTSPQEFSPALVSYTSSLPAQVGTIMDSSYSANRSVADKEAIANFTNQKNISNPPDMSGWNPFGEDNFSKLTEEELLDREFDLLRSSKGHLKAYFASQ

SEQ ID NO: 25209 - protein, 854 aa, Homo sapiens
  REGION 1..854: note = ENSP00000424668
  VARIANT 1: note = Any amino acid
XFQVSYFAFKFAKKDCPVSNINNSSIPSALPEPMTASEAAARKSQIKARITDTIGPTETSIAPRQRPKANSATTATPSVLTIQSSATPVKVLAPGEFGNHRPKGALRPGNGPEILLGQGPPQQPPQQHRVLQQLQQGDWRLQQLHLQHRHPHQQQQQQQQQQQQQQQQQQQQQQQQQQQHHHHHHHHLLQDAYMQQYQHATQQQQMLQQQFLMHSVYQPQPSASQYPTMMPQYQQAFFQQQMLAQHQPSQQQASPEYLTSPQEFSPALVSYTSSLPAQVGTIMDSSYSANRSVADKEAIANFTNQKNISNPPDMSGWNPFGEDNFSKLTEEELLDREFDLLRSNRLEERASSDKNVDSLSAPHNHPPEDPFGSVPFISHSGSPEKKAEHSSINQENGTANPIKNGKTSPASKDQRTGKKTSVQGQVQKGNDESESDFESDPPSPKSSEEEEQDDEEVLQGEQGDFNDDDTEPENLGHRPLLMDSEDEEEEEKHSSDSDYEQAKAKYSDMSSVYRDRSGSGPTQDLNTILLTSAQLSSDVAVETPKQEFDVFGAVPFFAVRAQQPQQEKNEKNLPQHRFPAAGLEQEEFDVFTKAPFSKKVNVQECHAVGPEAHTIPGYPKSVDVFGSTPFQPFLTSTSKSESNEDLFGLVPFDEITGSQQQKVKQRSLQKLSSRQRRTKQDMSKSNGKRHHGTPTSTKKTLKPTYRTPERARRHKKVGRRDSQSSNEFLTISDSKENISVALTDGKDRGNVLQPEESLLDPFGAKPFHSPDLSWHPPHQGLSDIRADHNTVLPGRPRQNSLHGSFHSADVLKMDDFGAVPFTELVVQSITPHQSQQSQPVELDPFGAAPFPSKQ

SEQ ID NO: 25210 - protein, 1161 aa, Homo sapiens
  REGION 1..1161: note = ENSP00000334836
MKKFSRMPKSEGGSGGGAAGGGAGGAGAGAGCGSGGSSVGVRVFAVGRHQVTLEESLAEGGFSTVFLVRTHGGIRCALKRMYVNNMPDLNVCKREITIMKELSGHKNIVGYLDCAVNSISDNVWEVLILMEYCRAGQVVNQMNKKLQTGFTEPEVLQIFCDTCEAVARLHQCKTPIIHRDLKVENILLNDGGNYVLCDFGSATNKFLNPQKDGVNVVEEEIKKYTTLSYRAPEMINLYGGKPITTKADIWALGCLLYKLCFFTLPFGESQVAICDGNFTIPDNSRYSRNIHCLIRFMLEPDPEHRPDIFQVSYFAFKFAKKDCPVSNINNSSIPSALPEPMTASEAAARKSQIKARITDTIGPTETSIAPRQRPKANSATTATPSVLTIQSSATPVKVLAPGEFGNHRPKGALRPGNGPEILLGQGPPQQPPQQHRVLQQLQQGDWRLQQLHLQHRHPHQQQQQQQQQQQQQQQQQQQQQQQQQQQHHHHHHHHLLQDAYMQQYQHATQQQQMLQQQFLMHSVYQPQPSASQYPTMMPQYQQAFFQQQMLAQHQPSQQQASPEYLTSPQEFSPALVSYTSSLPAQVGTIMDSSYSANRSVADKEAIANFTNQKNISNPPDMSGWNPFGEDNFSKLTEEELLDREFDLLRSNRLEERASSDKNVDSLSAPHNHPPEDPFGSVPFISHSGSPEKKAEHSSINQENGTANPIKNGKTSPASKDQRTGKKTSVQGQVQKGNDESESDFESDPPSPKSSEEEEQDDEEVLQGEQGDFNDDDTEPENLGHRPLLMDSEDEEEEEKHSSDSDYEQAKAKYSDMSSVYRDRSGSGPTQDLNTILLTSAQLSSDVAVETPKQEFDVFGAVPFFAVRAQQPQQEKNEKNLPQHRFPAAGLEQEEFDVFTKAPFSKKVNVQECHAVGPEAHTIPGYPKSVDVFGSTPFQPFLTSTSKSESNEDLFGLVPFDEITGSQQQKVKQRSLQKLSSRQRRTKQDMSKSNGKRHHGTPTSTKKTLKPTYRTPERARRHKKVGRRDSQSSNEFLTISDSKENISVALTDGKDRGNVLQPEESLLDPFGAKPFHSPDLSWHPPHQGLSDIRADHNTVLPGRPRQNSLHGSFHSADVLKMDDFGAVPFTELVVQSITPHQSQQSQPVELDPFGAAPFPSKQ

SEQ ID NO: 25211 - protein, 355 aa, Homo sapiens; identical to SEQ ID NO: 25207
  REGION 1..355: note = ENSP00000487317

SEQ ID NO: 25212 - protein, 472 aa, Homo sapiens
  REGION 1..472: note = ENSP00000282701
MAGASRLLFLWLGCFCVSLAQGERPKPPFPELRKAVPGDRTAGGGPDSELQPQDKVSEHMLRLYDRYSTVQAARTPGSLEGGSQPWRPRLLREGNTVRSFRAAAAETLERKGLYIFNLTSLTKSENILSATLYFCIGELGNISLSCPVSGGCSHHAQRKHIQIDLSAWTLKFSRNQSQLLGHLSVDMAKSHRDIMSWLSKDITQLLRKAKENEEFLIGFNITSKGRQLPKRRLPFPEPYILVYANDAAISEPESVVSSLQGHRNFPTGTVPKWDSHIRAALSIERRKKRSTGVLLPLQNNELPGAEYQYKKDEVWEERKPYKTLQAQAPEKSKNKKKQRKGPHRKSQTLQFDEQTLKKARRKQWIEPRNCARRYLKVDFADIGWSEWIISPKSFDAYYCSGACQFPMPKSLKPSNHATIQSIVRAVGVVPGIPEPCCVPEKMSSLSILFFDENKNVVLKVYPNMTVESCACR

SEQ ID NO: 25213 - protein, 90 aa, Homo sapiens
  REGION 1..90: note = ENSP00000398835
MLWFSGVGALAERYCRRSPGITCCVLLLLNCSGVPMSLASSFLTGSVAKCENEGEVLQIPFITDNPCIMCVCLHEPTRWSNLTQNPGFYD

SEQ ID NO: 25214 - protein, 685 aa, Homo sapiens
  REGION 1..685: note = ENSP00000297161
MLWFSGVGALAERYCRRSPGITCCVLLLLNCSGVPMSLASSFLTGSVAKCENEGEVLQIPFITDNPCIMCVCLNKEVTCKREKCPVLSRDCALAIKQRGACCEQCKGCTYEGNTYNSSFKWQSPAEPCVLRQCQEGVVTESGVRCVVHCKNPLEHLGMCCPTCPGCVFEGVQYQEGEEFQPEGSKCTKCSCTGGRTQCVREVCPILSCPQHLSHIPPGQCCPKCLGQRKVFDLPFGSCLFRSDVYDNGSSFLYDNCTACTCRDSTVVCKRKCSHPGGCDQGQEGCCEECLLRVPPEDIKVCKFGNKIFQDGEMWSSINCTICACVKGRTECRNKQCIPISSCPQGKILNRKGCCPICTEKPGVCTVFGDPHYNTFDGRTFNFQGTCQYVLTKDCSSPASPFQVLVKNDARRTRSFSWTKSVELVLGESRVSLQQHLTVRWNGSRIALPCRAPHFHIDLDGYLLKVTTKAGLEISWDGDSFVEVMAAPHLKGKLCGLCGNYNGHKRDDLIGGDGNFKFDVDDFAESWRVESNEFCNRPQRKPVPELCQGTVKVKLRAHRECQKLKSWEFQTCHSTVDYATFYRSCVTDMCECPVHKNCYCESFLAYTRACQREGIKVHWEPQQNCAATQCKHGAVYDTCGPGCIKTCDNWNEIGPCNKPCVAGCHCPANLVLHKGRCIKPVLCPQR

SEQ ID NO: 25215 - protein, 161 aa, Homo sapiens
  REGION 1..161: note = ENSP00000399843
MLWFSGVGALAERYCRRSPGITCCVLLLLNCSGVPMSLASSFLTGSVAKCENEGEVLQIPFITDNPCIMCVCLVAPMKEIPITAPSNGRARLSLVFYASARRALSQSLGCAVLFIVKTLWSIWECAAPHVQAVCLRVCSIKKGRNFSQKEANVPSVPALEA

SEQ ID NO: 25216 - protein, 133 aa, Homo sapiens
  REGION 1..133: note = ENSP00000409998
MLWFSGVGALAERYCRRSPGITCCVLLLLNCSGVPMSLASSFLTGSVAKCENEGEVLQIPFITDNPCIMCVCLNKEVTCKREKCPVLSRDCALAIKQRGACCEQCKVLVSRVLRDTVLFTLKYWRLPVFWLHL

SEQ ID NO: 25217 - protein, 1099 aa, Homo sapiens
  REGION 1..1099: note = ENSP00000370047
MAHLGPTPPPHSLNYKSEDRLSEQDWPAYFKVPCCGVDTSQIESEEAEVDVRERETQRDREPKRARDLTLRDSCTDNSMQFGTRTTTAEPGFMGTWQNADTNLLFRMSQQAIRCTLVNCTCECFQPGKINLRTCDQCKHGWVAHALDKLSTQHLYHPTQVEIVQSNVVFDISSLMLYGTQAVPVRLKILLDRLFSVLKQEEVLHILHGLGWTLRDYVRGYILQDAAGKVLDRWAIMSREEEIITLQQFLRFGETKSIVELMAIQEKEGQAVAVPSSKTDSDIRTFIESNNRTRSPSLLAHLENSNPSSIHHFENIPNSLAFLLPFQYINPVSAPLLGLPPNGLLLEQPGLRLREPSLSTQNEYNESSESEVSPTPYKNDQTPNRNALTSITNVEPKTEPACVSPIQNSAPVSDLTKTEHPKSSFRIHRMRRMGSASRKGRVFCNACGKTFYDKGTLKIHYNAVHLKIKHRCTIEGCNMVFSSLRSRNRHSANPNPRLHMPMLRNNRDKDLIRATSGAATPVIASTKSNLALTSPGRPPMGFTTPPLDPVLQNPLPSQLVFSGLKTVQPVPPFYRSLLTPGEMVSPPTSLPTSPIIPTSGTIEQHPPPPSEPVVPAVMMATHEPSADLAPKKKPRKSSMPVKIEKEIIDTADEFDDEDDDPNDGGAVVNDMSHDNHCHSQEEMSPGMSVKDFSKHNRTRCISRTEIRRADSMTSEDQEPERDYENESESSEPKLGEESMEGDEHIHSEVSEKVLMNSERPDENHSEPSHQDVIKVKEEFTDPTYDMFYMSQYGLYNGGGASMAALHESFTSSLNYGSPQKFSPEGDLCSSPDPKICYVCKKSFKSSYSVKLHYRNVHLKEMHVCTVAGCNAAFPSRRSRDRHSANINLHRKLLTKELDDMGLDSSQPSLSKDLRDEFLVKIYGAQHPMGLDVREDASSPAGTEDSHLNGYGRGMAEDYMVLDLSTTSSLQSSSSIHSSRESDAGSDEGILLDDIDGASDSGESAHKAEAPALPGSLGAEVSGSLMFSSLSGSNGGIMCNICHKMYSNKGTLRVHYKTVHLREMHKCKVPGCNMMFSSVRSRNRHSQNPNLHKNIPFTSVD

SEQ ID NO: 25218 - protein, 903 aa, Homo sapiens
  REGION 1..903: note = ENSP00000431516
MAHLGPTPPPHSLNYKSEDRLSEQDWPAYFKVPCCGVDTSQIESEEAEVDVRERETQRDREPKRARDLTLRDSCTDNSMQFGTRTTTAEPGFMGTWQNADTNLLFRMSQQAIRCTLVNCTCECFQPGKINLRTCDQCKHGWVAHALDKLSTQHLYHPTQVEIVQSNVVFDISSLMLYGTQAVPVRLKILLDRLFSVLKQEEVLHILHGLGWTLRDYVRGYILQDAAGKVLDRWAIMSREEEIITLQQFLRFGETKSIVELMAIQEKEGQAVAVPSSKTDSDIRTFIESNNRTRSPSLLAHLENSNPSSIHHFENIPNSLAFLLPFQYINPVSAPLLGLPPNGLLLEQPGLRLREPSLSTQNEYNESSESEVSPTPYKNDQTPNRNALTSITNVEPKTEPACVSPIQNSAPVSDLTKTEHPKSSFRIHRMRRMGSASRKGRVFCNACGKTFYDKGTLKIHYNAVHLKIKHRCTIEGCNMVFSSLRSRNRHSANPNPRLHMPMLRNNRDKDLIRATSGAATPVIASTKSNLALTSPGRPPMGFTTPPLDPVLQNPLPSQLVFSGLKTVQPVPPFYRSLLTPGEMVSPPTSLPTSPIIPTSGTIEQHPPPPSEPVVPAVMMATHEPSADLAPKKKPRKSSMPVKIEKEIIDTADEFDDEDDDPNDGGAVVNDMSHDNHCHSQEEMSPGMSVKDFSKHNRTRCISRTEIRRADSMTSEDQEPERDYENESESSEPKLGEESMEGDEHIHSEVSEKVLMNSERPDENHSEPSHQDVIKVKEEFTDPTYDMFYMSQYGLYNGGGASMAALHESFTSSLNYGSPQKFSPEGDLCSSPDPKICYVCKKSFKSSYSVKLHYRNVHLKEMHVCTVAGCNAAFPSRRSRDRYWEKSNEQNGLLVSWGETLSSLK

SEQ ID NO: 25219 - protein, 327 aa, Homo sapiens
  REGION 1..327: note = ENSP00000392212
PSEPVVPAVMMATHEPSADLAPKKKPRKSSMPVKIEKEIIDTADEFDDEDDDPNDGGAVVNDMSHDNHCHSQEEMSPGMSVKDFSKHNRTRCISRTEIRRADSMTSEDQEPERDYENESESSEPKLGEESMEGDEHIHSEVSEKVLMNSERPDENHSEPSHQDVIKVKEEFTDPTYDMFYMSQYGLYNGGGASMAALHESFTSSLNYGSPQKFSPEGDLCSSPDPKICYVCKKSFKSSYSVKLHYRNVHLKEMHVCTVAGCNAAFPSRRSRDRNRNLRMERTIGPGHRDSLHLRRGNSNRPGTCCLHTGDSLEESVIVRISCKRLES

SEQ ID NO: 25220 - protein, 860 aa, Homo sapiens
  REGION 1..860: note = ENSP00000408370
SEEAEVDVRERETQRDREPKRARDLTLRDSCTDNSMQFGTRTTTAEPGFMGTWQNADTNLLFRMSQQAIRCTLVNCTCECFQPGKINLRTCDQCKHGWVAHALDKLSTQHLYHPTQVEIVQSNVVFDISSLMLYGTQAVPVRLKILLDRLFSVLKQEEVLHILHGLGWTLRDYVRGYILQDAAGKVLDRWAIMSREEEIITLQQFLRFGETKSIVELMAIQEKEGQAVAVPSSKTDSDIRTFIESNNRTRSPSLLAHLENSNPSSIHHFENIPNSLAFLLPFQYINPVSAPLLGLPPNGLLLEQPGLRLREPSLSTQNEYNESSESEVSPTPYKNDQTPNRNALTSITNVEPKTEPACVSPIQNSAPVSDLTKTEHPKSSFRIHRMRRMGSASRKGRVFCNACGKTFYDKGTLKIHYNAVHLKIKHRCTIEGCNMVFSSLRSRNRHSANPNPRLHMPMLRNNRDKDLIRATSGAATPVIASTKSNLALTSPGRPPMGFTTPPLDPVLQNPLPSQLVFSGLKTVQPVPPFYRSLLTPGEMVSPPTSLPTSPIIPTSGTIEQHPPPPSEPVVPAVMMATHEPSADLAPKKKPRKSSMPVKIEKEIIDTADEFDDEDDDPNDGGAVVNDMSHDNHCHSQEEMSPGMSVKDFSKHNRTRCISRTEIRRADSMTSEDQEPERDYENESESSEPKLGEESMEGDEHIHSEVSEKVLMNSERPDENHSEPSHQDVIKVKEEFTDPTYDMFYMSQYGLYNGGGASMAALHESFTSSLNYGSPQKFSPEGDLCSSPDPKICYVCKKSFKSSYSVKLHYRNVHLKEMHVCTVAGCNAAFPSRRSRDRNRNLRMERTIGPGHRDSLHLLPT

SEQ ID NO: 25221 - protein, 1032 aa, Homo sapiens
  REGION 1..1032: note = ENSP00000370042
MAHLGPTPPPHSLNYKSEDRLSEQDWPAYFKVPCCGVDTSQIEAIRCTLVNCTCECFQPGKINLRTCDQCKHGWVAHALDKLSTQHLYHPTQVEIVQSNVVFDISSLMLYGTQAVPVRLKILLDRLFSVLKQEEVLHILHGLGWTLRDYVRGYILQDAAGKVLDRWAIMSREEEIITLQQFLRFGETKSIVELMAIQEKEGQAVAVPSSKTDSDIRTFIESNNRTRSPSLLAHLENSNPSSIHHFENIPNSLAFLLPFQYINPVSAPLLGLPPNGLLLEQPGLRLREPSLSTQNEYNESSESEVSPTPYKNDQTPNRNALTSITNVEPKTEPACVSPIQNSAPVSDLTKTEHPKSSFRIHRMRRMGSASRKGRVFCNACGKTFYDKGTLKIHYNAVHLKIKHRCTIEGCNMVFSSLRSRNRHSANPNPRLHMPMLRNNRDKDLIRATSGAATPVIASTKSNLALTSPGRPPMGFTTPPLDPVLQNPLPSQLVFSGLKTVQPVPPFYRSLLTPGEMVSPPTSLPTSPIIPTSGTIEQHPPPPSEPVVPAVMMATHEPSADLAPKKKPRKSSMPVKIEKEIIDTADEFDDEDDDPNDGGAVVNDMSHDNHCHSQEEMSPGMSVKDFSKHNRTRCISRTEIRRADSMTSEDQEPERDYENESESSEPKLGEESMEGDEHIHSEVSEKVLMNSERPDENHSEPSHQDVIKVKEEFTDPTYDMFYMSQYGLYNGGGASMAALHESFTSSLNYGSPQKFSPEGDLCSSPDPKICYVCKKSFKSSYSVKLHYRNVHLKEMHVCTVAGCNAAFPSRRSRDRHSANINLHRKLLTKELDDMGLDSSQPSLSKDLRDEFLVKIYGAQHPMGLDVREDASSPAGTEDSHLNGYGRGMAEDYMVLDLSTTSSLQSSSSIHSSRESDAGSDEGILLDDIDGASDSGESAHKAEAPALPGSLGAEVSGSLMFSSLSGSNGGIMCNICHKMYSNKGTLRVHYKTVHLREMHKCKVPGCNMMFSSVRSRNRHSQNPNLHKNIPFTSVD

SEQ ID NO: 25222 - protein, 294 aa, Homo sapiens
  REGION 1..294: note = ENSP00000370041
MQFGTRTTTAEPGFMGTWQNADTNLLFRMSQQAIRCTLVNCTCECFQPGKINLRTCDQCKHGWVAHALDKLSTQHLYHPTQVEIVQSNVVFDISSLMLYGTQAVPVRLKILLDRLFSVLKQEEVLHILHGLGWTLRDYVRGYILQDAAGKVLDRWAIMSREEEIITLQQFLRFGETKSIVELMAIQEKEGQAVAVPSSKTDSDIRTFIESNNRTRSPSLLAHLENSNPSSIHHFENIPNSLAFLLPFQYINPVSAPLLGLPPNGLLLEQPGLRLREPSLSTQNEYNESSESEVS

SEQ ID NO: 25223 - protein, 245 aa, Homo sapiens
  REGION 1..245: note = ENSP00000474045
MQFGTRTTTAEPGFMGTWQNADTNLLFRMSQQAIRCTLVNCTCECFQPGKINLRTCDQCKHGWVAHALDKLSTQHLYHPTQVEIVQSNVVFDISSLMLYGTQAVPVRLKILLDRLFSVLKQEEVLHILHGLGWTLRDYVRGYILQDAAGKVLDRWAIMSREEEIITLQQFLRFGETKSIVELMAIQEKEGQAVAVPSSKTDSDIRTFIESNNRTRSPSLLAHLENSNPSSIHHFENIPNSLAFLL

SEQ ID NO: 25224 - protein, 164 aa, Homo sapiens
  REGION 1..164: note = ENSP00000474647
MSEEAEVDVRERETQRDREPKRARDLTLRDSCTDNSMQFGTRTTTAEPGFMGTWQNADTNLLFRMSQQAIRCTLVNCTCECFQPGKINLRTCDQCKHGWVAHALDKLSTQHLYHPTQVEIVQSNVVFDISSLMLYGTQAVPVRLKILLDRLFSVLKQEEVLHIL

SEQ ID NO: 25225 - protein, 121 aa, Homo sapiens
  REGION 1..121: note = ENSP00000473935
MQFGTRTTTAEPGFMGTWQNADTNLLFRMSQQAIRCTLVNCTCECFQPGKINLRTCDQCKHGWVAHALDKLSTQHLYHPTQVEIVQSNVVFDISSLMLYGTQAVPVRLKILLDRLFSVLKQ

SEQ ID NO: 25226 - protein, 109 aa, Homo sapiens
  REGION 1..109: note = ENSP00000474468
SEEAEVDVRERETQRDREPKRARDLTLRDSCTDNSMQFGTRTTTAEPGFMGTWQNADTNLLFRMSQQAIRCTLVNCTCECFQPGKINLRTCDQCKHGWVAHETLKSCLQ

SEQ ID NO: 25227 - protein, 43 aa, Homo sapiens
  REGION 1..43: note = ENSP00000474832
MAIRCTLVNCTCECFQPGKINLRTCDQCKHGWVAHETLKSCLQ

SEQ ID NO: 25228 - protein, 40 aa, Homo sapiens
  REGION 1..40: note = ENSP00000477717
MQFGTRTTTAEPGFMGTWQNADTNLLFRMSQQAIRCTLVN

SEQ ID NO: 25229 - protein, 40 aa, Homo sapiens; identical to SEQ ID NO: 25228
  REGION 1..40: note = ENSP00000482793

SEQ ID NO: 25230 - protein, 729 aa, Homo sapiens
  REGION 1..729: note = ENSP00000444640
MLYGTQAVPVRLKILLDRLFSVLKQEEVLHILHGLGWTLRDYVRGYILQDAAGKVLDRWAIMSREEEIITLQQFLRFGETKSIVELMAIQEKEGQAVAVPSSKTDSDIRTFIESNNRTRSPSLLAHLENSNPSSIHHFENIPNSLAFLLPFQYINPVSAPLLGLPPNGLLLEQPGLRLREPSLSTQNEYNESSESEVSPTPYKNDQTPNRNALTSITNVEPKTEPACVSPIQNSAPVSDLTKTEHPKSSFRIHRMRRMGSASRKGRVFCNACGKTFYDKGTLKIHYNAVHLKIKHRCTIEGCNMVFSSLRSRNRHSANPNPRLHMPMLRNNRDKDLIRATSGAATPVIASTKSNLALTSPGRPPMGFTTPPLDPVLQNPLPSQLVFSGLKTVQPVPPFYRSLLTPGEMVSPPTSLPTSPIIPTSGTIEQHPPPPSEPVVPAVMMATHEPSADLAPKKKPRKSSMPVKIEKEIIDTADEFDDEDDDPNDGGAVVNDMSHDNHCHSQEEMSPGMSVKDFSKHNRTRCISRTEIRRADSMTSEDQEPERDYENESESSEPKLGEESMEGDEHIHSEVSEKVLMNSERPDENHSEPSHQDVIKVKEEFTDPTYDMFYMSQYGLYNGGGASMAALHESFTSSLNYGSPQKFSPEGDLCSSPDPKICYVCKKSFKSSYSVKLHYRNVHLKEMHVCTVAGCNAAFPSRRSRDRNRNLRMERTIGPGHRDSLHLLPT

SEQ ID NO: 25231 - protein, 84 aa, Homo sapiens
  REGION 1..84: note = ENSP00000417362
MLRGTMTAWRGMRPEVTLACLLLATAGCFADLNEVPQVTVQPASTVQKPGGTVILGCVVEPPRMNVTWRLNGKELNGSDDALGV

SEQ ID NO: 25232 - protein, 1114 aa, Homo sapiens
  REGION 1..1114: note = ENSP00000418663
MLRGTMTAWRGMRPEVTLACLLLATAGCFADLNEVPQVTVQPASTVQKPGGTVILGCVVEPPRMNVTWRLNGKELNGSDDALGVLITHGTLVITALNNHTVGRYQCVARMPAGAVASVPATVTLANLQDFKLDVQHVIEVDEGNTAVIACHLPESHPKAQVRYSVKQEWLEASRGNYLIMPSGNLQIVNASQEDEGMYKCAAYNPVTQEVKTSGSSDRLRVRRSTAEAARIIYPPEAQTIIVTKGQSLILECVASGIPPPRVTWAKDGSSVTGYNKTRFLLSNLLIDTTSEEDSGTYRCMADNGVGQPGAAVILYNVQVFEPPEVTMELSQLVIPWGQSAKLTCEVRGNPPPSVLWLRNAVPLISSQRLRLSRRALRVLSMGPEDEGVYQCMAENEVGSAHAVVQLRTSRPSITPRLWQDAELATGTPPVSPSKLGNPEQMLRGQPALPRPPTSVGPASPQCPGEKGQGAPAEAPIILSSPRTSKTDSYELVWRPRHEGSGRAPILYYVVKHRKVTNSSDDWTISGIPANQHRLTLTRLDPGSLYEVEMAAYNCAGEGQTAMVTFRTGRRPKPEIMASKEQQIQRDDPGASPQSSSQPDHGRLSPPEAPDRPTISTASETSVYVTWIPRGNGGFPIQSFRVEYKKLKKVGDWILATSAIPPSRLSVEITGLEKGTSYKFRVRALNMLGESEPSAPSRPYVVSGYSGRVYERPVAGPYITFTDAVNETTIMLKWMYIPASNNNTPIHGFYIYYRPTDSDNDSDYKKDMVEGDKYWHSISHLQPETSYDIKMQCFNEGGESEFSNVMICETKARKSSGQPGRLPPPTLAPPQPPLPETIERPVGTGAMVARSSDLPYLIVGVVLGSIVLIIVTFIPFCLWRAWSKQKHTTDLGFPRSALPPSCPYTMVPLGGLPGHQASGQPYLSGISGRACANGIHMNRGCPSAAVGYPGMKPQQHCPGELQQQSDTSSLLRQTHLGNGYDPQSHQITRGPKSSPDEGSFLYTLPDDSTHQLLQPHHDCCQRQEQPAAVGQSGVRRAPDSPVLEAVWDPPFHSGPPCCLGLVPVEEVDSPDSCQVSGGDWCPQHPVGAYVGQEPGMQLSPGPLVRVSFETPPLTI

SEQ ID NO: 25233 - protein, 65 aa, Homo sapiens
  REGION 1..65: note = ENSP00000419022
MTHEVLSTFIPSEGSSSKVEEVDLQDFKLDVQHVIEVDEGNTAVIACHLPESHPKAQVRYSVKQE

SEQ ID NO: 25234 - protein, 157 aa, Homo sapiens
  REGION 1..157: note = ENSP00000420154
MLRGTMTAWRGMRPEVTLACLLLATAGCFADLNEVPQVTVQPASTVQKPGGTVILGCVVEPPRMNVTWRLNGKELNGSDDALGVLITHGTLVITALNNHTVGRYQCVARMPAGAVASVPATVTLASESAPLPPCHGAVPPHLSHPEAPTIHAASCYS

SEQ ID NO: 25235 - protein, 21 aa, Homo sapiens
  REGION 1..21: note = ENSP00000418118
MLRGTMTAWRGMRPEVTLACL

SEQ ID NO: 25236 - protein, 1115 aa, Homo sapiens
  REGION 1..1115: note = ENSP00000273395
MLRGTMTAWRGMRPEVTLACLLLATAGCFADLNEVPQVTVQPASTVQKPGGTVILGCVVEPPRMNVTWRLNGKELNGSDDALGVLITHGTLVITALNNHTVGRYQCVARMPAGAVASVPATVTLANLQDFKLDVQHVIEVDEGNTAVIACHLPESHPKAQVRYSVKQEWLEASRGNYLIMPSGNLQIVNASQEDEGMYKCAAYNPVTQEVKTSGSSDRLRVRRSTAEAARIIYPPEAQTIIVTKGQSLILECVASGIPPPRVTWAKDGSSVTGYNKTRFLLSNLLIDTTSEEDSGTYRCMADNGVGQPGAAVILYNVQVFEPPEVTMELSQLVIPWGQSAKLTCEVRGNPPPSVLWLRNAVPLISSQRLRLSRRALRVLSMGPEDEGVYQCMAENEVGSAHAVVQLRTSRPSITPRLWQDAELATGTPPVSPSKLGNPEQMLRGQPALPRPPTSVGPASPQCPGEKGQGAPAEAPIILSSPRTSKTDSYELVWRPRHEGSGRAPILYYVVKHRKQVTNSSDDWTISGIPANQHRLTLTRLDPGSLYEVEMAAYNCAGEGQTAMVTFRTGRRPKPEIMASKEQQIQRDDPGASPQSSSQPDHGRLSPPEAPDRPTISTASETSVYVTWIPRGNGGFPIQSFRVEYKKLKKVGDWILATSAIPPSRLSVEITGLEKGTSYKFRVRALNMLGESEPSAPSRPYVVSGYSGRVYERPVAGPYITFTDAVNETTIMLKWMYIPASNNNTPIHGFYIYYRPTDSDNDSDYKKDMVEGDKYWHSISHLQPETSYDIKMQCFNEGGESEFSNVMICETKARKSSGQPGRLPPPTLAPPQPPLPETIERPVGTGAMVARSSDLPYLIVGVVLGSIVLIIVTFIPFCLWRAWSKQKHTTDLGFPRSALPPSCPYTMVPLGGLPGHQASGQPYLSGISGRACANGIHMNRGCPSAAVGYPGMKPQQHCPGELQQQSDTSSLLRQTHLGNGYDPQSHQITRGPKSSPDEGSFLYTLPDDSTHQLLQPHHDCCQRQEQPAAVGQSGVRRAPDSPVLEAVWDPPFHSGPPCCLGLVPVEEVDSPDSCQVSGGDWCPQHPVGAYVGQEPGMQLSPGPLVRVSFETPPLTI

SEQ ID NO: 25237 - protein, 32 aa, Homo sapiens
  REGION 1..32: note = ENSP00000418260
MLRGTMTAWRGMRPEVTLACLLLATAGCFADL

SEQ ID NO: 25238 - protein, 157 aa, Homo sapiens; identical to SEQ ID NO: 25234
  REGION 1..157: note = ENSP00000417337

SEQ ID NO: 25239 - protein, 84 aa, Homo sapiens
  REGION 1..84: note = ENSP00000420056
  VARIANT 1: note = Any amino acid
XRACANGIHMNRGCPSAAVGYPGMKPQQHCPGELQQQSDTSSLLRQTHLGNGYDPQSHQITSCCSPITTAANARSSLLLWASQG

SEQ ID NO: 25240 - protein, 39 aa, Homo sapiens
  REGION 1..39: note = ENSP00000418182
  VARIANT 1: note = Any amino acid
XQQQSDTSSLLRQTHLGNGYDPQSHQITRAPMLLGPCAS

SEQ ID NO: 25241 - protein, 1114 aa, Homo sapiens; identical to SEQ ID NO: 25232
  REGION 1..1114: note = ENSP00000347546

SEQ ID NO: 25242 - protein, 783 aa, Homo sapiens
  REGION 1..783: note = ENSP00000354481
MRWQCGTRFRGLRPAVAPWTALLALGLPGWVLAVSATAAAVVPEQHASVAGQHPLDWLLTDRGPFHRAQEYADFMERYRQGFTTRYRIYREFARWKVNNLALERKDFFSLPLPLAPEFIRNIRLLGRRPNLQQVTENLIKKYGTHFLLSATLGGEESLTIFVDKQKLGRKTETTGGASIIGGSGNSTAVSLETLHQLAASYFIDRESTLRRLHHIQIATGAIKVTETRTGPLGCSNYDNLDSVSSVLVQSPENKVQLLGLQVLLPEYLRERFVAAALSYITCSSEGELVCKENDCWCKCSPTFPECNCPDADIQAMEDSLLQIQDSWATHNRQFEESEEFQALLKRLPDDRFLNSTAISQFWAMDTSLQHRYQQLGAGLKVLFKKTHRILRRLFNLCKRCHRQPRFRLPKERSLSYWWNRIQSLLYCGESTFPGTFLEQSHSCTCPYDQSSCQGPIPCALGEGPACAHCAPDNSTRCGSCNPGYVLAQGLCRPEVAESLENFLGLETDLQDLELKYLLQKQDSRIEVHSIFISNDMRLGSWFDPSWRKRMLLTLKSNKYKPGLVHVMLALSLQICLTKNSTLEPVMAIYVNPFGGSHSESWFMPVNEGSFPDWERTNVDAAAQCQNWTITLGNRWKTFFETVHVYLRSRIKSLDDSSNETIYYEPLEMTDPSKNLGYMKINTLQVFGYSLPFDPDAIRDLILQLDYPYTQGSQDSALLQLIELRDRVNQLSPPGKVRLDLFSCLLRHRLKLANNEVGRIQSSLRAFNSKLPNPVEYETGKLCS

SEQ ID NO: 25243 - protein, 766 aa, Homo sapiens
  REGION 1..766: note = ENSP00000356432
MIWRSRAGAELFSLMALWEWIALSLHCWVLAVAAVSDQHATSPFDWLLSDKGPFHRSQEYTDFVDRSRQGFSTRYKIYREFGRWKVNNLAVERRNFLGSPLPLAPEFFRNIRLLGRRPTLQQITENLIKKYGTHFLLSATLGGEESLTIFVDKRKLSKRAEGSDSTTNSSSVTLETLHQLAASYFIDRDSTLRRLHHIQIASTAIKVTETRTGPLGCSNYDNLDSVSSVLVQSPENKIQLQGLQVLLPDYLQERFVQAALSYIACNSEGEFICKENDCWCHCGPKFPECNCPSMDIQAMEENLLRITETWKAYNSDFEESDEFKLFMKRLPMNYFLNTSTIMHLWTMDSNFQRRYEQLENSMKQLFLKAQKIVHKLFSLSKRCHKQPLISLPRQRTSTYWLTRIQSFLYCNENGLLGSFSEETHSCTCPNDQVVCTAFLPCTVGDASACLTCAPDNRTRCGTCNTGYMLSQGLCKPEVAESTDHYIGFETDLQDLEMKYLLQKTDRRIEVHAIFISNDMRLNSWFDPSWRKRMLLTLKSNKYKSSLVHMILGLSLQICLTKNSTLEPVLAVYVNPFGGSHSESWFMPVNENSFPDWERTKLDLPLQCYNWTLTLGNKWKTFFETVHIYLRSRIKSNGPNGNESIYYEPLEFIDPSRNLGYMKINNIQVFGYSMHFDPEAIRDLILQLDYPYTQGSQDSALLQLLEIRDRVNKLSPPGQRRLDLFSCLLRHRLKLSTSEVVRIQSALQAFNAKLPNTMDYDTTKLCS

SEQ ID NO: 25244 - protein, 158 aa, Homo sapiens
  REGION 1..158: note = ENSP00000487601
MIWRSRAGAELFSLMALWEWIALSLHCWVLAVAAVSDQHATSPFDWLLSDKGPFHRSQEYTDFVDRSRQGFSTRYKIYREFGRWKVNNLAVERRNFLGSPLPLAPEFFRNIRLLGRRPTLQQITENLIKKYGTHFLLSATLGGEESLTIFVDKRKLSK

SEQ ID NO: 25245 - protein, 28 aa, Homo sapiens
  REGION 1..28: note = ENSP00000393441
MIWRSRAGAELFSLMALWEWIALSLHCW

SEQ ID NO: 25246 - protein, 176 aa, Homo sapiens
  REGION 1..176: note = ENSP00000473664
MGTANIQLHGPPRVKAVKSSEHINEGETAMLVCKSESVPPVTDWAWYKITDSEDKALMNGSESRFFVSSSQGRSELHIENLNMEADPGQYRCNGTSSKGSDQAIITLRVRSHLAALWPFLGIVAEVLVLVTIIFIYEKRRKPEDVLDDDDAGSAPLKSSGQHQNDKGKNVRQRNSS

SEQ ID NO: 25247 - protein, 205 aa, Homo sapiens
  REGION 1..205: note = ENSP00000344707
MKQSDASPQERVDSDDQWGEYSCVFLPEPMGTANIQLHGPPRVKAVKSSEHINEGETAMLVCKSESVPPVTDWAWYKITDSEDKALMNGSESRFFVSSSQGRSELHIENLNMEADPGQYRCNGTSSKGSDQAIITLRVRSHLAALWPFLGIVAEVLVLVTIIFIYEKRRKPEDVLDDDDAGSAPLKSSGQHQNDKGKNVRQRNSS

SEQ ID NO: 25248 - protein, 385 aa, Homo sapiens
  REGION 1..385: note = ENSP00000333769
MAAALFVLLGFALLGTHGASGAAGFVQAPLSQQRWVGGSVELHCEAVGSPVPEIQWWFEGQGPNDTCSQLWDGARLDRVHIHATYHQHAASTISIDTLVEEDTGTYECRASNDPDRNHLTRAPRVKWVRAQAVVLVLEPGTVFTTVEDLGSKILLTCSLNDSATEVTGHRWLKGGVVLKEDALPGQKTEFKVDSDDQWGEYSCVFLPEPMGTANIQLHGPPRVKAVKSSEHINEGETAMLVCKSESVPPVTDWAWYKITDSEDKALMNGSESRFFVSSSQGRSELHIENLNMEADPGQYRCNGTSSKGSDQAIITLRVRSHLAALWPFLGIVAEVLVLVTIIFIYEKRRKPEDVLDDDDAGSAPLKSSGQHQNDKGKNVRQRNSS

SEQ ID NO: 25249 - protein, 160 aa, Homo sapiens
  REGION 1..160: note = ENSP00000458665
MAAALFVLLGFALLGTHGASGAEDLGSKILLTCSLNDSATEVTGHRWLKGGVVLKEDALPGQKTEFKVDSDDQWGEYSCVFLPEPMGTANIQLHGPPRVKAVKSSEHINEGETAMLVCKSESVPPVTDWAWYKITDSEDKALMNGSESRFFVSSSQGRSE

SEQ ID NO: 25250 - protein, 269 aa, Homo sapiens
  REGION 1..269: note = ENSP00000343809
MAAALFVLLGFALLGTHGASGAAGTVFTTVEDLGSKILLTCSLNDSATEVTGHRWLKGGVVLKEDALPGQKTEFKVDSDDQWGEYSCVFLPEPMGTANIQLHGPPRVKAVKSSEHINEGETAMLVCKSESVPPVTDWAWYKITDSEDKALMNGSESRFFVSSSQGRSELHIENLNMEADPGQYRCNGTSSKGSDQAIITLRVRSHLAALWPFLGIVAEVLVLVTIIFIYEKRRKPEDVLDDDDAGSAPLKSSGQHQNDKGKNVRQRNSS

SEQ ID NO: 25251 - protein, 221 aa, Homo sapiens
  REGION 1..221: note = ENSP00000484849
MAAALFVLLGFALLGTHGASGAVFTTVEDLGSKILLTCSLNDSATEVTGHRWLKGGVVLKEDALPGQKTEFKVDSDDQWGEYSCVFLPEPMGTANIQLHGPPRVKAVKSSEHINEGETAMLVCKSESVPPVTDWAWYKITDSEDKALMNGSESRFFVSSSQGRSELHIENLNMEADPGQYRCNGTSSKGSDQAIITLRVRSHLAALWPFLGIVAEVLVLVT

SEQ ID NO: 25252 - protein, 189 aa, Homo sapiens
  REGION 1..189: note = ENSP00000478958
MAAALFVLLGFALLGTHGASGAGPPRVKAVKSSEHINEGETAMLVCKSESVPPVTDWAWYKITDSEDKALMNGSESRFFVSSSQGRSELHIENLNMEADPGQYRCNGTSSKGSDQAIITLRVRSHLAALWPFLGIVAEVLVLVTIIFIYEKRRKPEDVLDDDDAGSAPLKSSGQHQNDKGKNVRQRNSS

SEQ ID NO: 25253 - protein, 55 aa, Homo sapiens
  REGION 1..55: note = ENSP00000484624
MAAALFVLLGFALLGTHGASGAAGTVFTTVEDLGSKILLTCSLNDSATEQRAAPE

SEQ ID NO: 25254 - protein, 84 aa, Homo sapiens
  REGION 1..84: note = ENSP00000473393
MGTANIQLHGPPRVKAVKSSEHINEGETAMLVCKSESVPPVTDWAWYKITDSEDKALMNGSESRFFVSSSQGRSELHIENLNME

SEQ ID NO: 25255 - protein, 52 aa, Homo sapiens
  REGION 1..52: note = ENSP00000473528
MGTANIQLHGPPRVKAVKSSEHINEGETAMLVCKSESVPPVTDWAWYKITDS

SEQ ID NO: 25256 - protein, 3926 aa, Homo sapiens
  REGION 1..3926: note = ENSP00000296452
MGNEVSLEGGAGDGPLPPGGAGPGPGPGPGPGAGKPPSAPAGGGQLPAAGAARSTAVPPVPGPGPGPGPGPGPGSTSRRLDPKEPLGNQRAASPTPKQASATTPGHESPRETRAQGPAGQEADGPRRTLQVDSRTQRSGRSPSVSPDRGSTPTSPYSVPQIAPLPSSTLCPICKTSDLTSTPSQPNFNTCTQCHNKVCNQCGFNPNPHLTQVKEWLCLNCQMQRALGMDMTTAPRSKSQQQLHSPALSPAHSPAKQPLGKPDQERSRGPGGPQPGSRQAETARATSVPGPAQAAAPPEVGRVSPQPPQPTKPSTAEPRPPAGEAPAKSATAVPAGLGATEQTQEGLTGKLFGLGASLLTQASTLMSVQPEADTQGQPAPSKGTPKIVFNDASKEAGPKPLGSGPGPGPAPGAKTEPGARMGPGSGPGALPKTGGTTSPKHGRAEHQAASKAAAKPKTMPKERAICPLCQAELNVGSKSPANYNTCTTCRLQVCNLCGFNPTPHLVEKTEWLCLNCQTKRLLEGSLGEPTPLPPPTSQQPPVGAPHRASGTSPLKQKGPQGLGQPSGPLPAKASPLSTKASPLPSKASPQAKPLRASEPSKTPSSVQEKKTRVPTKAEPMPKPPPETTPTPATPKVKSGVRRAEPATPVVKAVPEAPKGGEAEDLVGKPYSQDASRSPQSLSDTGYSSDGISSSQSEITGVVQQEVEQLDSAGVTGPHPPSPSEIHKVGSSMRPLLQAQGLAPSERSKPLSSGTGEEQKQRPHSLSITPEAFDSDEELEDILEEDEDSAEWRRRREQQDTAESSDDFGSQLRHDYVEDSSEGGLSPLPPQPPARAAELTDEDFMRRQILEMSAEEDNLEEDDTATSGRGLAKHGTQKGGPRPRPEPSQEPAALPKRRLPHNATTGYEELLPEGGSAEATDGSGTLQGGLRRFKTIELNSTGSYGHELDLGQGPDPSLDREPELEMESLTGSPEDRSRGEHSSTLPASTPSYTSGTSPTSLSSLEEDSDSSPSRRQRLEEAKQQRKARHRSHGPLLPTIEDSSEEEELREEEELLREQEKMREVEQQRIRSTARKTRRDKEELRAQRRRERSKTPPSNLSPIEDASPTEELRQAAEMEELHRSSCSEYSPSPSLDSEAEALDGGPSRLYKSGSEYNLPTFMSLYSPTETPSGSSTTPSSGRPLKSAEEAYEEMMRKAELLQRQQGQAAGARGPHGGPSQPTGPRGLGSFEYQDTTDREYGQAAQPAAEGTPASLGAAVYEEILQTSQSIVRMRQASSRDLAFAEDKKKEKQFLNAESAYMDPMKQNGGPLTPGTSPTQLAAPVSFSTPTSSDSSGGRVIPDVRVTQHFAKETQDPLKLHSSPASPSSASKEIGMPFSQGPGTPATTAVAPCPAGLPRGYMTPASPAGSERSPSPSSTAHSYGHSPTTANYGSQTEDLPQAPSGLAAAGRAAREKPLSASDGEGGTPQPSRAYSYFASSSPPLSPSSPSESPTFSPGKMGPRATAEFSTQTPSPAPASDMPRSPGAPTPSPMVAQGTQTPHRPSTPRLVWQESSQEAPFMVITLASDASSQTRMVHASASTSPLCSPTETQPTTHGYSQTTPPSVSQLPPEPPGPPGFPRVPSAGADGPLALYGWGALPAENISLCRISSVPGTSRVEPGPRTPGTAVVDLRTAVKPTPIILTDQGMDLTSLAVEARKYGLALDPIPGRQSTAVQPLVINLNAQEHTFLATATTVSITMASSVFMAQQKQPVVYGDPYQSRLDFGQGGGSPVCLAQVKQVEQAVQTAPYRSGPRGRPREAKFARYNLPNQVAPLARRDVLITQMGTAQSIGLKPGPVPEPGAEPHRATPAELRSHALPGARKPHTVVVQMGEGTAGTVTTLLPEEPAGALDLTGMRPESQLACCDMVYKLPFGSSCTGTFHPAPSVPEKSMADAAPPGQSSSPFYGPRDPEPPEPPTYRAQGVVGPGPHEEQRPYPQGLPGRLYSSMSDTNLAEAGLNYHAQRIGQLFQGPGRDSAMDLSSLKHSYSLGFADGRYLGQGLQYGSVTDLRHPTDLLAHPLPMRRYSSVSNIYSDHRYGPRGDAVGFQEASLAQYSATTAREISRMCAALNSMDQYGGRHGSGGGGPDLVQYQPQHGPGLSAPQSLVPLRPGLLGNPTFPEGHPSPGNLAQYGPAAGQGTAVRQLLPSTATVRAADGMIYSTINTPIAATLPITTQPASVLRPMVRGGMYRPYASGGITAVPLTSLTRVPMIAPRVPLGPTGLYRYPAPSRFPIASSVPPAEGPVYLGKPAAAKAPGAGGPSRPEMPVGAAREEPLPTTTPAAIKEAAGAPAPAPLAGQKPPADAAPGGGSGALSRPGFEKEEASQEERQRKQQEQLLQLERERVELEKLRQLRLQEELERERVELQRHREEEQLLVQRELQELQTIKHHVLQQQQEERQAQFALQREQLAQQRLQLEQIQQLQQQLQQQLEEQKQRQKAPFPAACEAPGRGPPLAAAELAQNGQYWPPLTHAAFIAMAGPEGLGQPREPVLHRGLPSSASDMSLQTEEQWEASRSGIKKRHSMPRLRDACELESGTEPCVVRRIADSSVQTDDEDGESRYLLSRRRRARRSADCSVQTDDEDSAEWEQPVRRRRSRLPRHSDSGSDSKHDATASSSSAAATVRAMSSVGIQTISDCSVQTEPDQLPRVSPAIHITAATDPKVEIVRYISAPEKTGRGESLACQTEPDGQAQGVAGPQLVGPTAISPYLPGIQIVTPGPLGRFEKKKPDPLEIGYQAHLPPESLSQLVSRQPPKSPQVLYSPVSPLSPHRLLDTSFASSERLNKAHVSPQKHFTADSALRQQTLPRPMKTLQRSLSDPKPLSPTAEESAKERFSLYQHQGGLGSQVSALPPNSLVRKVKRTLPSPPPEEAHLPLAGQASPQLYAASLLQRGLTGPTTVPATKASLLRELDRDLRLVEHESTKLRKKQAELDEEEKEIDAKLKYLELGITQRKESLAKDRGGRDYPPLRGLGEHRDYLSDSELNQLRLQGCTTPAGQFVDFPATAAAPATPSGPTAFQQPRFQPPAPQYSAGSGGPTQNGFPAHQAPTYPGPSTYPAPAFPPGASYPAEPGLPNQQAFRPTGHYAGQTPMPTTQSTLFPVPADSRAPLQKPRQTSLADLEQKVPTNYEVIASPVVPMSSAPSETSYSGPAVSSGYEQGKVPEVPRAGDRGSVSQSPAPTYPSDSHYTSLEQNVPRNYVMIDDISELTKDSTSTAPDSQRLEPLGPGSSGRPGKEPGEPGVLDGPTLPCCYARGEEESEEDSYDPRGKGGHLRSMESNGRPASTHYYGDSDYRHGARVEKYGPGPMGPKHPSKSLAPAAISSKRSKHRKQGMEQKISKFSPIEEAKDVESDLASYPPPAVSSSLVSRGRKFQDEITYGLKKNVYEQQKYYGMSSRDAVEDDRIYGGSSRSRAPSAYSGEKLSSHDFSGWGKGYEREREAVERLQKAGPKPSSLSMAHSRVRPPMRSQASEEESPVSPLGRPRPAGGPLPPGGDTCPQFCSSHSMPDVQEHVKDGPRAHAYKREEGYILDDSHCVVSDSEAYHLGQEETDWFDKPRDARSDRFRHHGGHAVSSSSQKRGPARHSYHDYDEPPEEGLWPHDEGGPGRHASAKEHRHGDHGRHSGRHTGEEPGRRAAKPHARDLGRHEARPHSQPSSAPAMPKKGQPGYPSSAEYSQPSRASSAYHHASDSKKGSRQAHSGPAALQSKAEPQAQPQLQGRQAAPGPQQSQSPSSRQIPSGAASRQPQTQQQQQGLGLQPPQQALTQARLQQQSQPTTRGSAPAASQPAGKPQPGPSTATGPQPAGPPRAEQTNGSKGTAKAPQQGRAPQAQPAPGPGPAGVKAGARPGGTPGAPAGQPGADGESVFSKILPGGAAEQAGKLTEAVSAFGKKFSSFW

SEQ ID NO: 25257 - protein, 1849 aa, Homo sapiens
  REGION 1..1849: note = ENSP00000265990
MAVSRLDRLFILLDTGTTPVTRKAAAQQLGEVVKLHPHELNNLLSKVLIYLRSANWDTRIAAGQAVEAIVKNVPEWNPVPRTRQEPTSESSMEDSPTTERLNFDRFDICRLLQHGASLLGSAGAEFEVQDEKSGEVDPKERIARQRKLLQKKLGLNMGEAIGMSTEELFNDEDLDYTPTSASFVNKQPTLQAAELIDSEFRAGMSNRQKNKAKRMAKLFAKQRSRDAVETNEKSNDSTDGEPEEKRRKIANVVINQSANDSKVLIDNIPDSSSLIEETNEWPLESFCEELCNDLFNPSWEVRHGAGTGLREILKAHGKSGGKMGDSTLEEMIQQHQEWLEDLVIRLLCVFALDRFGDFVSDEVVAPVRETCAQTLGVVLKHMNETGVHKTVDVLLKLLTQEQWEVRHGGLLGIKYALAVRQDVINTLLPKVLTRIIEGLQDLDDDVRAVAAASLVPVVESLVYLQTQKVPFIINTLWDALLELDDLTASTNSIMTLLSSLLTYPQVQQCSIQQSLTVLVPRVWPFLHHTISSVRRAALETLFTLLSTQDQNSSSWLIPILPDMLRHIFQFCVLESSQEILDLIHKVWMELLSKASVQYVVAAACPWMGAWLCLMMQPSHLPIDLNMLLEVKARAKEKTGGKVRQGQSQNKEVLQEYIAGADTIMEDPATRDFVVMRARMMAAKLLGALCCCICDPGVNVVTQEIKPAESLGQLLLFHLNSKSALQRISVALVICEWAALQKECKAVTLAVQPRLLDILSEHLYYDEIAVPFTRMQNECKQLISSLADVHIEVGNRVNNNVLTIDQASDLVTTVFNEATSSFDLNPQVLQQLDSKRQQVQMTVTETNQEWQVLQLRVHTFAACAVVSLQQLPEKLNPIIKPLMETIKKEENTLVQNYAAQCIAKLLQQCTTRTPCPNSKIIKNLCSSLCVDPYLTPCVTCPVPTQSGQENSKGSTSEKDGMHHTVTKHRGIITLYRHQKAAFAITSRRGPTPKAVKAQIADLPAGSSGNILVELDEAQKPYLVQRRGAEFALTTIVKHFGGEMAVKLPHLWDAMVGPLRNTIDINNFDGKSLLDKGDSPAQELVNSLQVFETAAASMDSELHPLLVQHLPHLYMCLQYPSTAVRHMAARCVGVMSKIATMETMNIFLEKVLPWLGAIDDSVKQEGAIEALACVMEQLDVGIVPYIVLLVVPVLGRMSDQTDSVRFMATQCFATLIRLMPLEAGIPDPPNMSAELIQLKAKERHFLEQLLDGKKLENYKIPVPINAELRKYQQDGVNWLAFLNKYKLHGILCDDMGLGKTLQSICILAGDHCHRAQEYARSKLAECMPLPSLVVCPPTLTGHWVDEVGKFCSREYLNPLHYTGPPTERIRLQHQVKRHNLIVASYDVVRNDIDFFRNIKFNYCILDEGHVIKNGKTKLSKAVKQLTANYRIILSGTPIQNNVLELWSLFDFLMPGFLGTERQFAARYGKPILASRDARSSSREQEAGVLAMDALHRQVLPFLLRRMKEDVLQDLPPKIIQDYYCTLSPLQVQLYEDFAKSRAKCDVDETVSSATLSEETEKPKLKATGHVFQALQYLRKLCNHPALVLTPQHPEFKTTAEKLAVQNSSLHDIQHAPKLSALKQLLLDCGLGNGSTSESGTESVVAQHRILIFCQLKSMLDIVEHDLLKPHLPSVTYLRLDGSIPPGQRHSIVSRFNNDPSIDVLLLTTHVGGLGLNLTGADTVVFVEHDWNPMRDLQAMDRAHRIGQKRVVNVYRLITRGTLEEKIMGLQKFKMNIANTVISQENSSLQSMGTDQLLDLFTLDKDGKAEKADTSTSGKASMKSILENLSDLWDQEQYDSEYSLENFMHSLK

SEQ ID NO: 25258 - protein, 1849 aa, Homo sapiens [sequence omitted]

SEQ ID NO: 25259 - protein, 482 aa, Homo sapiens
  REGION 1..482: note = ENSP00000261721
MASLGPAAAGEQASGAEAEPGPAGPPPPPSPSSLGPLLPLQREPLYNWQATKASLKERFAFLFNSELLSDVRFVLGKGRGAAAAGGPQRIPAHRFVLAAGSAVFDAMFNGGMATTSAEIELPDVEPAAFLALLRFLYSDEVQIGPETVMTTLYTAKKYAVPALEAHCVEFLTKHLRADNAFMLLTQARLFDEPQLASLCLDTIDKSTMDAISAEGFTDIDIDTLCAVLERDTLSIRESRLFGAVVRWAEAECQRQQLPVTFGNKQKVLGKALSLIRFPLMTIEEFAAGPAQSGILSDREVVNLFLHFTVNPKPRVEYIDRPRCCLRGKECCINRFQQVESRWGYSGTSDRIRFTVNRRISIVGFGLYGSIHGPTDYQVNIQIIEYEKKQTLGQNDTGFSCDGTANTFRVMFKEPIEILPNVCYTACATLKGPDSHYGTKGLKKVVHETPAASKTVFFFFSSPGNNNGTSIEDGQIPEIIFYT

SEQ ID NO: 25260 - protein, 385 aa, Homo sapiens
  REGION 1..385: note = ENSP00000368713
MASLGPAAAGEQASGAEAEPGPAGPPPPPSPSSLGPLLPLQREPLYNWQATKASLKERFAFLFNSELLSDVRFVLGKGRGAAAAGGPQRIPAHRFVLAAGSAVFDAMFNGGMATTSAEIELPDVEPAAFLALLRFLYSDEVQIGPETVMTTLYTAKKYAVPALEAHCVEFLTKHLRADNAFMLLTQARLFDEPQLASLCLDTIDKSTMDAISAEGFTDIDIDTLCAVLERDTLSIRESRLFGAVVRWAEAECQRQQLPVTFGNKQKVLGKALSLIRFPLMTIEEFAAGPAQSGILSDREVVNLFLHFTVNPKPRVEYIDRPRCCLRGKECCINRFQQVESRWGYSGTSDRIRSLNMRKSKPWDRMIPALVVMGQLTHSGSCSRNP

SEQ ID NO: 25261 - protein, 37 aa, Homo sapiens
  REGION 1..37: note = ENSP00000453104
  VARIANT 1: note = Any amino acid
XKYAVPALEAHCVEFLTKHLRADNAFMLLTQIHSVQF

SEQ ID NO: 25262 - protein, 1104 aa, Homo sapiens
  REGION 1..1104: note = ENSP00000280758
MARRGKKPVVRTLEDLTLDSGYGGAADSVRSSNLSLCCSDSHPASPYGGSCWPPLADSMHSRHNSFDTVNTALVEDSEGLDCAGQHCSRLLPDLDEVPWTLQELEALLLRSRDPRAGPAVPGGLPKDALAKLSTLVSRALVRIAKEAQRLSLRFAKCTKYEIQSAMEIVLSWGLAAHCTAAALAALSLYNMSSAGGDRLGRGKSARCGLTFSVGRVYRWMVDSRVALRIHEHAAIYLTACMESLFRDIYSRVVASGVPRSCSGPGSGSGSGPGPSSGPGAAPAADKEREAPGGGAASGGACSAASSASGGSSCCAPPAAAAAAVPPAAAANHHHHHHHALHEAPKFTVETLEHTVNNDSEIWGLLQPYQHLICGKNASGVLCLPDSLNLHRDPQRSNKPGELPMFSQSELRTIEQSLLATRVGSIAELSDLVSRAMHHLQPLNAKHHGNGTPLHHKQGALYWEPEALYTLCYFMHCPQMEWENPNVEPSKVNLQVERPFLVLPPLMEWIRVAVAHAGHRRSFSMDSDDVRQAARLLLPGVDCEPRQLRADDCFCASRKLDAVAIEAKFKQDLGFRMLNCGRTDLVKQAVSLLGPDGINTMSEQGMTPLMYACVRGDEAMVQMLLDAGADLNVEVVSTPHKYPSVHPETRHWTALTFAVLHGHIPVVQLLLDAGAKVEGSVEHGEENYSETPLQLAAAVGNFELVSLLLERGADPLIGTMYRNGISTTPQGDMNSFSQAAAHGHRNVFRKLLAQPEKEKSDILSLEEILAEGTDLAETAPPPLCASRNSKAKLRALREAMYHSAEHGYVDVTIDIRSIGVPWTLHTWLESLRIAFQQHRRPLIQCLLKEFKTIQEEEYTEELVTQGLPLMFEILKASKNEVISQQLCVIFTHCYGPYPIPKLTEIKRKQTSRLDPHFLNNKEMSDVTFLVEGRPFYAHKVLLFTASPRFKALLSSKPTNDGTCIEIGYVKYSIFQLVMQYLYYGGPESLLIKNNEIMELLSAAKFFQLEALQRHCEIICAKSINTDNCVDIYNHAKFLGVTELSAYCEGYFLKNMMVLIENEAFKQLLYDKNGEGTGQDVLQDLQRTLAIRIQSIHLSSSKGSVV

SEQ ID NO: 25263 - protein, 985 aa, Homo sapiens
  REGION 1..985: note = ENSP00000413889
MARRGKKPVVRTLEDLTLDSGYGGAADSVRSSNLSLCCSDSHPASPYGGSCWPPLADSMHSRHNSFDTVNTALVEDSEGLDCAGQHCSRLLPDLDEVPWTLQELEALLLRSRDPRAGPAVPGGLPKDALAKLSTLVSRALVRIAKEAQRLSLRFAKCTKYEIQSAMEIVLSWGLAAHCTAAALAALSLYNMSSAGGDRLGRGKSARCGLTFSVGRVYRWMVDSRVALRIHEHAAIYLTACMESLFRDIYSRVVASGVPRSCSGPGSGSGSGPGPSSGPGAAPAADKEREAPGGGAASGGACSAASSASGGSSCCAPPAAAAAAVPPAAAANHHHHHHHALHEAPKFTVETLEHTVNNDSEIWGLLQPYQHLICGKNASGVLCLPDSLNLHRDPQRSNKPGELPMFSQSELRTIEQSLLATRVGSIAELSDLVSRAMHHLQPLNAKHHGNGTPLHHKQGALYWEPEALYTLCYFMHCPQMEWENPNVEPSKVNLQVERPFLVLPPLMEWIRVAVAHAGHRRSFSMDSDDVRQAARLLLPGVDCEPRQLRADDCFCASRKLDAVAIEAKFKQDLGFRMLNCGRTDLVKQAVSLLGPDGINTMSEQGMTPLMYACVRGDEAMVQMLLDAGADLNVEVVSTPHKYPSVHPETRHWTALTFAVLHGHIPVVQLLLDAGAKVEGSVEHGEENYSETPLQLAAAVGVPWTLHTWLESLRIAFQQHRRPLIQCLLKEFKTIQEEEYTEELVTQGLPLMFEILKASKNEVISQQLCVIFTHCYGPYPIPKLTEIKRKQTSRLDPHFLNNKEMSDVTFLVEGRPFYAHKVLLFTASPRFKALLSSKPTNDGTCIEIGYVKYSIFQLVMQYLYYGGPESLLIKNNEIMELLSAAKFFQLEALQRHCEIICAKSINTDNCVDIYNHAKFLGVTELSAYCEGYFLKNMMVLIENEAFKQLLYDKNGEGTGQDVLQDLQRTLAIRIQSIHLSSSKGSVV

SEQ ID NO: 25264 - protein, 1007 aa, Homo sapiens
  REGION 1..1007: note = ENSP00000447319
MARRGKKPVVRTLEDLTLDSGYGGAADSVRSSNLSLCCSDSHPASPYGGSCWPPLADSMHSRHNSFDTVNTALVEDSEGLDCAGQHCSRLLPDLDEVPWTLQELEALLLRSRDPRAGPAVPGGLPKDALAKLSTLVSRALVRIAKEAQRLSLRFAKCTKYEIQSAMEIVLSWGLAAHCTAAALAALSLYNMSSAGGDRLGRGKSARCGLTFSVGRVYRWMVDSRVALRIHEHAAIYLTACMESLFRDIYSRVVASGVPRSCSGPGSGSGSGPGPSSGPGAAPAADKEREAPGGGAASGGACSAASSASGGSSCCAPPAAAAAAVPPAAAANHHHHHHHALHEAPKFTVETLEHTVNNDSEIWGLLQPYQHLICGKNASGVLCLPDSLNLHRDPQRSNKPGELPMFSQSELRTIEQSLLATRVGSIAELSDLVSRAMHHLQPLNAKHHGNGTPLHHKQGALYWEPEALYTLCYFMHCPQMEWENPNVEPSKVNLQVERPFLVLPPLMEWIRVAVAHAGHRRSFSMDSDDVRQAARLLLPGVDCEPRQLRADDCFCASRKLDAVAIEAKFKQDLGFRMLNCGRTDLVKQAVSLLGPDGINTMSEQGMTPLMYACVRGDEAMVQMLLDAGADLNVEVVSTPHKYPSVHPETRHWTALTFAVLHGHIPVVQLLLDAGAKVEGSVEHGEENYSETPLQLAAAVGNFELVSLLLERGADPLIGTMYRNGISTTPQGDMNSFSQAAAHGHRNVFRKLLAQPEKEKSDILSLEEILAEGTDLAETAPPPLCASRNSKAKLRALREAMYHSAEHGYVDVTIDIRSIGVPWTLHTWLESLRIAFQQHRRPLIQCLLKEFKTIQEEEYTEELVTQGLPLMFEILKASKNEVISQQLCVIFTHCYGPYPIPKLTEIKRKQTSRLDPHFLNNKEMSDVTFLVEGRPFYAHKVLLFTASPRFKALLSSKPTNDGTCIEIGYVKYSIFQLVMQYLYYGGPESLLIKNNEIMEVRDPLWCWLS

SEQ ID NO: 25265 - protein, 222 aa, Homo sapiens
  REGION 1..222: note = ENSP00000447606
AAAAVPPAAAANHHHHHHHALHEAPKFTVETLEHTVNNDSEIWGLLQPYQHLICGKNASGDLVSRAMHHLQPLNAKHHGNGTPLHHKQGALYWEPEALYTLCYFMHCPQMEWENPNVEPSKVNLQVERPFLVLPPLMEWIRVAVAHAGHRRSFSMDSDDVRQAARLLLPGVDCEPRQLRADDCFCASRKLDAVAIEAKFKQDLGFRMLNCGRTDLVKQAVSL

SEQ ID NO: 25266 - protein, 237 aa, Homo sapiens
  REGION 1..237: note = ENSP00000407416
MVESLHGLDSRKGVLCLPDSLNLHRDPQRSNKPGELPMFSQSELRTIEQSLLATRVGSIAELSDLVSRAMHHLQPLNAKHHGNGTPLHHKQGALYWEPEALYTLCYFMHCPQMEWENPNVEPSKVNLQVERPFLVLPPLMEWIRVAVAHAGHRRSFSMDSDDVRQAARLLLPGVDCEPRQLRADDCFCASRKLDAVAIEAKFKQDLGFRMLNCGRTDLVKQAVSLLGPDGINTMSEQ

SEQ ID NO: 25267 - protein, 641 aa, Homo sapiens
  REGION 1..641: note = ENSP00000349690
MRKLRPKDSREPAPGSPVRSGCLQRLSHYSGIQRPFLVLPPLMEWIRVAVAHAGHRRSFSMDSDDVRQAARLLLPGVDCEPRQLRADDCFCASRKLDAVAIEAKFKQDLGFRMLNCGRTDLVKQAVSLLGPDGINTMSEQGMTPLMYACVRGDEAMVQMLLDAGADLNVEVVSTPHKYPSVHPETRHWTALTFAVLHGHIPVVQLLLDAGAKVEGSVEHGEENYSETPLQLAAAVGNFELVSLLLERGADPLIGTMYRNGISTTPQGDMNSFSQAAAHGHRNVFRKLLAQPEKEKSDILSLEEILAEGTDLAETAPPPLCASRNSKAKLRALREAMYHSAEHGYVDVTIDIRSIGVPWTLHTWLESLRIAFQQHRRPLIQCLLKEFKTIQEEEYTEELVTQGLPLMFEILKASKNEVISQQLCVIFTHCYGPYPIPKLTEIKRKQTSRLDPHFLNNKEMSDVTFLVEGRPFYAHKVLLFTASPRFKALLSSKPTNDGTCIEIGYVKYSIFQLVMQYLYYGGPESLLIKNNEIMELLSAAKFFQLEALQRHCEIICAKSINTDNCVDIYNHAKFLGVTELSAYCEGYFLKNMMVLIENEAFKQLLYDKNGEGTGQDVLQDLQRTLAIRIQSIHLSSSKGSVV

SEQ ID NO: 25268 - protein, 183 aa, Homo sapiens
  REGION 1..183: note = ENSP00000448322
MSDVTFLVEGRPFYAHKVLLFTASPRFKALLSSKPTNDGTCIEIGYVKYSIFQLVMQYLYYGGPESLLIKNNEIMELLSAAKFFQLEALQRHCEIICAKSINTDNCVDIYNHAKFLGVTELSAYCEGYFLKNMMVLIENEAFKQLLYDKNGEGTGQDVLQDLQRTLAIRIQSIHLSSSKGSVV

SEQ ID NO: 25269 - protein, 478 aa, Homo sapiens
  REGION 1..478: note = ENSP00000364515
MPRRGYSKPGSWGSFWAMLTLVGLVTHAAQRADVGGEAAGTSINHSQAVLQRLQELLRQGNASDVVLRVQAAGTDEVRVFHAHRLLLGLHSELFLELLSNQSEAVLQEPQDCAAVFDKFIRYLYCGELTVLLTQAIPLHRLATKYGVSSLQRGVADYMRAHLAGGAGPAVGWYHYAVGTGDEALRESCLQFLAWNLSAVAASTEWGAVSPELLWQLLQRSDLVLQDELELFHALEAWLGRARPPPAVAERALRAIRYPMIPPAQLFQLQARSAALARHGPAVADLLLQAYQFHAASPLHYAKFFDVNGSAFLPRNYLAPAWGAPWVINNPARDDRSTSFQTQLGPSGHDAGRRVTWNVLFSPRWLPVSLRPVYADAAGTALPAARPEDGRPRLVVTPASSGGDAAGVSFQKTVLVGARQQGRLLVRHAYSFHQSSEEAGDFLAHADLQRRNSEYLVENALHLHLIVKPVYHTLIRTPK

SEQ ID NO: 25270 - protein, 171 aa, Homo sapiens
  REGION 1..171: note = ENSP00000256015
MHPFYTRAATMIGEIAAAVSFISKFLRTKGLTSERQLQTFSQSLQELLAEHYKHHWFPEKPCKGSGYRCIRINHKMDPLIGQAAQRIGLSSQELFRLLPSELTLWVDPYEVSYRIGEDGSICVLYEASPAGGSTQNSTNVQMVDSRISCKEELLLGRTSPSKNYNMMTVSG

SEQ ID NO: 25271 - protein, 84 aa, Homo sapiens
  REGION 1..84: note = ENSP00000447551
MDPLIGQAAQRIGLSSQELFRLLPSELTLWVDPYEVSYRIGEDGSICVLYEASPAGGSTQNSTNVQMVDSRISCKEELLLGRTS

SEQ ID NO: 25272 - protein, 158 aa, Homo sapiens
  REGION 1..158: note = ENSP00000433553
MSHGKGTDMLPEIAAAVGFLSSLLRTRGCVSEQRLKVFSGALQEALTEHYKHHWFPEKPSKGSGYRCIRINHKMDPIISRVASQIGLSQPQLHQLLPSELTLWVDPYEVSYRIGEDGSICVLYEEAPLAASCGLLTCKNQVLLGRSSPSKNYVMAVSS

SEQ ID NO: 25273 - protein, 158 aa, Homo sapiens; identical to SEQ ID NO: 25272
  REGION 1..158: note = ENSP00000290551

SEQ ID NO: 25274 - protein, 158 aa, Homo sapiens; identical to SEQ ID NO: 25272
  REGION 1..158: note = ENSP00000433553

SEQ ID NO: 25275 - protein, 158 aa, Homo sapiens; identical to SEQ ID NO: 25272
  REGION 1..158: note = ENSP00000290551

SEQ ID NO: 25276 - protein, 526 aa, Homo sapiens
  REGION 1..526: note = ENSP00000244513
MAVFPSSGLPRCLLTLILLQLPKLDSAPFDVIGPPEPILAVVGEDAELPCRLSPNASAEHLELRWFRKKVSPAVLVHRDGREQEAEQMPEYRGRATLVQDGIAKGRVALRIRGVRVSDDGEYTCFFREDGSYEEALVHLKVAALGSDPHISMQVQENGEICLECTSVGWYPEPQVQWRTSKGEKFPSTSESRNPDEEGLFTVAASVIIRDTSAKNVSCYIQNLLLGQEKKVEISIPASSLPRLTPWIVAVAVILMVLGLLTIGSIFFTWRLYNERPRERRNEFSSKERLLEELKWKKATLHAVDVTLDPDTAHPHLFLYEDSKSVRLEDSRQKLPEKTERFDSWPCVLGRETFTSGRHYWEVEVGDRTDWAIGVCRENVMKKGFDPMTPENGFWAVELYGNGYWALTPLRTPLPLAGPPRRVGIFLDYESGDISFYNMNDGSDIYTFSNVTFSGPLRPFFCLWSSGKKPLTICPIADGPERVTVIANAQDLSKEIPLSPMGEDSAPRDADTLHSKLIPTQPSQGAP

SEQ ID NO: 25277 - protein, 494 aa, Homo sapiens
  REGION 1..494: note = ENSP00000484707
MAVFPSSGLPRCLLTLILLQLPKLDSAPFDVIGPPEPILAVVGEDAELPCRLSPNASAEHLELRWFRKKVSPAVLVHRDGREQEAEQMPEYRGRATLVQDGIAKGRVALRIRGVRVSDDGEYTCFFREDGSYEEALVHLKVAALGSDPHISMQVQENGEICLECTSVGWYPEPQVQWRTSKGEKFPSTSESRNPDEEGLFTVAASVIIRDTSAKNVSCYIQNLLLGQEKKVEISIPASSLPRLTPWIVAVAVILMVLGLLTIGSIFFTWRLYNERPRERRNEFSSKERLLEELKWKKATLHAVDVTLDPDTAHPHLFLYEDSKSVRLEDSRQKLPEKTERFDSWPCVLGRETFTSGRHYWEVEVGDRTDWAIGVCRENVMKKGFDPMTPENGFWAVELYGNGYWALTPLRTPLPLAGPPRRVGIFLDYESGDISFYNMNDGSDIYTFSNVTVIANAQDLSKEIPLSPMGEDSAPRDADTLHSKLIPTQPSQGAP

SEQ ID NO: 25278 - protein, 1050 aa, Homo sapiens
  REGION 1..1050: note = ENSP00000287598
MAAVKKEGGALSEAMSLEGDEWELSKENVQPLRQGRIMSTLQGALAQESACNNTLQQQKRAFEYEIRFYTGNDPLDVWDRYISWTEQNYPQGGKESNMSTLLERAVEALQGEKRYYSDPRFLNLWLKLGRLCNEPLDMYSYLHNQGIGVSLAQFYISWAEEYEARENFRKADAIFQEGIQQKAEPLERLQSQHRQFQARVSRQTLLALEKEEEEEVFESSVPQRSTLAELKSKGKKTARAPIIRVGGALKAPSQNRGLQNPFPQQMQNNSRITVFDENADEASTAELSKPTVQPWIAPPMPRAKENELQAGPWNTGRSLEHRPRGNTASLIAVPAVLPSFTPYVEETARQPVMTPCKIEPSINHILSTRKPGKEEGDPLQRVQSHQQASEEKKEKMMYCKEKIYAGVGEFSFEEIRAEVFRKKLKEQREAELLTSAEKRAEMQKQIEEMEKKLKEIQTTQQERTGDQQEETMPTKETTKLQIASESQKIPGMTLSSSVCQVNCCARETSLAENIWQEQPHSKGPSVPFSIFDEFLLSEKKNKSPPADPPRVLAQRRPLAVLKTSESITSNEDVSPDVCDEFTGIEPLSEDAIITGFRNVTICPNPEDTCDFARAARFVSTPFHEIMSLKDLPSDPERLLPEEDLDVKTSEDQQTACGTIYSQTLSIKKLSPIIEDSREATHSSGFSGSSASVASTSSIKCLQIPEKLELTNETSENPTQSPWCSQYRRQLLKSLPELSASAELCIEDRPMPKLEIEKEIELGNEDYCIKREYLICEDYKLFWVAPRNSAELTVIKVSSQPVPWDFYINLKLKERLNEDFDHFCSCYQYQDGCIVWHQYINCFTLQDLLQHSEYITHEITVLIIYNLLTIVEMLHKAEIVHGDLSPRCLILRNRIHDPYDCNKNNQALKIVDFSYSVDLRVQLDVFTLSGFRTVQILEGQKILANCSSPYQVDLFGIADLAHLLLFKEHLQVFWDGSFWKLSQNISELKDGELWNKFFVRILNANDEATVSVLGELAAEMNGVFDTTFQSHLNKALWKVGKLTSPGALLFQ

SEQ ID NO: 25279 - protein, 96 aa, Homo sapiens
  REGION 1..96: note = ENSP00000453861
MAAVKKEGGALSEAMSLEGDEWELSKENVQPLRQGRIMSTLQGALAQESACNNTLQQQKRDGVSLFRPGWSAVARSWLTGSSASWVHANLLPQPPE

SEQ ID NO: 25280 - protein, 1064 aa, Homo sapiens
  REGION 1..1064: note = ENSP00000398470
MAAVKKEGGALSEAMSLEGDEWELSKENVQPLRQGRIMSTLQGALAQESACNNTLQQQKRAFEYEIRFYTGNDPLDVWDRWVFLFHKDNRNINRYISWTEQNYPQGGKESNMSTLLERAVEALQGEKRYYSDPRFLNLWLKLGRLCNEPLDMYSYLHNQGIGVSLAQFYISWAEEYEARENFRKADAIFQEGIQQKAEPLERLQSQHRQFQARVSRQTLLALEKEEEEEVFESSVPQRSTLAELKSKGKKTARAPIIRVGGALKAPSQNRGLQNPFPQQMQNNSRITVFDENADEASTAELSKPTVQPWIAPPMPRAKENELQAGPWNTGRSLEHRPRGNTASLIAVPAVLPSFTPYVEETARQPVMTPCKIEPSINHILSTRKPGKEEGDPLQRVQSHQQASEEKKEKMMYCKEKIYAGVGEFSFEEIRAEVFRKKLKEQREAELLTSAEKRAEMQKQIEEMEKKLKEIQTTQQERTGDQQEETMPTKETTKLQIASESQKIPGMTLSSSVCQVNCCARETSLAENIWQEQPHSKGPSVPFSIFDEFLLSEKKNKSPPADPPRVLAQRRPLAVLKTSESITSNEDVSPDVCDEFTGIEPLSEDAIITGFRNVTICPNPEDTCDFARAARFVSTPFHEIMSLKDLPSDPERLLPEEDLDVKTSEDQQTACGTIYSQTLSIKKLSPIIEDSREATHSSGFSGSSASVASTSSIKCLQIPEKLELTNETSENPTQSPWCSQYRRQLLKSLPELSASAELCIEDRPMPKLEIEKEIELGNEDYCIKREYLICEDYKLFWVAPRNSAELTVIKVSSQPVPWDFYINLKLKERLNEDFDHFCSCYQYQDGCIVWHQYINCFTLQDLLQHSEYITHEITVLIIYNLLTIVEMLHKAEIVHGDLSPRCLILRNRIHDPYDCNKNNQALKIVDFSYSVDLRVQLDVFTLSGFRTVQILEGQKILANCSSPYQVDLFGIADLAHLLLFKEHLQVFWDGSFWKLSQNISELKDGELWNKFFVRILNANDEATVSVLGELAAEMNGVFDTTFQSHLNKALWKVGKLTSPGALLFQ

SEQ ID NO: 25281 - protein, 66 aa, Homo sapiens
  REGION 1..66: note = ENSP00000453643
  VARIANT 1: note = Any amino acid
XQFQARVSRQTLLALEKEEEEEVFESSVPQRSTLAELKSKGKKTARAPIIRVGGALKGHHVKLNLV

SEQ ID NO: 25282 - protein, 154 aa, Homo sapiens
  REGION 1..154: note = ENSP00000412072
MNNQKQQKPTLSGQRFKTRKRDEKERFDPTQFQDCIIQGLTETGTDLEAVAKFLDASGAKLDYRRYAETLFDILVAGGMLAPGGTLADDMMRTDVCVFAAQEDLETMQAFAQVFNKLIRRYKYLEKGFEDEVKKLLLFLKGFSESERNKLAMLT

SEQ ID NO: 25283 - protein, 216 aa, Homo sapiens
  REGION 1..216: note = ENSP00000390766
MNNQKQQKPTLSGQRFKTRKRDEKERFDPTQFQDCIIQGLTETGTDLEAVAKFLDASGAKLDYRRYAETLFDILVAGGMLAPGGTLADDMMRTDVCVFAAQEDLETMQAFAQVFNKLIRRYKYLEKGFEDEVKKLLLFLKGFSESERNKLAMLTGVLLANGTLNASILNSLYNENLVKEGVSAAFAVKLFKSWINEKDINAVAASLRKVSMDNRLM

SEQ ID NO: 25284 - protein, 294 aa, Homo sapiens
  REGION 1..294: note = ENSP00000387086
MNNQKQQKPTLSGQRFKTRKRDEKERFDPTQFQDCIIQGLTETGTDLEAVAKFLDASGAKLDYRRYAETLFDILVAGGMLAPGGTLADDMMRTDVCVFAAQEDLETMQAFAQVFNKLIRRYKYLEKGFEDEVKKLLLFLKGFSESERNKLAMLTGVLLANGTLNASILNSLYNENLVKEGVSAAFAVKLFKSWINEKDINAVAASLRKVSMDNRLMELFPANKQSVEHFTKYFTEAGLKELSEYVRNQQTIGARKELQKELQEQMSRGDPFKDIILYVKEEMKKNNIPEPVVIG

SEQ ID NO: 25285 - protein, 419 aa, Homo sapiens
  REGION 1..419: note = ENSP00000386474
MNNQKQQKPTLSGQRFKTRKRDEKERFDPTQFQDCIIQGLTETGTDLEAVAKFLDASGAKLDYRRYAETLFDILVAGGMLAPGGTLADDMMRTDVCVFAAQEDLETMQAFAQVFNKLIRRYKYLEKGFEDEVKKLLLFLKGFSESERNKLAMLTGVLLANGTLNASILNSLYNENLVKEGVSAAFAVKLFKSWINEKDINAVAASLRKVSMDNRLMELFPANKQSVEHFTKYFTEAGLKELSEYVRNQQTIGARKELQKELQEQMSRGDPFKDIILYVKEEMKKNNIPEPVVIGIVWSSVMSTVEWNKKEELVAEQAIKHLKQYSPLLAAFTTQGQSELTLLLKIQEYCYDNIHFMKAFQKIVVLFYKAEVLSEEPILKWYKDAHVAKGKSVFLEQMKKFVEWLKNAEEESESEAEEGD

SEQ ID NO: 25286 - protein, 423 aa, Homo sapiens
  REGION 1..423: note = ENSP00000386837
MVSFMNNQKQQKPTLSGQRFKTRKRDEKERFDPTQFQDCIIQGLTETGTDLEAVAKFLDASGAKLDYRRYAETLFDILVAGGMLAPGGTLADDMMRTDVCVFAAQEDLETMQAFAQVFNKLIRRYKYLEKGFEDEVKKLLLFLKGFSESERNKLAMLTGVLLANGTLNASILNSLYNENLVKEGVSAAFAVKLFKSWINEKDINAVAASLRKVSMDNRLMELFPANKQSVEHFTKYFTEAGLKELSEYVRNQQTIGARKELQKELQEQMSRGDPFKDIILYVKEEMKKNNIPEPVVIGIVWSSVMSTVEWNKKEELVAEQAIKHLKQYSPLLAAFTTQGQSELTLLLKIQEYCYDNIHFMKAFQKIVVLFYKAEVLSEEPILKWYKDAHVAKGKSVFLEQMKKFVEWLKNAEEESESEAEEGD

SEQ ID NO: 25287 - protein, 451 aa, Homo sapiens
  REGION 1..451: note = ENSP00000394316
MYGAPGAPAQSASVTVVRSLRRPPPQATGVSFMNNQKQQKPTLSGQRFKTRKRDEKERFDPTQFQDCIIQGLTETGTDLEAVAKFLDASGAKLDYRRYAETLFDILVAGGMLAPGGTLADDMMRTDVCVFAAQEDLETMQAFAQVFNKLIRRYKYLEKGFEDEVKKLLLFLKGFSESERNKLAMLTGVLLANGTLNASILNSLYNENLVKEGVSAAFAVKLFKSWINEKDINAVAASLRKVSMDNRLMELFPANKQSVEHFTKYFTEAGLKELSEYVRNQQTIGARKELQKELQEQMSRGDPFKDIILYVKEEMKKNNIPEPVVIGIVWSSVMSTVEWNKKEELVAEQAIKHLKQYSPLLAAFTTQGQSELTLLLKIQEYCYDNIHFMKAFQKIVVLFYKAEVLSEEPILKWYKDAHVAKGKSVFLEQMKKFVEWLKNAEEESESEAEEGD

SEQ ID NO: 25288 - protein, 116 aa, Homo sapiens
  REGION 1..116: note = ENSP00000393587
MVSFMNNQKQQKPTLSGQRFKTRKRDEKERFDPTQFQDCIIQGLTETGTDLEAVAKFLDASGAKLDYRRYAETLFDILVAGGMLAPGGTLADDMMRTDVCVFAAQEDLETMQAFAQ

SEQ ID NO: 25289 - protein, 161 aa, Homo sapiens
  REGION 1..161: note = ENSP00000407268
MNNQKQQKPTLSGQRFKTRKRDEKERFDPTQFQDCIIQGLTETGTDLEAVAKFLDASGAKLDYRRYAETLFDILVAGGMLAPGGTLADDMMRTDVCVFAAQEDLETMQAFAQVFNKLIRRYKYLEKGFEDEVKKLLLFLKGFSESERNKLAMLTGVLLANG

SEQ ID NO: 25290 - protein, 135 aa, Homo sapiens
  REGION 1..135: note = ENSP00000395673
  VARIANT 1: note = Any amino acid
XGARKELQKELQEQMSRGDPFKDIILYVKEEMKKNNIPEPVVIGIVWSSVMSTVEWNKKEELVAEQAIKHLKQYSPLLAAFTTQAEVLSEEPILKWYKDAHVAKGKSVFLEQMKKFVEWLKNAEEESESEAEEGD

SEQ ID NO: 25291 - protein, 380 aa, Homo sapiens
  REGION 1..380: note = ENSP00000306245
MMFSGFNADYEASSSRCSSASPAGDSLSYYHSPADSFSSMGSPVNAQDFCTDLAVSSANFIPTVTAISTSPDLQWLVQPALVSSVAPSQTRAPHPFGVPAPSAGAYSRAGVVKTMTGGRAQSIGRRGKVEQLSPEEEEKRRIRRERNKMAAAKCRNRRRELTDTLQAETDQLEDEKSALQTEIANLLKEKEKLEFILAAHRPACKIPDDLGFPEEMSVASLDLTGGLPEVATPESEEAFTLPLLNDPEPKPSVEPVKSISSMELKTEPFDDFLFPASSRPSGSETARSVPDMDLSGSFYAADWEPLHSGSLGMGPMATELEPLCTPVVTCTPSCTAYTSSFVFTYPEADSFPSCAAAHRKGSSSNEPSSDSLSSPTLLAL

SEQ ID NO: 25292 - protein, 170 aa, Homo sapiens
  REGION 1..170: note = ENSP00000450519
MMFSGFNADYEASSSRCSSASPAGDSLSYYHSPADSFSSMGSPVNAQDFCTDLAVSSANFIPTVTAISTSPDLQWLVQPALVSSVAPSQTRAPHPFGVPAPSAGAYSRAGVVKTMTGGRAQSIGRRGKVEQVRNSSVLFLGMWGLGGKQPRRCRSPVQRMKPLMGLAAHP

SEQ ID NO: 25293 - protein, 137 aa, Homo sapiens
  REGION 1..137: note = ENSP00000452443
MMFSGFNADYEASSSRCSSASPAGDSLSYYHSPADSFSSMGSPVNAQCQLHSHGHCHLDQSGPAVAGAARPRLLRGPIADQSPSPFRSPRPLRWGLLQGWRCEDHDRRPSAEHWQEGQGGTVISRRRREKENPKGKE

SEQ ID NO: 25294 - protein, 344 aa, Homo sapiens
  REGION 1..344: note = ENSP00000442268
MMFSGFNADYEASSSRCSSASPAGDSLSYYHSPADSFSSMGSPVNAQDFCTDLAVSSANFIPTVTAISTSPDLQWLVQPALVSSVAPSQTRAPHPFGVPAPSAGAYSRAGVVKTMTGGRAQSIGRRGKVEQETDQLEDEKSALQTEIANLLKEKEKLEFILAAHRPACKIPDDLGFPEEMSVASLDLTGGLPEVATPESEEAFTLPLLNDPEPKPSVEPVKSISSMELKTEPFDDFLFPASSRPSGSETARSVPDMDLSGSFYAADWEPLHSGSLGMGPMATELEPLCTPVVTCTPSCTAYTSSFVFTYPEADSFPSCAAAHRKGSSSNEPSSDSLSSPTLLAL

SEQ ID NO: 25295 - protein, 176 aa, Homo sapiens
  REGION 1..176: note = ENSP00000452386
MMFSGFNADYEASSSRCSSASPAGDSLSYYHSPADSFSSMGSPVNAQDFCTDLAVSSANFIPTVTAISTSPDLQWLVQPALVSSVAPSQTRAPHPFGVPAPSAGAYSRAGVVKTMTGGRAQSIGRRGKVEQLSPEEEEKRRIRRERNKMAAAKCRNRRRELTDTLQAVGTLWVAPF

SEQ ID NO: 25296 - protein, 266 aa, Homo sapiens
  REGION 1..266: note = ENSP00000452590
MTGGRAQSIGRRGKVEQLSPEEEEKRRIRRERNKMAAAKCRNRRRELTDTLQAETDQLEDEKSALQTEIANLLKEKEKLEFILAAHRPACKIPDDLGFPEEMSVASLDLTGGLPEVATPESEEAFTLPLLNDPEPKPSVEPVKSISSMELKTEPFDDFLFPASSRPSGSETARSVPDMDLSGSFYAADWEPLHSGSLGMGPMATELEPLCTPVVTCTPSCTAYTSSFVFTYPEADSFPSCAAAHRKGSSSNEPSSDSLSSPTLLAL

SEQ ID NO: 25297 - protein, 142 aa, Homo sapiens
  REGION 1..142: note = ENSP00000452440
MTGGRAQSIGRRGKVEQETDQLEDEKSALQTEIANLLKEKEKLEFILAAHRPACKIPDDLGFPEEMSVASLDLTGGLPEVATPESEEAFTLPLLNDPEPKPSVEPVKSISSMELKTEPFDDFLFPASSRPSGSETARSVPDM

SEQ ID NO: 25298 - protein, 83 aa, Homo sapiens
  REGION 1..83: note = ENSP00000451786
RLLRGPIADQSPSPFRSPRPLRWGLLQGWRCEDHDRRPSAEHWQEGQGGTEEEEKRRIRRERNKMAAAKCRNRRRELTDTLQA

SEQ ID NO: 25299 - protein, 232 aa, Homo sapiens
  REGION 1..232: note = ENSP00000450886
MAAAKCRNRRRELTDTLQAETDQLEDEKSALQTEIANLLKEKEKLEFILAAHRPACKIPDDLGFPEEMSVASLDLTGGLPEVATPESEEAFTLPLLNDPEPKPSVEPVKSISSMELKTEPFDDFLFPASSRPSGSETARSVPDMDLSGSFYAADWEPLHSGSLGMGPMATELEPLCTPVVTCTPSCTAYTSSFVFTYPEADSFPSCAAAHRKGSSSNEPSSDSLSSPTLLAL

SEQ ID NO: 25300 - protein, 380 aa, Homo sapiens; identical to SEQ ID NO: 25291
  REGION 1..380: note = ENSP00000306245

SEQ ID NO: 25301 - protein, 170 aa, Homo sapiens; identical to SEQ ID NO: 25292
  REGION 1..170: note = ENSP00000450519

SEQ ID NO: 25302 - protein, 137 aa, Homo sapiens; identical to SEQ ID NO: 25293
  REGION 1..137: note = ENSP00000452443

SEQ ID NO: 25303 - protein, 344 aa, Homo sapiens; identical to SEQ ID NO: 25294
  REGION 1..344: note = ENSP00000442268

SEQ ID NO: 25304 - protein, 176 aa, Homo sapiens; identical to SEQ ID NO: 25295
  REGION 1..176: note = ENSP00000452386

SEQ ID NO: 25305 - protein, 266 aa, Homo sapiens; identical to SEQ ID NO: 25296
  REGION 1..266: note = ENSP00000452590

SEQ ID NO: 25306 - protein, 142 aa, Homo sapiens; identical to SEQ ID NO: 25297
  REGION 1..142: note = ENSP00000452440

SEQ ID NO: 25307 - protein, 83 aa, Homo sapiens; identical to SEQ ID NO: 25298
  REGION 1..83: note = ENSP00000451786

SEQ ID NO: 25308 - protein, 232 aa, Homo sapiens; identical to SEQ ID NO: 25299
  REGION 1..232: note = ENSP00000450886

SEQ ID NO: 25309 - protein, 197 aa, Homo sapiens
  REGION 1..197: note = ENSP00000331581
MSARAPKELRLALPPCLLNRTFASPNASGSGNTGARGPGAVGSGTCITQVGQQLFQSFSSTLVLIVLVTLIFCLIVLSLSTFHIHKRRMKKRKMQRAQEEYERDHCSGSRGGGGLPRPGRQAPTHAKETRLERQPRDSPFCAPSNASSLSSSSPGLPCQGPCAPPPPPPASSPQGAHAASSCLDTAGEGLLQTVVLS

SEQ ID NO: 25310 - protein, 197 aa, Homo sapiens; identical to SEQ ID NO: 25309
  REGION 1..197: note = ENSP00000331581

SEQ ID NO: 25311 - protein, 205 aa, Homo sapiens
  REGION 1..205: note = ENSP00000261318
MVNLAAMVWRRLLRKRWVLALVFGLSLVYFLSSTFKQEERAVRDRNLLQVHDHNQPIPWKVQFNLGNSSRPSNQCRNSIQGKHLITDELGYVCERKDLLVNGCCNVNVPSTKQYCCDGCWPNGCCSAYEYCVSCCLQPNKQLLLERFLNRAAVAFQNLFMAVEDHFELCLAKCRTSSQSVQHENTYRDPIAKYCYGESPPELFPA

SEQ ID NO: 25312 - protein, 47 aa, Homo sapiens
  REGION 1..47: note = ENSP00000446478
MVNLAAMVWRRLLRKRWVLALVFGLSLVYFLSSTFKQATFARGRICW

SEQ ID NO: 25313 - protein, 46 aa, Homo sapiens
  REGION 1..46: note = ENSP00000449151
MAVEDHFELCLAKCRTSSQSVQHENTYRDPIAKYCYGESPPELFPA

SEQ ID NO: 25314 - protein, 43 aa, Homo sapiens
  REGION 1..43: note = ENSP00000447722
  VARIANT 1: note = Any amino acid
XFGLSLVYFLSSTFKQSVQHENTYRDPIAKYCYGESPPELFPA

SEQ ID NO: 25315 - protein, 140 aa, Homo sapiens
  REGION 1..140: note = ENSP00000256319
MSRFLNVLRSWLVMVSIIAMGNTLQSFRDHTFLYEKLYTGKPNLVNGLQARTFGIWTLLSSVIRCLCAIDIHNKTLYHITLWTFLLALGHFLSELFVYGTAAPTIGVLAPLMVASFSILGMLVGLRYLEVEPVSRQKKRN

SEQ ID NO: 25316 - protein, 83 aa, Homo sapiens
  REGION 1..83: note = ENSP00000490729
MDLSFMAAQLPMMGGAFMDSPNEDFSTEYSLFNSSANVHAAANGQGQPEDPPRSSNDAVLLWIAIIATLGNIVVVGVVYAFTF

SEQ ID NO: 25317 - protein, 92 aa, Homo sapiens
  REGION 1..92: note = ENSP00000489964
MDQPNSFPVCRCHLEFFQLPMMGGAFMDSPNEDFSTEYSLFNSSANVHAAANGQGQPEDPPRSSNDAVLLWIAIIATLGNIVVVGVVYAFTF

SEQ ID NO: 25318 - protein, 83 aa, Homo sapiens; identical to SEQ ID NO: 25316
  REGION 1..83: note = ENSP00000490894

SEQ ID NO: 25319 - protein, 114 aa, Homo sapiens
  REGION 1..114: note = ENSP00000490925
MDLSFMAAQNKDKSRISPSVCDPREDPELAPGKGCVWPGRLPMMGGAFMDSPNEDFSTEYSLFNSSANVHAAANGQGQPEDPPRSSNDAVLLWIAIIATLGNIVVVGVVYAFTF

SEQ ID NO: 25320 - protein, 83 aa, Homo sapiens; identical to SEQ ID NO: 25316
  REGION 1..83: note = ENSP00000490729

SEQ ID NO: 25321 - protein, 92 aa, Homo sapiens; identical to SEQ ID NO: 25317
  REGION 1..92: note = ENSP00000489964

SEQ ID NO: 25322 - protein, 83 aa, Homo sapiens; identical to SEQ ID NO: 25316
  REGION 1..83: note = ENSP00000490894

SEQ ID NO: 25323 - protein, 114 aa, Homo sapiens; identical to SEQ ID NO: 25319
  REGION 1..114: note = ENSP00000490925

SEQ ID NO: 25324 - protein, 774 aa, Homo sapiens
  REGION 1..774: note = ENSP00000267485
MRGPIVLHICLAFCSLLLFSVATQCLAFPKIERRREIAHVHAEKGQSDKMNTDDLENSSVTSKQTPQLVVSEDPMMMSAVPSATSLNKAFSINKETQPGQAGLMQTERPGVSTPTESGVPSAEEVFGSSQPERISPESGLAKAMLTIAITATPSLTVDEKEELLTSTNFQPIVEEITETTKGFLKYMDNQSFATESQEGVGLGHSPSSYVNTKEMLTTNPKTEKFEADTDHRTTSFPGAESTAGSEPGSLTPDKEKPSQMTADNTQAAATKQPLETSEYTLSVEPETDSLLGAPEVTVSVSTAVPAASALSDEWDDTKLESVSRIRTPKLGDNEETQVRTEMSQTAQVSHEGMEGGQPWTEAAQVALGLPEGETHTGTALLIAHGNERSPAFTDQSSFTPTSLMEDMKVSIVNLLQSTGDFTESTKENDALFFLETTVSVSVYESEADQLLGNTMKDIITQEMTTAVQEPDATLSMVTQEQVATLELIRDSGKTEEEKEDPSPVSDVPGVTQLSRRWEPLATTISTTVVPLSFEVTPTVEEQMDTVTGPNEEFTPVLGSPVTPPGIMVGEPSISPALPALEASSERRTVVPSITRVNTAASYGLDQLESEEGQEDEDEEDEEDEDEEEEDEEEDEEDKDADSLDEGLDGDTELPGFTLPGITSQEPGLEEGNMDLLEGATYQVPDALEWEQQNQGLVRSWMEKLKDKAGYMSGMLVPVGVGIAGALFILGALYSIKVMNRRRRNGFKRHKRKQREFNSMQDRVMLLADSSEDEF

SEQ ID NO: 25325 - protein, 97 aa, Homo sapiens
  REGION 1..97: note = ENSP00000477692
  VARIANT 1: note = Any amino acid
XVVPLSFEVTPTVEEQMDTVTGPNEEFTPVLGSPVTPPGIMVGEPSISPALPALEASSERRTVVPSITRVNTAASYGLDQLESEGIHALKGIFSRTG

SEQ ID NO: 25326 - protein, 180 aa, Homo sapiens
  REGION 1..180: note = ENSP00000359401
MAESGKEKIKWTTTIIISSSLKSYEVATALENRSHKVRYSDSVENGSIIFSLSGVAFLLMDTKECLLSTEEIFLAKIEKFINIHQNSFLVLSAALHGPEEWKLMFRIQQRFLGCNLRILPVHNTVNAINLMCTIAKTTSKPYIDSICYRMITAKAYIIEQSPVWKTLQKIKLNSDSVNPN

SEQ ID NO: 25327 - protein, 121 aa, Homo sapiens
  REGION 1..121: note = ENSP00000359399
MDTKECLLSTEEIFLAKIEKFINIHQNSFLVLSAALHGPEEWKLMFRIQQRFLGCNLRILPVHNTVNAINLMCTIAKTTSKPYIDSICYRMITAKAYIIEQSPVWKTLQKIKLNSDSVNPN

SEQ ID NO: 25328 - protein, 121 aa, Homo sapiens
  REGION 1..121: note = ENSP00000235307
MGCASAKHVATVQNEEEAQKGKNYQNGDVFGDEYRIKPVEEVKYMKNGAEEEQKIAARNQENLEKSASSNVRLKTNKEVPGLVHQPRANMHISESQQEFFRMLDEKIEKGRDYCSEEEDIT

SEQ ID NO: 25329 - protein, 66 aa, Homo sapiens
  REGION 1..66: note = ENSP00000383776
  VARIANT 1: note = Any amino acid
XQPQGPPEQSLLLTEAWSWASKKKQPHLFSGVIVGGHLWLLGPKRRMYFIWLGWIPSDKPSQLTER

SEQ ID NO: 25330 - protein, 188 aa, Homo sapiens
  REGION 1..188: note = ENSP00000357225
  VARIANT 1: note = Any amino acid
XAQRGPGKAGLTGGRERLERGARAARTDQHQRIQEEERDLTGSGDISPPQHPSRHSFSPGAGGFCTTLPPSFLRVDDRATSSTTDSSRAPSSPRPPGSTSHCGISTRCTERCLCVLPLRTSQVPDVMAPQHDQEKFHDLAYSCLGKSFSMSNQDLYGYSTSSLALGLAWLSWETKKKNVLHLVGLDSL

SEQ ID NO: 25331 - protein, 140 aa, Homo sapiens
  REGION 1..140: note = ENSP00000310651
GPPEQSLLLTEAWSWASKKKQPHLFSGVIVGGHLWLLGFSPGAGGFCTTLPPSFLRVDDRATSSTTDSSRAPSSPRPPGSTSHCGISTRCTERCLCVLPLRTSQVPDVMAPQHDQEPKRRMYFIWLGWIPSDKPSQLTER

SEQ ID NO: 25332 - protein, 156 aa, Homo sapiens
  REGION 1..156: note = ENSP00000357226
MFLTEDLITFNLRNFLLFQLWESSFSPGAGGFCTTLPPSFLRVDDRATSSTTDSSRAPSSPRPPGSTSHCGISTRCTERCLCVLPLRTSQVPDVMAPQHDQEKFHDLAYSCLGKSFSMSNQDLYGYSTSSLALGLAWLSWETKKKNVLHLVGLDSL

SEQ ID NO: 25333 - protein, 169 aa, Homo sapiens
  REGION 1..169: note = ENSP00000350661
PPEQSLLLTEAWSWASKKKQPHLFSGVIVGGHLWLLGFSPGAGGFCTTLPPSFLRVDDRATSSTTDSSRAPSSPRPPGSTSHCGISTRCTERCLCVLPLRTSQVPDVMAPQHDQEKFHDLAYSCLGKSFSMSNQDLYGYSTSSLALGLAWLSWETKKKNVLHLVGLDSL

SEQ ID NO: 25334 - protein, 156 aa, Homo sapiens; identical to SEQ ID NO: 25332
  REGION 1..156: note = ENSP00000479346

SEQ ID NO: 25335 - protein, 141 aa, Homo sapiens
  REGION 1..141: note = ENSP00000355752
MEPSHKDAETAAAAAAVAAADPRGASSSSGVVVQVREKKGPLRAAIPYMPFPVAVICLFLNTFVPGLGTFVSAFTVLCGARTDLPDRHVCCVFWLNIAAALIQILTAIVMVGWIMSIFWGMDMVILAISQGYKEQGIPQQL

SEQ ID NO: 25336 - protein, 141 aa, Homo sapiens [sequence omitted]

SEQ ID NO: 25337 - protein, 245 aa, Homo sapiens
  REGION 1..245: note = ENSP00000363773
MEGPRGWLVLCVLAISLASMVTEDLCRAPDGKKGEAGRPGRRGRPGLKGEQGEPGAPGIRTGIQGLKGDQGEPGPSGNPGKVGYPGPSGPLGARGIPGIKGTKGSPGNIKDQPRPAFSAIRRNPPMGGNVVIFDTVITNQEEPYQNHSGRFVCTVPGYYYFTFQVLSQWEICLSIVSSSRGQVRRSLGFCDTTNKGLFQVVSGGMVLQLQQGDQVWVEKDPKKGHIYQGSEADSVFSGFLIFPSA

SEQ ID NO: 25338 - protein, 220 aa, Homo sapiens
  REGION 1..220: note = ENSP00000416841
MEGPRGWLVLCVLAISLASMVTEDLCRAPDGKKGEAGRPGRRGRPGLKGEQGEPGAPGIRTGIQGLKGDQGEPGPSGNPGKVGYPGPSGPLGARGIPGIKGTKGSPGNIKDQPRPAFSAIRRNPPMGGNVVIFDTVITNQEEPYQNHSGRFVCTVPGYYYFTFQVLSQWEICLSIVSSSRGQVRRSLGFCDTTNKGLFQVVSGGMVLQLQQGDQVWVEKD

SEQ ID NO: 25339 - protein, 245 aa, Homo sapiens; identical to SEQ ID NO: 25337
  REGION 1..245: note = ENSP00000385564

SEQ ID NO: 25340 - protein, 153 aa, Homo sapiens
  REGION 1..153: note = ENSP00000426317
MKIPWGSIPVLMLLLLLGLIDISQAQLSCTGPPAIPGIPGIPGTPGPDGQPGTPGIKGEKGLPGLAGDHGEFGEKGDPGIPGNPGKVGPKGPMGPKGGPGAPGAPGPKGESGDYKATQKIAFSATRTINVPLRRDQTIRFDHVITNMNNNYEP

SEQ ID NO: 25341 - protein, 251 aa, Homo sapiens
  REGION 1..251: note = ENSP00000423689
MKIPWGSIPVLMLLLLLGLIDISQAQLSCTGPPAIPGIPGIPGTPGPDGQPGTPGIKGEKGLPGLAGDHGEFGEKGDPGIPGNPGKVGPKGPMGPKGGPGAPGAPGPKGESGDYKATQKIAFSATRTINVPLRRDQTIRFDHVITNMNNNYEPRSGKFTCKVPGLYYFTYHASSRGNLCVNLMRGRERAQKVVTFCDYAYNTFQVTTGGMVLKLEQGENVFLQATDKNSLLGMEGANSIFSGFLLFPDMEA

SEQ ID NO: 25342 - protein, 228 aa, Homo sapiens
  REGION 1..228: note = ENSP00000404606
MKIPWGSIPVLMLLLLLGLIDISQAQLSCTGPPAIPGIPGIPGTPGPDGQPGTPGIKGEKGLPGLAGDHGEFGEKGDPGIPGNPGKVGPKGPMGPKGGPGAPGAPGPKGESGDYKATQKIAFSATRTINVPLRRDQTIRFDHVITNMNNNYEPRSGKFTCKVPGLYYFTYHASSRGNLCVNLMRGRERAQKVVTFCDYAYNTFQVTTGGMVLKLEQGENVFLQATDKN

SEQ ID NO: 25343 - protein, 253 aa, Homo sapiens
  REGION 1..253: note = ENSP00000313967
MMMKIPWGSIPVLMLLLLLGLIDISQAQLSCTGPPAIPGIPGIPGTPGPDGQPGTPGIKGEKGLPGLAGDHGEFGEKGDPGIPGNPGKVGPKGPMGPKGGPGAPGAPGPKGESGDYKATQKIAFSATRTINVPLRRDQTIRFDHVITNMNNNYEPRSGKFTCKVPGLYYFTYHASSRGNLCVNLMRGRERAQKVVTFCDYAYNTFQVTTGGMVLKLEQGENVFLQATDKNSLLGMEGANSIFSGFLLFPDMEA

SEQ ID NO: 25344 - protein, 258 aa, Homo sapiens
  REGION 1..258: note = ENSP00000253407
MLLVLVVLIPVLVSSGGPEGHYEMLGTCRMVCDPYPARGPGAGARTDGGDALSEQSGAPPPSTLVQGPQGKPGRTGKPGPPGPPGDPGPPGPVGPPGEKGEPGKPGPPGLPGAGGSGAISTATYTTVPRVAFYAGLKNPHEGYEVLKFDDVVTNLGNNYDAASGKFTCNIPGTYFFTYHVLMRGGDGTSMWADLCKNGQVRASAIAQDADQNYDYASNSVILHLDAGDEVFIKLDGGKAHGGNSNKYSTFSGFIIYSD

SEQ ID NO: 25345 - protein, 287 aa, Homo sapiens
  REGION 1..287: note = ENSP00000272520
MALGLLIAVPLLLQAAPRGAAHYEMMGTCRMICDPYTAAPGGEPPGAKAQPPGPSTAALEVMQDLSANPPPPFIQGPKGDPGRPGKPGPRGPPGEPGPPGPRGPPGEKGDSGRPGLPGLQLTAGTASGVGVVGGGAGVGGDSEGEVTSALSATFSGPKIAFYVGLKSPHEGYEVLKFDDVVTNLGNHYDPTTGKFSCQVRGIYFFTYHILMRGGDGTSMWADLCKNGQVRASAIAQDADQNYDYASNSVVLHLDSGDEVYVKLDGGKAHGGNNNKYSTFSGFLLYPD

SEQ ID NO: 25346 - protein, 329 aa, Homo sapiens
  REGION 1..329: note = ENSP00000302274
MLPLLLGLLGPAACWALGPTPGPGSSELRSAFSAARTTPLEGTSEMAVTFDKVYVNIGGDFDVATGQFRCRVPGAYFFSFTAGKAPHKSLSVMLVRNRDEVQALAFDEQRRPGARRAASQSAMLQLDYGDTVWLRLHGAPQYALGAPGATFSGYLVYADADADAPARGPPAPPEPRSAFSAARTRSLVGSDAGPGPRHQPLAFDTEFVNIGGDFDAAAGVFRCRLPGAYFFSFTLGKLPRKTLSVKLMKNRDEVQAMIYDDGASRRREMQSQSVMLALRRGDAVWLLSHDHDGYGAYSNHGKYITFSGFLVYPDLAPAAPPGLGASELL

SEQ ID NO: 25347 - protein, 100 aa, Homo sapiens
  REGION 1..100: note = ENSP00000434548
MLPLLLGLLGPAACWALGPTPGPGSSELRSAFSAARTTPLEGTSEMAVTFDKVYVNIGGDFDVATGQFRCRVPGAYFFSFTAGKAPHKSLSVMLVRNRDE

SEQ ID NO: 25348 - protein, 66 aa, Homo sapiens
  REGION 1..66: note = ENSP00000444157
  VARIANT 1: note = Any amino acid
XNPAKVQNHCQEPYYQAAAAGALTCATPGTWKDRQDGEEVLQCMPGCGSYADPITDQPSVRFSPQL

SEQ ID NO: 25349 - protein, 110 aa, Homo sapiens
  REGION 1..110: note = ENSP00000438286
MPGPRVWGKYLWRSPHSKGCPGAISHSSVRIQASSVVSKAPLWAGPLVRGSFQPISEASRGSEAINAPGDNPAKVQNHCQEPYYQAAAAGCGSYADPITDQPSVRFSPQL

SEQ ID NO: 25350 - protein, 487 aa, Homo sapiens
  REGION 1..487: note = ENSP00000266542
MPGPRVWGKYLWRSPHSKGCPGAMWWLLLWGVLQACPTRGSVLLAQELPQQLTSPGYPEPYGKGQESSTDIKAPEGFAVRLVFQDFDLEPSQDCAGDSVTISFVGSDPSQFCGQQGSPLGRPPGQREFVSSGRSLRLTFRTQPSSENKTAHLHKGFLALYQTVAVNYSQPISEASRGSEAINAPGDNPAKVQNHCQEPYYQAAAAGALTCATPGTWKDRQDGEEVLQCMPVCGRPVTPIAQNQTTLGSSRAKLGNFPWQAFTSIHGRGGGALLGDRWILTAAHTIYPKDSVSLRKNQSVNVFLGHTAIDEMLKLGNHPVHRVVVHPDYRQNESHNFSGDIALLELQHSIPLGPNVLPVCLPDNETLYRSGLLGYVSGFGMEMGWLTTELKYSRLPVAPREACNAWLQKRQRPEVFSDNMFCVGDETQRHSVCQGDSGSVYVVWDNHAHHWVATGIVSWGIGCGEGYDFYTKVLSYVDWIKGVMNGKN

SEQ ID NO: 25351 - protein, 314 aa, Homo sapiens
  REGION 1..314: note = ENSP00000441885
MPGPRVWGKYLWRSPHSKGCPGAMWWLLLWGVLQACPTRGSVLLAQELPQQLTSPGYPEPYGKGQESSTDIKAPEGFAVRLVFQDFDLEPSQDCAGDSVTISFVGSDPSQFCGQQGSPLGRPPGQREFVSSGRSLRLTFRTQPSSENKTAHLHKGFLALYQTVAVNYSQPISEASRGSEAINAPGDNPAKVQNHCQEPYYQAAAAASTPSLFLCLSSFTPQGHSPVQPQGPGKTDRMGRRFFSVCLSADGQSPPLPRIRRPSVLPEPSWATSPGKPSPVSTAVGAGPCWGTDGSSLLPTPSTPRTVFLSGRTRV

SEQ ID NO: 25352 - protein, 194 aa, Homo sapiens
  REGION 1..194: note = ENSP00000439180
  VARIANT 1: note = Any amino acid
XSFVGSDPSQFCGQQGSPLGRPPGQREFVSSGRSLRLTFRTQPSSENKTAHLHKGFLALYQTVVCGRPVTPIAQNQTTLGSSRAKLGNFPWQAFTSIHGRGGGALLGDRWILTAAHTIYPKDSVSLRKNQSVNVFLGHTAIDEMLKLGNHPVHRVVVHPDYRQNESHNFSGDIALLELQHSIPLGPNVLPVCLP

SEQ ID NO: 25353 - protein, 191 aa, Homo sapiens
  REGION 1..191: note = ENSP00000437398
MPGPRVWGKYLWRSPHSKGCPGAMWWLLLWGVLQACPTRGSVLLAQELPQQLTSPGYPEPYGKGQESSTDIKAPEGFAVRLVFQDFDLEPSQDCAGDSVTISFVGSDPSQFCGQQGSPLGRPPGQREFVSSGRSLRLTFRTQPSSENKTAHLHKGFLALYQTVGALTCATPGTWKDRQDGEEVLQCMPVCG

SEQ ID NO: 25354 - protein, 85 aa, Homo sapiens
  REGION 1..85: note = ENSP00000438951
  VARIANT 1: note = Any amino acid
XPGLRPGAVPGLCRGLCHNLIRRFGSKPVLWSARLPSGQAPWSEGVCILREEFAADLPHTAFLGEQDCPPPQGLPGPLPNRGCEL

SEQ ID NO: 25355 - protein, 83 aa, Homo sapiens
  REGION 1..83: note = ENSP00000437569
GLRPGAVPGLCRGLCHNLIRRFGSKPVLWSARLPSGQAPWSEGVCILREEFAADLPHTAFLGEQDCPPPQGLPGPLPNRGCEL

SEQ ID NO: 25356 - protein, 187 aa, Homo sapiens
  REGION 1..187: note = ENSP00000442611
MPGPRVWGKYLWRSPHSKGCPGAMWWLLLWGVLQACPTRGSVLLAQELPQQLTSPGYPEPYGKGQESSTDIKAPEGFAVRLVFQDFDLEPSQDCAGDSVTISFVGSDPSQFCGQQGSPLGRPPGQREFVSSGRSLRLTFRTQPSSENKTAHLHKGFLALYQTVGECPSWGCREGASVPSHDPGIFKP

SEQ ID NO: 25357 - protein, 385 aa, Homo sapiens
  REGION 1..385: note = ENSP00000312770
MWGFRLLRSPPLLLLLPQLGIGNASSCSQARTMNPGGSGGARCSLSAEVRRRQCLQLSTVPGADPQRSNELLLLAAAGEGLERQDLPGDPAKEEPQPPPQHHVLYFPGDVQNYHEIMTRHPENYQWENWSLENVATILAHRFPNSYIWVIKCSRMHLHKFSCYDNFVKSNMFGAPEHNTDFGAFKHLYMLLVNAFNLSQNSLSKKSLNVWNKDSIASNCRSSPSHTTNGCQGEKVRTCEKSDESAMSFYPPSLNDASFTLIGFSKGCVVLNQLLFELKEAKKDKNIDAFIKSIRTMYWLDGGHSGGSNTWVTYPEVLKEFAQTGIIVHTHVTPYQVRDPMRSWIGKEHKKFVQILGDLGMQVTSQIHFTKEAPSIENHFRVHEVF

SEQ ID NO: 25358 - protein, 295 aa, Homo sapiens
  REGION 1..295: note = ENSP00000362743
MERELEALAARLARPAEPPFQALVEAAGGRGQVLLVGELWEREQSRALLRDFARAVFPPEPGAAKPGGAAAEGAGPGAARGAQRAARAAGAAGAAAAAARAIRSPLVFVLCRASSLAAREPRRRLREMLRDVRGRRRAGAALVGVLVAEAGPEDAVAPGLRLLEALLRAVFGRQAGGPVQAAAYCPGLPASCLAVQAAACRALQAAGAGQPVEGAWERPGLPGLLACFSWGPWSRRKNQDVAACRSSAQEDFQEPEEELPLTAIFPNGDCDDLGRGSKACDGVVHTPAEPTGDSR

SEQ ID NO: 25359 - protein, 295 aa, Homo sapiens; identical to SEQ ID NO: 25358
  REGION 1..295: note = ENSP00000362743

SEQ ID NO: 25360 - protein, 223 aa, Homo sapiens
  REGION 1..223: note = ENSP00000417971
MQVSNGFSQELALFGQHKIEDAAITYVSENEEIKHEEKPGKSIHHSKSHVGRGRIYYAKFINTNARTYNEPFPYIDPKKGPEIQGDWWSHGKALEPVFLPPYDSKSTQRSDFQKPSCPLVLPVKHSKMQKPSCGIVPLASPGTSAELQNNFIEYISFIHQYDARKTPNEPLQGKRHGAFVQREIKPGSRPTVPKGAEVLLNTPGSRSSEQSKKTEKGNSAESR

SEQ ID NO: 25361 - protein, 113 aa, Homo sapiens
  REGION 1..113: note = ENSP00000385348
MEEKEDKHQQHKIEDAAITYGDWWSHGKALEPVFLPPYDSKSTQRSDFQKPSCPLVLPVKHSKMQKPSCGIDETLRKGAKTVTVVLCHSAGRKGTERSRACFFRWFHAILFSP

SEQ ID NO: 25362 - protein, 287 aa, Homo sapiens
  REGION 1..287: note = ENSP00000381631
MEEKEDKHQQHKIEDAAITYVSENEEIKHEEKPGKSIHHSKSHVGRGRIYYAKFINTNARTYNEPFPYIDPKKGPEIQGDWWSHGKALEPVFLPPYDSKSTQRSDFQKPSCPLVLPVKHSKMQKPSCGIVPLASPGTSAELQNNFIEYISFIHQYDARKTPNEPLQGKRHGAFVQREIKPGSRPTVPKGAEVLLNTPGSRSSEQSKKTEKGNSAESRMISPGLCQQNSQELLEPKTHLSETDVRQAAKACPSTPESREKTSGATQTTVGDALFTRHKPLNPPIKKSE

SEQ ID NO: 25363 - protein, 59 aa, Homo sapiens
  REGION 1..59: note = ENSP00000325555
MEEKEDKHQVTGGHMVKHWNLSSYHLTTLRAPRGVTSKNHRVHWFCQSNTARCKSLLVE

SEQ ID NO: 25364 - protein, 211 aa, Homo sapiens
  REGION 1..211: note = ENSP00000389570
MEEKEDKHQQHKIEDAAITYGDWWSHGKALEPVFLPPYDSKSTQRSDFQKPSCPLVLPVKHSKMQKPSCGIVPLASPGTSAELQNNFIEYISFIHQYDARKTPNEPLQGKRHGAFVQREIKPGSRPTVPKGAEVLLNTPGSRSSEQSKKTEKGNSAESRMISPGLCQQNSQELLEPKTHLSETDVRQAAKACPSTPESREKTSGATQTTVG

SEQ ID NO: 25365 - protein, 82 aa, Homo sapiens
  REGION 1..82: note = ENSP00000403195
  VARIANT 1: note = Any amino acid
XEDKHQQHKIEDAAITYGDWWSHGKALEPVFLPPYDSKSTQRSDFQKPSCPLVLPVKHSKMQKPSCGIETRSFCTERDKTRQ

SEQ ID NO: 25366 - protein, 70 aa, Homo sapiens
  REGION 1..70: note = ENSP00000481108
MISPGLCQQNSQELLEPKTHLSETDVRQAAKACPSTPESREKTSGATQTTVGDALFTRHKPLNPPIKKSE

SEQ ID NO: 25367 - protein, 1663 aa, Homo sapiens
  REGION 1..1663: note = ENSP00000245907
MGPTSGPSLLLLLLTHLPLALGSPMYSIITPNILRLESEETMVLEAHDAQGDVPVTVTVHDFPGKKLVLSSEKTVLTPATNHMGNVTFTIPANREFKSEKGRNKFVTVQATFGTQVVEKVVLVSLQSGYLFIQTDKTIYTPGSTVLYRIFTVNHKLLPVGRTVMVNIENPEGIPVKQDSLSSQNQLGVLPLSWDIPELVNMGQWKIRAYYENSPQQVFSTEFEVKEYVLPSFEVIVEPTEKFYYIYNEKGLEVTITARFLYGKKVEGTAFVIFGIQDGEQRISLPESLKRIPIEDGSGEVVLSRKVLLDGVQNPRAEDLVGKSLYVSATVILHSGSDMVQAERSGIPIVTSPYQIHFTKTPKYFKPGMPFDLMVFVTNPDGSPAYRVPVAVQGEDTVQSLTQGDGVAKLSINTHPSQKPLSITVRTKKQELSEAEQATRTMQALPYSTVGNSNNYLHLSVLRTELRPGETLNVNFLLRMDRAHEAKIRYYTYLIMNKGRLLKAGRQVREPGQDLVVLPLSITTDFIPSFRLVAYYTLIGASGQREVVADSVWVDVKDSCVGSLVVKSGQSEDRQPVPGQQMTLKIEGDHGARVVLVAVDKGVFVLNKKNKLTQSKIWDVVEKADIGCTPGSGKDYAGVFSDAGLTFTSSSGQQTAQRAELQCPQPAARRRRSVQLTEKRMDKVGKYPKELRKCCEDGMRENPMRFSCQRRTRFISLGEACKKVFLDCCNYITELRRQHARASHLGLARSNLDEDIIAEENIVSRSEFPESWLWNVEDLKEPPKNGISTKLMNIFLKDSITTWEILAVSMSDKKGICVADPFEVTVMQDFFIDLRLPYSVVRNEQVEIRAVLYNYRQNQELKVRVELLHNPAFCSLATTKRRHQQTVTIPPKSSLSVPYVIVPLKTGLQEVEVKAAVYHHFISDGVRKSLKVVPEGIRMNKTVAVRTLDPERLGREGVQKEDIPPADLSDQVPDTESETRILLQGTPVAQMTEDAVDAERLKHLIVTPSGCGEQNMIGMTPTVIAVHYLDETEQWEKFGLEKRQGALELIKKGYTQQLAFRQPSSAFAAFVKRAPSTWLTAYVVKVFSLAVNLIAIDSQVLCGAVKWLILEKQKPDGVFQEDAPVIHQEMIGGLRNNNEKDMALTAFVLISLQEAKDICEEQVNSLPGSITKAGDFLEANYMNLQRSYTVAIAGYALAQMGRLKGPLLNKFLTTAKDKNRWEDPGKQLYNVEATSYALLALLQLKDFDFVPPVVRWLNEQRYYGGGYGSTQATFMVFQALAQYQKDAPDHQELNLDVSLQLPSRSSKITHRIHWESASLLRSEETKENEGFTVTAEGKGQGTLSVVTMYHAKAKDQLTCNKFDLKVTIKPAPETEKRPQDAKNTMILEICTRYRGDQDATMSILDISMMTGFAPDTDDLKQLANGVDRYISKYELDKAFSDRNTLIIYLDKVSHSEDDCLAFKVHQYFNVELIQPGAVKVYAYYNLEESCTRFYHPEKEDGKLNKLCRDELCRCAEENCFIQKSDDKVTLEERLDKACEPGVDYVYKTRLVKVQLSNDFDEYIMAIEQTIKSGSDEVQVGQQRTFISPIKCREALKLEEKKHYLMWGLSSDFWGEKPNLSYIIGKDTWVEHWPEEDECQDEENQKQCQDLGAFTESMVVFGCPN

SEQ ID NO: 25368 - protein, 100 aa, Homo sapiens
  REGION 1..100: note = ENSP00000469482
  VARIANT 1: note = Any amino acid
XFIQKSDDKVTLEERLDKACEPGVDYVYKTRLVKVQLSNDFDEYIMAIEQTIKSGSDEVQVGQQRTFISPIKCREALKLEEKKHYLMWGLSSDFWGEKPK

SEQ ID NO: 25369 - protein, 101 aa, Homo sapiens
  REGION 1..101: note = ENSP00000471384
NNEKDMALTAFVLISLQEAKDICEEQVNSLPGSITKAGDFLEANYMNLQRSYTVAIAGYALAQMGRLKGPLLNKFLTTAKDEENQKQCQDLGAFTESMVVF

SEQ ID NO: 25370 - protein, 192 aa, Homo sapiens
  REGION 1..192: note = ENSP00000469744
ITHRIHWESASLLRSEETKENEGFTVTAEGKGQGTLSVVTMYHAKAKDQLTCNKFDLKVTIKPAPETGIPSPIFLSSVFLEKRPQDAKNTMILEICTRYRGDQDATMSILDISMMTGFAPDTDDLKQLANGVDRYISKYELDKAFSDRNTLIIYLDKVSHSEDDCLAFKVHQYFNVELIQPGAVKVYAYYNL

SEQ ID NO: 25371 - protein, 103 aa, Homo sapiens
  REGION 1..103: note = ENSP00000472044
MVLEAHDAQGDVPVTVTVHDFPGKKLVLSSEKTVLTPATNHMGNVTFTIPANREFKSEKGRNKFVTVQATFGTQVVEKVVLVSLQSGYLFIQTDKTIYTPGST

SEQ ID NO: 25372 - protein, 233 aa, Homo sapiens
  REGION 1..233: note = ENSP00000350818
MDQEEGLKALDNIVTQFNAYEDFLDSQITTVDLYYLEDETLARQLVELGYRGTGERVKREDFEARKAAIEIARLAERAQQKTLTSAGKDLQDNFLTALAMREEDNRSGKLSSVIFIRDRNSHGQEISGYIDYAHRLKTEDFEVYFTGKKRLLPRPTDISFYNWDADIAVSNSSPNYQVIADNPEGLLFRYKRDRKILNVDPKAQPGDNSTRITILTELYVQAVIFDHISRRKT

SEQ ID NO: 25373 - protein, 86 aa, Homo sapiens
  REGION 1..86: note = ENSP00000426308
MDQEEGLKALDNIVTQFNAYEDFLDSQITTVDLYYLEDETLARQLVELGYRGTGERVKREDFEARKAAIEIARLAERAQQKCQTLS

SEQ ID NO: 25374 - protein, 156 aa, Homo sapiens
  REGION 1..156: note = ENSP00000422569
MDQEEGLKALDNIVTQFNAYEDFLDSQITTVDLYYLEDETLARQLVELGYRGTGERVKREDFEARKAAIEIARLAERAQQKTLTSAGKDLQDNFLTALAMREEDNRSGKLSAGVQWHHLGSLQPLPPGFKEFSCFSLPSSWDYRHAPPHPVRDLYS

SEQ ID NO: 25375 - protein, 250 aa, Homo sapiens
  REGION 1..250: note = ENSP00000425786
MDQEEGLKALDNIVTQFNAYEDFLDSQITTVDLYYLEDETLARQLVELGYRGTGERVKREDFEARKAAIEIARLAERAQQKTLTSAGKDLQDNFLTALAMREEDNRSGKLSLNQQETDAAHILKKQLASVIFIRDRNSHGQEISGYIDYAHRLKTEDFEVYFTGKKRLLPRPTDISFYNWDADIAVSNSSPNYQVIADNPEGLLFRYKRDRKILNVDPKAQPGDNSTRITILTELYVQAVIFDHISRRKT

SEQ ID NO: 25376 - protein, 75 aa, Homo sapiens
  REGION 1..75: note = ENSP00000480723
SFYNWDADIAVSNSSPNYQVIADNPEGLLFRYKRDRKILNVDPKAQPGDNSTRITILTELYVQAVIFDHISRRKT

SEQ ID NO: 25377 - protein, 199 aa, Homo sapiens
  REGION 1..199: note = ENSP00000281146
MDFKIEHTWDGFPVKHEPVFIRLNPGDRGVMMDISAPFFRDPPAPLGEPGKPFNELWDYEVVEAFFLNDITEQYLEVELCPHGQHLVLLLSGRRNVWKQELPLSFRMSRGETKWEGKAYLPWSYFPPNVTKFNSFAIHGSKDKRSYEALYPVPQHELQQGQKPDFHCLEYFKSFNFNTLLGEEWKQPESDLWLIEKCDI

SEQ ID NO: 25378 - protein, 165 aa, Homo sapiens
  REGION 1..165: note = ENSP00000427406
MDFKIEHTWDGFPVKHEPVFIRLNPGDRGVMMDISAPFFRDPPAPLGEPGKPFNELWDYEVVEAFFLNDITEQYLEVELCPHGQHLVLLLSGRRNVWKQELPLSFRMSRGETKWEGKAYLPWSYFPPNVTKFNSFAIHGSKDKRSYEALYPVPQHELQQGQKPDL

SEQ ID NO: 25379 - protein, 102 aa, Homo sapiens
  REGION 1..102: note = ENSP00000427096
MDFKIEHTWDGFPVKHEPVFIRLNPGDRGVMMDISAPFFRDPPAPLGEPGKPFNELWDYEVVEAFFLNDITEQYLEVELCPKNFLYRSECPEERQNGKAKLI

SEQ ID NO: 25380 - protein, 64 aa, Homo sapiens
  REGION 1..64: note = ENSP00000427431
MDFKIEHTWDGFPVKHEPVFIRLNPGDRGVMMDISAPFFRDPPAPLGEPGKPFNELWDYEVVEA

SEQ ID NO: 25381 - protein, 199 aa, Homo sapiens; identical to SEQ ID NO: 25377
  REGION 1..199: note = ENSP00000401090

SEQ ID NO: 25382 - protein, 298 aa, Homo sapiens
  REGION 1..298: note = ENSP00000363135
MEGMDVDLDPELMQKFSCLGTTDKDVLISEFQRLLGFQLNPAGCAFFLDMTNWNLQAAIGAYYDFESPNISVPSMSFVEDVTIGEGESIPPDTQFVKTWRIQNSGAEAWPPGVCLKYVGGDQFGHVNMVMVRSLEPQEIADVSVQMCSPSRAGMYQGQWRMCTATGLYYGDVIWVILSVEVGGLLGVTQQLSSFETEFNTQPHRKVEGNFNPFASPQKNRQSDENNLKDPGGSEFDSISKNTWAPAPDTWAPAPDQTEQDQNRLSQNSVNLSPSSHANNLSVVTYSKGLHGPYPFGQS

SEQ ID NO: 25383 - protein, 232 aa, Homo sapiens
  REGION 1..232: note = ENSP00000363138
MEGMDVDLDPELMQKFSCLGTTDKDVLISEFQRLLGFQLNPAGCAFFLDMTNWNLQAAIGAYYDFESPNISVPSMSFVEDVTIGEGESIPPDTQFVKTWRIQNSDVIWVILSVEVGGLLGVTQQLSSFETEFNTQPHRKVEGNFNPFASPQKNRQSDENNLKDPGGSEFDSISKNTWAPAPDTWAPAPDQTEQDQNRLSQNSVNLSPSSHANNLSVVTYSKGLHGPYPFGQS

SEQ ID NO: 25384 - protein, 224 aa, Homo sapiens
  REGION 1..224: note = ENSP00000363133
MSFVEDVTIGEGESIPPDTQFVKTWRIQNSGAEAWPPGVCLKYVGGDQFGHVNMVMVRSLEPQEIADVSVQMCSPSRAGMYQGQWRMCTATGLYYGDVIWVILSVEVGGLLGVTQQLSSFETEFNTQPHRKVEGNFNPFASPQKNRQSDENNLKDPGGSEFDSISKNTWAPAPDTWAPAPDQTEQDQNRLSQNSVNLSPSSHANNLSVVTYSKGLHGPYPFGQS

SEQ ID NO: 25385 - protein, 538 aa, Homo sapiens
  REGION 1..538: note = ENSP00000427820
MSSPLASELSELAALRPGFRLSAPHARVAPRAATHARGRGRASHAGQPRLRSSCPGPSPGKRRVVPSGGAQPRVLPALSSRSHLFPMASHPQTRIQAYLEKNKIGPLFEELMTKLITETPDQPIPFLIDHLQSKQGNRGQLQRTLSGSAALWAESEKSESKGTRRDFRSYDKPWQLNAKKPKKSKSDLAVSNISPPSPDSKSLPRSVEHPKWNWRTKPQSRDFDELNHILQESKKLGKALENLSRSIAISDELDKETVTFNSSLLRPRVIGEWIGREENDADPLAAEMLQPPIPRSKNDQWESEDSGSSPAGSLKMEPKNKGLKQQQQQHKKLLAAMLSQDSFESIHSPTPSVTEEDIDNEDDAMELLEDLNDLRMEGVTTLVPSGSKFNQGRPTYPAEPQAKVTLNICSRCARLQGDNLEERTEESLPILHSPDEKIPDSFDSLPGTEEALMEEGDEFEKASKLTGPGEASSGVGHSLKNYMEEDESLKQLQVVHQPWILPSDTESEGVEAEQEKRSADLLLCVPCSSCPTLVYSGL

SEQ ID NO: 25386 - protein, 129 aa, Homo sapiens
  REGION 1..129: note = ENSP00000429102
MASHPQTRIQAYLEKNKIGPLFEELMTKLITETPDQPIPFLIDHLQSKQGNRGQLQRTLSGSAALWAESEKSESKGTRRDFRSYDKPWQLNAKKPKKSKSDLAVSNISPPSPDSKSCKEVSYSNAIQSM

SEQ ID NO: 25387 - protein, 287 aa, Homo sapiens
  REGION 1..287: note = ENSP00000345255
MASHPQTRIQAYLEKNKIGPLFEELMTKLITETPDQPIPFLIDHLQSKQGNRGQLQRTLSGSAALWAESEKSESKGTRRDFRSYDKPWQLNAKKPKKSKSDLAVSNISPPSPDSKSLPRSVEHPKWNWRTKPQSRDFDELNHILQESKKLGKALENLSRSIAISDELDKETVTFNSSLLRPRVIGEWIGREENDADPLAAEMLQPPIPRSKNDQWESEDSGSSPAGSLKMEPKNKGLKQQQQQHKKLLAAMLSQDSFESIHSPTPSVTEEDIDNEDDAMELLGNFKN

SEQ ID NO: 25388 - protein, 427 aa, Homo sapiens
  REGION 1..427: note = ENSP00000337174
MTKLITETPDQPIPFLIDHLQSKQGNRGQLQRTLSGSAALWAESEKSESKGTRRDFRSYDKPWQLNAKKPKKSKSDLAVSNISPPSPDSKSLPRSVEHPKWNWRTKPQSRDFDELNHILQESKKLGKALENLSRSIAISDELDKETVTFNSSLLRPRVIGEWIGREENDADPLAAEMLQPPIPRSKNDQWESEDSGSSPAGSLKMEPKNKGLKQQQQQHKKLLAAMLSQDSFESIHSPTPSVTEEDIDNEDDAMELLEDLNDLRMEGVTTLVPSGSKFNQGRPTYPAEPQAKVTLNICSRCARLQGDNLEERTEESLPILHSPDEKIPDSFDSLPGTEEALMEEGDEFEKASKLTGPGEASSGVGHSLKNYMEEDESLKQLQVVHQPWILPSDTESEGVEAEQEKRSADLLLCVPCSSCPTLVYSGL

SEQ ID NO: 25389 - protein, 206 aa, Homo sapiens
  REGION 1..206: note = ENSP00000429081
MTKLITETPDQPIPFLIDHLQSKQGNRGQLQRTLSGSAALWAESEKSESKGTRRDFRSYDKPWQLNAKKPKKSKSDLAVSNISPPSPDSKSLPRSVEHPKWNWRTKPQSRDFDELNHILQESKKLGKALENLSRSIAISDELDKETVTFNSSLLRPRVIGEWIGREENDADPLAAEMLQPPIPRSKNDQWESEDSGSSPAGSLEDT

SEQ ID NO: 25390 - protein, 201 aa, Homo sapiens
  REGION 1..201: note = ENSP00000319532
MENGFTMCQTGRQHPVACGLHLSGGKEDLNDLRMEGVTTLVPSGSKFNQGRPTYPAEPQAKVTLNICSRCARLQGDNLEERTEESLPILHSPDEKIPDSFDSLPGTEEALMEEGDEFEKASKLTGPGEASSGVGHSLKNYMEEDESLKQLQVVHQPWILPSDTESEGVEAEQEKHLLNQNLCGWDSEFCIFHTLASFLIYK

SEQ ID NO: 25391 - protein, 207 aa, Homo sapiens
  REGION 1..207: note = ENSP00000302260
MMHQIYSCSDENIEVFTTVIPSKVSSPARRRAKSSQHLLTKNVVIESDLYTHQPLELLPHRGDRRDPGDRRRFGRLQTARPPTAHPAKASARPVGISEPKTSNLCGNRAYGKSLIPPVPRISVKTSASASLEATAMGTEKGAVLMRGSRHLKKMTEEYPALPQGAEASLPLTGSASCGVPGILRKMWTRHKKKSEYVGATNSAFEAD

SEQ ID NO: 25392 - protein, 122 aa, Homo sapiens
  REGION 1..122: note = ENSP00000430501
MMHQIYSCSDENIEVFTTVIPSKVSSPARRRAKSSQHLLTKNVVIESDLYTHQPLELLPHRGDRRDPGDRRRFGRLQTARPPTAHPAKASARPVGISEPKTSNLCGNRAYGKSLIQTSQEDD

SEQ ID NO: 25393 - protein, 77 aa, Homo sapiens
  REGION 1..77: note = ENSP00000430388
MMHQIYSCSDENIEVFTTVIPSKVSSPARRRAKSSQHLLTKNILSLFLEFTGITKDPETPSMRAPSAKLLPWGSMGP

SEQ ID NO: 25394 - protein, 48 aa, Homo sapiens
  REGION 1..48: note = ENSP00000473681
MMHQIYSCSDENIEVFTTVIPSKVSSPARRRAKSSQHLLTKNTLLDQG

SEQ ID NO: 25395 - protein, 134 aa, Homo sapiens
  REGION 1..134: note = ENSP00000430141
MMHQIYSCSDENIEVFTTVIPSKVSSPARRRAKSSQHLLTKNVVIESDLYTHQPLELLPHRGDRRDPGDRRRFGRLQTARPPTAHPAKASARPDTASAPDLSENFSLCLIGGDSHGHREGSCSDERIQTSQEDD

SEQ ID NO: 25396 - protein, 147 aa, Homo sapiens
  REGION 1..147: note = ENSP00000429883
MMHQIYSCSDENIEVFTTVIPSKVSSPARRRAKSSQHLLTKNVVIESDLYTHQPLELLPHRGDRRDPGDRRRFGRLQTARPPTAHPAKASARPVGISEPKTSNLCGNRAYGKSLIPPVPRISVKTSASASLEATAMGTEKGAVLMRG

SEQ ID NO: 25397 - protein, 207 aa, Homo sapiens; identical to SEQ ID NO: 25391
  REGION 1..207: note = ENSP00000302260

SEQ ID NO: 25398 - protein, 122 aa, Homo sapiens; identical to SEQ ID NO: 25392
  REGION 1..122: note = ENSP00000430501

SEQ ID NO: 25399 - protein, 77 aa, Homo sapiens; identical to SEQ ID NO: 25393
  REGION 1..77: note = ENSP00000430388

SEQ ID NO: 25400 - protein, 48 aa, Homo sapiens; identical to SEQ ID NO: 25394
  REGION 1..48: note = ENSP00000473681

SEQ ID NO: 25401 - protein, 134 aa, Homo sapiens; identical to SEQ ID NO: 25395
  REGION 1..134: note = ENSP00000430141

SEQ ID NO: 25402 - protein, 147 aa, Homo sapiens; identical to SEQ ID NO: 25396
  REGION 1..147: note = ENSP00000429883

SEQ ID NO: 25403 - protein, 229 aa, Homo sapiens
  REGION 1..229: note = ENSP00000366402
MDSLDRSCQDWCDRKQHWLEIGPPDLVERKGSLTLRSHHKKYSKPVLVYSWHRDREAFPKGYDIEGPEKVKKLCNSTYRRLGTDESPIWTSETHEKLSQMCLNTEWVEMKSKALLNEETVSSGIIERVTGLPATGFGAVFPRHPPDWSKMCALTTYSEDYVPPYDYQPHAYPCQDDYSIVHRKCRSQFTDLNGSKRFGINTWHDESGIYANSDVKQKLYPLTSGPIVPI

SEQ ID NO: 25404 - protein, 159 aa, Homo sapiens
  REGION 1..159: note = ENSP00000431855
MDSLDRSCQDWCDRKQHWLEIGPPDLVERKGSLTLRSHHKKYSKPVLVYSWHRDREAFPKGYDIEGPEKVKKLCNSTYRRLGTDESPIWTSETHEKLSQMCLNTEWVEMKSKALLNEETVSSGIIERVTGLPATGFGAVFPRHPPDWSKMLIPVKMIIP

SEQ ID NO: 25405 - protein, 50 aa, Homo sapiens
  REGION 1..50: note = ENSP00000434032
MDSLDRSCQDWCDRKQHWLEIGPPDLVERKGSLTLRSHHKKYSKPVLVYS

SEQ ID NO: 25406 - protein, 50 aa, Homo sapiens; identical to SEQ ID NO: 25405
  REGION 1..50: note = ENSP00000436701

SEQ ID NO: 25407 - protein, 37 aa, Homo sapiens
  REGION 1..37: note = ENSP00000433973
  VARIANT 1: note = Any amino acid
XKQHWLEIGPPDLVERKGSLTLRSHHKKYSKPVLVYS

SEQ ID NO: 25408 - protein, 149 aa, Homo sapiens
  REGION 1..149: note = ENSP00000433123
  VARIANT 1: note = Any amino acid
XERKGSLTLRSHHKKYSKPVLVYSWHRDREAFPKGYDIEGPEKVKKLCNSTYRRLGTDESPIWTSETHEKLSQMCLNTEWVEMKSKALLNEETVSSGIIERVTGLPATGFGAVFPRHPPDWSKMLVVPKLLQLYKMFLDSEGLFAGAKV

SEQ ID NO: 25409 - protein, 481 aa, Homo sapiens
  REGION 1..481: note = ENSP00000369339
MSTLCPPPSPAVAKTEIALSGKSPLLAATFAYWDNILGPRVRHIWAPKTEQVLLSDGEITFLANHTLNGEILRNAESGAIDVKFFVLSEKGVIIVSLIFDGNWNGDRSTYGLSIILPQTELSFYLPLHRVCVDRLTHIIRKGRIWMHKERQENVQKIILEGTERMEDQGQSIIPMLTGEVIPVMELLSSMKSHSVPEEIDIADTVLNDDDIGDSCHEGFLLNAISSHLQTCGCSVVVGSSAEKVNKIVRTLCLFLTPAERKCSRLCEAESSFKYESGLFVQGLLKDSTGSFVLPFRQVMYAPYPTTHIDVDVNTVKQMPPCHEHIYNQRRYMRSELTAFWRATSEEDMAQDTIIYTDESFTPDLNIFQDVLHRDTLVKAFLDQVFQLKPGLSLRSTFLAQFLLVLHRKALTLIKYIEDDTQKGKKPFKSLRNLKIDLDLTAEGDLNIIMALAEKIKPGLHSFIFGRPFYTSVQERDVLMTF

SEQ ID NO: 25410 - protein, 222 aa, Homo sapiens
  REGION 1..222: note = ENSP00000369333
MSTLCPPPSPAVAKTEIALSGKSPLLAATFAYWDNILGPRVRHIWAPKTEQVLLSDGEITFLANHTLNGEILRNAESGAIDVKFFVLSEKGVIIVSLIFDGNWNGDRSTYGLSIILPQTELSFYLPLHRVCVDRLTHIIRKGRIWMHKERQENVQKIILEGTERMEDQGQSIIPMLTGEVIPVMELLSSMKSHSVPEEIDIADTVLNDDDIGDSCHEGFLLK

SEQ ID NO: 25411 - protein, 222 aa, Homo sapiens; identical to SEQ ID NO: 25410
  REGION 1..222: note = ENSP00000369331

SEQ ID NO: 25412 - protein, 481 aa, Homo sapiens; identical to SEQ ID NO: 25409
  REGION 1..481: note = ENSP00000482753

SEQ ID NO: 25413 - protein, 264 aa, Homo sapiens [sequence omitted]

SEQ ID NO: 25414 - protein, 44 aa, Homo sapiens
  REGION 1..44: note = ENSP00000447178
MSLSITNNGHSVQVDFNDSDDRTAASGSLECQEVQHFWGGGLST

SEQ ID NO: 25415 - protein, 208 aa, Homo sapiens
  REGION 1..208: note = ENSP00000377632
MSLSITNNGHSVQVDFNDSDDRTVVTGGPLEGPYRLKQFHFHWGKKHDVGSEHTVDGKSFPSELHLVHWNAKKYSTFGEAASAPDGLAVVGVFLETGDEHPSMNRLTDALYMVRFKGTKAQFSCFNPKCLLPASRHYWTYPGSLTTPPLSESVTWIVLREPICISERQMGKFRSLLFTSEDDERIHMVNNFRPPQPLKGRVVKASFRA

SEQ ID NO: 25416 - protein, 264 aa, Homo sapiens [sequence omitted]

SEQ ID NO: 25417 - protein, 44 aa, Homo sapiens; identical to SEQ ID NO: 25414
  REGION 1..44: note = ENSP00000447178

SEQ ID NO: 25418 - protein, 208 aa, Homo sapiens; identical to SEQ ID NO: 25415
  REGION 1..208: note = ENSP00000377632

SEQ ID NO: 25419 - protein, 337 aa, Homo sapiens
  REGION 1..337: note = ENSP00000348113
MKKMPLFSKSHKNPAEIVKILKDNLAILEKQDKKTDKASEEVSKSLQAMKEILCGTNEKEPPTEAVAQLAQELYSSGLLVTLIADLQLIDFEGKKDVTQIFNNILRRQIGTRSPTVEYISAHPHILFMLLKGYEAPQIALRCGIMLRECIRHEPLAKIILFSNQFRDFFKYVELSTFDIASDAFATFKDLLTRHKVLVADFLEQNYDTIFEDYEKLLQSENYVTKRQSLKLLGELILDRHNFAIMTKYISKPENLKLMMNLLRDKSPNIQFEAFHVFKVFVASPHKTQPIVEILLKNQPKLIEFLSSFQKERTDDEQFADEKNYLIKQIRDLKKTAP

SEQ ID NO: 25420 - protein, 337 aa, Homo sapiens; identical to SEQ ID NO: 25419
  REGION 1..337: note = ENSP00000386375

SEQ ID NO: 25421 - protein, 193 aa, Homo sapiens
  REGION 1..193: note = ENSP00000387245
MLRECIRHEPLAKIILFSNQFRDFFKYVELSTFDIASDAFATFKDLLTRHKVLVADFLEQNYDTIFEDYEKLLQSENYVTKRQSLKLLGELILDRHNFAIMTKYISKPENLKLMMNLLRDKSPNIQFEAFHVFKVFVASPHKTQPIVEILLKNQPKLIEFLSSFQKERTDDEQFADEKNYLIKQIRDLKKTAP

SEQ ID NO: 25422 - protein, 280 aa, Homo sapiens
  REGION 1..280: note = ENSP00000416719
ASEEVSKSLQAMKEILCGTNEKEPPTEAVAQLAQELYSSGLLVTLIADLQLIDFEGKKDVTQIFNNILRRQIGTRSPTVEYISAHPHILFMLLKGYEAPQIALRCGIMLRECIRHEPLAKIILFSNQFRDFFKYVELSTFDIASDAFATFKIFEDYEKLLQSENYVTKRQSLKLLGELILDRHNFAIMTKYISKPENLKLMMNLLRDKSPNIQFEAFHVFKVFVASPHKTQPIVEILLKNQPKLIEFLSSFQKERTDDEQFADEKNYLIKQIRDLKKTAP

SEQ ID NO: 25423 - protein, 337 aa, Homo sapiens; identical to SEQ ID NO: 25419
  REGION 1..337: note = ENSP00000386328

SEQ ID NO: 25424 - protein, 188 aa, Homo sapiens
  REGION 1..188: note = ENSP00000409253
MKKMPLFSKSHKNPAEIVKILKDNLAILEKQDKKTDKASEEVSKSLQAMKEILCGTNEKEPPTEAVAQLAQELYSSGLLVTLIADLQLIDFEGKKDVTQIFNNILRRQIGTRSPTVEYISAHPHILFMLLKGYEAPQIALRCGIMLRECIRHEPLAKIILFSNQFRDFFKYVELSTFDIASDAFATFK

SEQ ID NO: 25425 - protein, 128 aa, Homo sapiens
  REGION 1..128: note = ENSP00000404028
MKKMPLFSKSHKNPAEIVKILKDNLAILEKQDKKTDKASEEVSKSLQAMKEILCGTNEKEPPTEAVAQLAQELYSSGLLVTLIADLQLIDFEGKKDVTQIFNNILRRQIGTRSPTVEYISAHPHILFM

SEQ ID NO: 25426 - protein, 93 aa, Homo sapiens
  REGION 1..93: note = ENSP00000386979
MKKMPLFSKSHKNPAEIVKILKDNLAILEKQDKKTDKASEEVSKSLQAMKEILCGTNEKEPPTEAVAQLAQELYSSGLLVTLIADLQLIDFEV

SEQ ID NO: 25427 - protein, 337 aa, Homo sapiens; identical to SEQ ID NO: 25419
  REGION 1..337: note = ENSP00000479669

SEQ ID NO: 25428 - protein, 337 aa, Homo sapiens; identical to SEQ ID NO: 25419
  REGION 1..337: note = ENSP00000261669

SEQ ID NO: 25429 - protein, 357 aa, Homo sapiens
  REGION 1..357: note = ENSP00000394209
MIRIAALNASSTIEDDHEGSFKSHKTQTKEAQEAEAFALYHKALDLQKHDRFEESAKAYHELLEASLLREAVMLDSTDVNLWYKIGHVALRLIRIPLARHAFEEGLRCNPDHWPCLDNLITVLYTLSDYTTCLYFICKALEKDCRYSKGLVLKEKIFEEQPCLRKDSLRMFLKCDMSIHDVSVSAAETQAIVDEALGLRKKRQALIVREKEPDLKLVQPIPFFTWKCLGESLLAMYNHLTTCEPPRPSLGKRIDLSDYQDPSQPLESSMVVTPVNVIQPSTVSTNPAVAVAEPVVSYTSVATTSFPLHSPGLLETGAPVGDISGGDKSKKGVKRKKISEESGETAKRRSARVRNTKC

SEQ ID NO: 25430 - protein, 2220 aa, Homo sapiens
  REGION 1..2220: note = ENSP00000263119
MIRIAALNASSTIEDDHEGSFKSHKTQTKEAQEAEAFALYHKALDLQKHDRFEESAKAYHELLEASLLREAVSSGDEKEGLKHPGLILKYSTYKNLAQLAAQREDLETAMEFYLEAVMLDSTDVNLWYKIGHVALRLIRIPLARHAFEEGLRCNPDHWPCLDNLITVLYTLSDYTTCLYFICKALEKDCRYSKGLVLKEKIFEEQPCLRKDSLRMFLKCDMSIHDVSVSAAETQAIVDEALGLRKKRQALIVREKEPDLKLVQPIPFFTWKCLGESLLAMYNHLTTCEPPRPSLGKRIDLSDYQDPSQPLESSMVVTPVNVIQPSTVSTNPAVAVAEPVVSYTSVATTSFPLHSPGLLETGAPVGDISGGDKSKKGVKRKKISEESGETAKRRSARVRNTKCKKEEKVDFQELLMKFLPSRLRKLDPEEEDDSFNNYEVQSEAKLESFPSIGPQRLSFDSATFMESEKQDVHEFLLENLTNGGILELMMRYLKAMGHKFLVRWPPGLAEVVLSVYHSWRRHSTSLPNPLLRDCSNKHIKDMMLMSLSCMELQLDQWLLTKGRSSAVSPRNCPAGMVNGRFGPDFPGTHCLGDLLQLSFASSQRDLFEDGWLEFVVRVYWLKARFLALQGDMEQALENYDICTEMLQSSTAIQVEAGAERRDIVIRLPNLHNDSVVSLEEIDKNLKSLERCQSLEEIQRLYEAGDYKAVVHLLRPTLCTSGFDRAKHLEFMTSIPERPAQLLLLQDSLLRLKDYRQCFECSDVALNEAVQQMVNSGEAAAKEEWVATVTQLLMGIEQALSADSSGSILKVSSSTTGLVRLTNNLIQVIDCSMAVQEEAKEPHVSSVLPWIILHRIIWQEEDTFHSLCHQQQLQNPAEEGMSETPMLPSSLMLLNTAHEYLGRRSWCCNSDGALLRFYVRVLQKELAASTSEDTHPYKEELETALEQCFYCLYSFPSKKSKARYLEEHSAQQVDLIWEDALFMFEYFKPKTLPEFDSYKTSTVSADLANLLKRIATIVPRTERPALSLDKVSAYIEGTSTEVPCLPEGADPSPPVVNELYYLLADYHFKNKEQSKAIKFYMHDICICPNRFDSWAGMALARASRIQDKLNSNELKSDGPIWKHATPVLNCFRRALEIDSSNLSLWIEYGTMSYALHSFASRQLKQWRGELPPELVQQMEGRRDSMLETAKHCFTSAARCEGDGDEEEWLIHYMLGKVAEKQQQPPTVYLLHYRQAGHYLHEEAARYPKKIHYHNPPELAMEALEVYFRLHASILKLLGKPDSGVGAEVLVNFMKEAAEGPFARGEEKNTPKASEKEKACLVDEDSHSSAGTLPGPGASLPSSSGPGLTSPPYTATPIDHDYVKCKKPHQQATPDDRSQDSTAVALSDSSSTQDFFNEPTSLLEGSRKSYTEKRLPILSSQAGATGKDLQGATEERGKNEESLESTEGFRAAEQGVQKPAAETPASACIPGKPSASTPTLWDGKKRGDLPGEPVAFPQGLPAGAEEQRQFLTEQCIASFRLCLSRFPQHYKSLYRLAFLYTYSKTHRNLQWARDVLLGSSIPWQQLQHMPAQGLFCERNKTNFFNGIWRIPVDEIDRPGSFAWHMNRSIVLLLKVLAQLRDHSTLLKVSSMLQRTPDQGKKYLRDADRQVLAQRAFILTVKVLEDTLSELAEGSERPGPKVCGLPGARMTTDVSHKASPEDGQEGLPQPKKPPLADGSGPGPEPGGKVGLLNHRPVAMDAGDSADQSGERKDKESPRAGPTEPMDTSEATVCHSDLERTPPLLPGRPARDRGPESRPTELSLEELSISARQQPTPLTPAQPAPAPAPATTTGTRAGGHPEEPLSRLSRKRKLLEDTESGKTLLLDAYRVWQQGQKGVAYDLGRVERIMSETYMLIKQVDEEAALEQAVKFCQVHLGAAAQRQASGDTPTTPKHPKDSRENFFPVTVVPTAPDPVPADSVQRPSDAHTKPRPALAAATTIITCPPSASASTLDQSKDPGPPRPHRPEATPSMASLGPEGEELARVAEGTSFPPQEPRHSPQVKMAPTSSPAEPHCWPAEAALGTGAEPTCSQEGKLRPEPRRDGEAQEAASETQPLSSPPTAASSKAPSSGSAQPPEGHPGKPEPSRAKSRPLPNMPKLVIPSAATKFPPEITVTPPTPTLLSPKGSISEETKQKLKSAILSAQSAANVRKESLCQPALEVLETSSQESSLESETDEDDDYMDI

SEQ ID NO: 25431 - protein, 2141 aa, Homo sapiens
  REGION 1..2141: note = ENSP00000384694
MIRIAALNASSTIEDDHEGSFKSHKTQTKEAQEAEAFALYHKALDLQKHDRFEESAKAYHELLEASLLREAVSSGDEKEGLKHPGLILKYSTYKNLAQLAAQREDLETAMEFYLEAVMLDSTDVNLWYKIGHVALRLIRIPLARHAFEEGLRCNPDHWPCLDNLITVLYTLSDYTTCLYFICKALEKDCRYSKGLVLKEKIFEEQPCLRKDSLRMFLKCWKCLGESLLAMYNHLTTCEPPRPSLGKRIDLSDYQDPSQPLESSMVVTPVNVIQPSTVSTNPAVAVAEPVVSYTSVATTSFPLHSPGLLETGAPVGDISGGDKSKKGVKRKKISEESGETAKRRSARVRNTKCKKEEKVDFQELLMKFLPSRLRKLDPEEEDDSFNNYEVQSEAKLESFPSIGPQRLSFDSATFMESEKQDVHEFLLENLTNGGILELMMRYLKAMGHKFLVRWPPGLAEVVLSVYHSWRRHSTSLPNPLLRDCSNKHIKDMMLMSLSCMELQLDQWLLTKGRSSAVSPRNCPAGMVNGRFGPDFPGTHCLGDLLQLSFASSQRDLFEDGWLEFVVRVYWLKARFLALQGDMEQALENYDICTEMLQSSTAIQVEAGAERRDIVIRLPNLHNDSVVSLEEIDKNLKSLERCQSLEEIQRLYEAGDYKAVVHLLRPTLCTSGFDRAKHLEFMTSIPERPAQLLLLQDSLLRLKDYRQCFECSDVALNEAVQQMVNSGEAAAKEEWVATVTQLLMGIEQALSADSSGSILKVSSSTTGLVRLTNNLIQVIDCSMAVQEEAKEPHVSSVLPWIILHRIIWQEEDTFHSLCHQQQLQNPAEEGMSETPMLPSSLMLLNTAHEYLGRRSWCCNSDGALLRFYVRVLQKELAASTSEDTHPYKEELETALEQCFYCLYSFPSKKSKARYLEEHSAQQVDLIWEDALFMFEYFKPKTLPEFDSYKTSTVSADLANLLKRIATIVPRTERPALSLDKVSAYIEGTSTEVPCLPEGADPSPPVVNELYYLLADYHFKNKEQSKAIKFYMHDICICPNRFDSWAGMALARASRIQDKLNSNELKSDGPIWKHATPVLNCFRRALEIDSSNLSLWIEYGTMSYALHSFASRQLKQWRGELPPELVQQMEGRRDSMLETAKHCFTSAARCEGDGDEEEWLIHYMLGKVAEKQQQPPTVYLLHYRQAGHYLHEEAARYPKKIHYHNPPELAMEALEVYFRLHASILKLLGKPDSGVGAEVLVNFMKEAAEGPFARGEEKNTPKASEKEKACLVDEDSHSSAGTLPGPGASLPSSSGPDRSQDSTAVALSDSSSTQDFFNEPTSLLEGSRKSYTEKRLPILSSQAGATGKDLQGATEERGKNEESLESTEGFRAAEQGVQKPAAETPASACIPGKPSASTPTLWDGKKRGDLPGEPVAFPQGLPAGAEEQRQFLTEQCIASFRLCLSRFPQHYKSLYRLAFLYTYSKTHRNLQWARDVLLGSSIPWQQLQHMPAQGLFCERNKTNFFNGIWRIPVDEIDRPGSFAWHMNRSIVLLLKVLAQLRDHSTLLKVSSMLQRTPDQGKKYLRDADRQVLAQRAFILTVKVLEDTLSELAEGSERPGPKVCGLPGARMTTDVSHKASPEDGQEGLPQPKKPPLADGSGPGPEPGGKVGLLNHRPVAMDAGDSADQSGERKDKESPRAGPTEPMDTSEATVCHSDLERTPPLLPGRPARDRGPESRPTELSLEELSISARQQPTPLTPAQPAPAPAPATTTGTRAGGHPEEPLSRLSRKRKLLEDTESGKTLLLDAYRVWQQGQKGVAYDLGRVERIMSETYMLIKQVDEEAALEQAVKFCQVHLGAAAQRQASGDTPTTPKHPKDSRENFFPVTVVPTAPDPVPADSVQRPSDAHTKPRPALAAATTIITCPPSASASTLDQSKDPGPPRPHRPEATPSMASLGPEGEELARVAEGTSFPPQEPRHSPQVKMAPTSSPAEPHCWPAEAALGTGAEPTCSQEGKLRPEPRRDGEAQEAASETQPLSSPPTAASSKAPSSGSAQPPEGHPGKPEPSRAKSRPLPNMPKLVIPSAATKFPPEITVTPPTPTLLSPKGSISEETKQKLKSAILSAQSAANVRKESLCQPALEVLETSSQESSLESETDEDDDYMDI

SEQ ID NO: 25432 - protein, 361 aa, Homo sapiens
  REGION 1..361: note = ENSP00000412389
MIRIAALNASSTIEDDHEGSFKSHKTQTKEAQEAEAFALYHKALDLQKHDRFEESAKAYHELLEASLLREAVMLDSTDVNLWYKIGHVALRLIRIPLARHAFEEGLRCNPDHWPCLDNLITVLYTLSDYTTCLYFICKALEKDCRYSKGLVLKEKIFEEQPCLRKDSLRMFLKCDMSIHDVSVSAAETQAIVDEALGLRKKRQALIVREKEPDLKLVQPIPFFTWKCLGESLLAMYNHLTTCEPPRPSLGKRIDLSDYQDPSQPLESSMVVTPVNVIQPSTVSTNPAVAVAEPVVSYTSVATTSFPLHSPGLLETGAPVGDISGGDKSKKGVKRKKISEESGETAKRRSARVRNTKCKKEE

SEQ ID NO: 25433 - protein, 2220 aa, Homo sapiens; identical to SEQ ID NO: 25430
  REGION 1..2220: note = ENSP00000381364

SEQ ID NO: 25434 - protein, 590 aa, Homo sapiens
  REGION 1..590: note = ENSP00000336991
MPRRSRRGIWRIPVDEIDRPGSFAWHMNRSIVLLLKVLAQLRDHSTLLKVSSMLQRTPDQGKKYLRDADRQVLAQRAFILTVKVLEDTLSELAEGSERPGPKVCGLPGARMTTDVSHKASPEDGQEGLPQPKKPPLADGSGPGPEPGGKVGLLNHRPVAMDAGDSADQSGERKDKESPRAGPTEPMDTSEATVCHSDLERTPPLLPGRPARDRGPESRPTELSLEELSISARQQPTPLTPAQPAPAPAPATTTGTRAGGHPEEPLSRLSRKRKLLEDTESGKTLLLDAYRVWQQGQKGVAYDLGRVERIMSETYMLIKQVDEEAALEQAVKFCQVHLGAAAQRQASGDTPTTPKHPKDSRENFFPVTVVPTAPDPVPADSVQRPSDAHTKPRPALAAATTIITCPPSASASTLDQSKDPGPPRPHRPEATPSMASLGPEGKLRPEPRRDGEAQEAASETQPLSSPPTAASSKAPSSGSAQPPEGHPGKPEPSRAKSRPLPNMPKLVIPSAATKFPPEITVTPPTPTLLSPKGSISEETKQKLKSAILSAQSAANVRKESLCQPALEVLETSSQESSLESETDEDDDYMDI

SEQ ID NO: 25435 - protein, 2170 aa, Homo sapiens
  REGION 1..2170: note = ENSP00000480560
MIRIAALNASSTIEDDHEGSFKSHKTQTKEAQEAEAFALYHKALDLQKHDRFEESAKAYHELLEASLLREAVSSGDEKEGLKHPGLILKYSTYKNLAQLAAQREDLETAMEFYLEAVMLDSTDVNLWYKIGHVALRLIRIPLARHAFEEGLRCNPDHWPCLDNLITVLYTLSDYTTCLYFICKALEKDCRYSKGLVLKEKIFEEQPCLRKDSLRMFLKCWKCLGESLLAMYNHLTTCEPPRPSLGKRIDLSDYQDPSQPLESSMVVTPVNVIQPSTVSTNPAVAVAEPVVSYTSVATTSFPLHSPGLLETGAPVGDISGGDKSKKGVKRKKISEESGETAKRRSARVRNTKCKKEEKVDFQELLMKFLPSRLRKLDPEEEDDSFNNYEVQSEAKLESFPSIGPQRLSFDSATFMESEKQDVHEFLLENLTNGGILELMMRYLKAMGHKFLVRWPPGLAEVVLSVYHSWRRHSTSLPNPLLRDCSNKHIKDMMLMSLSCMELQLDQWLLTKGRSSAVSPRNCPAGMVNGRFGPDFPGTHCLGDLLQLSFASSQRDLFEDGWLEFVVRVYWLKARFLALQGDMEQALENYDICTEMLQSSTAIQVEAGAERRDIVIRLPNLHNDSVVSLEEIDKNLKSLERCQSLEEIQRLYEAGDYKAVVHLLRPTLCTSGFDRAKHLEFMTSIPERPAQLLLLQDSLLRLKDYRQCFECSDVALNEAVQQMVNSGEAAAKEEWVATVTQLLMGIEQALSADSSGSILKVSSSTTGLVRLTNNLIQVIDCSMAVQEEAKEPHVSSVLPWIILHRIIWQEEDTFHSLCHQQQLQNPAEEGMSETPMLPSSLMLLNTAHEYLGRRSWCCNSDGALLRFYVRVLQKELAASTSEDTHPYKEELETALEQCFYCLYSFPSKKSKARYLEEHSAQQVDLIWEDALFMFEYFKPKTLPEFDSYKTSTVSADLANLLKRIATIVPRTERPALSLDKVSAYIEGTSTEVPCLPEGADPSPPVVNELYYLLADYHFKNKEQSKAIKFYMHDICICPNRFDSWAGMALARASRIQDKLNSNELKSDGPIWKHATPVLNCFRRALEIDSSNLSLWIEYGTMSYALHSFASRQLKQWRGELPPELVQQMEGRRDSMLETAKHCFTSAARCEGDGDEEEWLIHYMLGKVAEKQQQPPTVYLLHYRQAGHYLHEEAARYPKKIHYHNPPELAMEALEVYFRLHASILKLLGKPDSGVGAEVLVNFMKEAAEGPFARGEEKNTPKASEKEKACLVDEDSHSSAGTLPGPGASLPSSSGPGLTSPPYTATPIDHDYVKCKKPHQQATPDDRSQDSTAVALSDSSSTQDFFNEPTSLLEGSRKSYTEKRLPILSSQAGATGKDLQGATEERGKNEESLESTEGFRAAEQGVQKPAAETPASACIPGKPSASTPTLWDGKKRGDLPGEPVAFPQGLPAGAEEQRQFLTEQCIASFRLCLSRFPQHYKSLYRLAFLYTYSKTHRNLQWARDVLLGSSIPWQQLQHMPAQGLFCERNKTNFFNGIWRIPVDEIDRPGSFAWHMNRSIVLLLKVLAQLRDHSTLLKVSSMLQRTPDQGKKYLRDADRQVLAQRAFILTVKVLEDTLSELAEGSERPGPKVCGLPGARMTTDVSHKASPEDGQEGLPQPKKPPLADGSGPGPEPGGKVGLLNHRPVAMDAGDSADQSGERKDKESPRAGPTEPMDTSEATVCHSDLERTPPLLPGRPARDRGPESRPTELSLEELSISARQQPTPLTPAQPAPAPAPATTTGTRAGGHPEEPLSRLSRKRKLLEDTESGKTLLLDAYRVWQQGQKGVAYDLGRVERIMSETYMLIKQVDEEAALEQAVKFCQVHLGAAAQRQASGDTPTTPKHPKDSRENFFPVTVVPTAPDPVPADSVQRPSDAHTKPRPALAAATTIITCPPSASASTLDQSKDPGPPRPHRPEATPSMASLGPEGEELARVAEGTSFPPQEPRHSPQVKMAPTSSPAEPHCWPAEAALGTGAEPTCSQEGKLRPEPRRDGEAQEAASETQPLSSPPTAASSKAPSSGSAQPPEGHPGKPEPSRAKSRPLPNMPKLVIPSAATKFPPEITVTPPTPTLLSPKGSISEETKQKLKSAILSAQSAANVRKESLCQPALEVLETSSQESSLESETDEDDDYMDI

SEQ ID NO: 25436 - protein, 1149 aa, Homo sapiens
  REGION 1..1149: note = ENSP00000361423
MGQQPGKVLGDQRRPSLPALHFIKGAGKKESSRHGGPHCNVFVEHEALQRPVASDFEPQGLSEAARWNSKENLLAGPSENDPNLFVALYDFVASGDNTLSITKGEKLRVLGYNHNGEWCEAQTKNGQGWVPSNYITPVNSLEKHSWYHGPVSRNAAEYLLSSGINGSFLVRESESSPGQRSISLRYEGRVYHYRINTASDGKLYVSSESRFNTLAELVHHHSTVADGLITTLHYPAPKRNKPTVYGVSPNYDKWEMERTDITMKHKLGGGQYGEVYEGVWKKYSLTVAVKTLKEDTMEVEEFLKEAAVMKEIKHPNLVQLLGVCTREPPFYIITEFMTYGNLLDYLRECNRQEVNAVVLLYMATQISSAMEYLEKKNFIHRDLAARNCLVGENHLVKVADFGLSRLMTGDTYTAHAGAKFPIKWTAPESLAYNKFSIKSDVWAFGVLLWEIATYGMSPYPGIDLSQVYELLEKDYRMERPEGCPEKVYELMRACWQWNPSDRPSFAEIHQAFETMFQESSISDEVEKELGKQGVRGAVSTLLQAPELPTKTRTSRRAAEHRDTTDVPEMPHSKGQGESDPLDHEPAVSPLLPRKERGPPEGGLNEDERLLPKDKKTNLFSALIKKKKKTAPTPPKRSSSFREMDGQPERRGAGEEEGRDISNGALAFTPLDTADPAKSPKPSNGAGVPNGALRESGGSGFRSPHLWKKSSTLTSSRLATGEEEGGGSSSKRFLRSCSASCVPHGAKDTEWRSVTLPRDLQSTGRQFDSSTFGGHKSEKPALPRKRAGENRSDQVTRGTVTPPPRLVKKNEEAADEVFKDIMESSPGSSPPNLTPKPLRRQVTVAPASGLPHKEEAGKGSALGTPAAAEPVTPTSKAGSGAPGGTSKGPAEESRVRRHKHSSESPGRDKGKLSRLKPAPPPPPAASAGKAGGKPSQSPSQEAAGEAVLGAKTKATSLVDAVNSDAAKPSQPGEGLKKPVLPATPKPQSAKPSGTPISPAPVPSTLPSASSALAGDQPSSTAFIPLISTRVSLRKTRQPPERIASGAITKGVVLDSTEALCLAISRNSEQMASHSAVLEAGKNLYTFCVSYVDSIQQMRNKFAFREAINKLENNLRELQICPATAGSGPAATQDFSKLLSSVKEISDIVQR

SEQ ID NO: 25437 - protein, 64 aa, Homo sapiens
  REGION 1..64: note = ENSP00000376971
MGQQPGKVLGDQRRPSLPALHFIKGAGKKESSRHGGPHCNVFVEHALQRPVASDFEPQGLSEAA

SEQ ID NO: 25438 - protein, 1130 aa, Homo sapiens
  REGION 1..1130: note = ENSP00000323315
MLEICLKLVGCKSKKGLSSSSSCYLEEALQRPVASDFEPQGLSEAARWNSKENLLAGPSENDPNLFVALYDFVASGDNTLSITKGEKLRVLGYNHNGEWCEAQTKNGQGWVPSNYITPVNSLEKHSWYHGPVSRNAAEYLLSSGINGSFLVRESESSPGQRSISLRYEGRVYHYRINTASDGKLYVSSESRFNTLAELVHHHSTVADGLITTLHYPAPKRNKPTVYGVSPNYDKWEMERTDITMKHKLGGGQYGEVYEGVWKKYSLTVAVKTLKEDTMEVEEFLKEAAVMKEIKHPNLVQLLGVCTREPPFYIITEFMTYGNLLDYLRECNRQEVNAVVLLYMATQISSAMEYLEKKNFIHRDLAARNCLVGENHLVKVADFGLSRLMTGDTYTAHAGAKFPIKWTAPESLAYNKFSIKSDVWAFGVLLWEIATYGMSPYPGIDLSQVYELLEKDYRMERPEGCPEKVYELMRACWQWNPSDRPSFAEIHQAFETMFQESSISDEVEKELGKQGVRGAVSTLLQAPELPTKTRTSRRAAEHRDTTDVPEMPHSKGQGESDPLDHEPAVSPLLPRKERGPPEGGLNEDERLLPKDKKTNLFSALIKKKKKTAPTPPKRSSSFREMDGQPERRGAGEEEGRDISNGALAFTPLDTADPAKSPKPSNGAGVPNGALRESGGSGFRSPHLWKKSSTLTSSRLATGEEEGGGSSSKRFLRSCSASCVPHGAKDTEWRSVTLPRDLQSTGRQFDSSTFGGHKSEKPALPRKRAGENRSDQVTRGTVTPPPRLVKKNEEAADEVFKDIMESSPGSSPPNLTPKPLRRQVTVAPASGLPHKEEAGKGSALGTPAAAEPVTPTSKAGSGAPGGTSKGPAEESRVRRHKHSSESPGRDKGKLSRLKPAPPPPPAASAGKAGGKPSQSPSQEAAGEAVLGAKTKATSLVDAVNSDAAKPSQPGEGLKKPVLPATPKPQSAKPSGTPISPAPVPSTLPSASSALAGDQPSSTAFIPLISTRVSLRKTRQPPERIASGAITKGVVLDSTEALCLAISRNSEQMASHSAVLEAGKNLYTFCVSYVDSIQQMRNKFAFREAINKLENNLRELQICPATAGSGPAATQDFSKLLSSVKEISDIVQR

SEQ ID NO: 25439 - protein, 306 aa, Homo sapiens
  REGION 1..306: note = ENSP00000383321
MRQHDTRNGRIVLISGRRSFCSIFSVLPYRDSTQVGDLKLDGGRQSTGAVSLKEIIGLEGVELGADGKTVSYTQFLLPTNAFGARRNTIDSTSSFSQFRNLSHRSLSIGRASGTQGSLDTGSDLGDFMDYDPNLLDDPQWPCGKHKRVLIFPSYMTTVIDYVKPSDLKKDMNETFKEKFPHIKLTLSKIRSLKREMRKLAQEDCGLEEPTVAMAFVYFEKLALKGKLNKQNRKLCAGACVLLAAKIGSDLKKHEVKHLIDKLEEKFRLNRRELIAFEFPVLVALEFALHLPEHEVMPHYRRLVQSS

SEQ ID NO: 25440 - protein, 38 aa, Homo sapiens
  REGION 1..38: note = ENSP00000464435
MRQHDTRNGRIVLISGRRSFCSIFSVLPYRDSTQVGQQ

SEQ ID NO: 25441 - protein, 9 aa, Homo sapiens
  REGION 1..9: note = ENSP00000461994
MRQHDTRNG

SEQ ID NO: 25442 - protein, 633 aa, Homo sapiens
  REGION 1..633: note = ENSP00000256925
MAAAAAAATTAACSSGSAGTDAAGASGLQQPPPQPQPQPAAAAPAQPPPEPPRKPRMDPRRRQAALSFLTNISLDGRLPPQDAEWGGGEEGGAAKPGAGGACGARTRFSLLAAAERGGCIALAAPGTPAAGLAAGSGPCLPQPSSLPPLIPGGHATVSGPGVARGFASPLGAGRASGEQWQPPRPAPLAACAQLQLLDGSGAAGQEELEEDDAFISVQVPAAAFLGSGTPGSGSGSRGRLNSFTQGILPIAFSRPTSQNYCSLEQPGQGGSTSAFEQLQRSRRRLISQRSSLETLEDIEENAPLRRCRTLSGSPRPKNFKKIHFIKNMRQHDTRNGRIVLISGRRSFCSIFSVLPYRDSTQVGDLKLDGGRQSTGAVSLKEIIGLEGVELGADGKTVSYTQFLLPTNAFGARRNTIDSTSSFSQFRNLSHRSLSIGRASGTQGSLDTGSDLGDFMDYDPNLLDDPQWPCGKHKRVLIFPSYMTTVIDYVKPSDLKKDMNETFKEKFPHIKLTLSKIRSLKREMRKLAQEDCGLEEPTVAMAFVYFEKLALKGKLNKQNRKLCAGACVLLAAKIGSDLKKHEVKHLIDKLEEKFRLNRRELIAFEFPVLVALEFALHLPEHEVMPHYRRLVQSS

SEQ ID NO: 25443 - protein, 163 aa, Homo sapiens
  REGION 1..163: note = ENSP00000476575
  VARIANT 1: note = Any amino acid
XAAFLGSGTPGSGSGSRGRLNSFTQGILPIAFSRPTSQNYCSLEQPGQGGSTSAFEQLQRSRRRLISQRSSLETLEDIEENAPLRRCRTLSGSPRPKNFKKIHFIKNMRQHDTRNGRIVLISGRRSFCSIFSVLPYRDSTQVGYVYACMLCSSLGEKISHQCT

SEQ ID NO: 25444 - protein, 368 aa, Homo sapiens
  REGION 1..368: note = ENSP00000413851
MLSKRGCHARIYADFPIRRLISQRSSLETLEDIEENAPLRRCRTLSGSPRPKNFKKIHFIKNMRQHDTRNGRIVLISGRRSFCSIFSVLPYRDSTQVGDLKLDGGRQSTGAVSLKEIIGLEGVELGADGKTVSYTQFLLPTNAFGARRNTIDSTSSFSQFRNLSHRSLSIGRASGTQGSLDTGSDLGDFMDYDPNLLDDPQWPCGKHKRVLIFPSYMTTVIDYVKPSDLKKDMNETFKEKFPHIKLTLSKIRSLKREMRKLAQEDCGLEEPTVAMAFVYFEKLALKGKLNKQNRKLCAGACVLLAAKIGSDLKKHEVKHLIDKLEEKFRLNRRELIAFEFPVLVALEFALHLPEHEVMPHYRRLVQSS

SEQ ID NO: 25445 - protein, 370 aa, Homo sapiens
  REGION 1..370: note = ENSP00000317310
MGGGDGAAFKRPGDGARLQRVLGLGSRREPRSLPAGGPAPRRTAPPPPGHASAGPAAMSSHIAKSESKTSLLKAAAAAASGGSRAPRHGPARDPGLPSRRLPGSCPATPQSSGDPSSRRPLCRPAPREEGARGSQRVLPQAHCRPREALPAAASRPSPSSPLPPARGRDGEERGLSPALGLRGSLRARGRGDSVPAAASEADPFLHRLRPMLSSAFGQDRSLRPEEIEELREAFREFDKDKDGYINCRDLGNCMRTMGYMPTEMELIELSQQINMNLGGHVDFDDFVELMGPKLLAETADMIGVKELRDAFREFDTNGDGEISTSELREAMRKLLGHQVGHRDIEEIIRDVDLNGDGRVDFEEFVRMMSR

SEQ ID NO: 25446 - protein, 227 aa, Homo sapiens
  REGION 1..227: note = ENSP00000288616
MGNCVKYPLRNLSRKMCQEEQTSYMVVQTSEEGLAADAELPGPLLMLAQNCAVMHNLLGPACIFLRKGFAENRQPDRSLRPEEIEELREAFREFDKDKDGYINCRDLGNCMRTMGYMPTEMELIELSQQINMNLGGHVDFDDFVELMGPKLLAETADMIGVKELRDAFREFDTNGDGEISTSELREAMRKLLGHQVGHRDIEEIIRDVDLNGDGRVDFEEFVRMMSR

SEQ ID NO: 25447 - protein, 167 aa, Homo sapiens
  REGION 1..167: note = ENSP00000288615
MGNCVKYPLRNLSRKDRSLRPEEIEELREAFREFDKDKDGYINCRDLGNCMRTMGYMPTEMELIELSQQINMNLGGHVDFDDFVELMGPKLLAETADMIGVKELRDAFREFDTNGDGEISTSELREAMRKLLGHQVGHRDIEEIIRDVDLNGDGRVDFEEFVRMMSR

SEQ ID NO: 25448 - protein, 306 aa, Homo sapiens
  REGION 1..306: note = ENSP00000398959
MCQCVRACVCVCVCACATQRASHSALPGTTISVKDWRLCLLDQFDACARSGLSEPRSLTLRVPSCGKPLPGPGARLGREVTPCLSFAFAWCWLKMCQEEQTSYMVVQTSEEGLAADAELPGPLLMLAQNCAVMHNLLGPACIFLRKGFAENRQPDRSLRPEEIEELREAFREFDKDKDGYINCRDLGNCMRTMGYMPTEMELIELSQQINMNLGGHVDFDDFVELMGPKLLAETADMIGVKELRDAFREFDTNGDGEISTSELREAMRKLLGHQVGHRDIEEIIRDVDLNGDGRVDFEEFVRMMSR

SEQ ID NO: 25449 - protein, 1223 aa, Homo sapiens
  REGION 1..1223: note = ENSP00000290039
MRRLAAEELGVVTMQRIFNSFVYTEKISNGESEVQQLAKKIREKFNRYLDVVNRNKQVVEASYTAHLTSPLTAIQDCCTIPPSMMEFDGNFNTNVSRTISCDRLSTTVNSRAFNPGRDLNSVLADNLKSNPGIKWQYFSSEEGIFTVFPAHKFRCKGSYEHRSRPIYVSTVRPQSKHIVVILDHGASVTDTQLQIAKDAAQVILSAIDEHDKISVLTVADTVRTCSLDQCYKTFLSPATSETKRKMSTFVSSVKSSDSPTQHAVGFQKAFQLIRSTNNNTKFQANTDMVIIYLSAGITSKDSSEEDKKATLQVINEENSFLNNSVMILTYALMNDGVTGLKELAFLRDLAEQNSGKYGVPDRMALPVIKGSMMVLNQLSNLETTVGRFYTNLPNRMIDEAVFSLPFSDEMGDGLIMTVSKPCYFGNLLLGIVGVDVNLAYILEDVTYYQDSLASYTFLIDDKGYTLMHPSLTRPYLLSEPPLHTDIIHYENIPKFELVRQNILSLPLGSQIIAVPVNSSLSWHINKLRETGKEAYNVSYAWKMVQDTSFILCIVVIQPEIPVKQLKNLNTVPSSKLLYHRLDLLGQPSACLHFKQLATLESPTIMLSAGSFSSPYEHLSQPETKRMVEHYTAYLSDNTRLIANPGLKFSVRNEVMATSHVTDEWMTQMEMSSLNTYIVRRYIATPNGVLRIYPGSLMDKAFDPTRRQWYLHAVANPGLISLTGPYLDVGGAGYVVTISHTIHSSSTQLSSGHTVAVMGIDFTLRYFYKVLMDLLPVCNQDGGNKIRCFIMEDRGYLVAHPTLIDPKGHAPVEQQHITHKEPLVANDILNHPNFVKKNLCNSFSDRTVQRFYKFNTSLAGDLTNLVHGSHCSKYRLARIPGTNAFVGIVNETCDSLAFCACSMVDRLCLNCHRMEQNECECPCECPLEVNECTGNLTNAENRNPSCEVHQEPVTYTAIDPGLQDALHQCVNSRCSQRLESGDCFGVLDCEWCMVDSDGKTHLDKPYCAPQKECFGGIVGAKSPYVDDMGAIGDEVITLNMIKSAPVGPVAGGIMGCIMVLVLAVYAYRHQIHRRSHQHMSPLAAQEMSVRMSNLENDRDERDDDSHEDRGIISNTRFIAAVIERHAHSPERRRRYWGRSGTESDHGYSTMSPQEDSENPPCNNDPLSAGVDVGNHDEDLDLDTPPQTAALLSHKFHHYRSHHPTLHHSHHLQAAVTVHTVDAEC

SEQ ID NO: 25450 - protein, 2506 aa, Homo sapiens
  REGION 1..2506: note = ENSP00000353362
MARFGDEMPARYGGGGSGAAAGVVVGSGGGRGAGGSRQGGQPGAQRMYKQSMAQRARTMALYNPIPVRQNCLTVNRSLFLFSEDNVVRKYAKKITEWPPFEYMILATIIANCIVLALEQHLPDDDKTPMSERLDDTEPYFIGIFCFEAGIKIIALGFAFHKGSYLRNGWNVMDFVVVLTGILATVGTEFDLRTLRAVRVLRPLKLVSGIPSLQVVLKSIMKAMIPLLQIGLLLFFAILIFAIIGLEFYMGKFHTTCFEEGTDDIQGESPAPCGTEEPARTCPNGTKCQPYWEGPNNGITQFDNILFAVLTVFQCITMEGWTDLLYNSNDASGNTWNWLYFIPLIIIGSFFMLNLVLGVLSGEFAKERERVENRRAFLKLRRQQQIERELNGYMEWISKAEEVILAEDETDGEQRHPFDALRRTTIKKSKTDLLNPEEAEDQLADIASVGSPFARASIKSAKLENSTFFHKKERRMRFYIRRMVKTQAFYWTVLSLVALNTLCVAIVHYNQPEWLSDFLYYAEFIFLGLFMSEMFIKMYGLGTRPYFHSSFNCFDCGVIIGSIFEVIWAVIKPGTSFGISVLRALRLLRIFKVTKYWASLRNLVVSLLNSMKSIISLLFLLFLFIVVFALLGMQLFGGQFNFDEGTPPTNFDTFPAAIMTVFQILTGEDWNEVMYDGIKSQGGVQGGMVFSIYFIVLTLFGNYTLLNVFLAIAVDNLANAQELTKDEQEEEEAANQKLALQKAKEVAEVSPLSAANMSIAVKEQQKNQKPAKSVWEQRTSEMRKQNLLASREALYNEMDPDERWKAAYTRHLRPDMKTHLDRPLVVDPQENRNNNTNKSRAAEPTVDQRLGQQRAEDFLRKQARYHDRARDPSGSAGLDARRPWAGSQEAELSREGPYGRESDHHAREGSLEQPGFWEGEAERGKAGDPHRRHVHRQGGSRESRSGSPRTGADGEHRRHRAHRRPGEEGPEDKAERRARHREGSRPARGGEGEGEGPDGGERRRRHRHGAPATYEGDARREDKERRHRRRKENQGSGVPVSGPNLSTTRPIQQDLGRQDPPLAEDIDNMKNNKLATAESAAPHGSLGHAGLPQSPAKMGNSTDPGPMLAIPAMATNPQNAASRRTPNNPGNPSNPGPPKTPENSLIVTNPSGTQTNSAKTARKPDHTTVDIPPACPPPLNHTVVQVNKNANPDPLPKKEEEKKEEEEDDRGEDGPKPMPPYSSMFILSTTNPLRRLCHYILNLRYFEMCILMVIAMSSIALAAEDPVQPNAPRNNVLRYFDYVFTGVFTFEMVIKMIDLGLVLHQGAYFRDLWNILDFIVVSGALVAFAFTGNSKGKDINTIKSLRVLRVLRPLKTIKRLPKLKAVFDCVVNSLKNVFNILIVYMLFMFIFAVVAVQLFKGKFFHCTDESKEFEKDCRGKYLLYEKNEVKARDREWKKYEFHYDNVLWALLTLFTVSTGEGWPQVLKHSVDATFENQGPSPGYRMEMSIFYVVYFVVFPFFFVNIFVALIIITFQEQGDKMMEEYSLEKNERACIDFAISAKPLTRHMPQNKQSFQYRMWQFVVSPPFEYTIMAMIALNTIVLMMKFYGASVAYENALRVFNIVFTSLFSLECVLKVMAFGILNYFRDAWNIFDFVTVLGSITDILVTEFGNNFINLSFLRLFRAARLIKLLRQGYTIRILLWTFVQSFKALPYVCLLIAMLFFIYAIIGMQVFGNIGIDVEDEDSDEDEFQITEHNNFRTFFQALMLLFRSATGEAWHNIMLSCLSGKPCDKNSGILTRECGNEFAYFYFVSFIFLCSFLMLNLFVAVIMDNFEYLTRDSSILGPHHLDEYVRVWAEYDPAAWGRMPYLDMYQMLRHMSPPLGLGKKCPARVAYKRLLRMDLPVADDNTVHFNSTLMALIRTALDIKIAKGGADKQQMDAELRKEMMAIWPNLSQKTLDLLVTPHKSTDLTVGKIYAAMMIMEYYRQSKAKKLQAMREEQDRTPLMFQRMEPPSPTQEGGPGQNALPSTQLDPGGALMAHESGLKESPSWVTQRAQEMFQKTGTWSPEQGPPTDMPNSQPNSQSVEMREMGRDGYSDSEHYLPMEGQGRAASMPRLPAENQRRRGRPRGNNLSTISDTSPMKRSASVLGPKARRLDDYSLERVPPEENQRHHQRRRDRSHRASERSLGRYTDVDTGLGTDLSMTTQSGDLPSKERDQERGRPKDRKHRQHHHHHHHHHHPPPPDKDRYAQERPDHGRARARDQRWSRSPSEGREHMAHRQGSSSVSGSPAPSTSGTSTPRRGRRQLPQTPSTPRPHVSYSPVIRKAGGSGPPQQQQQQQQQQQQQAVARPGRAATSGPRRYPGPTAEPLAGDRPPTGGHSSGRSPRMERRVPGPARSESPRACRHGGARWPASGPHVSEGPPGPRHHGYYRGSDYDEADGPGSGGGEEAMAGAYDAPPPVRHASSGATGRSPRTPRASGPACASPSRHGRRLPNGYYPAHGLARPRGPGSRKGLHEPYSESDDDWC

SEQ ID NO: 25451 - protein, 2507 aa, Homo sapiens
  REGION 1..2507: note = ENSP00000489778
MARFGDEMPARYGGGGSGAAAGVVVGSGGGRGAGGSRQGGQPGAQRMYKQSMAQRARTMALYNPIPVRQNCLTVNRSLFLFSEDNVVRKYAKKITEWPPFEYMILATIIANCIVLALEQHLPDDDKTPMSERLDDTEPYFIGIFCFEAGIKIIALGFAFHKGSYLRNGWNVMDFVVVLTGILATVGTEFDLRTLRAVRVLRPLKLVSGIPSLQVVLKSIMKAMIPLLQIGLLLFFAILIFAIIGLEFYMGKFHTTCFEEGTDDIQGESPAPCGTEEPARTCPNGTKCQPYWEGPNNGITQFDNILFAVLTVFQCITMEGWTDLLYNSNDASGNTWNWLYFIPLIIIGSFFMLNLVLGVLSGEFAKERERVENRRAFLKLRRQQQIERELNGYMEWISKAEEVILAEDETDGEQRHPFDGALRRTTIKKSKTDLLNPEEAEDQLADIASVGSPFARASIKSAKLENSTFFHKKERRMRFYIRRMVKTQAFYWTVLSLVALNTLCVAIVHYNQPEWLSDFLYYAEFIFLGLFMSEMFIKMYGLGTRPYFHSSFNCFDCGVIIGSIFEVIWAVIKPGTSFGISVLRALRLLRIFKVTKYWASLRNLVVSLLNSMKSIISLLFLLFLFIVVFALLGMQLFGGQFNFDEGTPPTNFDTFPAAIMTVFQILTGEDWNEVMYDGIKSQGGVQGGMVFSIYFIVLTLFGNYTLLNVFLAIAVDNLANAQELTKDEQEEEEAANQKLALQKAKEVAEVSPLSAANMSIAVKEQQKNQKPAKSVWEQRTSEMRKQNLLASREALYNEMDPDERWKAAYTRHLRPDMKTHLDRPLVVDPQENRNNNTNKSRAAEPTVDQRLGQQRAEDFLRKQARYHDRARDPSGSAGLDARRPWAGSQEAELSREGPYGRESDHHAREGSLEQPGFWEGEAERGKAGDPHRRHVHRQGGSRESRSGSPRTGADGEHRRHRAHRRPGEEGPEDKAERRARHREGSRPARGGEGEGEGPDGGERRRRHRHGAPATYEGDARREDKERRHRRRKENQGSGVPVSGPNLSTTRPIQQDLGRQDPPLAEDIDNMKNNKLATAESAAPHGSLGHAGLPQSPAKMGNSTDPGPMLAIPAMATNPQNAASRRTPNNPGNPSNPGPPKTPENSLIVTNPSGTQTNSAKTARKPDHTTVDIPPACPPPLNHTVVQVNKNANPDPLPKKEEEKKEEEEDDRGEDGPKPMPPYSSMFILSTTNPLRRLCHYILNLRYFEMCILMVIAMSSIALAAEDPVQPNAPRNNVLRYFDYVFTGVFTFEMVIKMIDLGLVLHQGAYFRDLWNILDFIVVSGALVAFAFTGNSKGKDINTIKSLRVLRVLRPLKTIKRLPKLKAVFDCVVNSLKNVFNILIVYMLFMFIFAVVAVQLFKGKFFHCTDESKEFEKDCRGKYLLYEKNEVKARDREWKKYEFHYDNVLWALLTLFTVSTGEGWPQVLKHSVDATFENQGPSPGYRMEMSIFYVVYFVVFPFFFVNIFVALIIITFQEQGDKMMEEYSLEKNERACIDFAISAKPLTRHMPQNKQSFQYRMWQFVVSPPFEYTIMAMIALNTIVLMMKFYGASVAYENALRVFNIVFTSLFSLECVLKVMAFGILNYFRDAWNIFDFVTVLGSITDILVTEFGNNFINLSFLRLFRAARLIKLLRQGYTIRILLWTFVQSFKALPYVCLLIAMLFFIYAIIGMQVFGNIGIDVEDEDSDEDEFQITEHNNFRTFFQALMLLFRSATGEAWHNIMLSCLSGKPCDKNSGILTRECGNEFAYFYFVSFIFLCSFLMLNLFVAVIMDNFEYLTRDSSILGPHHLDEYVRVWAEYDPAACGRIHYKDMYSLLRVISPPLGLGKKCPHRVACKRLLRMDLPVADDNTVHFNSTLMALIRTALDIKIAKGGADKQQMDAELRKEMMAIWPNLSQKTLDLLVTPHKSTDLTVGKIYAAMMIMEYYRQSKAKKLQAMREEQDRTPLMFQRMEPPSPTQEGGPGQNALPSTQLDPGGALMAHESGLKESPSWVTQRAQEMFQKTGTWSPEQGPPTDMPNSQPNSQSVEMREMGRDGYSDSEHYLPMEGQGRAASMPRLPAENQRRRGRPRGNNLSTISDTSPMKRSASVLGPKARRLDDYSLERVPPEENQRHHQRRRDRSHRASERSLGRYTDVDTGLGTDLSMTTQSGDLPSKERDQERGRPKDRKHRQHHHHHHHHHHPPPPDKDRYAQERPDHGRARARDQRWSRSPSEGREHMAHRQGSSSVSGSPAPSTSGTSTPRRGRRQLPQTPSTPRPHVSYSPVIRKAGGSGPPQQQQQQQQQQQQQAVARPGRAATSGPRRYPGPTAEPLAGDRPPTGGHSSGRSPRMERRVPGPARSESPRACRHGGARWPASGPHVSEGPPGPRHHGYYRGSDYDEADGPGSGGGEEAMAGAYDAPPPVRHASSGATGRSPRTPRASGPACASPSRHGRRLPNGYYPAHGLARPRGPGSRKGLHEPYSESDDDWC

SEQ ID NO: 25452 - protein, 2261 aa, Homo sapiens
  REGION 1..2261: note = ENSP00000490323
MARFGDEMPARYGGGGSGAAAGVVVGSGGGRGAGGSRQGGQPGAQRMYKQSMAQRARTMALYNPIPVRQNCLTVNRSLFLFSEDNVVRKYAKKITEWPPFEYMILATIIANCIVLALEQHLPDDDKTPMSERLDDTEPYFIGIFCFEAGIKIIALGFAFHKGSYLRNGWNVMDFVVVLTGILATVGTEFDLRTLRAVRVLRPLKLVSGIPSLQVVLKSIMKAMIPLLQIGLLLFFAILIFAIIGLEFYMGKFHTTCFEEGTDDIQGESPAPCGTEEPARTCPNGTKCQPYWEGPNNGITQFDNILFAVLTVFQCITMEGWTDLLYNSNDASGNTWNWLYFIPLIIIGSFFMLNLVLGVLSGEFAKERERVENRRAFLKLRRQQQIERELNGYMEWISKAEEVILAEDETDGEQRHPFDGALRRTTIKKSKTDLLNPEEAEDQLADIASVGSPFARASIKSAKLENSTFFHKKERRMRFYIRRMVKTQAFYWTVLSLVALNTLCVAIVHYNQPEWLSDFLYYAEFIFLGLFMSEMFIKMYGLGTRPYFHSSFNCFDCGVIIGSIFEVIWAVIKPGTSFGISVLRALRLLRIFKVTKYWASLRNLVVSLLNSMKSIISLLFLLFLFIVVFALLGMQLFGGQFNFDEGTPPTNFDTFPAAIMTVFQILTGEDWNEVMYDGIKSQGGVQGGMVFSIYFIVLTLFGNYTLLNVFLAIAVDNLANAQELTKDEQEEEEAANQKLALQKAKEVAEVSPLSAANMSIAVKEQQKNQKPAKSVWEQRTSEMRKQNLLASREALYNEMDPDERWKAAYTRHLRPDMKTHLDRPLVVDPQENRNNNTNKSRAAEPTVDQRLGQQRAEDFLRKQARYHDRARDPSGSAGLDARRPWAGSQEAELSREGPYGRESDHHAREGSLEQPGFWEGEAERGKAGDPHRRHVHRQGGSRESRSGSPRTGADGEHRRHRAHRRPGEEGPEDKAERRARHREGSRPARGGEGEGEGPDGGERRRRHRHGAPATYEGDARREDKERRHRRRKENQGSGVPVSGPNLSTTRPIQQDLGRQDPPLAEDIDNMKNNKLATAESAAPHGSLGHAGLPQSPAKMGNSTDPGPMLAIPAMATNPQNAASRRTPNNPGNPSNPGPPKTPENSLIVTNPSGTQTNSAKTARKPDHTTVDIPPACPPPLNHTVVQVNKNANPDPLPKKEEEKKEEEEDDRGEDGPKPMPPYSSMFILSTTNPLRRLCHYILNLRYFEMCILMVIAMSSIALAAEDPVQPNAPRNNVLRYFDYVFTGVFTFEMVIKMIDLGLVLHQGAYFRDLWNILDFIVVSGALVAFAFTGNSKGKDINTIKSLRVLRVLRPLKTIKRLPKLKAVFDCVVNSLKNVFNILIVYMLFMFIFAVVAVQLFKGKFFHCTDESKEFEKDCRGKYLLYEKNEVKARDREWKKYEFHYDNVLWALLTLFTVSTGEGWPQVLKHSVDATFENQGPSPGYRMEMSIFYVVYFVVFPFFFVNIFVALIIITFQEQGDKMMEEYSLEKNERACIDFAISAKPLTRHMPQNKQSFQYRMWQFVVSPPFEYTIMAMIALNTIVLMMKFYGASVAYENALRVFNIVFTSLFSLECVLKVMAFGILNYFRDAWNIFDFVTVLGSITDILVTEFGNNFINLSFLRLFRAARLIKLLRQGYTIRILLWTFVQSFKALPYVCLLIAMLFFIYAIIGMQVFGNIGIDVEDEDSDEDEFQITEHNNFRTFFQALMLLFRSATGEAWHNIMLSCLSGKPCDKNSGILTRECGNEFAYFYFVSFIFLCSFLMLNLFVAVIMDNFEYLTRDSSILGPHHLDEYVRVWAEYDPAAWGRMPYLDMYQMLRHMSPPLGLGKKCPARVAYKRLLRMDLPVADDNTVHFNSTLMALIRTALDIKIAKGGADKQQMDAELRKEMMAIWPNLSQKTLDLLVTPHKSTDLTVGKIYAAMMIMEYYRQSKAKKLQAMREEQDRTPLMFQRMEPPSPTQEGGPGQNALPSTQLDPGGALMAHESGLKESPSWVTQRAQEMFQKTGTWSPEQGPPTDMPNSQPNSQSVEMREMGRDGYSDSEHYLPMEGQGRAASMPRLPAENQRRRGRPRGNNLSTISDTSPMKRSASVLGPKARRLDDYSLERVPPEENQRHHQRRRDRSHRASERSLGRYTDVDTGLGTDLSMTTQSGDLPSKERDQERGRPKDRKHRQHHHHHHHHHHPPPPDKDRYAQERPDHGRARARDQRWSRSPSEGREHMAHRQ

SEQ ID NO: 25453 - protein, 2261 aa, Homo sapiens
  REGION 1..2261: note = ENSP00000489913
MARFGDEMPARYGGGGSGAAAGVVVGSGGGRGAGGSRQGGQPGAQRMYKQSMAQRARTMALYNPIPVRQNCLTVNRSLFLFSEDNVVRKYAKKITEWPPFEYMILATIIANCIVLALEQHLPDDDKTPMSERLDDTEPYFIGIFCFEAGIKIIALGFAFHKGSYLRNGWNVMDFVVVLTGILATVGTEFDLRTLRAVRVLRPLKLVSGIPSLQVVLKSIMKAMIPLLQIGLLLFFAILIFAIIGLEFYMGKFHTTCFEEGTDDIQGESPAPCGTEEPARTCPNGTKCQPYWEGPNNGITQFDNILFAVLTVFQCITMEGWTDLLYNSNDASGNTWNWLYFIPLIIIGSFFMLNLVLGVLSGEFAKERERVENRRAFLKLRRQQQIERELNGYMEWISKAEEVILAEDETDGEQRHPFDGALRRTTIKKSKTDLLNPEEAEDQLADIASVGSPFARASIKSAKLENSTFFHKKERRMRFYIRRMVKTQAFYWTVLSLVALNTLCVAIVHYNQPEWLSDFLYYAEFIFLGLFMSEMFIKMYGLGTRPYFHSSFNCFDCGVIIGSIFEVIWAVIKPGTSFGISVLRALRLLRIFKVTKYWASLRNLVVSLLNSMKSIISLLFLLFLFIVVFALLGMQLFGGQFNFDEGTPPTNFDTFPAAIMTVFQILTGEDWNEVMYDGIKSQGGVQGGMVFSIYFIVLTLFGNYTLLNVFLAIAVDNLANAQELTKDEQEEEEAANQKLALQKAKEVAEVSPLSAANMSIAVKEQQKNQKPAKSVWEQRTSEMRKQNLLASREALYNEMDPDERWKAAYTRHLRPDMKTHLDRPLVVDPQENRNNNTNKSRAAEPTVDQRLGQQRAEDFLRKQARYHDRARDPSGSAGLDARRPWAGSQEAELSREGPYGRESDHHAREGSLEQPGFWEGEAERGKAGDPHRRHVHRQGGSRESRSGSPRTGADGEHRRHRAHRRPGEEGPEDKAERRARHREGSRPARGGEGEGEGPDGGERRRRHRHGAPATYEGDARREDKERRHRRRKENQGSGVPVSGPNLSTTRPIQQDLGRQDPPLAEDIDNMKNNKLATAESAAPHGSLGHAGLPQSPAKMGNSTDPGPMLAIPAMATNPQNAASRRTPNNPGNPSNPGPPKTPENSLIVTNPSGTQTNSAKTARKPDHTTVDIPPACPPPLNHTVVQVNKNANPDPLPKKEEEKKEEEEDDRGEDGPKPMPPYSSMFILSTTNPLRRLCHYILNLRYFEMCILMVIAMSSIALAAEDPVQPNAPRNNVLRYFDYVFTGVFTFEMVIKMIDLGLVLHQGAYFRDLWNILDFIVVSGALVAFAFTGNSKGKDINTIKSLRVLRVLRPLKTIKRLPKLKAVFDCVVNSLKNVFNILIVYMLFMFIFAVVAVQLFKGKFFHCTDESKEFEKDCRGKYLLYEKNEVKARDREWKKYEFHYDNVLWALLTLFTVSTGEGWPQVLKHSVDATFENQGPSPGYRMEMSIFYVVYFVVFPFFFVNIFVALIIITFQEQGDKMMEEYSLEKNERACIDFAISAKPLTRHMPQNKQSFQYRMWQFVVSPPFEYTIMAMIALNTIVLMMKFYGASVAYENALRVFNIVFTSLFSLECVLKVMAFGILNYFRDAWNIFDFVTVLGSITDILVTEFGNNFINLSFLRLFRAARLIKLLRQGYTIRILLWTFVQSFKALPYVCLLIAMLFFIYAIIGMQVFGNIGIDVEDEDSDEDEFQITEHNNFRTFFQALMLLFRSATGEAWHNIMLSCLSGKPCDKNSGILTRECGNEFAYFYFVSFIFLCSFLMLNLFVAVIMDNFEYLTRDSSILGPHHLDEYVRVWAEYDPAACGRIHYKDMYSLLRVISPPLGLGKKCPHRVACKRLLRMDLPVADDNTVHFNSTLMALIRTALDIKIAKGGADKQQMDAELRKEMMAIWPNLSQKTLDLLVTPHKSTDLTVGKIYAAMMIMEYYRQSKAKKLQAMREEQDRTPLMFQRMEPPSPTQEGGPGQNALPSTQLDPGGALMAHESGLKESPSWVTQRAQEMFQKTGTWSPEQGPPTDMPNSQPNSQSVEMREMGRDGYSDSEHYLPMEGQGRAASMPRLPAENQRRRGRPRGNNLSTISDTSPMKRSASVLGPKARRLDDYSLERVPPEENQRHHQRRRDRSHRASERSLGRYTDVDTGLGTDLSMTTQSGDLPSKERDQERGRPKDRKHRQHHHHHHHHHHPPPPDKDRYAQERPDHGRARARDQRWSRSPSEGREHMAHRQ

SEQ ID NO: 25454 - protein, 981 aa, Homo sapiens
  REGION 1..981: note = ENSP00000467729
QEQGDKMMEEYSLEKNERACIDFAISAKPLTRHMPQNKQSFQYRMWQFVVSPPFEYTIMAMIALNTIVLMMKFYGASVAYENALRVFNIVFTSLFSLECVLKVMAFGILNYFRDAWNIFDFVTVLGSITDILVTEFGNNFINLSFLRLFRAARLIKLLRQGYTIRILLWTFVQSFKALPYVCLLIAMLFFIYAIIGMQVFGNIGIDVEDEDSDEDEFQITEHNNFRTFFQALMLLFRSATGEAWHNIMLSCLSGKPCDKNSGILTRECGNEFAYFYFVSFIFLCSFLMLNLFVAVIMDNFEYLTRDSSILGPHHLDEYVRVWAEYDPAACGRIHYKDMYSLLRVISPPLGLGKKCPHRVACKRLLRMDLPVADDNTVHFNSTLMALIRTALDIKIAKGGADKQQMDAELRKEMMAIWPNLSQKTLDLLVTPHKSTDLTVGKIYAAMMIMEYYRQSKAKKLQAMREEQDRTPLMFQRMEPPSPTQEGGPGQNALPSTQLDPGGALMAHESGLKESPSWVTQRAQEMFQKTGTWSPEQGPPTDMPNSQPNSQSVEMREMGRDGYSDSEHYLPMEGQGRAASMPRLPAENQTISDTSPMKRSASVLGPKARRLDDYSLERVPPEENQRHHQRRRDRSHRASERSLGRYTDVDTGLGTDLSMTTQSGDLPSKERDQERGRPKDRKHRQHHHHHHHHHHPPPPDKDRYAQERPDHGRARARDQRWSRSPSEGREHMAHRQGSSSVSGSPAPSTSGTSTPRRGRRQLPQTPSTPRPHVSYSPVIRKAGGSGPPQQQQQQQQQQQQQAVARPGRAATSGPRRYPGPTAEPLAGDRPPTGGHSSGRSPRMERRVPGPARSESPRACRHGGARWPASGPHVSEGPPGPRHHGYYRGSDYDEADGPGSGGGEEAMAGAYDAPPPVRHASSGATGRSPRTPRASGPACASPSRHGRRLPNGYYPAHGLARPRGPGSRKGLHEPYSESDDDWC

SEQ ID NO: 25455 - protein, 2460 aa, Homo sapiens
  REGION 1..2460: note = ENSP00000489861
MARFGDEMPARYGGGGSGAAAGVVVGSGGGRGAGGSRQGGQPGAQRMYKQSMAQRARTMALYNPIPVRQNCLTVNRSLFLFSEDNVDDTEPYFIGIFCFEAGIKIIALGFAFHKGSYLRNGWNVMDFVVVLTGILATVGTEFDLRTLRAVRVLRPLKLVSGIPSLQVVLKSIMKAMIPLLQIGLLLFFAILIFAIIGLEFYMGKFHTTCFEEGTDDIQGESPAPCGTEEPARTCPNGTKCQPYWEGPNNGITQFDNILFAVLTVFQCITMEGWTDLLYNSNDASGNTWNWLYFIPLIIIGSFFMLNLVLGVLSGEFAKERERVENRRAFLKLRRQQQIERELNGYMEWISKAEEVILAEDETDGEQRHPFDGALRRTTIKKSKTDLLNPEEAEDQLADIASVGSPFARASIKSAKLENSTFFHKKERRMRFYIRRMVKTQAFYWTVLSLVALNTLCVAIVHYNQPEWLSDFLYYAEFIFLGLFMSEMFIKMYGLGTRPYFHSSFNCFDCGVIIGSIFEVIWAVIKPGTSFGISVLRALRLLRIFKVTKYWASLRNLVVSLLNSMKSIISLLFLLFLFIVVFALLGMQLFGGQFNFDEGTPPTNFDTFPAAIMTVFQILTGEDWNEVMYDGIKSQGGVQGGMVFSIYFIVLTLFGNYTLLNVFLAIAVDNLANAQELTKDEQEEEEAANQKLALQKAKEVAEVSPLSAANMSIAVKEQQKNQKPAKSVWEQRTSEMRKQNLLASREALYNEMDPDERWKAAYTRHLRPDMKTHLDRPLVVDPQENRNNNTNKSRAAEPTVDQRLGQQRAEDFLRKQARYHDRARDPSGSAGLDARRPWAGSQEAELSREGPYGRESDHHAREGSLEQPGFWEGEAERGKAGDPHRRHVHRQGGSRESRSGSPRTGADGEHRRHRAHRRPGEEGPEDKAERRARHREGSRPARGGEGEGEGPDGGERRRRHRHGAPATYEGDARREDKERRHRRRKENQGSGVPVSGPNLSTTRPIQQDLGRQDPPLAEDIDNMKNNKLATAESAAPHGSLGHAGLPQSPAKMGNSTDPGPMLAIPAMATNPQNAASRRTPNNPGNPSNPGPPKTPENSLIVTNPSGTQTNSAKTARKPDHTTVDIPPACPPPLNHTVVQVNKNANPDPLPKKEEEKKEEEEDDRGEDGPKPMPPYSSMFILSTTNPLRRLCHYILNLRYFEMCILMVIAMSSIALAAEDPVQPNAPRNNVLRYFDYVFTGVFTFEMVIKMIDLGLVLHQGAYFRDLWNILDFIVVSGALVAFAFTGNSKGKDINTIKSLRVLRVLRPLKTIKRLPKLKAVFDCVVNSLKNVFNILIVYMLFMFIFAVVAVQLFKGKFFHCTDESKEFEKDCRGKYLLYEKNEVKARDREWKKYEFHYDNVLWALLTLFTVSTGEGWPQVLKHSVDATFENQGPSPGYRMEMSIFYVVYFVVFPFFFVNIFVALIIITFQEQGDKMMEEYSLEKNERACIDFAISAKPLTRHMPQNKQSFQYRMWQFVVSPPFEYTIMAMIALNTIVLMMKFYGASVAYENALRVFNIVFTSLFSLECVLKVMAFGILNYFRDAWNIFDFVTVLGSITDILVTEFGNNFINLSFLRLFRAARLIKLLRQGYTIRILLWTFVQSFKALPYVCLLIAMLFFIYAIIGMQVFGNIGIDVEDEDSDEDEFQITEHNNFRTFFQALMLLFRSATGEAWHNIMLSCLSGKPCDKNSGILTRECGNEFAYFYFVSFIFLCSFLMLNLFVAVIMDNFEYLTRDSSILGPHHLDEYVRVWAEYDPAACGRIHYKDMYSLLRVISPPLGLGKKCPHRVACKRLLRMDLPVADDNTVHFNSTLMALIRTALDIKIAKGGADKQQMDAELRKEMMAIWPNLSQKTLDLLVTPHKSTDLTVGKIYAAMMIMEYYRQSKAKKLQAMREEQDRTPLMFQRMEPPSPTQEGGPGQNALPSTQLDPGGALMAHESGLKESPSWVTQRAQEMFQKTGTWSPEQGPPTDMPNSQPNSQSVEMREMGRDGYSDSEHYLPMEGQGRAASMPRLPAENQRRRGRPRGNNLSTISDTSPMKRSASVLGPKARRLDDYSLERVPPEENQRHHQRRRDRSHRASERSLGRYTDVDTGLGTDLSMTTQSGDLPSKERDQERGRPKDRKHRQHHHHHHHHHHPPPPDKDRYAQERPDHGRARARDQRWSRSPSEGREHMAHRQGSSSVSGSPAPSTSGTSTPRRGRRQLPQTPSTPRPHVSYSPVIRKAGGSGPPQQQQQQQQQQQQQAVARPGRAATSGPRRYPGPTAEPLAGDRPPTGGHSSGRSPRMERRVPGPARSESPRACRHGGARWPASGPHVSEGPPGPRHHGYYRGSDYDEADGPGSGGGEEAMAGAYDAPPPVRHASSGATGRSPRTPRASGPACASPSRHGRRLPNGYYPAHGLARPRGPGSRKGLHEPYSESDDDWC

SEQ ID NO: 25456 - protein, 2302 aa, Homo sapiens
  REGION 1..2302: note = ENSP00000489992
MARFGDEMPARYGGGGSGAAAGVVVGSGGGRGAGGSRQGGQPGAQRMYKQSMAQRARTMALYNPIPVRQNCLTVNRSLFLFSEDNVVRKYAKKITEWPPFEYMILATIIANCIVLALEQHLPDDDKTPMSERLDDTEPYFIGIFCFEAGIKIIALGFAFHKGSYLRNGWNVMDFVVVLTGILATVGTEFDLRTLRAVRVLRPLKLVSGIPSLQVVLKSIMKAMIPLLQIGLLLFFAILIFAIIGLEFYMGKFHTTCFEEGTDDIQGESPAPCGTEEPARTCPNGTKCQPYWEGPNNGITQFDNILFAVLTVFQCITMEGWTDLLYNSNDASGNTWNWLYFIPLIIIGSFFMLNLVLGVLSGEFAKERERVENRRAFLKLRRQQQIERELNGYMEWISKAEEVILAEDETDGEQRHPFDGALRRTTIKKSKTDLLNPEEAEDQLADIASVGSPFARASIKSAKLENSTFFHKKERRMRFYIRRMVKTQAFYWTVLSLVALNTLCVAIVHYNQPEWLSDFLYYAEFIFLGLFMSEMFIKMYGLGTRPYFHSSFNCFDCGVIIGSIFEVIWAVIKPGTSFGISVLRALRLLRIFKVTKYWASLRNLVVSLLNSMKSIISLLFLLFLFIVVFALLGMQLFGGQFNFDEGTPPTNFDTFPAAIMTVFQILTGEDWNEVMYDGIKSQGGVQGGMVFSIYFIVLTLFGNYTLLNVFLAIAVDNLANAQELTKDEQEEEEAANQKLALQKAKEVAEVSPLSAANMSIAVKEQQKNQKPAKSVWEQRTSEMRKQNLLASREALYNEMDPDERWKAAYTRHLRPDMKTHLDRPLVVDPQENRNNNTNKSRAAEPTVDQRLGQQRAEDFLRKQARYHDRARDPSGSAGLDARRPWAGSQEAELSREGPYGRESDHHAREGSLEQPGFWEGEAERGKAGDPHRRHVHRQGGSRESRSGSPRTGADGEHRRHRAHRRPGEEGPEDKAERRARHREGSRPARGGEGEGEGPDGGERRRRHRHGAPATYEGDARREDKERRHRRRKENQGSGVPVSGPNLSTTRPIQQDLGRQDPPLAEDIDNMKNNKLATAESAAPHGSLGHAGLPQSPAKMGNSTDPGPMLAIPAMATNPQNAASRRTPNNPGNPSNPGPPKTPENSLIVTNPSGTQTNSAKTARKPDHTTVDIPPACPPPLNHTVVQVNKNANPDPLPKKEEEKKEEEEDDRGEDGPKPMPPYSSMFILSTTNPLRRLCHYILNLRYFEMCILMVIAMSSIALAAEDPVQPNAPRNNVLRYFDYVFTGVFTFEMVIKMIDLGLVLHQGAYFRDLWNILDFIVVSGALVAFAFTGNSKGKDINTIKSLRVLRVLRPLKTIKRLPKLKAVFDCVVNSLKNVFNILIVYMLFMFIFAVVAVQLFKGKFFHCTDESKEFEKDCRGKYLLYEKNEVKARDREWKKYEFHYDNVLWALLTLFTVSTGEGWPQVLKHSVDATFENQGPSPGYRMEMSIFYVVYFVVFPFFFVNIFVALIIITFQEQGDKMMEEYSLEKNERACIDFAISAKPLTRHMPQNKQSFQYRMWQFVVSPPFEYTIMAMIALNTIVLMMKFYGASVAYENALRVFNIVFTSLFSLECVLKVMAFGILNYFRDAWNIFDFVTVLGSITDILVTEFGNNFINLSFLRLFRAARLIKLLRQGYTIRILLWTFVQSFKALPYVCLLIAMLFFIYAIIGMQVFGNIGIDVEDEDSDEDEFQITEHNNFRTFFQALMLLFRSATGEAWHNIMLSCLSGKPCDKNSGILTRECGNEFAYFYFVSFIFLCSFLMLNLFVAVIMDNFEYLTRDSSILGPHHLDEYVRVWAEYDPAACGRIHYKDMYSLLRVISPPLGLGKKCPHRVACKRLLRMDLPVADDNTVHFNSTLMALIRTALDIKIAKGGADKQQMDAELRKEMMAIWPNLSQKTLDLLVTPHKSTDLTVGKIYAAMMIMEYYRQSKAKKLQAMREEQDRTPLMFQRMEPPSPTQEGGPGQNALPSTQLDPGGALMAHESGLKESPSWVTQRAQEMFQKTGTWSPEQGPPTDMPNSQPNSQSVEMREMGRDGYSDSEHYLPMEGQGRAASMPRLPAENQRRRGRPRGNNLSTISDTSPMKRSASVLGPKARRLDDYSLERVPPEENQRHHQRRRDRSHRASERSLGRYTDVDTGLGTDLSMTTQSGDLPSKERDQERGRPKDRKHRQHHHHHHHHHHPPPPDKDRYAQERPDHGRARARDQRWSRSPSEGREHMAHRQFRKWKPSPLNIWYQHSAAGPPPAPPDPLHPPATRVLFPCDP

SEQ ID NO: 25457 - protein, 881 aa, Homo sapiens
  REGION 1..881: note = ENSP00000465598
VMAFGILNYFRDAWNIFDFVTVLGSITDILVTEFGNPNNFINLSFLRLFRAARLIKLLRQGYTIRILLWTFVQSFKALPYVCLLIAMLFFIYAIIGMQVFGNIGIDVEDEDSDEDEFQITEHNNFRTFFQALMLLFRSATGEAWHNIMLSCLSGKPCDKNSGILTRECGNEFAYFYFVSFIFLCSFLMLNLFVAVIMDNFEYLTRDSSILGPHHLDEYVRVWAEYDPAAWGRMPYLDMYQMLRHMSPPLGLGKKCPARVAYKRLLRMDLPVADDNTVHFNSTLMALIRTALDIKIAKGGADKQQMDAELRKEMMAIWPNLSQKTLDLLVTPHKSTDLTVGKIYAAMMIMEYYRQSKAKKLQAMREEQDRTPLMFQRMEPPSPTQEGGPGQNALPSTQLDPGGALMAHESGLKESPSWVTQRAQEMFQKTGTWSPEQGPPTDMPNSQPNSQSVEMREMGRDGYSDSEHYLPMEGQGRAASMPRLPAENQTISDTSPMKRSASVLGPKARRLDDYSLERVPPEENQRHHQRRRDRSHRASERSLGRYTDVDTGLGTDLSMTTQSGDLPSKERDQERGRPKDRKHRQHHHHHHHHHHPPPPDKDRYAQERPDHGRARARDQRWSRSPSEGREHMAHRQGSSSVSGSPAPSTSGTSTPRRGRRQLPQTPSTPRPHVSYSPVIRKAGGSGPPQQQQQQQQQQQQQAVARPGRAATSGPRRYPGPTAEPLAGDRPPTGGHSSGRSPRMERRVPGPARSESPRACRHGGARWPASGPHVSEGPPGPRHHGYYRGSDYDEADGPGSGGGEEAMAGAYDAPPPVRHASSGATGRSPRTPRASGPACASPSRHGRRLPNGYYPAHGLARPRGPGSRKGLHEPYSESDDDWC

SEQ ID NO: 25458 - protein, 2266 aa, Homo sapiens
  REGION 1..2266: note = ENSP00000490617
MARFGDEMPARYGGGGSGAAAGVVVGSGGGRGAGGSRQGGQPGAQRMYKQSMAQRARTMALYNPIPVRQNCLTVNRSLFLFSEDNVVRKYAKKITEWPPFEYMILATIIANCIVLALEQHLPDDDKTPMSERLDDTEPYFIGIFCFEAGIKIIALGFAFHKGSYLRNGWNVMDFVVVLTGILATVGTEFDLRTLRAVRVLRPLKLVSGIPSLQVVLKSIMKAMIPLLQIGLLLFFAILIFAIIGLEFYMGKFHTTCFEEGTDDIQGESPAPCGTEEPARTCPNGTKCQPYWEGPNNGITQFDNILFAVLTVFQCITMEGWTDLLYNSNDASGNTWNWLYFIPLIIIGSFFMLNLVLGVLSGEFAKERERVENRRAFLKLRRQQQIERELNGYMEWISKAEEVILAEDETDGEQRHPFDGALRRTTIKKSKTDLLNPEEAEDQLADIASVGSPFARASIKSAKLENSTFFHKKERRMRFYIRRMVKTQAFYWTVLSLVALNTLCVAIVHYNQPEWLSDFLYYAEFIFLGLFMSEMFIKMYGLGTRPYFHSSFNCFDCGVIIGSIFEVIWAVIKPGTSFGISVLRALRLLRIFKVTKYWASLRNLVVSLLNSMKSIISLLFLLFLFIVVFALLGMQLFGGQFNFDEGTPPTNFDTFPAAIMTVFQILTGEDWNEVMYDGIKSQGGVQGGMVFSIYFIVLTLFGNYTLLNVFLAIAVDNLANAQELTKVEADEQEEEEAANQKLALQKAKEVAEVSPLSAANMSIAVKEQQKNQKPAKSVWEQRTSEMRKQNLLASREALYNEMDPDERWKAAYTRHLRPDMKTHLDRPLVVDPQENRNNNTNKSRAAEPTVDQRLGQQRAEDFLRKQARYHDRARDPSGSAGLDARRPWAGSQEAELSREGPYGRESDHHAREGSLEQPGFWEGEAERGKAGDPHRRHVHRQGGSRESRSGSPRTGADGEHRRHRAHRRPGEEGPEDKAERRARHREGSRPARGGEGEGEGPDGGERRRRHRHGAPATYEGDARREDKERRHRRRKENQGSGVPVSGPNLSTTRPIQQDLGRQDPPLAEDIDNMKNNKLATAESAAPHGSLGHAGLPQSPAKMGNSTDPGPMLAIPAMATNPQNAASRRTPNNPGNPSNPGPPKTPENSLIVTNPSGTQTNSAKTARKPDHTTVDIPPACPPPLNHTVVQVNKNANPDPLPKKEEEKKEEEEDDRGEDGPKPMPPYSSMFILSTTNPLRRLCHYILNLRYFEMCILMVIAMSSIALAAEDPVQPNAPRNNVLRYFDYVFTGVFTFEMVIKMIDLGLVLHQGAYFRDLWNILDFIVVSGALVAFAFTGNSKGKDINTIKSLRVLRVLRPLKTIKRLPKLKAVFDCVVNSLKNVFNILIVYMLFMFIFAVVAVQLFKGKFFHCTDESKEFEKDCRGKYLLYEKNEVKARDREWKKYEFHYDNVLWALLTLFTVSTGEGWPQVLKHSVDATFENQGPSPGYRMEMSIFYVVYFVVFPFFFVNIFVALIIITFQEQGDKMMEEYSLEKNERACIDFAISAKPLTRHMPQNKQSFQYRMWQFVVSPPFEYTIMAMIALNTIVLMMKFYGASVAYENALRVFNIVFTSLFSLECVLKVMAFGILNYFRDAWNIFDFVTVLGSITDILVTEFGNPNNFINLSFLRLFRAARLIKLLRQGYTIRILLWTFVQSFKALPYVCLLIAMLFFIYAIIGMQVFGNIGIDVEDEDSDEDEFQITEHNNFRTFFQALMLLFRSATGEAWHNIMLSCLSGKPCDKNSGILTRECGNEFAYFYFVSFIFLCSFLMLNLFVAVIMDNFEYLTRDSSILGPHHLDEYVRVWAEYDPAAWGRMPYLDMYQMLRHMSPPLGLGKKCPARVAYKRLLRMDLPVADDNTVHFNSTLMALIRTALDIKIAKGGADKQQMDAELRKEMMAIWPNLSQKTLDLLVTPHKSTDLTVGKIYAAMMIMEYYRQSKAKKLQAMREEQDRTPLMFQRMEPPSPTQEGGPGQNALPSTQLDPGGALMAHESGLKESPSWVTQRAQEMFQKTGTWSPEQGPPTDMPNSQPNSQSVEMREMGRDGYSDSEHYLPMEGQGRAASMPRLPAENQRRRGRPRGNNLSTISDTSPMKRSASVLGPKARRLDDYSLERVPPEENQRHHQRRRDRSHRASERSLGRYTDVDTGLGTDLSMTTQSGDLPSKERDQERGRPKDRKHRQHHHHHHHHHHPPPPDKDRYAQERPDHGRARARDQRWSRSPSEGREHMAHRQ

SEQ ID NO: 25459 - protein, 2512 aa, Homo sapiens
  REGION 1..2512: note = ENSP00000489829
MARFGDEMPARYGGGGSGAAAGVVVGSGGGRGAGGSRQGGQPGAQRMYKQSMAQRARTMALYNPIPVRQNCLTVNRSLFLFSEDNVVRKYAKKITEWPPFEYMILATIIANCIVLALEQHLPDDDKTPMSERLDDTEPYFIGIFCFEAGIKIIALGFAFHKGSYLRNGWNVMDFVVVLTGILATVGTEFDLRTLRAVRVLRPLKLVSGIPSLQVVLKSIMKAMIPLLQIGLLLFFAILIFAIIGLEFYMGKFHTTCFEEGTDDIQGESPAPCGTEEPARTCPNGTKCQPYWEGPNNGITQFDNILFAVLTVFQCITMEGWTDLLYNSNDASGNTWNWLYFIPLIIIGSFFMLNLVLGVLSGEFAKERERVENRRAFLKLRRQQQIERELNGYMEWISKAEEVILAEDETDGEQRHPFDGALRRTTIKKSKTDLLNPEEAEDQLADIASVGSPFARASIKSAKLENSTFFHKKERRMRFYIRRMVKTQAFYWTVLSLVALNTLCVAIVHYNQPEWLSDFLYYAEFIFLGLFMSEMFIKMYGLGTRPYFHSSFNCFDCGVIIGSIFEVIWAVIKPGTSFGISVLRALRLLRIFKVTKYWASLRNLVVSLLNSMKSIISLLFLLFLFIVVFALLGMQLFGGQFNFDEGTPPTNFDTFPAAIMTVFQILTGEDWNEVMYDGIKSQGGVQGGMVFSIYFIVLTLFGNYTLLNVFLAIAVDNLANAQELTKVEADEQEEEEAANQKLALQKAKEVAEVSPLSAANMSIAVKEQQKNQKPAKSVWEQRTSEMRKQNLLASREALYNEMDPDERWKAAYTRHLRPDMKTHLDRPLVVDPQENRNNNTNKSRAAEPTVDQRLGQQRAEDFLRKQARYHDRARDPSGSAGLDARRPWAGSQEAELSREGPYGRESDHHAREGSLEQPGFWEGEAERGKAGDPHRRHVHRQGGSRESRSGSPRTGADGEHRRHRAHRRPGEEGPEDKAERRARHREGSRPARGGEGEGEGPDGGERRRRHRHGAPATYEGDARREDKERRHRRRKENQGSGVPVSGPNLSTTRPIQQDLGRQDPPLAEDIDNMKNNKLATAESAAPHGSLGHAGLPQSPAKMGNSTDPGPMLAIPAMATNPQNAASRRTPNNPGNPSNPGPPKTPENSLIVTNPSGTQTNSAKTARKPDHTTVDIPPACPPPLNHTVVQVNKNANPDPLPKKEEEKKEEEEDDRGEDGPKPMPPYSSMFILSTTNPLRRLCHYILNLRYFEMCILMVIAMSSIALAAEDPVQPNAPRNNVLRYFDYVFTGVFTFEMVIKMIDLGLVLHQGAYFRDLWNILDFIVVSGALVAFAFTGNSKGKDINTIKSLRVLRVLRPLKTIKRLPKLKAVFDCVVNSLKNVFNILIVYMLFMFIFAVVAVQLFKGKFFHCTDESKEFEKDCRGKYLLYEKNEVKARDREWKKYEFHYDNVLWALLTLFTVSTGEGWPQVLKHSVDATFENQGPSPGYRMEMSIFYVVYFVVFPFFFVNIFVALIIITFQEQGDKMMEEYSLEKNERACIDFAISAKPLTRHMPQNKQSFQYRMWQFVVSPPFEYTIMAMIALNTIVLMMKFYGASVAYENALRVFNIVFTSLFSLECVLKVMAFGILNYFRDAWNIFDFVTVLGSITDILVTEFGNPNNFINLSFLRLFRAARLIKLLRQGYTIRILLWTFVQSFKALPYVCLLIAMLFFIYAIIGMQVFGNIGIDVEDEDSDEDEFQITEHNNFRTFFQALMLLFRSATGEAWHNIMLSCLSGKPCDKNSGILTRECGNEFAYFYFVSFIFLCSFLMLNLFVAVIMDNFEYLTRDSSILGPHHLDEYVRVWAEYDPAAWGRMPYLDMYQMLRHMSPPLGLGKKCPARVAYKRLLRMDLPVADDNTVHFNSTLMALIRTALDIKIAKGGADKQQMDAELRKEMMAIWPNLSQKTLDLLVTPHKSTDLTVGKIYAAMMIMEYYRQSKAKKLQAMREEQDRTPLMFQRMEPPSPTQEGGPGQNALPSTQLDPGGALMAHESGLKESPSWVTQRAQEMFQKTGTWSPEQGPPTDMPNSQPNSQSVEMREMGRDGYSDSEHYLPMEGQGRAASMPRLPAENQRRRGRPRGNNLSTISDTSPMKRSASVLGPKARRLDDYSLERVPPEENQRHHQRRRDRSHRASERSLGRYTDVDTGLGTDLSMTTQSGDLPSKERDQERGRPKDRKHRQHHHHHHHHHHPPPPDKDRYAQERPDHGRARARDQRWSRSPSEGREHMAHRQGSSSVSGSPAPSTSGTSTPRRGRRQLPQTPSTPRPHVSYSPVIRKAGGSGPPQQQQQQQQQQQQQAVARPGRAATSGPRRYPGPTAEPLAGDRPPTGGHSSGRSPRMERRVPGPARSESPRACRHGGARWPASGPHVSEGPPGPRHHGYYRGSDYDEADGPGSGGGEEAMAGAYDAPPPVRHASSGATGRSPRTPRASGPACASPSRHGRRLPNGYYPAHGLARPRGPGSRKGLHEPYSESDDDWC

SEQ ID NO: 25460 - protein, 2495 aa, Homo sapiens
  REGION 1..2495: note = ENSP00000490223
MARFGDEMPARYGGGGSGAAAGVVVGSGGGRGAGGSRQGGQPGAQRMYKQSMAQRARTMALYNPIPVRQNCLTVNRSLFLFSEDNVVRKYAKKITEWPPFEYMILATIIANCIVLALEQHLPDDDKTPMSERLDDTEPYFIGIFCFEAGIKIIALGFAFHKGSYLRNGWNVMDFVVVLTGILATVGTEFDLRTLRAVRVLRPLKLVSGIPSLQVVLKSIMKAMIPLLQIGLLLFFAILIFAIIGLEFYMGKFHTTCFEEGTDDIQGESPAPCGTEEPARTCPNGTKCQPYWEGPNNGITQFDNILFAVLTVFQCITMEGWTDLLYNSNDASGNTWNWLYFIPLIIIGSFFMLNLVLGVLSGEFAKERERVENRRAFLKLRRQQQIERELNGYMEWISKAEEVILAEDETDGEQRHPFDGALRRTTIKKSKTDLLNPEEAEDQLADIASVGSPFARASIKSAKLENSTFFHKKERRMRFYIRRMVKTQAFYWTVLSLVALNTLCVAIVHYNQPEWLSDFLYYAEFIFLGLFMSEMFIKMYGLGTRPYFHSSFNCFDCGVIIGSIFEVIWAVIKPGTSFGISVLRALRLLRIFKVTKYWASLRNLVVSLLNSMKSIISLLFLLFLFIVVFALLGMQLFGGQFNFDEGTPPTNFDTFPAAIMTVFQILTGEDWNEVMYDGIKSQGGVQGGMVFSIYFIVLTLFGNYTLLNVFLAIAVDNLANAQELTKDEQEEEEAANQKLALQKAKEVAEVSPLSAANMSIAVKEQQKNQKPAKSVWEQRTSEMRKQNLLASREALYNEMDPDERWKAAYTRHLRPDMKTHLDRPLVVDPQENRNNNTNKSRAAEPTVDQRLGQQRAEDFLRKQARYHDRARDPSGSAGLDARRPWAGSQEAELSREGPYGRESDHHAREGSLEQPGFWEGEAERGKAGDPHRRHVHRQGGSRESRSGSPRTGADGEHRRHRAHRRPGEEGPEDKAERRARHREGSRPARGGEGEGEGPDGGERRRRHRHGAPATYEGDARREDKERRHRRRKENQGSGVPVSGPNLSTTRPIQQDLGRQDPPLAEDIDNMKNNKLATAESAAPHGSLGHAGLPQSPAKMGNSTDPGPMLAIPAMATNPQNAASRRTPNNPGNPSNPGPPKTPENSLIVTNPSGTQTNSAKTARKPDHTTVDIPPACPPPLNHTVVQVNKNANPDPLPKKEEEKKEEEEDDRGEDGPKPMPPYSSMFILSTTNPLRRLCHYILNLRYFEMCILMVIAMSSIALAAEDPVQPNAPRNNVLRYFDYVFTGVFTFEMVIKMIDLGLVLHQGAYFRDLWNILDFIVVSGALVAFAFTGNSKGKDINTIKSLRVLRVLRPLKTIKRLPKLKAVFDCVVNSLKNVFNILIVYMLFMFIFAVVAVQLFKGKFFHCTDESKEFEKDCRGKYLLYEKNEVKARDREWKKYEFHYDNVLWALLTLFTVSTGEGWPQVLKHSVDATFENQGPSPGYRMEMSIFYVVYFVVFPFFFVNIFVALIIITFQEQGDKMMEEYSLEKNERACIDFAISAKPLTRHMPQNKQSFQYRMWQFVVSPPFEYTIMAMIALNTIVLMMKFYGASVAYENALRVFNIVFTSLFSLECVLKVMAFGILNYFRDAWNIFDFVTVLGSITDILVTEFGNNFINLSFLRLFRAARLIKLLRQGYTIRILLWTFVQSFKALPYVCLLIAMLFFIYAIIGMQVFGNIGIDVEDEDSDEDEFQITEHNNFRTFFQALMLLFRSATGEAWHNIMLSCLSGKPCDKNSGILTRECGNEFAYFYFVSFIFLCSFLMLNLFVAVIMDNFEYLTRDSSILGPHHLDEYVRVWAEYDPAAWGRMPYLDMYQMLRHMSPPLGLGKKCPARVAYKRLLRMDLPVADDNTVHFNSTLMALIRTALDIKIAKGGADKQQMDAELRKEMMAIWPNLSQKTLDLLVTPHKSTDLTVGKIYAAMMIMEYYRQSKAKKLQAMREEQDRTPLMFQRMEPPSPTQEGGPGQNALPSTQLDPGGALMAHESGLKESPSWVTQRAQEMFQKTGTWSPEQGPPTDMPNSQPNSQSVEMREMGRDGYSDSEHYLPMEGQGRAASMPRLPAENQTISDTSPMKRSASVLGPKARRLDDYSLERVPPEENQRHHQRRRDRSHRASERSLGRYTDVDTGLGTDLSMTTQSGDLPSKERDQERGRPKDRKHRQHHHHHHHHHHPPPPDKDRYAQERPDHGRARARDQRWSRSPSEGREHMAHRQGSSSVSGSPAPSTSGTSTPRRGRRQLPQTPSTPRPHVSYSPVIRKAGGSGPPQQQQQQQQQQQQQAVARPGRAATSGPRRYPGPTAEPLAGDRPPTGGHSSGRSPRMERRVPGPARSESPRACRHGGARWPASGPHVSEGPPGPRHHGYYRGSDYDEADGPGSGGGEEAMAGAYDAPPPVRHASSGATGRSPRTPRASGPACASPSRHGRRLPNGYYPAHGLARPRGPGSRKGLHEPYSESDDDWC

SEQ ID NO: 25461 - protein, 2507 aa, Homo sapiens
  REGION 1..2507: note = ENSP00000490001
MARFGDEMPARYGGGGSGAAAGVVVGSGGGRGAGGSRQGGQPGAQRMYKQSMAQRARTMALYNPIPVRQNCLTVNRSLFLFSEDNVVRKYAKKITEWPPFEYMILATIIANCIVLALEQHLPDDDKTPMSERLDDTEPYFIGIFCFEAGIKIIALGFAFHKGSYLRNGWNVMDFVVVLTGILATVGTEFDLRTLRAVRVLRPLKLVSGIPSLQVVLKSIMKAMIPLLQIGLLLFFAILIFAIIGLEFYMGKFHTTCFEEGTDDIQGESPAPCGTEEPARTCPNGTKCQPYWEGPNNGITQFDNILFAVLTVFQCITMEGWTDLLYNSNDASGNTWNWLYFIPLIIIGSFFMLNLVLGVLSGEFAKERERVENRRAFLKLRRQQQIERELNGYMEWISKAEEVILAEDETDGEQRHPFDGALRRTTIKKSKTDLLNPEEAEDQLADIASVGSPFARASIKSAKLENSTFFHKKERRMRFYIRRMVKTQAFYWTVLSLVALNTLCVAIVHYNQPEWLSDFLYYAEFIFLGLFMSEMFIKMYGLGTRPYFHSSFNCFDCGVIIGSIFEVIWAVIKPGTSFGISVLRALRLLRIFKVTKYWASLRNLVVSLLNSMKSIISLLFLLFLFIVVFALLGMQLFGGQFNFDEGTPPTNFDTFPAAIMTVFQILTGEDWNEVMYDGIKSQGGVQGGMVFSIYFIVLTLFGNYTLLNVFLAIAVDNLANAQELTKDEQEEEEAANQKLALQKAKEVAEVSPLSAANMSIAVKEQQKNQKPAKSVWEQRTSEMRKQNLLASREALYNEMDPDERWKAAYTRHLRPDMKTHLDRPLVVDPQENRNNNTNKSRAAEPTVDQRLGQQRAEDFLRKQARYHDRARDPSGSAGLDARRPWAGSQEAELSREGPYGRESDHHAREGSLEQPGFWEGEAERGKAGDPHRRHVHRQGGSRESRSGSPRTGADGEHRRHRAHRRPGEEGPEDKAERRARHREGSRPARGGEGEGEGPDGGERRRRHRHGAPATYEGDARREDKERRHRRRKENQGSGVPVSGPNLSTTRPIQQDLGRQDPPLAEDIDNMKNNKLATAESAAPHGSLGHAGLPQSPAKMGNSTDPGPMLAIPAMATNPQNAASRRTPNNPGNPSNPGPPKTPENSLIVTNPSGTQTNSAKTARKPDHTTVDIPPACPPPLNHTVVQVNKNANPDPLPKKEEEKKEEEEDDRGEDGPKPMPPYSSMFILSTTNPLRRLCHYILNLRYFEMCILMVIAMSSIALAAEDPVQPNAPRNNVLRYFDYVFTGVFTFEMVIKMIDLGLVLHQGAYFRDLWNILDFIVVSGALVAFAFTGNSKGKDINTIKSLRVLRVLRPLKTIKRLPKLKAVFDCVVNSLKNVFNILIVYMLFMFIFAVVAVQLFKGKFFHCTDESKEFEKDCRGKYLLYEKNEVKARDREWKKYEFHYDNVLWALLTLFTVSTGEGWPQVLKHSVDATFENQGPSPGYRMEMSIFYVVYFVVFPFFFVNIFVALIIITFQEQGDKMMEEYSLEKNERACIDFAISAKPLTRHMPQNKQSFQYRMWQFVVSPPFEYTIMAMIALNTIVLMMKFYGASVAYENALRVFNIVFTSLFSLECVLKVMAFGILNYFRDAWNIFDFVTVLGSITDILVTEFGNNFINLSFLRLFRAARLIKLLRQGYTIRILLWTFVQSFKALPYVCLLIAMLFFIYAIIGMQVFGNIGIDVEDEDSDEDEFQITEHNNFRTFFQALMLLFRSATGEAWHNIMLSCLSGKPCDKNSGILTRECGNEFAYFYFVSFIFLCSFLMLNLFVAVIMDNFEYLTRDSSILGPHHLDEYVRVWAEYDPAAWGRMPYLDMYQMLRHMSPPLGLGKKCPARVAYKRLLRMDLPVADDNTVHFNSTLMALIRTALDIKIAKGGADKQQMDAELRKEMMAIWPNLSQKTLDLLVTPHKSTDLTVGKIYAAMMIMEYYRQSKAKKLQAMREEQDRTPLMFQRMEPPSPTQEGGPGQNALPSTQLDPGGALMAHESGLKESPSWVTQRAQEMFQKTGTWSPEQGPPTDMPNSQPNSQSVEMREMGRDGYSDSEHYLPMEGQGRAASMPRLPAENQRRRGRPRGNNLSTISDTSPMKRSASVLGPKARRLDDYSLERVPPEENQRHHQRRRDRSHRASERSLGRYTDVDTGLGTDLSMTTQSGDLPSKERDQERGRPKDRKHRQHHHHHHHHHHPPPPDKDRYAQERPDHGRARARDQRWSRSPSEGREHMAHRQGSSSVSGSPAPSTSGTSTPRRGRRQLPQTPSTPRPHVSYSPVIRKAGGSGPPQQQQQQQQQQQQQAVARPGRAATSGPRRYPGPTAEPLAGDRPPTGGHSSGRSPRMERRVPGPARSESPRACRHGGARWPASGPHVSEGPPGPRHHGYYRGSDYDEADGPGSGGGEEAMAGAYDAPPPVRHASSGATGRSPRTPRASGPACASPSRHGRRLPNGYYPAHGLARPRGPGSRKGLHEPYSESDDDWC

SEQ ID NO: 25462 - protein, 2508 aa, Homo sapiens
  REGION 1..2508: note = ENSP00000460092
MARFGDEMPARYGGGGSGAAAGVVVGSGGGRGAGGSRQGGQPGAQRMYKQSMAQRARTMALYNPIPVRQNCLTVNRSLFLFSEDNVVRKYAKKITEWPPFEYMILATIIANCIVLALEQHLPDDDKTPMSERLDDTEPYFIGIFCFEAGIKIIALGFAFHKGSYLRNGWNVMDFVVVLTGILATVGTEFDLRTLRAVRVLRPLKLVSGIPSLQVVLKSIMKAMIPLLQIGLLLFFAILIFAIIGLEFYMGKFHTTCFEEGTDDIQGESPAPCGTEEPARTCPNGTKCQPYWEGPNNGITQFDNILFAVLTVFQCITMEGWTDLLYNSNDASGNTWNWLYFIPLIIIGSFFMLNLVLGVLSGEFAKERERVENRRAFLKLRRQQQIERELNGYMEWISKAEEVILAEDETDGEQRHPFDVGALRRTTIKKSKTDLLNPEEAEDQLADIASVGSPFARASIKSAKLENSTFFHKKERRMRFYIRRMVKTQAFYWTVLSLVALNTLCVAIVHYNQPEWLSDFLYYAEFIFLGLFMSEMFIKMYGLGTRPYFHSSFNCFDCGVIIGSIFEVIWAVIKPGTSFGISVLRALRLLRIFKVTKYWASLRNLVVSLLNSMKSIISLLFLLFLFIVVFALLGMQLFGGQFNFDEGTPPTNFDTFPAAIMTVFQILTGEDWNEVMYDGIKSQGGVQGGMVFSIYFIVLTLFGNYTLLNVFLAIAVDNLANAQELTKDEQEEEEAANQKLALQKAKEVAEVSPLSAANMSIAVKEQQKNQKPAKSVWEQRTSEMRKQNLLASREALYNEMDPDERWKAAYTRHLRPDMKTHLDRPLVVDPQENRNNNTNKSRAAEPTVDQRLGQQRAEDFLRKQARYHDRARDPSGSAGLDARRPWAGSQEAELSREGPYGRESDHHAREGSLEQPGFWEGEAERGKAGDPHRRHVHRQGGSRESRSGSPRTGADGEHRRHRAHRRPGEEGPEDKAERRARHREGSRPARGGEGEGEGPDGGERRRRHRHGAPATYEGDARREDKERRHRRRKENQGSGVPVSGPNLSTTRPIQQDLGRQDPPLAEDIDNMKNNKLATAESAAPHGSLGHAGLPQSPAKMGNSTDPGPMLAIPAMATNPQNAASRRTPNNPGNPSNPGPPKTPENSLIVTNPSGTQTNSAKTARKPDHTTVDIPPACPPPLNHTVVQVNKNANPDPLPKKEEEKKEEEEDDRGEDGPKPMPPYSSMFILSTTNPLRRLCHYILNLRYFEMCILMVIAMSSIALAAEDPVQPNAPRNNVLRYFDYVFTGVFTFEMVIKMIDLGLVLHQGAYFRDLWNILDFIVVSGALVAFAFTGNSKGKDINTIKSLRVLRVLRPLKTIKRLPKLKAVFDCVVNSLKNVFNILIVYMLFMFIFAVVAVQLFKGKFFHCTDESKEFEKDCRGKYLLYEKNEVKARDREWKKYEFHYDNVLWALLTLFTVSTGEGWPQVLKHSVDATFENQGPSPGYRMEMSIFYVVYFVVFPFFFVNIFVALIIITFQEQGDKMMEEYSLEKNERACIDFAISAKPLTRHMPQNKQSFQYRMWQFVVSPPFEYTIMAMIALNTIVLMMKFYGASVAYENALRVFNIVFTSLFSLECVLKVMAFGILNYFRDAWNIFDFVTVLGSITDILVTEFGNNFINLSFLRLFRAARLIKLLRQGYTIRILLWTFVQSFKALPYVCLLIAMLFFIYAIIGMQVFGNIGIDVEDEDSDEDEFQITEHNNFRTFFQALMLLFRSATGEAWHNIMLSCLSGKPCDKNSGILTRECGNEFAYFYFVSFIFLCSFLMLNLFVAVIMDNFEYLTRDSSILGPHHLDEYVRVWAEYDPAACGRIHYKDMYSLLRVISPPLGLGKKCPHRVACKRLLRMDLPVADDNTVHFNSTLMALIRTALDIKIAKGGADKQQMDAELRKEMMAIWPNLSQKTLDLLVTPHKSTDLTVGKIYAAMMIMEYYRQSKAKKLQAMREEQDRTPLMFQRMEPPSPTQEGGPGQNALPSTQLDPGGALMAHESGLKESPSWVTQRAQEMFQKTGTWSPEQGPPTDMPNSQPNSQSVEMREMGRDGYSDSEHYLPMEGQGRAASMPRLPAENQRRRGRPRGNNLSTISDTSPMKRSASVLGPKARRLDDYSLERVPPEENQRHHQRRRDRSHRASERSLGRYTDVDTGLGTDLSMTTQSGDLPSKERDQERGRPKDRKHRQHHHHHHHHHHPPPPDKDRYAQERPDHGRARARDQRWSRSPSEGREHMAHRQGSSSVSGSPAPSTSGTSTPRRGRRQLPQTPSTPRPHVSYSPVIRKAGGSGPPQQQQQQQQQQQQQAVARPGRAATSGPRRYPGPTAEPLAGDRPPTGGHSSGRSPRMERRVPGPARSESPRACRHGGARWPASGPHVSEGPPGPRHHGYYRGSDYDEADGPGSGGGEEAMAGAYDAPPPVRHASSGATGRSPRTPRASGPACASPSRHGRRLPNGYYPAHGLARPRGPGSRKGLHEPYSESDDDWC

SEQ ID NO: 25463 - protein, 2249 aa, Homo sapiens
  REGION 1..2249: note = ENSP00000489777
MARFGDEMPARYGGGGSGAAAGVVVGSGGGRGAGGSRQGGQPGAQRMYKQSMAQRARTMALYNPIPVRQNCLTVNRSLFLFSEDNVVRKYAKKITEWPPFEYMILATIIANCIVLALEQHLPDDDKTPMSERLDDTEPYFIGIFCFEAGIKIIALGFAFHKGSYLRNGWNVMDFVVVLTGILATVGTEFDLRTLRAVRVLRPLKLVSGIPSLQVVLKSIMKAMIPLLQIGLLLFFAILIFAIIGLEFYMGKFHTTCFEEGTDDIQGESPAPCGTEEPARTCPNGTKCQPYWEGPNNGITQFDNILFAVLTVFQCITMEGWTDLLYNSNDASGNTWNWLYFIPLIIIGSFFMLNLVLGVLSGEFAKERERVENRRAFLKLRRQQQIERELNGYMEWISKAEEVILAEDETDGEQRHPFDGALRRTTIKKSKTDLLNPEEAEDQLADIASVGSPFARASIKSAKLENSTFFHKKERRMRFYIRRMVKTQAFYWTVLSLVALNTLCVAIVHYNQPEWLSDFLYYAEFIFLGLFMSEMFIKMYGLGTRPYFHSSFNCFDCGVIIGSIFEVIWAVIKPGTSFGISVLRALRLLRIFKVTKYWASLRNLVVSLLNSMKSIISLLFLLFLFIVVFALLGMQLFGGQFNFDEGTPPTNFDTFPAAIMTVFQILTGEDWNEVMYDGIKSQGGVQGGMVFSIYFIVLTLFGNYTLLNVFLAIAVDNLANAQELTKDEQEEEEAANQKLALQKAKEVAEVSPLSAANMSIAVKEQQKNQKPAKSVWEQRTSEMRKQNLLASREALYNEMDPDERWKAAYTRHLRPDMKTHLDRPLVVDPQENRNNNTNKSRAAEPTVDQRLGQQRAEDFLRKQARYHDRARDPSGSAGLDARRPWAGSQEAELSREGPYGRESDHHAREGSLEQPGFWEGEAERGKAGDPHRRHVHRQGGSRESRSGSPRTGADGEHRRHRAHRRPGEEGPEDKAERRARHREGSRPARGGEGEGEGPDGGERRRRHRHGAPATYEGDARREDKERRHRRRKENQGSGVPVSGPNLSTTRPIQQDLGRQDPPLAEDIDNMKNNKLATAESAAPHGSLGHAGLPQSPAKMGNSTDPGPMLAIPAMATNPQNAASRRTPNNPGNPSNPGPPKTPENSLIVTNPSGTQTNSAKTARKPDHTTVDIPPACPPPLNHTVVQVNKNANPDPLPKKEEEKKEEEEDDRGEDGPKPMPPYSSMFILSTTNPLRRLCHYILNLRYFEMCILMVIAMSSIALAAEDPVQPNAPRNNVLRYFDYVFTGVFTFEMVIKMIDLGLVLHQGAYFRDLWNILDFIVVSGALVAFAFTGNSKGKDINTIKSLRVLRVLRPLKTIKRLPKLKAVFDCVVNSLKNVFNILIVYMLFMFIFAVVAVQLFKGKFFHCTDESKEFEKDCRGKYLLYEKNEVKARDREWKKYEFHYDNVLWALLTLFTVSTGEGWPQVLKHSVDATFENQGPSPGYRMEMSIFYVVYFVVFPFFFVNIFVALIIITFQEQGDKMMEEYSLEKNERACIDFAISAKPLTRHMPQNKQSFQYRMWQFVVSPPFEYTIMAMIALNTIVLMMKFYGASVAYENALRVFNIVFTSLFSLECVLKVMAFGILNYFRDAWNIFDFVTVLGSITDILVTEFGNNFINLSFLRLFRAARLIKLLRQGYTIRILLWTFVQSFKALPYVCLLIAMLFFIYAIIGMQVFGNIGIDVEDEDSDEDEFQITEHNNFRTFFQALMLLFRSATGEAWHNIMLSCLSGKPCDKNSGILTRECGNEFAYFYFVSFIFLCSFLMLNLFVAVIMDNFEYLTRDSSILGPHHLDEYVRVWAEYDPAAWGRMPYLDMYQMLRHMSPPLGLGKKCPARVAYKRLLRMDLPVADDNTVHFNSTLMALIRTALDIKIAKGGADKQQMDAELRKEMMAIWPNLSQKTLDLLVTPHKSTDLTVGKIYAAMMIMEYYRQSKAKKLQAMREEQDRTPLMFQRMEPPSPTQEGGPGQNALPSTQLDPGGALMAHESGLKESPSWVTQRAQEMFQKTGTWSPEQGPPTDMPNSQPNSQSVEMREMGRDGYSDSEHYLPMEGQGRAASMPRLPAENQTISDTSPMKRSASVLGPKARRLDDYSLERVPPEENQRHHQRRRDRSHRASERSLGRYTDVDTGLGTDLSMTTQSGDLPSKERDQERGRPKDRKHRQHHHHHHHHHHPPPPDKDRYAQERPDHGRARARDQRWSRSPSEGREHMAHRQ

SEQ ID NO: 25464 - protein, 2262 aa, Homo sapiens
  REGION 1..2262: note = ENSP00000489715
MARFGDEMPARYGGGGSGAAAGVVVGSGGGRGAGGSRQGGQPGAQRMYKQSMAQRARTMALYNPIPVRQNCLTVNRSLFLFSEDNVVRKYAKKITEWPPFEYMILATIIANCIVLALEQHLPDDDKTPMSERLDDTEPYFIGIFCFEAGIKIIALGFAFHKGSYLRNGWNVMDFVVVLTGILATVGTEFDLRTLRAVRVLRPLKLVSGIPSLQVVLKSIMKAMIPLLQIGLLLFFAILIFAIIGLEFYMGKFHTTCFEEGTDDIQGESPAPCGTEEPARTCPNGTKCQPYWEGPNNGITQFDNILFAVLTVFQCITMEGWTDLLYNSNDASGNTWNWLYFIPLIIIGSFFMLNLVLGVLSGEFAKERERVENRRAFLKLRRQQQIERELNGYMEWISKAEEVILAEDETDGEQRHPFDVGALRRTTIKKSKTDLLNPEEAEDQLADIASVGSPFARASIKSAKLENSTFFHKKERRMRFYIRRMVKTQAFYWTVLSLVALNTLCVAIVHYNQPEWLSDFLYYAEFIFLGLFMSEMFIKMYGLGTRPYFHSSFNCFDCGVIIGSIFEVIWAVIKPGTSFGISVLRALRLLRIFKVTKYWASLRNLVVSLLNSMKSIISLLFLLFLFIVVFALLGMQLFGGQFNFDEGTPPTNFDTFPAAIMTVFQILTGEDWNEVMYDGIKSQGGVQGGMVFSIYFIVLTLFGNYTLLNVFLAIAVDNLANAQELTKDEQEEEEAANQKLALQKAKEVAEVSPLSAANMSIAVKEQQKNQKPAKSVWEQRTSEMRKQNLLASREALYNEMDPDERWKAAYTRHLRPDMKTHLDRPLVVDPQENRNNNTNKSRAAEPTVDQRLGQQRAEDFLRKQARYHDRARDPSGSAGLDARRPWAGSQEAELSREGPYGRESDHHAREGSLEQPGFWEGEAERGKAGDPHRRHVHRQGGSRESRSGSPRTGADGEHRRHRAHRRPGEEGPEDKAERRARHREGSRPARGGEGEGEGPDGGERRRRHRHGAPATYEGDARREDKERRHRRRKENQGSGVPVSGPNLSTTRPIQQDLGRQDPPLAEDIDNMKNNKLATAESAAPHGSLGHAGLPQSPAKMGNSTDPGPMLAIPAMATNPQNAASRRTPNNPGNPSNPGPPKTPENSLIVTNPSGTQTNSAKTARKPDHTTVDIPPACPPPLNHTVVQVNKNANPDPLPKKEEEKKEEEEDDRGEDGPKPMPPYSSMFILSTTNPLRRLCHYILNLRYFEMCILMVIAMSSIALAAEDPVQPNAPRNNVLRYFDYVFTGVFTFEMVIKMIDLGLVLHQGAYFRDLWNILDFIVVSGALVAFAFTGNSKGKDINTIKSLRVLRVLRPLKTIKRLPKLKAVFDCVVNSLKNVFNILIVYMLFMFIFAVVAVQLFKGKFFHCTDESKEFEKDCRGKYLLYEKNEVKARDREWKKYEFHYDNVLWALLTLFTVSTGEGWPQVLKHSVDATFENQGPSPGYRMEMSIFYVVYFVVFPFFFVNIFVALIIITFQEQGDKMMEEYSLEKNERACIDFAISAKPLTRHMPQNKQSFQYRMWQFVVSPPFEYTIMAMIALNTIVLMMKFYGASVAYENALRVFNIVFTSLFSLECVLKVMAFGILNYFRDAWNIFDFVTVLGSITDILVTEFGNNFINLSFLRLFRAARLIKLLRQGYTIRILLWTFVQSFKALPYVCLLIAMLFFIYAIIGMQVFGNIGIDVEDEDSDEDEFQITEHNNFRTFFQALMLLFRSATGEAWHNIMLSCLSGKPCDKNSGILTRECGNEFAYFYFVSFIFLCSFLMLNLFVAVIMDNFEYLTRDSSILGPHHLDEYVRVWAEYDPAACGRIHYKDMYSLLRVISPPLGLGKKCPHRVACKRLLRMDLPVADDNTVHFNSTLMALIRTALDIKIAKGGADKQQMDAELRKEMMAIWPNLSQKTLDLLVTPHKSTDLTVGKIYAAMMIMEYYRQSKAKKLQAMREEQDRTPLMFQRMEPPSPTQEGGPGQNALPSTQLDPGGALMAHESGLKESPSWVTQRAQEMFQKTGTWSPEQGPPTDMPNSQPNSQSVEMREMGRDGYSDSEHYLPMEGQGRAASMPRLPAENQRRRGRPRGNNLSTISDTSPMKRSASVLGPKARRLDDYSLERVPPEENQRHHQRRRDRSHRASERSLGRYTDVDTGLGTDLSMTTQSGDLPSKERDQERGRPKDRKHRQHHHHHHHHHHPPPPDKDRYAQERPDHGRARARDQRWSRSPSEGREHMAHRQ

SEQ ID NO: 25465 - protein, 550 aa, Homo sapiens
  REGION 1..550: note = ENSP00000490173
VMAFGILNYFRDAWNIFDFVTVLGSITDILVTEFGNPNNFINLSFLRLFRAARLIKLLRQGYTIRILLWTFVQSFKVFGNIGIDVEDEDSDEDEFQITEHNNFRTFFQALMLLFRSATGEAWHNIMLSCLSGKPCDKNSGILTRECGNEFAYFYFVSFIFLCSFLRLLRMDLPVADDNTVHFNSTLMALIRTALDIKIAKGGADKQQMDAELRKEMMAIWPNLSQKTLDLLVTPHKSTDLTVGKIYAAMMIMEYYRQSKAKKLQAMREEQDRTPLMFQRMEPPSPTQEGGPGQNALPSTQLDPGGALMAHESGLKESPSWVTQRAQEMFQKTGTWSPEQGPPTDMPNSQPNSQSVEMREMGRDGYSDSEHYLPMEGQGRAASMPRLPAENQRRRGRPRGNNLSTISDTSPMKRSASVLGPKARRLDDYSLERVPPEENQRHHQRRRDRSHRASERSLGRYTDVDTGLGTDLSMTTQSGDLPSKERDQERGRPKDRKHRQHHHHHHHHHHPPPPDKDRYAQERPDHGRARARDQRWSRSPSEGREHMAHRQ

SEQ ID NO: 25466 - protein, 2263 aa, Homo sapiens
  REGION 1..2263: note = ENSP00000490578
MARFGDEMPARYGGGGSGAAAGVVVGSGGGRGAGGSRQGGQPGAQRMYKQSMAQRARTMALYNPIPVRQNCLTVNRSLFLFSEDNVVRKYAKKITEWPPFEYMILATIIANCIVLALEQHLPDDDKTPMSERLDDTEPYFIGIFCFEAGIKIIALGFAFHKGSYLRNGWNVMDFVVVLTGILATVGTEFDLRTLRAVRVLRPLKLVSGIPSLQVVLKSIMKAMIPLLQIGLLLFFAILIFAIIGLEFYMGKFHTTCFEEGTDDIQGESPAPCGTEEPARTCPNGTKCQPYWEGPNNGITQFDNILFAVLTVFQCITMEGWTDLLYNSNDASGNTWNWLYFIPLIIIGSFFMLNLVLGVLSGEFAKERERVENRRAFLKLRRQQQIERELNGYMEWISKAEEVILAEDETDGEQRHPFDGALRRTTIKKSKTDLLNPEEAEDQLADIASVGSPFARASIKSAKLENSTFFHKKERRMRFYIRRMVKTQAFYWTVLSLVALNTLCVAIVHYNQPEWLSDFLYYAEFIFLGLFMSEMFIKMYGLGTRPYFHSSFNCFDCGVIIGSIFEVIWAVIKPGTSFGISVLRALRLLRIFKVTKYWASLRNLVVSLLNSMKSIISLLFLLFLFIVVFALLGMQLFGGQFNFDEGTPPTNFDTFPAAIMTVFQILTGEDWNEVMYDGIKSQGGVQGGMVFSIYFIVLTLFGNYTLLNVFLAIAVDNLANAQELTKDEQEEEEAANQKLALQKAKEVAEVSPLSAANMSIAVKEQQKNQKPAKSVWEQRTSEMRKQNLLASREALYNEMDPDERWKAAYTRHLRPDMKTHLDRPLVVDPQENRNNNTNKSRAAEPTVDQRLGQQRAEDFLRKQARYHDRARDPSGSAGLDARRPWAGSQEAELSREGPYGRESDHHAREGSLEQPGFWEGEAERGKAGDPHRRHVHRQGGSRESRSGSPRTGADGEHRRHRAHRRPGEEGPEDKAERRARHREGSRPARGGEGEGEGPDGGERRRRHRHGAPATYEGDARREDKERRHRRRKENQGSGVPVSGPNLSTTRPIQQDLGRQDPPLAEDIDNMKNNKLATAESAAPHGSLGHAGLPQSPAKMGNSTDPGPMLAIPAMATNPQNAASRRTPNNPGNPSNPGPPKTPENSLIVTNPSGTQTNSAKTARKPDHTTVDIPPACPPPLNHTVVQVNKNANPDPLPKKEEEKKEEEEDDRGEDGPKPMPPYSSMFILSTTNPLRRLCHYILNLRYFEMCILMVIAMSSIALAAEDPVQPNAPRNNVLRYFDYVFTGVFTFEMVIKMIDLGLVLHQGAYFRDLWNILDFIVVSGALVAFAFTGNSKGKDINTIKSLRVLRVLRPLKTIKRLPKLKAVFDCVVNSLKNVFNILIVYMLFMFIFAVVAVQLFKGKFFHCTDESKEFEKDCRGKYLLYEKNEVKARDREWKKYEFHYDNVLWALLTLFTVSTGEGWPQVLKHSVDATFENQGPSPGYRMEMSIFYVVYFVVFPFFFVNIFVALIIITFQEQGDKMMEEYSLEKNERACIDFAISAKPLTRHMPQNKQSFQYRMWQFVVSPPFEYTIMAMIALNTIVLMMKFYGASVAYENALRVFNIVFTSLFSLECVLKVMAFGILNYFRDAWNIFDFVTVLGSITDILVTEFGNPNNFINLSFLRLFRAARLIKLLRQGYTIRILLWTFVQSFKALPYVCLLIAMLFFIYAIIGMQVFGNIGIDVEDEDSDEDEFQITEHNNFRTFFQALMLLFRSATGEAWHNIMLSCLSGKPCDKNSGILTRECGNEFAYFYFVSFIFLCSFLMLNLFVAVIMDNFEYLTRDSSILGPHHLDEYVRVWAEYDPAAWGRMPYLDMYQMLRHMSPPLGLGKKCPARVAYKRLLRMDLPVADDNTVHFNSTLMALIRTALDIKIAKGGADKQQMDAELRKEMMAIWPNLSQKTLDLLVTPHKSTDLTVGKIYAAMMIMEYYRQSKAKKLQAMREEQDRTPLMFQRMEPPSPTQEGGPGQNALPSTQLDPGGALMAHESGLKESPSWVTQRAQEMFQKTGTWSPEQGPPTDMPNSQPNSQSVEMREMGRDGYSDSEHYLPMEGQGRAASMPRLPAENQRRRGRPRGNNLSTISDTSPMKRSASVLGPKARRLDDYSLERVPPEENQRHHQRRRDRSHRASERSLGRYTDVDTGLGTDLSMTTQSGDLPSKERDQERGRPKDRKHRQHHHHHHHHHHPPPPDKDRYAQERPDHGRARARDQRWSRSPSEGREHMAHRQ

SEQ ID NO: 25467 - protein, 75 aa, Homo sapiens
  REGION 1..75: note = ENSP00000490190
SFIFLCSFLMLNLFVAVIMDNFEYLTRDSSILGPHHLDEYVRVWAEYDPAACGFCGWTCPSQMTTPSTSIPPSWL

SEQ ID NO: 25468 - protein, 459 aa, Homo sapiens
  REGION 1..459: note = ENSP00000490686
DFAISAKPLTRHMPQNKQSFQYRMWQFVVSPPFEYTIMAMIALNTIVLMMKFYGASVAYENALRVFNIVFTSLFSLECVLKVMAFGILNYFRDAWNIFDFVTVLGSITDILVTEFGNPNNFINLSFLRLFRAARLIKLLRQGYTIRILLWTFVQSFKALPYVCLLIAMLFFIYAIIGMQVFGNIGIDVEDEDSDEDEFQITEHNNFRTFFQALMLLFRSATGEAWHNIMLSCLSGKPCDKNSGILTRECGNEFAYFYFVSFIFLCSFLMLNLFVAVIMDNFEYLTRDSSILGPHHLDEYVRVWAEYDPAACGRIHYKDMYSLLRVISPPLGLGKKCPHRVACKRLLRMDLPVADDNTVHFNSTLMALIRTALDIKIAKGGADKQQMDAELRKEMMAIWPNLSQKTLDLLVTPHKSTDLTVGKIYAAMMIMEYYRQSKAKKLQAMREEQDRTPLMFQRME

SEQ ID NO: 25469 - protein, 26 aa, Homo sapiens
  REGION 1..26: note = ENSP00000490475
  VARIANT 1: note = Any amino acid
XSITDILVTEFGNPAWSRATPPSPRS

SEQ ID NO: 25470 - protein, 79 aa, Homo sapiens
  REGION 1..79: note = ENSP00000460276
  VARIANT 1: note = Any amino acid
XKFYGASVAYENALRVFNIVFTSLFSLECVLKVMAFGILNYFRDAWNIFDFVTVLGSITDILVTEFGAWSRATPPSPRS

SEQ ID NO: 25471 - protein, 44 aa, Homo sapiens
  REGION 1..44: note = ENSP00000490075
  VARIANT 1: note = Any amino acid
XLNYFRDAWNIFDFVTVLGSITDILVTEFGNPAWSRATPPSPRS

SEQ ID NO: 25472 - protein, 212 aa, Homo sapiens
  REGION 1..212: note = ENSP00000489692
LLTLFTVSTGEGWPQVLKHSVDATFENQGPSPGYRMEMSIFYVVYFVVFPFFFVNIFVALIIITFQEQGDKMMEEYSLEKNENNFINLSFLRLFRAARLIKLLRQGYTIRILLWTFVQSFKALPYVCLLIAMLFFIYAIIGMQVFGNIGIDVEDEDSDEDEFQITEHNNFRTFFQALMLLFRSATGEAWHNIMLSCLSGKPCDKNSGILTRE

SEQ ID NO: 25473 - protein, 103 aa, Homo sapiens
  REGION 1..103: note = ENSP00000459963
MSSWPTRPTKSTAPPRPGGKNGTTIIANCIVLALEQHLPDDDKTPMSERLDDTEPYFIGIFCFEAGIKIIALGFAFHKGSYLRNGWNVMDFVVVLTGILATVG

SEQ ID NO: 25474 - protein, 35 aa, Homo sapiens
  REGION 1..35: note = ENSP00000464729
MSSWPTRPTKSTAPPRPGGKNGRSYQRMCFTQTRE

SEQ ID NO: 25475 - protein, 2512 aa, Homo sapiens; identical to SEQ ID NO: 25459
  REGION 1..2512: note = ENSP00000479983

SEQ ID NO: 25476 - protein, 2237 aa, Homo sapiens
  REGION 1..2237: note = ENSP00000277551
MVRFGDELGGRYGGPGGGERARGGGAGGAGGPGPGGLQPGQRVLYKQSIAQRARTMALYNPIPVKQNCFTVNRSLFVFSEDNVVRKYAKRITEWPPFEYMILATIIANCIVLALEQHLPDGDKTPMSERLDDTEPYFIGIFCFEAGIKIIALGFVFHKGSYLRNGWNVMDFVVVLTGILATAGTDFDLRTLRAVRVLRPLKLVSGIPSLQVVLKSIMKAMVPLLQIGLLLFFAILMFAIIGLEFYMGKFHKACFPNSTDAEPVGDFPCGKEAPARLCEGDTECREYWPGPNFGITNFDNILFAILTVFQCITMEGWTDILYNTNDAAGNTWNWLYFIPLIIIGSFFMLNLVLGVLSGEFAKERERVENRRAFLKLRRQQQIERELNGYLEWIFKAEEVMLAEEDRNAEEKSPLDVLKRAATKKSRNDLIHAEEGEDRFADLCAVGSPFARASLKSGKTESSSYFRRKEKMFRFFIRRMVKAQSFYWVVLCVVALNTLCVAMVHYNQPRRLTTTLYFAEFVFLGLFLTEMSLKMYGLGPRSYFRSSFNCFDFGVIVGSVFEVVWAAIKPGSSFGISVLRALRLLRIFKVTKYWSSLRNLVVSLLNSMKSIISLLFLLFLFIVVFALLGMQLFGGQFNFQDETPTTNFDTFPAAILTVFQILTGEDWNAVMYHGIESQGGVSKGMFSSFYFIVLTLFGNYTLLNVFLAIAVDNLANAQELTKDEEEMEEAANQKLALQKAKEVAEVSPMSAANISIAARQQNSAKARSVWEQRASQLRLQNLRASCEALYSEMDPEERLRFATTRHLRPDMKTHLDRPLVVELGRDGARGPVGGKARPEAAEAPEGVDPPRRHHRHRDKDKTPAAGDQDRAEAPKAESGEPGAREERPRPHRSHSKEAAGPPEARSERGRGPGPEGGRRHHRRGSPEEAAEREPRRHRAHRHQDPSKECAGAKGERRARHRGGPRAGPREAESGEEPARRHRARHKAQPAHEAVEKETTEKEATEKEAEIVEADKEKELRNHQPREPHCDLETSGTVTVGPMHTLPSTCLQKVEEQPEDADNQRNVTRMGSQPPDPNTIVHIPVMLTGPLGEATVVPSGNVDLESQAEGKKEVEADDVMRSGPRPIVPYSSMFCLSPTNLLRRFCHYIVTMRYFEVVILVVIALSSIALAAEDPVRTDSPRNNALKYLDYIFTGVFTFEMVIKMIDLGLLLHPGAYFRDLWNILDFIVVSGALVAFAFSGSKGKDINTIKSLRVLRVLRPLKTIKRLPKLKAVFDCVVNSLKNVLNILIVYMLFMFIFAVIAVQLFKGKFFYCTDESKELERDCRGQYLDYEKEEVEAQPRQWKKYDFHYDNVLWALLTLFTVSTGEGWPMVLKHSVDATYEEQGPSPGYRMELSIFYVVYFVVFPFFFVNIFVALIIITFQEQGDKVMSECSLEKNERACIDFAISAKPLTRYMPQNRQSFQYKTWTFVVSPPFEYFIMAMIALNTVVLMMKFYDAPYEYELMLKCLNIVFTSMFSMECVLKIIAFGVLNYFRDAWNVFDFVTVLGSITDILVTEIAETNNFINLSFLRLFRAARLIKLLRQGYTIRILLWTFVQSFKALPYVCLLIAMLFFIYAIIGMQVFGNIALDDDTSINRHNNFRTFLQALMLLFRSATGEAWHEIMLSCLSNQACDEQANATECGSDFAYFYFVSFIFLCSFLMLNLFVAVIMDNFEYLTRDSSILGPHHLDEFIRVWAEYDPAACGRISYNDMFEMLKHMSPPLGLGKKCPARVAYKRLVRMNMPISNEDMTVHFTSTLMALIRTALEIKLAPAGTKQHQCDAELRKEISVVWANLPQKTLDLLVPPHKPDEMTVGKVYAALMIFDFYKQNKTTRDQMQQAPGGLSQMGPVSLFHPLKATLEQTQPAVLRGARVFLRQKSSTSLSNGGAIQNQESGIKESVSWGTQRTQDAPHEARPPLERGHSTEIPVGRSGALAVDVQMQSITRRGPDGEPQPGLESQGRAASMPRLAAETQPVTDASPMKRSISTLAQRPRGTHLCSTTPDRPPPSQASSHHHHHRCHRRRDRKQRSLEKGPSLSADMDGAPSSAVGPGLPPGEGPTGCRRERERRQERGRSQERRQPSSSSSEKQRFYSCDRFGGREPPKPKPSLSSHPTSPTAGQEPGPHPQAGSAVGFPNTTPCCRETPSASPWPLALELALTLTWGSVWTVRPLSTPCLRTLSLSRRLWPPTRAAPPGLPTCPP

SEQ ID NO: 25477 - protein, 2339 aa, Homo sapiens [sequence omitted]

SEQ ID NO: 25478 - protein, 2337 aa, Homo sapiens
  REGION 1..2337: note = ENSP00000360414
MVRFGDELGGRYGGPGGGERARGGGAGGAGGPGPGGLQPGQRVLYKQSIAQRARTMALYNPIPVKQNCFTVNRSLFVFSEDNVVRKYAKRITEWPPFEYMILATIIANCIVLALEQHLPDGDKTPMSERLDDTEPYFIGIFCFEAGIKIIALGFVFHKGSYLRNGWNVMDFVVVLTGILATAGTDFDLRTLRAVRVLRPLKLVSGIPSLQVVLKSIMKAMVPLLQIGLLLFFAILMFAIIGLEFYMGKFHKACFPNSTDAEPVGDFPCGKEAPARLCEGDTECREYWPGPNFGITNFDNILFAILTVFQCITMEGWTDILYNTNDAAGNTWNWLYFIPLIIIGSFFMLNLVLGVLSGEFAKERERVENRRAFLKLRRQQQIERELNGYLEWIFKAEEVMLAEEDRNAEEKSPLDVLKRAATKKSRNDLIHAEEGEDRFADLCAVGSPFARASLKSGKTESSSYFRRKEKMFRFFIRRMVKAQSFYWVVLCVVALNTLCVAMVHYNQPRRLTTTLYFAEFVFLGLFLTEMSLKMYGLGPRSYFRSSFNCFDFGVIVGSVFEVVWAAIKPGSSFGISVLRALRLLRIFKVTKYWSSLRNLVVSLLNSMKSIISLLFLLFLFIVVFALLGMQLFGGQFNFQDETPTTNFDTFPAAILTVFQILTGEDWNAVMYHGIESQGGVSKGMFSSFYFIVLTLFGNYTLLNVFLAIAVDNLANAQELTKDEEEMEEAANQKLALQKAKEVAEVSPMSAANISIAARQQNSAKARSVWEQRASQLRLQNLRASCEALYSEMDPEERLRFATTRHLRPDMKTHLDRPLVVELGRDGARGPVGGKARPEAAEAPEGVDPPRRHHRHRDKDKTPAAGDQDRAEAPKAESGEPGAREERPRPHRSHSKEAAGPPEARSERGRGPGPEGGRRHHRRGSPEEAAEREPRRHRAHRHQDPSKECAGAKGERRARHRGGPRAGPREAESGEEPARRHRARHKAQPAHEAVEKETTEKEATEKEAEIVEADKEKELRNHQPREPHCDLETSGTVTVGPMHTLPSTCLQKVEEQPEDADNQRNVTRMGSQPPDPNTIVHIPVMLTGPLGEATVVPSGNVDLESQAEGKKEVEADDVMRSGPRPIVPYSSMFCLSPTNLLRRFCHYIVTMRYFEVVILVVIALSSIALAAEDPVRTDSPRNNALKYLDYIFTGVFTFEMVIKMIDLGLLLHPGAYFRDLWNILDFIVVSGALVAFAFSGSKGKDINTIKSLRVLRVLRPLKTIKRLPKLKAVFDCVVNSLKNVLNILIVYMLFMFIFAVIAVQLFKGKFFYCTDESKELERDCRGQYLDYEKEEVEAQPRQWKKYDFHYDNVLWALLTLFTVSTGEGWPMVLKHSVDATYEEQGPSPGYRMELSIFYVVYFVVFPFFFVNIFVALIIITFQEQGDKVMSECSLEKNERACIDFAISAKPLTRYMPQNRQSFQYKTWTFVVSPPFEYFIMAMIALNTVVLMMKFYDAPYEYELMLKCLNIVFTSMFSMECVLKIIAFGVLNYFRDAWNVFDFVTVLGSITDILVTEIANNFINLSFLRLFRAARLIKLLRQGYTIRILLWTFVQSFKALPYVCLLIAMLFFIYAIIGMQVFGNIALDDDTSINRHNNFRTFLQALMLLFRSATGEAWHEIMLSCLSNQACDEQANATECGSDFAYFYFVSFIFLCSFLMLNLFVAVIMDNFEYLTRDSSILGPHHLDEFIRVWAEYDPAACGRISYNDMFEMLKHMSPPLGLGKKCPARVAYKRLVRMNMPISNEDMTVHFTSTLMALIRTALEIKLAPAGTKQHQCDAELRKEISVVWANLPQKTLDLLVPPHKPDEMTVGKVYAALMIFDFYKQNKTTRDQMQQAPGGLSQMGPVSLFHPLKATLEQTQPAVLRGARVFLRQKSSTSLSNGGAIQNQESGIKESVSWGTQRTQDAPHEARPPLERGHSTEIPVGRSGALAVDVQMQSITRRGPDGEPQPGLESQGRAASMPRLAAETQPVTDASPMKRSISTLAQRPRGTHLCSTTPDRPPPSQASSHHHHHRCHRRRDRKQRSLEKGPSLSADMDGAPSSAVGPGLPPGEGPTGCRRERERRQERGRSQERRQPSSSSSEKQRFYSCDRFGGREPPKPKPSLSSHPTSPTAGQEPGPHPQGSGSVNGSPLLSTSGASTPGRGGRRQLPQTPLTPRPSITYKTANSSPIHFAGAQTSLPAFSPGRLSRGLSEHNALLQRDPLSQPLAPGSRIGSDPYLGQRLDSEASVHALPEDTLTFEEAVATNSGRSSRTSYVSSLTSQSHPLRRVPNGYHCTLGLSSGGRARHSYHHPDQDHWC

SEQ ID NO: 25479 - protein, 2338 aa, Homo sapiens
  REGION 1..2338: note = ENSP00000360408
MVRFGDELGGRYGGPGGGERARGGGAGGAGGPGPGGLQPGQRVLYKQSIAQRARTMALYNPIPVKQNCFTVNRSLFVFSEDNVVRKYAKRITEWPPFEYMILATIIANCIVLALEQHLPDGDKTPMSERLDDTEPYFIGIFCFEAGIKIIALGFVFHKGSYLRNGWNVMDFVVVLTGILATAGTDFDLRTLRAVRVLRPLKLVSGIPSLQVVLKSIMKAMVPLLQIGLLLFFAILMFAIIGLEFYMGKFHKACFPNSTDAEPVGDFPCGKEAPARLCEGDTECREYWPGPNFGITNFDNILFAILTVFQCITMEGWTDILYNTNDAAGNTWNWLYFIPLIIIGSFFMLNLVLGVLSGEFAKERERVENRRAFLKLRRQQQIERELNGYLEWIFKAEEVMLAEEDRNAEEKSPLDAVLKRAATKKSRNDLIHAEEGEDRFADLCAVGSPFARASLKSGKTESSSYFRRKEKMFRFFIRRMVKAQSFYWVVLCVVALNTLCVAMVHYNQPRRLTTTLYFAEFVFLGLFLTEMSLKMYGLGPRSYFRSSFNCFDFGVIVGSVFEVVWAAIKPGSSFGISVLRALRLLRIFKVTKYWSSLRNLVVSLLNSMKSIISLLFLLFLFIVVFALLGMQLFGGQFNFQDETPTTNFDTFPAAILTVFQILTGEDWNAVMYHGIESQGGVSKGMFSSFYFIVLTLFGNYTLLNVFLAIAVDNLANAQELTKDEEEMEEAANQKLALQKAKEVAEVSPMSAANISIAARQQNSAKARSVWEQRASQLRLQNLRASCEALYSEMDPEERLRFATTRHLRPDMKTHLDRPLVVELGRDGARGPVGGKARPEAAEAPEGVDPPRRHHRHRDKDKTPAAGDQDRAEAPKAESGEPGAREERPRPHRSHSKEAAGPPEARSERGRGPGPEGGRRHHRRGSPEEAAEREPRRHRAHRHQDPSKECAGAKGERRARHRGGPRAGPREAESGEEPARRHRARHKAQPAHEAVEKETTEKEATEKEAEIVEADKEKELRNHQPREPHCDLETSGTVTVGPMHTLPSTCLQKVEEQPEDADNQRNVTRMGSQPPDPNTIVHIPVMLTGPLGEATVVPSGNVDLESQAEGKKEVEADDVMRSGPRPIVPYSSMFCLSPTNLLRRFCHYIVTMRYFEVVILVVIALSSIALAAEDPVRTDSPRNNALKYLDYIFTGVFTFEMVIKMIDLGLLLHPGAYFRDLWNILDFIVVSGALVAFAFSGSKGKDINTIKSLRVLRVLRPLKTIKRLPKLKAVFDCVVNSLKNVLNILIVYMLFMFIFAVIAVQLFKGKFFYCTDESKELERDCRGQYLDYEKEEVEAQPRQWKKYDFHYDNVLWALLTLFTVSTGEGWPMVLKHSVDATYEEQGPSPGYRMELSIFYVVYFVVFPFFFVNIFVALIIITFQEQGDKVMSECSLEKNERACIDFAISAKPLTRYMPQNRQSFQYKTWTFVVSPPFEYFIMAMIALNTVVLMMKFYDAPYEYELMLKCLNIVFTSMFSMECVLKIIAFGVLNYFRDAWNVFDFVTVLGSITDILVTEIANNFINLSFLRLFRAARLIKLLRQGYTIRILLWTFVQSFKALPYVCLLIAMLFFIYAIIGMQVFGNIALDDDTSINRHNNFRTFLQALMLLFRSATGEAWHEIMLSCLSNQACDEQANATECGSDFAYFYFVSFIFLCSFLMLNLFVAVIMDNFEYLTRDSSILGPHHLDEFIRVWAEYDPAACGRISYNDMFEMLKHMSPPLGLGKKCPARVAYKRLVRMNMPISNEDMTVHFTSTLMALIRTALEIKLAPAGTKQHQCDAELRKEISVVWANLPQKTLDLLVPPHKPDEMTVGKVYAALMIFDFYKQNKTTRDQMQQAPGGLSQMGPVSLFHPLKATLEQTQPAVLRGARVFLRQKSSTSLSNGGAIQNQESGIKESVSWGTQRTQDAPHEARPPLERGHSTEIPVGRSGALAVDVQMQSITRRGPDGEPQPGLESQGRAASMPRLAAETQPVTDASPMKRSISTLAQRPRGTHLCSTTPDRPPPSQASSHHHHHRCHRRRDRKQRSLEKGPSLSADMDGAPSSAVGPGLPPGEGPTGCRRERERRQERGRSQERRQPSSSSSEKQRFYSCDRFGGREPPKPKPSLSSHPTSPTAGQEPGPHPQGSGSVNGSPLLSTSGASTPGRGGRRQLPQTPLTPRPSITYKTANSSPIHFAGAQTSLPAFSPGRLSRGLSEHNALLQRDPLSQPLAPGSRIGSDPYLGQRLDSEASVHALPEDTLTFEEAVATNSGRSSRTSYVSSLTSQSHPLRRVPNGYHCTLGLSSGGRARHSYHHPDQDHWC

SEQ ID NO: 25480 - protein, 164 aa, Homo sapiens
  REGION 1..164: note = ENSP00000413042
  VARIANT 1: note = Any amino acid
XNFRTFLQALMLLFRSATGEAWHEIMLSCLSNQACDEQANATECGSDFAYFYFVSFIFLCSFLMLNLFVAVIMDNFEYLTRDSSILGPHHLDEFIRVWAEYDPAACCRIHYKDMYSLLRCIAPPVGLGKNCPRRLAYKRLVRMNMPISNEDMTVHFTSTLMALI

SEQ ID NO: 25481 - protein, 2237 aa, Homo sapiens [sequence omitted]

SEQ ID NO: 25482 - protein, 2340 aa, Homo sapiens
  REGION 1..2340: note = ENSP00000360406
MVRFGDELGGRYGGPGGGERARGGGAGGAGGPGPGGLQPGQRVLYKQSIAQRARTMALYNPIPVKQNCFTVNRSLFVFSEDNVVRKYAKRITEWPPFEYMILATIIANCIVLALEQHLPDGDKTPMSERLDDTEPYFIGIFCFEAGIKIIALGFVFHKGSYLRNGWNVMDFVVVLTGILATAGTDFDLRTLRAVRVLRPLKLVSGIPSLQVVLKSIMKAMVPLLQIGLLLFFAILMFAIIGLEFYMGKFHKACFPNSTDAEPVGDFPCGKEAPARLCEGDTECREYWPGPNFGITNFDNILFAILTVFQCITMEGWTDILYNTNDAAGNTWNWLYFIPLIIIGSFFMLNLVLGVLSGEFAKERERVENRRAFLKLRRQQQIERELNGYLEWIFKAEEVMLAEEDRNAEEKSPLDAVLKRAATKKSRNDLIHAEEGEDRFADLCAVGSPFARASLKSGKTESSSYFRRKEKMFRFFIRRMVKAQSFYWVVLCVVALNTLCVAMVHYNQPRRLTTTLYFAEFVFLGLFLTEMSLKMYGLGPRSYFRSSFNCFDFGVIVGSVFEVVWAAIKPGSSFGISVLRALRLLRIFKVTKYWSSLRNLVVSLLNSMKSIISLLFLLFLFIVVFALLGMQLFGGQFNFQDETPTTNFDTFPAAILTVFQILTGEDWNAVMYHGIESQGGVSKGMFSSFYFIVLTLFGNYTLLNVFLAIAVDNLANAQELTKDEEEMEEAANQKLALQKAKEVAEVSPMSAANISIAARQQNSAKARSVWEQRASQLRLQNLRASCEALYSEMDPEERLRFATTRHLRPDMKTHLDRPLVVELGRDGARGPVGGKARPEAAEAPEGVDPPRRHHRHRDKDKTPAAGDQDRAEAPKAESGEPGAREERPRPHRSHSKEAAGPPEARSERGRGPGPEGGRRHHRRGSPEEAAEREPRRHRAHRHQDPSKECAGAKGERRARHRGGPRAGPREAESGEEPARRHRARHKAQPAHEAVEKETTEKEATEKEAEIVEADKEKELRNHQPREPHCDLETSGTVTVGPMHTLPSTCLQKVEEQPEDADNQRNVTRMGSQPPDPNTIVHIPVMLTGPLGEATVVPSGNVDLESQAEGKKEVEADDVMRSGPRPIVPYSSMFCLSPTNLLRRFCHYIVTMRYFEVVILVVIALSSIALAAEDPVRTDSPRNNALKYLDYIFTGVFTFEMVIKMIDLGLLLHPGAYFRDLWNILDFIVVSGALVAFAFSGSKGKDINTIKSLRVLRVLRPLKTIKRLPKLKAVFDCVVNSLKNVLNILIVYMLFMFIFAVIAVQLFKGKFFYCTDESKELERDCRGQYLDYEKEEVEAQPRQWKKYDFHYDNVLWALLTLFTVSTGEGWPMVLKHSVDATYEEQGPSPGYRMELSIFYVVYFVVFPFFFVNIFVALIIITFQEQGDKVMSECSLEKNERACIDFAISAKPLTRYMPQNRQSFQYKTWTFVVSPPFEYFIMAMIALNTVVLMMKFYDAPYEYELMLKCLNIVFTSMFSMECVLKIIAFGVLNYFRDAWNVFDFVTVLGSITDILVTEIAETNNFINLSFLRLFRAARLIKLLRQGYTIRILLWTFVQSFKALPYVCLLIAMLFFIYAIIGMQVFGNIALDDDTSINRHNNFRTFLQALMLLFRSATGEAWHEIMLSCLSNQACDEQANATECGSDFAYFYFVSFIFLCSFLMLNLFVAVIMDNFEYLTRDSSILGPHHLDEFIRVWAEYDPAACGRISYNDMFEMLKHMSPPLGLGKKCPARVAYKRLVRMNMPISNEDMTVHFTSTLMALIRTALEIKLAPAGTKQHQCDAELRKEISVVWANLPQKTLDLLVPPHKPDEMTVGKVYAALMIFDFYKQNKTTRDQMQQAPGGLSQMGPVSLFHPLKATLEQTQPAVLRGARVFLRQKSSTSLSNGGAIQNQESGIKESVSWGTQRTQDAPHEARPPLERGHSTEIPVGRSGALAVDVQMQSITRRGPDGEPQPGLESQGRAASMPRLAAETQPVTDASPMKRSISTLAQRPRGTHLCSTTPDRPPPSQASSHHHHHRCHRRRDRKQRSLEKGPSLSADMDGAPSSAVGPGLPPGEGPTGCRRERERRQERGRSQERRQPSSSSSEKQRFYSCDRFGGREPPKPKPSLSSHPTSPTAGQEPGPHPQGSGSVNGSPLLSTSGASTPGRGGRRQLPQTPLTPRPSITYKTANSSPIHFAGAQTSLPAFSPGRLSRGLSEHNALLQRDPLSQPLAPGSRIGSDPYLGQRLDSEASVHALPEDTLTFEEAVATNSGRSSRTSYVSSLTSQSHPLRRVPNGYHCTLGLSSGGRARHSYHHPDQDHWC

SEQ ID NO: 25483 - protein, 2170 aa, Homo sapiens
  REGION 1..2170: note = ENSP00000489769
MEMNLPTFSSDLIFIKSTMYQEIDARYKGKVISEAETKGYFSLAFGEANYARGTRLPLSGEGPTSQPNSSKQTVLSWQAAIDAARQAKAAQTMSTSAPPPVGSLSQRKRQQYAKSKKQGNSSNSRPARALFCLSLNNPIRRACISIVEWKPFDIFILLAIFANCVALAIYIPFPEDDSNSTNHNLEKVEYAFLIIFTVETFLKIIAYGLLLHPNAYVRNGWNLLDFVIVIVGLFSVILEQLTKETEGGNHSSGKSGGFDVKALRAFRVLRPLRLVSGVPSLQVVLNSIIKAMVPLLHIALLVLFVIIIYAIIGLELFIGKMHKTCFFADSDIVAEEDPAPCAFSGNGRQCTANGTECRSGWVGPNGGITNFDNFAFAMLTVFQCITMEGWTDVLYWVNDAIGWEWPWVYFVSLIILGSFFVLNLVLGVLSGEFSKEREKAKARGDFQKLREKQQLEEDLKGYLDWITQAEDIDPENEEEGGEEGKRNTSMPTSETESVNTENVSGEGENRGCCGSLCQAISKSKLSRRWRRWNRFNRRRCRAAVKSVTFYWLVIVLVFLNTLTISSEHYNQPDWLTQIQDIANKVLLALFTCEMLVKMYSLGLQAYFVSLFNRFDCFVVCGGITETILVELEIMSPLGISVFRCVRLLRIFKVTRHWTSLSNLVASLLNSMKSIASLLLLLFLFIIIFSLLGMQLFGGKFNFDETQTKRSTFDNFPQALLTVFQILTGEDWNAVMYDGIMAYGGPSSSGMIVCIYFIILFICGNYILLNVFLAIAVDNLADAESLNTAQKEEAEEKERKKIARKESLENKKNNKPEVNQIANSDNKVTIDDYREEDEDKDPYPPCDVPVGEEEEEEEEDEPEVPAGPRPRRISELNMKEKIAPIPEGSAFFILSKTNPIRVGCHKLINHHIFTNLILVFIMLSSAALAAEDPIRSHSFRNTILGYFDYAFTAIFTVEILLKMTTFGAFLHKGAFCRNYFNLLDMLVVGVSLVSFGIQSSAISVVKILRVLRVLRPLRAINRAKGLKHVVQCVFVAIRTIGNIMIVTTLLQFMFACIGVQLFKGKFYRCTDEAKSNPEECRGLFILYKDGDVDSPVVRERIWQNSDFNFDNVLSAMMALFTVSTFEGWPALLYKAIDSNGENIGPIYNHRVEISIFFIIYIIIVAFFMMNIFVGFVIVTFQEQGEKEYKNCELDKNQRQCVEYALKARPLRRYIPKNPYQYKFWYVVNSSPFEYMMFVLIMLNTLCLAMQHYEQSKMFNDAMDILNMVFTGVFTVEMVLKVIAFKPKGYFSDAWNTFDSLIVIGSIIDVALSEADNSEESNRISITFFRLFRVMRLVKLLSRGEGIRTLLWTFIKSFQALPYVALLIAMLFFIYAVIGMQMFGKVAMRDNNQINRNNNFQTFPQAVLLLFRCATGEAWQEIMLACLPGKLCDPESDYNPGEEYTCGSNFAIVYFISFYMLCAFLIINLFVAVIMDNFDYLTRDWSILGPHHLDEFKRIWSEYDPEAKGRIKHLDVVTLLRRIQPPLGFGKLCPHRVACKRLVAMNMPLNSDGTVMFNATLFALVRTALKIKTEGNLEQANEELRAVIKKIWKKTSMKLLDQVVPPAGDDEVTVGKFYATFLIQDYFRKFKKRKEQGLVGKYPAKNTTIALQAGLRTLHDIGPEIRRAISCDLQDDEPEETKREEEDDVFKRNGALLGNHVNHVNSDRRDSLQQTNTTHRPLHVQRPSIPPASDTEKPLFPPAGNSVCHNHHNHNSIGKQVPTSTNANLNNANMSKAAHGKRPSIGNLEHVSENGHHSSHKHDREPQRRSSVKRTRYYETYIRSDSGDEQLPTICREDPEIHGYFRDPHCLGEQEYFSSEECYEDDSSPTWSRQNYGYYSRYPGRNIDSERPRGYHHPQGFLEDDDSPVCYDSRRSPRRRLLPPTPASHRRSSFNFECLRRQSSQEEVPSSPIFPHRTALPLHLMQQQIMAVAGLDSSKAQKYSPSHSTRSWATPPATPPYRDWTPCYTPLIQVEQSEALDQVNGSLPSLHRSSWYTDEPDISYRTFTPASLTVPSSFRNKNSDKQRSADSLVEAVLISEGLGRYARDPKFVSATKHEIADACDLTIDEMESAASTLLNGNVRPRANGDVGPLSHRQDYELQDFGPGYSDEEPDPGRDEEDLADEMICITTL

SEQ ID NO: 25484 - protein, 2161 aa, Homo sapiens
  REGION 1..2161: note = ENSP00000288133
MMMMMMMKKMQHQRQQQADHANEANYARGTRLPLSGEGPTSQPNSSKQTVLSWQAAIDAARQAKAAQTMSTSAPPPVGSLSQRKRQQYAKSKKQGNSSNSRPARALFCLSLNNPIRRACISIVEWKPFDIFILLAIFANCVALAIYIPFPEDDSNSTNHNLEKVEYAFLIIFTVETFLKIIAYGLLLHPNAYVRNGWNLLDFVIVIVGLFSVILEQLTKETEGGNHSSGKSGGFDVKALRAFRVLRPLRLVSGVPSLQVVLNSIIKAMVPLLHIALLVLFVIIIYAIIGLELFIGKMHKTCFFADSDIVAEEDPAPCAFSGNGRQCTANGTECRSGWVGPNGGITNFDNFAFAMLTVFQCITMEGWTDVLYWMNDAMGFELPWVYFVSLVIFGSFFVLNLVLGVLSGEFSKEREKAKARGDFQKLREKQQLEEDLKGYLDWITQAEDIDPENEEEGGEEGKRNTSMPTSETESVNTENVSGEGENRGCCGSLCQAISKSKLSRRWRRWNRFNRRRCRAAVKSVTFYWLVIVLVFLNTLTISSEHYNQPDWLTQIQDIANKVLLALFTCEMLVKMYSLGLQAYFVSLFNRFDCFVVCGGITETILVELEIMSPLGISVFRCVRLLRIFKVTRHWTSLSNLVASLLNSMKSIASLLLLLFLFIIIFSLLGMQLFGGKFNFDETQTKRSTFDNFPQALLTVFQILTGEDWNAVMYDGIMAYGGPSSSGMIVCIYFIILFICGNYILLNVFLAIAVDNLADAESLNTAQKEEAEEKERKKIARKESLENKKNNKPEVNQIANSDNKVTIDDYREEDEDKDPYPPCDVPVGEEEEEEEEDEPEVPAGPRPRRISELNMKEKIAPIPEGSAFFILSKTNPIRVGCHKLINHHIFTNLILVFIMLSSAALAAEDPIRSHSFRNTILGYFDYAFTAIFTVEILLKMTTFGAFLHKGAFCRNYFNLLDMLVVGVSLVSFGIQSSAISVVKILRVLRVLRPLRAINRAKGLKHVVQCVFVAIRTIGNIMIVTTLLQFMFACIGVQLFKGKFYRCTDEAKSNPEECRGLFILYKDGDVDSPVVRERIWQNSDFNFDNVLSAMMALFTVSTFEGWPALLYKAIDSNGENIGPIYNHRVEISIFFIIYIIIVAFFMMNIFVGFVIVTFQEQGEKEYKNCELDKNQRQCVEYALKARPLRRYIPKNPYQYKFWYVVNSSPFEYMMFVLIMLNTLCLAMQHYEQSKMFNDAMDILNMVFTGVFTVEMVLKVIAFKPKGYFSDAWNTFDSLIVIGSIIDVALSEADPTESENVPVPTATPGNSEESNRISITFFRLFRVMRLVKLLSRGEGIRTLLWTFIKSFQALPYVALLIAMLFFIYAVIGMQMFGKVAMRDNNQINRNNNFQTFPQAVLLLFRCATGEAWQEIMLACLPGKLCDPESDYNPGEEYTCGSNFAIVYFISFYMLCAFLIINLFVAVIMDNFDYLTRDWSILGPHHLDEFKRIWSEYDPEAKGRIKHLDVVTLLRRIQPPLGFGKLCPHRVACKRLVAMNMPLNSDGTVMFNATLFALVRTALKIKTEGNLEQANEELRAVIKKIWKKTSMKLLDQVVPPAGDDEVTVGKFYATFLIQDYFRKFKKRKEQGLVGKYPAKNTTIALQAGLRTLHDIGPEIRRAISCDLQDDEPEETKREEEDDVFKRNGALLGNHVNHVNSDRRDSLQQTNTTHRPLHVQRPSIPPASDTEKPLFPPAGNSVCHNHHNHNSIGKQVPTSTNANLNNANMSKAAHGKRPSIGNLEHVSENGHHSSHKHDREPQRRSSVKRTRYYETYIRSDSGDEQLPTICREDPEIHGYFRDPHCLGEQEYFSSEECYEDDSSPTWSRQNYGYYSRYPGRNIDSERPRGYHHPQGFLEDDDSPVCYDSRRSPRRRLLPPTPASHRRSSFNFECLRRQSSQEEVPSSPIFPHRTALPLHLMQQQIMAVAGLDSSKAQKYSPSHSTRSWATPPATPPYRDWTPCYTPLIQVEQSEALDQVNGSLPSLHRSSWYTDEPDISYRTFTPASLTVPSSFRNKNSDKQRSADSLVEAVLISEGLGRYARDPKFVSATKHEIADACDLTIDEMESAASTLLNGNVRPRANGDVGPLSHRQDYELQDFGPGYSDEEPDPGRDEEDLADEMICITTL

SEQ ID NO: 25485 - protein, 1647 aa, Homo sapiens
  REGION 1..1647: note = ENSP00000490039
MMMMMMMKKMQHQRQQQADHANEANYARGTRLPLSGEGPTSQPNSSKQTVLSWQAAIDAARQAKAAQTMSTSAPPPVGSLSQRKRQQYAKSKKQGNSSNSRPARALFCLSLNNPIRRACISIVEWKPFDIFILLAIFANCVALAIYIPFPEDDSNSTNHNLEKVEYAFLIIFTVETFLKIIAYGLLLHPNAYVRNGWNLLDFVIVIVGLFSVILEQLTKETEGGNHSSGKSGGFDVKALRAFRVLRPLRLVSGVPSLQVVLNSIIKAMVPLLHIALLVLFVIIIYAIIGLELFIGKMHKTCFFADSDIVAEEDPAPCAFSGNGRQCTANGTECRSGWVGPNGGITNFDNFAFAMLTVFQCITMEGWTDVLYWVNDAIGWEWPWVYFVSLIILGSFFVLNLVLGVLSGEFSKEREKAKARGDFQKLREKQQLEEDLKGYLDWITQAEDIDPENEEEGGEEGKRNTSMPTSETESVNTENVSGEGENRGCCGSLCQAISKSKLSRRWRRWNRFNRRRCRAAVKSVTFYWLVIVLVFLNTLTISSEHYNQPDWLTQIQDIANKVLLALFTCEMLVKMYSLGLQAYFVSLFNRFDCFVVCGGITETILVELEIMSPLGISVFRCVRLLRIFKVTRHWTSLSNLVASLLNSMKSIASLLLLLFLFIIIFSLLGMQLFGGKFNFDETQTKRSTFDNFPQALLTVFQILTGEDWNAVMYDGIMAYGGPSSSGMIVCIYFIILFICGNYILLNVFLAIAVDNLADAESLNTAQKEEAEEKERKKIARKESLENKKNNKPEVNQIANSDNKVTIDDYREEDEDKDPYPPCDVPVGEEEEEEEEDEPEVPAGPRPRRISELNMKEKIAPIPEGSAFFILSKTNPIRVGCHKLINHHIFTNLILVFIMLSSAALAAEDPIRSHSFRNTILGYFDYAFTAIFTVEILLKMTTFGAFLHKGAFCRNYFNLLDMLVVGVSLVSFGIQSSAISVVKILRVLRVLRPLRAINRAKGLKHVVQCVFVAIRTIGNIMIVTTLLQFMFACIGVQLFKGKFYRCTDEAKSNPEECRGLFILYKDGDVDSPVVRERIWQNSDFNFDNVLSAMMALFTVSTFEGWPALLYKAIDSNGENIGPIYNHRVEISIFFIIYIIIVAFFMMNIFVGFVIVTFQEQGEKEYKNCELDKNQRQCVEYALKARPLRRYIPKNPYQYKFWYVVNSSPFEYMMFVLIMLNTLCLAMQHYEQSKMFNDAMDILNMVFTGVFTVEMVLKVIAFKPKGYFSDAWNTFDSLIVIGSIIDVALSEADPTESENVPVPTATPGNSEESNRISITFFRLFRVMRLVKLLSRGEGIRTLLWTFIKSFQALPYVALLIAMLFFIYAVIGMQMFGKVAMRDNNQINRNNNFQTFPQAVLLLFRCATGEAWQEIMLACLPGKLCDPESDYNPGEEYTCGSNFAIVYFISFYMLCAFLIINLFVAVIMDNFDYLTRDWSILGPHHLDEFKRIWSEYDPEAKGRIKHLDVVTLLRRIQPPLGFGKLCPHRVACKRLVAMNMPLNSDGTVMFNATLFALVRTALKIKTEGNLEQANEELRAVIKKIWKKTSMKLLDQVVPPAGDDEVTVGKFYATFLIQDYFRKFKKRKEQGLVGKYPAKNTTIALQMLERML

SEQ ID NO: 25486 - protein, 2181 aa, Homo sapiens
  REGION 1..2181: note = ENSP00000288139
MMMMMMMKKMQHQRQQQADHANEANYARGTRLPLSGEGPTSQPNSSKQTVLSWQAAIDAARQAKAAQTMSTSAPPPVGSLSQRKRQQYAKSKKQGNSSNSRPARALFCLSLNNPIRRACISIVEWKPFDIFILLAIFANCVALAIYIPFPEDDSNSTNHNLEKVEYAFLIIFTVETFLKIIAYGLLLHPNAYVRNGWNLLDFVIVIVGLFSVILEQLTKETEGGNHSSGKSGGFDVKALRAFRVLRPLRLVSGVPSLQVVLNSIIKAMVPLLHIALLVLFVIIIYAIIGLELFIGKMHKTCFFADSDIVAEEDPAPCAFSGNGRQCTANGTECRSGWVGPNGGITNFDNFAFAMLTVFQCITMEGWTDVLYWVNDAIGWEWPWVYFVSLIILGSFFVLNLVLGVLSGEFSKEREKAKARGDFQKLREKQQLEEDLKGYLDWITQAEDIDPENEEEGGEEGKRNTSMPTSETESVNTENVSGEGENRGCCGSLWCWWRRRGAAKAGPSGCRRWGQAISKSKLSRRWRRWNRFNRRRCRAAVKSVTFYWLVIVLVFLNTLTISSEHYNQPDWLTQIQDIANKVLLALFTCEMLVKMYSLGLQAYFVSLFNRFDCFVVCGGITETILVELEIMSPLGISVFRCVRLLRIFKVTRHWTSLSNLVASLLNSMKSIASLLLLLFLFIIIFSLLGMQLFGGKFNFDETQTKRSTFDNFPQALLTVFQILTGEDWNAVMYDGIMAYGGPSSSGMIVCIYFIILFICGNYILLNVFLAIAVDNLADAESLNTAQKEEAEEKERKKIARKESLENKKNNKPEVNQIANSDNKVTIDDYREEDEDKDPYPPCDVPVGEEEEEEEEDEPEVPAGPRPRRISELNMKEKIAPIPEGSAFFILSKTNPIRVGCHKLINHHIFTNLILVFIMLSSAALAAEDPIRSHSFRNTILGYFDYAFTAIFTVEILLKMTTFGAFLHKGAFCRNYFNLLDMLVVGVSLVSFGIQSSAISVVKILRVLRVLRPLRAINRAKGLKHVVQCVFVAIRTIGNIMIVTTLLQFMFACIGVQLFKGKFYRCTDEAKSNPEECRGLFILYKDGDVDSPVVRERIWQNSDFNFDNVLSAMMALFTVSTFEGWPALLYKAIDSNGENIGPIYNHRVEISIFFIIYIIIVAFFMMNIFVGFVIVTFQEQGEKEYKNCELDKNQRQCVEYALKARPLRRYIPKNPYQYKFWYVVNSSPFEYMMFVLIMLNTLCLAMQHYEQSKMFNDAMDILNMVFTGVFTVEMVLKVIAFKPKGYFSDAWNTFDSLIVIGSIIDVALSEADPTESENVPVPTATPGNSEESNRISITFFRLFRVMRLVKLLSRGEGIRTLLWTFIKSFQALPYVALLIAMLFFIYAVIGMQMFGKVAMRDNNQINRNNNFQTFPQAVLLLFRCATGEAWQEIMLACLPGKLCDPESDYNPGEEYTCGSNFAIVYFISFYMLCAFLIINLFVAVIMDNFDYLTRDWSILGPHHLDEFKRIWSEYDPEAKGRIKHLDVVTLLRRIQPPLGFGKLCPHRVACKRLVAMNMPLNSDGTVMFNATLFALVRTALKIKTEGNLEQANEELRAVIKKIWKKTSMKLLDQVVPPAGDDEVTVGKFYATFLIQDYFRKFKKRKEQGLVGKYPAKNTTIALQAGLRTLHDIGPEIRRAISCDLQDDEPEETKREEEDDVFKRNGALLGNHVNHVNSDRRDSLQQTNTTHRPLHVQRPSIPPASDTEKPLFPPAGNSVCHNHHNHNSIGKQVPTSTNANLNNANMSKAAHGKRPSIGNLEHVSENGHHSSHKHDREPQRRSSVKRTRYYETYIRSDSGDEQLPTICREDPEIHGYFRDPHCLGEQEYFSSEECYEDDSSPTWSRQNYGYYSRYPGRNIDSERPRGYHHPQGFLEDDDSPVCYDSRRSPRRRLLPPTPASHRRSSFNFECLRRQSSQEEVPSSPIFPHRTALPLHLMQQQIMAVAGLDSSKAQKYSPSHSTRSWATPPATPPYRDWTPCYTPLIQVEQSEALDQVNGSLPSLHRSSWYTDEPDISYRTFTPASLTVPSSFRNKNSDKQRSADSLVEAVLISEGLGRYARDPKFVSATKHEIADACDLTIDEMESAASTLLNGNVRPRANGDVGPLSHRQDYELQDFGPGYSDEEPDPGRDEEDLADEMICITTL

SEQ ID NO: 25487 - protein, 2137 aa, Homo sapiens
  REGION 1..2137: note = ENSP00000409174
MMMMMMMKKMQHQRQQQADHANEANYARGTRLPLSGEGPTSQPNSSKQTVLSWQAAIDAARQAKAAQTMSTSAPPPVGSLSQRKRQQYAKSKKQGNSSNSRPARALFCLSLNNPIRRACISIVEWKPFDIFILLAIFANCVALAIYIPFPEDDSNSTNHNLEKVEYAFLIIFTVETFLKIIAYGLLLHPNAYVRNGWNLLDFVIVIVGLFSVILEQLTKETEGGNHSSGKSGGFDVKALRAFRVLRPLRLVSGVPSLQVVLNSIIKAMVPLLHIALLVLFVIIIYAIIGLELFIGKMHKTCFFADSDIVAEEDPAPCAFSGNGRQCTANGTECRSGWVGPNGGITNFDNFAFAMLTVFQCITMEGWTDVLYWMNDAMGFELPWVYFVSLVIFGSFFVLNLVLGVLSGEFSKEREKAKARGDFQKLREKQQLEEDLKGYLDWITQAEDIDPENEEEGGEEGKRNTSMPTSETESVNTENVSGEGENRGCCGSLCQAISKSKLSRRWRRWNRFNRRRCRAAVKSVTFYWLVIVLVFLNTLTISSEHYNQPDWLTQIQDIANKVLLALFTCEMLVKMYSLGLQAYFVSLFNRFDCFVVCGGITETILVELEIMSPLGISVFRCVRLLRIFKVTRHWTSLSNLVASLLNSMKSIASLLLLLFLFIIIFSLLGMQLFGGKFNFDETQTKRSTFDNFPQALLTVFQILTGEDWNAVMYDGIMAYGGPSSSGMIVCIYFIILFICGNYILLNVFLAIAVDNLADAESLNTAQKEEAEEKERKKIARKESLENKKNNKPEVNQIANSDNKVTIDDYREEDEDKDPYPPCDVPVGEEEEEEEEDEPEVPAGPRPRRISELNMKEKIAPIPEGSAFFILSKTNPIRVGCHKLINHHIFTNLILVFIMLSSAALAAEDPIRSHSFRNTILGYFDYAFTAIFTVEILLKMTTFGAFLHKGAFCRNYFNLLDMLVVGVSLVSFGIQSSAISVVKILRVLRVLRPLRAINRAKGLKHVVQCVFVAIRTIGNIMIVTTLLQFMFACIGVQLFKGKFYRCTDEAKSNPEECRGLFILYKDGDVDSPVVRERIWQNSDFNFDNVLSAMMALFTVSTFEGWPALLYKAIDSNGENIGPIYNHRVEISIFFIIYIIIVAFFMMNIFVGFVIVTFQEQGEKEYKNCELDKNQRQCVEYALKARPLRRYIPKNPYQYKFWYVVNSSPFEYMMFVLIMLNTLCLAMQHYEQSKMFNDAMDILNMVFTGVFTVEMVLKVIAFKPKGYFSDAWNTFDSLIVIGSIIDVALSEADNSEESNRISITFFRLFRVMRLVKLLSRGEGIRTLLWTFIKSFQALPYVALLIAMLFFIYAVIGMQMFGKVAMRDNNQINRNNNFQTFPQAVLLLFRCATGEAWQEIMLACLPGKLCDPESDYNPGEEYTCGSNFAIVYFISFYMLCAFLIINLFVAVIMDNFDYLTRDWSILGPHHLDEFKRIWSEYDPEAKGRIKHLDVVTLLRRIQPPLGFGKLCPHRVACKRLVAMNMPLNSDGTVMFNATLFALVRTALKIKTEGNLEQANEELRAVIKKIWKKTSMKLLDQVVPPAGDDEVTVGKFYATFLIQDYFRKFKKRKEQGLVGKYPAKNTTIALQAGLRTLHDIGPEIRRAISCDLQDDEPEETKREEEDDVFKRNGALLGNHVNHVNSDRRDSLQQTNTTHRPLHVQRPSIPPASDTEKPLFPPAGNSVCHNHHNHNSIGKQVPTSTNANLNNANMSKAAHGKRPSIGNLEHVSENGHHSSHKHDREPQRRSSVKRSDSGDEQLPTICREDPEIHGYFRDPHCLGEQEYFSSEECYEDDSSPTWSRQNYGYYSRYPGRNIDSERPRGYHHPQGFLEDDDSPVCYDSRRSPRRRLLPPTPASHRRSSFNFECLRRQSSQEEVPSSPIFPHRTALPLHLMQQQIMAVAGLDSSKAQKYSPSHSTRSWATPPATPPYRDWTPCYTPLIQVEQSEALDQVNGSLPSLHRSSWYTDEPDISYRTFTPASLTVPSSFRNKNSDKQRSADSLVEAVLISEGLGRYARDPKFVSATKHEIADACDLTIDEMESAASTLLNGNVRPRANGDVGPLSHRQDYELQDFGPGYSDEEPDPGRDEEDLADEMICITTL

SEQ ID NO: 25488 - protein, 2146 aa, Homo sapiens
  REGION 1..2146: note = ENSP00000490183
MMMMMMMKKMQHQRQQQADHANEANYARGTRLPLSGEGPTSQPNSSKQTVLSWQAAIDAARQAKAAQTMSTSAPPPVGSLSQRKRQQYAKSKKQGNSSNSRPARALFCLSLNNPIRRACISIVEWKPFDIFILLAIFANCVALAIYIPFPEDDSNSTNHNLEKVEYAFLIIFTVETFLKIIAYGLLLHPNAYVRNGWNLLDFVIVIVGLFSVILEQLTKETEGGNHSSGKSGGFDVKALRAFRVLRPLRLVSGVPSLQVVLNSIIKAMVPLLHIALLVLFVIIIYAIIGLELFIGKMHKTCFFADSDIVAEEDPAPCAFSGNGRQCTANGTECRSGWVGPNGGITNFDNFAFAMLTVFQCITMEGWTDVLYWVNDAIGWEWPWVYFVSLIILGSFFVLNLVLGVLSGEFSKEREKAKARGDFQKLREKQQLEEDLKGYLDWITQAEDIDPENEEEGGEEGKRNTSMPTSETESVNTENVSGEGENRGCCGSLCQAISKSKLSRRWRRWNRFNRRRCRAAVKSVTFYWLVIVLVFLNTLTISSEHYNQPDWLTQIQDIANKVLLALFTCEMLVKMYSLGLQAYFVSLFNRFDCFVVCGGITETILVELEIMSPLGISVFRCVRLLRIFKVTRHWTSLSNLVASLLNSMKSIASLLLLLFLFIIIFSLLGMQLFGGKFNFDETQTKRSTFDNFPQALLTVFQILTGEDWNAVMYDGIMAYGGPSSSGMIVCIYFIILFICGNYILLNVFLAIAVDNLADAESLNTAQKEEAEEKERKKIARKESLENKKNNKPEVNQIANSDNKVTIDDYREEDEDKDPYPPCDVPVGEEEEEEEEDEPEVPAGPRPRRISELNMKEKIAPIPEGSAFFILSKTNPIRVGCHKLINHHIFTNLILVFIMLSSAALAAEDPIRSHSFRNTILGYFDYAFTAIFTVEILLKMTTFGAFLHKGAFCRNYFNLLDMLVVGVSLVSFGIQSSAISVVKILRVLRVLRPLRAINRAKGLKHVVQCVFVAIRTIGNIMIVTTLLQFMFACIGVQLFKGKFYRCTDEAKSNPEECRGLFILYKDGDVDSPVVRERIWQNSDFNFDNVLSAMMALFTVSTFEGWPALLYKAIDSNGENIGPIYNHRVEISIFFIIYIIIVAFFMMNIFVGFVIVTFQEQGEKEYKNCELDKNQRQCVEYALKARPLRRYIPKNPYQYKFWYVVNSSPFEYMMFVLIMLNTLCLAMQHYEQSKMFNDAMDILNMVFTGVFTVEMVLKVIAFKPKGYFSDAWNTFDSLIVIGSIIDVALSEADNSEESNRISITFFRLFRVMRLVKLLSRGEGIRTLLWTFIKSFQALPYVALLIAMLFFIYAVIGMQMFGKVAMRDNNQINRNNNFQTFPQAVLLLFRCATGEAWQEIMLACLPGKLCDPESDYNPGEEYTCGSNFAIVYFISFYMLCAFLIINLFVAVIMDNFDYLTRDWSILGPHHLDEFKRIWSEYDPEAKGRIKHLDVVTLLRRIQPPLGFGKLCPHRVACKRLVAMNMPLNSDGTVMFNATLFALVRTALKIKTEGNLEQANEELRAVIKKIWKKTSMKLLDQVVPPAGDDEVTVGKFYATFLIQDYFRKFKKRKEQGLVGKYPAKNTTIALQAGLRTLHDIGPEIRRAISCDLQDDEPEETKREEEDDVFKRNGALLGNHVNHVNSDRRDSLQQTNTTHRPLHVQRPSIPPASDTEKPLFPPAGNSVCHNHHNHNSIGKQVPTSTNANLNNANMSKAAHGKRPSIGNLEHVSENGHHSSHKHDREPQRRSSVKRTRYYETYIRSDSGDEQLPTICREDPEIHGYFRDPHCLGEQEYFSSEECYEDDSSPTWSRQNYGYYSRYPGRNIDSERPRGYHHPQGFLEDDDSPVCYDSRRSPRRRLLPPTPASHRRSSFNFECLRRQSSQEEVPSSPIFPHRTALPLHLMQQQIMAVAGLDSSKAQKYSPSHSTRSWATPPATPPYRDWTPCYTPLIQVEQSEALDQVNGSLPSLHRSSWYTDEPDISYRTFTPASLTVPSSFRNKNSDKQRSADSLVEAVLISEGLGRYARDPKFVSATKHEIADACDLTIDEMESAASTLLNGNVRPRANGDVGPLSHRQDYELQDFGPGYSDEEPDPGRDEEDLADEMICITTL

SEQ ID NO: 25489 - protein, 1643 aa, Homo sapiens
  REGION 1..1643: note = ENSP00000491921
MQHQRQQQADHANEANYARGTRLPLSGEGPTSQPNSSKQTVLSWQAAIDAARQAKAAQTMSTSAPPPVGSLSQRKRQQYAKSKKQGNSSNSRPARALFCLSLNNPIRRACISIVEWKPFDIFILLAIFANCVALAIYIPFPEDDSNSTNHNLEKVEYAFLIIFTVETFLKIIAYGLLLHPNAYVRNGWNLLDFVIVIVGLFSVILEQLTKETEGGNHSSGKSGGFDVKALRAFRVLRPLRLVSGVPSLQVVLNSIIKAMVPLLHIALLVLFVIIIYAIIGLELFIGKMHKTCFFADSDIVAEEDPAPCAFSGNGRQCTANGTECRSGWVGPNGGITNFDNFAFAMLTVFQCITMEGWTDVLYWVNDAIGWEWPWVYFVSLIILGSFFVLNLVLGVLSGEFSKEREKAKARGDFQKLREKQQLEEDLKGYLDWITQAEDIDPENEEEGGEEGKRNTSMPTSETESVNTENVSGEGENRGCCGSLWCWWRRRGAAKAGPSGCRRWGQAISKSKLSRRWRRWNRFNRRRCRAAVKSVTFYWLVIVLVFLNTLTISSEHYNQPDWLTQIQDIANKVLLALFTCEMLVKMYSLGLQAYFVSLFNRFDCFVVCGGITETILVELEIMSPLGISVFRCVRLLRIFKVTRHWTSLSNLVASLLNSMKSIASLLLLLFLFIIIFSLLGMQLFGGKFNFDETQTKRSTFDNFPQALLTVFQILTGEDWNAVMYDGIMAYGGPSSSGMIVCIYFIILFICGNYILLNVFLAIAVDNLADAESLNTAQKEEAEEKERKKIARKESLENKKNNKPEVNQIANSDNKVTIDDYREEDEDKDPYPPCDVPVGEEEEEEEEDEPEVPAGPRPRRISELNMKEKIAPIPEGSAFFILSKTNPIRVGCHKLINHHIFTNLILVFIMLSSAALAAEDPIRSHSFRNTILGYFDYAFTAIFTVEILLKMTTFGAFLHKGAFCRNYFNLLDMLVVGVSLVSFGIQSSAISVVKILRVLRVLRPLRAINRAKGLKHVVQCVFVAIRTIGNIMIVTTLLQFMFACIGVQLFKGKFYRCTDEAKSNPEECRGLFILYKDGDVDSPVVRERIWQNSDFNFDNVLSAMMALFTVSTFEGWPALLYKAIDSNGENIGPIYNHRVEISIFFIIYIIIVAFFMMNIFVGFVIVTFQEQGEKEYKNCELDKNQRQCVEYALKARPLRRYIPKNPYQYKFWYVVNSSPFEYMMFVLIMLNTLCLAMQHYEQSKMFNDAMDILNMVFTGVFTVEMVLKVIAFKPKHYFTDAWNTFDALIVVGSVVDIAITEVNNSEESNRISITFFRLFRVMRLVKLLSRGEGIRTLLWTFIKSFQALPYVALLIAMLFFIYAVIGMQMFGKVAMRDNNQINRNNNFQTFPQAVLLLFRCATGEAWQEIMLACLPGKLCDPESDYNPGEEYTCGSNFAIVYFISFYMLCAFLIINLFVAVIMDNFDYLTRDWSILGPHHLDEFKRIWSEYDPEAKGRIKHLDVVTLLRRIQPPLGFGKLCPHRVACKRLVAMNMPLNSDGTVMFNATLFALVRTALKIKTEGNLEQANEELRAVIKKIWKKTSMKLLDQVVPPAGDDEVTVGKFYATFLIQDYFRKFKKRKEQGLVGKYPAKNTTIALQMLERML

SEQ ID NO: 25490 - protein, 1372 aa, Homo sapiens
  REGION 1..1372: note = ENSP00000490889
  VARIANT 1: note = Any amino acid
XPSLQVVLNSIIKAMVPLLHIALLVLFVIIIYAIIGLELFIGKMHKTCFFADSDIVAEEDPAPCAFSGNGRQCTANGTECRSGWVGPNGGITNFDNFAFAMLTVFQCITMEGWTDVLYWVNDAIGWEWPWVYFVSLIILGSFFVLNLVLGVLSGEFSKEREKAKARGDFQKLREKQQLEEDLKGYLDWITQAEDIDPENEEEGGEEGKRNTSMPTSETESVNTENVSGEGENRGCCGSLWCWWRRRGAAKAGPSGCRRWGQAISKSKLSRRWRRWNRFNRRRCRAAVKSVTFYWLVIVLVFLNTLTISSEHYNQPDWLTQIQDIANKVLLALFTCEMLVKMYSLGLQAYFVSLFNRFDCFVVCGGITETILVELEIMSPLGISVFRCVRLLRIFKVTRHWTSLSNLVASLLNSMKSIASLLLLLFLFIIIFSLLGMQLFGGKFNFDETQTKRSTFDNFPQALLTVFQILTGEDWNAVMYDGIMAYGGPSSSGMIVCIYFIILFICGNYILLNVFLAIAVDNLADAESLNTAQKEEAEEKERKKIARKESLENKKNNKPEVNQIANSDNKVTIDDYREEDEDKDPYPPCDVPVGEEEEEEEEDEPEVPAGPRPRRISELNMKEKIAPIPEGSAFFILSKTNPIRVGCHKLINHHIFTNLILVFIMLSSAALAAEDPIRSHSFRNTILGYFDYAFTAIFTVEILLKMTTFGAFLHKGAFCRNYFNLLDMLVVGVSLVSFGIQSSAISVVKILRVLRVLRPLRAINRAKGLKHVVQCVFVAIRTIGNIMIVTTLLQFMFACIGVQLFKGKFYRCTDEAKSNPEECRGLFILYKDGDVDSPVVRERIWQNSDFNFDNVLSAMMALFTVSTFEGWPALLYKAIDSNGENIGPIYNHRVEISIFFIIYIIIVAFFMMNIFVGFVIVTFQEQGEKEYKNCELDKNQRQCVEYALKARPLRRYIPKNPYQYKFWYVVNSSPFEYMMFVLIMLNTLCLAMQHYEQSKMFNDAMDILNMVFTGVFTVEMVLKVIAFKPKHYFTDAWNTFDALIVVGSVVDIAITEVNPTESENVPVPTATPGNSEESNRISITFFRLFRVMRLVKLLSRGEGIRTLLWTFIKSFQALPYVALLIAMLFFIYAVIGMQMFGKVAMRDNNQINRNNNFQTFPQAVLLLFRCATGEAWQEIMLACLPGKLCDPESDYNPGEEYTCGSNFAIVYFISFYMLCAFLIINLFVAVIMDNFDYLTRDWSILGPHHLDEFKRIWSEYDPEAKGRIKHLDVVTLLRRIQPPLGFGKLCPHRVACKRLVAMNMPLNSDGTVMFNATLFALVRTALKIKTEGNLEQANEELRAVIKKIWKKTSMKLLDQVVPPAGGQCSLFPK

SEQ ID NO: 25491 - protein, 264 aa, Homo sapiens
  REGION 1..264: note = ENSP00000418045
  VARIANT 1: note = Any amino acid
XPCAFSGNGRQCTANGTECRSGWVGPNGGITNFDNFAFAMLTVFQCITMEGWTDVLYWVNDAIGWEWPWVYFVSLIILGSFFVLNLVLGVLSGEFSKEREKAKARGDFQKLREKQQLEEDLKGYLDWITQAEDIDPENEEEGGEEGKRNRVTVADLLKEDKKKKKFCCFRQRRAKDHASMPTSETESVNTENVSGEGENRGCCGSLCQAISKSKLSRRWRRWNRFNRRRCRAAVKSVTFYWLVIVLVFLNTLTISSEHYNQPDW

SEQ ID NO: 25492 - protein, 1854 aa, Homo sapiens
  REGION 1..1854: note = ENSP00000418014
ANGTECRSGWVGPNGGITNFDNFAFAMLTVFQCITMEGWTDVLYWMNDAMGFELPWVYFVSLVIFGSFFVLNLVLGVLSGEFSKEREKAKARGDFQKLREKQQLEEDLKGYLDWITQAEDIDPENEEEGGEEGKRNTSMPTSETESVNTENVSGEGENRGCCGSLWCWWRRRGAAKAGPSGCRRWGQAISKSKLSRRWRRWNRFNRRRCRAAVKSVTFYWLVIVLVFLNTLTISSEHYNQPDWLTQIQDIANKVLLALFTCEMLVKMYSLGLQAYFVSLFNRFDCFVVCGGITETILVELEIMSPLGISVFRCVRLLRIFKVTRHWTSLSNLVASLLNSMKSIASLLLLLFLFIIIFSLLGMQLFGGKFNFDETQTKRSTFDNFPQALLTVFQILTGEDWNAVMYDGIMAYGGPSSSGMIVCIYFIILFICGNYILLNVFLAIAVDNLADAESLNTAQKEEAEEKERKKIARKESLENKKNNKPEVNQIANSDNKVTIDDYREEDEDKDPYPPCDVPVGEEEEEEEEDEPEVPAGPRPRRISELNMKEKIAPIPEGSAFFILSKTNPIRVGCHKLINHHIFTNLILVFIMLSSAALAAEDPIRSHSFRNTILGYFDYAFTAIFTVEILLKMTTFGAFLHKGAFCRNYFNLLDMLVVGVSLVSFGIQSSAISVVKILRVLRVLRPLRAINRAKGLKHVVQCVFVAIRTIGNIMIVTTLLQFMFACIGVQLFKGKFYRCTDEAKSNPEECRGLFILYKDGDVDSPVVRERIWQNSDFNFDNVLSAMMALFTVSTFEGWPALLYKAIDSNGENIGPIYNHRVEISIFFIIYIIIVAFFMMNIFVGFVIVTFQEQGEKEYKNCELDKNQRQCVEYALKARPLRRYIPKNPYQYKFWYVVNSSPFEYMMFVLIMLNTLCLAMQHYEQSKMFNDAMDILNMVFTGVFTVEMVLKVIAFKPKHYFTDAWNTFDALIVVGSVVDIAITEVNPTESENVPVPTATPGNSEESNRISITFFRLFRVMRLVKLLSRGEGIRTLLWTFIKSFQALPYVALLIAMLFFIYAVIGMQMFGKVAMRDNNQINRNNNFQTFPQAVLLLFRCATGEAWQEIMLACLPGKLCDPESDYNPGEEYTCGSNFAIVYFISFYMLCAFLIINLFVAVIMDNFDYLTRDWSILGPHHLDEFKRIWSEYDPEAKGRIKHLDVVTLLRRIQPPLGFGKLCPHRVACKRLVAMNMPLNSDGTVMFNATLFALVRTALKIKTEGNLEQANEELRAVIKKIWKKTSMKLLDQVVPPAGDDEVTVGKFYATFLIQDYFRKFKKRKEQGLVGKYPAKNTTIALQAGLRTLHDIGPEIRRAISCDLQDDEPEETKREEEDDVFKRNGALLGNHVNHVNSDRRDSLQQTNTTHRPLHVQRPSIPPASDTEKPLFPPAGNSVCHNHHNHNSIGKQVPTSTNANLNNANMSKAAHGKRPSIGNLEHVSENGHHSSHKHDREPQRRSSVKRTRYYETYIRSDSGDEQLPTICREDPEIHGYFRDPHCLGEQEYFSSEECYEDDSSPTWSRQNYGYYSRYPGRNIDSERPRGYHHPQGFLEDDDSPVCYDSRRSPRRRLLPPTPASHRRSSFNFECLRRQSSQEEVPSSPIFPHRTALPLHLMQQQIMAVAGLDSSKAQKYSPSHSTRSWATPPATPPYRDWTPCYTPLIQVEQSEALDQVNGSLPSLHRSSWYTDEPDISYRTFTPASLTVPSSFRNKNSDKQRSADSLVEAVLISEGLGRYARDPKFVSATKHEIADACDLTIDEMESAASTLLNGNVRPRANGDVGPLSHRQDYELQDFGPGYSDEEPDPGRDEEDLADEMICITTL

SEQ ID NO: 25493 - protein, 72 aa, Homo sapiens
  REGION 1..72: note = ENSP00000489962
EEEGGEEGKRNRVTVADLLKEDKKKKKFCCFRQRRAKDHASMPTSETESVNTENVSGEGENRGCCGSLWCWW

SEQ ID NO: 25494 - protein, 297 aa, Homo sapiens
  REGION 1..297: note = ENSP00000490108
  VARIANT 1: note = Any amino acid
XADAESLNTAQKEEAEEKERKKIARKESLENKKNNKPEVNQIANSDNKVTIDDYREEDEDKDPYPPCDVPGEEEEEEEEDEPEVPAGPRPRRISELNMKEKIAPIPEGSAFFILSKTNPIRVGCHKLINHHIFTNLILVFIMLSSAALAAEDPIRSHSFRNTMLGYADYVFTGTFAFEIILKMTTFGAFLHKGAFCRNYFNLLDMLVVGVSLVSFGIQSSAISVVKILRVLRVLRPLRAINRAKGLKHVVQCVFVAIRTIGNIMIVTTLLQFMFACIGVQLFKGKFYRCTDEAKSNP

SEQ ID NO: 25495 - protein, 284 aa, Homo sapiens
  REGION 1..284: note = ENSP00000490908
  VARIANT 1: note = Any amino acid
XFYRCTDEAKSNPEECRGLFILYKDGDVDSPVVRERIWQNSDFNFDNVLSAMMALFTVSTFEGWPALLYKAIDSNGENIGPIYNHRVEISIFFIIYIIIVAFFMMNIFVGFVIVTFQEQGEKEYKNCELDKNQRQCVEYALKARPLRRYIPKNPYQYKFWYVVNSSPFEYMMFVLIMLNTLCLAMQHYEQSKMFNDAMDILNMVFTGVFTVEMVLKVIAFKPKNSEESNRISITFFRLFRVMRLVKLLSRGEGIRTLLWTFIKSFQALPYVALLIAMLFFIYAV

SEQ ID NO: 25496 - protein, 490 aa, Homo sapiens
  REGION 1..490: note = ENSP00000489790
MMNIFVGFVIVTFQEQGEKEYKNCELDKNQRQCVEYALKARPLRRYIPKNPYQYKFWYVVNSSPFEYMMFVLIMLNTLCLAMQHYEQSKMFNDAMDILNMVFTGVFTVEMVLKVIAFKPKGYFSDAWNTFDSLIVIGSIIDVALSEADNSEESNRISITFFRLFRVMRLVKLLSRGEGIRTLLWTFIKSFQALPYVALLIAMLFFIYAVIGMQMFGKVAMRDNNQINRNNNFQTFPQAVLLLFRCATGEAWQEIMLACLPGKLCDPESDYNPGEEYTCGSNFAIVYFISFYMLCAFLIINLFVAVIMDNFDYLTRDWSILGPHHLDEFKRIWSEYDPEAKGRIKHLDVVTLLRRIQPPLGFGKLCPHRVACKRLVAMNMPLNSDGTVMFNATLFALVRTALKIKTEGNLEQANEELRAVIKKIWKKTSMKLLDQVVPPAGDDEVTVGKFYATFLIQDYFRKFKKRKEQGLVGKYPAKNTTIALQMLERML

SEQ ID NO: 25497 - protein, 223 aa, Homo sapiens
  REGION 1..223: note = ENSP00000490523
FFMMNIFVGFVIVTFQEQGEKEYKNCELDKNQRQCVEYALKARPLRRYIPKNPYQYKFWYVVNSSPFEYMMFVLIMLNTLCLAMQHYEQSKMFNDAMDILNMVFTGVFTVEMVLKVIAFKPKALPYVALLIAMLFFIYAVIGMQMFGKVAMRDNNQINRNNNFQTFPQAVLLLFRCATGEAWQEIMLACLPGKLCDPESDYNPGEEYTCGSNFAIVYFISFYM

SEQ ID NO: 25498 - protein, 453 aa, Homo sapiens
  REGION 1..453: note = ENSP00000490839
  VARIANT 1: note = Any amino acid
XVFTGVFTVEMVLKVIAFKPKHYFTDAWNTFDALIVVGSVVDIAITEVNPTESENVPVPTATPGNSEESNRISITFFRLFRVMRLVKLLSRGEGIRTLLWTFIKSFQALPYVALLIAMLFFIYAVIGMQMFGKVAMRDNNQINRNNNFQTFPQAVLLLFRCATGEAWQEIMLACLPGKLCDPESDYNPGEEYTCGSNFAIVYFISFYMLCAFLIINLFVAVIMDNFDYLTRDWSILGPHHLDEFKRIWSEYDPEAKGRIKHLDVVTLLRRIQPPLGFGKLCPHRVACKRLVAMNMPLNSDGTVMFNATLFALVRTALKIKTEGNLEQANEELRAVIKKIWKKTSMKLLDQVVPPAGDDEVTVGKFYATFLIQDYFRKFKKRKEQGLVGKYPAKNTTIALQAGLRTLHDIGPEIRRAISCDLQDDEPEETKREEEDDVFKQEIRCVITIITIIP

SEQ ID NO: 25499 - protein, 438 aa, Homo sapiens
  REGION 1..438: note = ENSP00000432038
MARFGEAVVARPGSGDGDSDQSRNRQGTPVPASGQAAAYKQTKAQRARTMALYNPIPVRQNCFTVNRSLFIFGEDNIVRKYAKKLIDWPPFEYMILATIIANCIVLALEQHLPEDDKTPMSRRLEKTEPYFIGIFCFEAGIKIVALGFIFHKGSYLRNGWNVMDFIVVLSGILATAGTHFNTHVDLRTLRAVRVLRPLKLVSGIPSLQIVLKSIMKAMVPLLQIGLLLFFAILMFAIIGLEFYSGKLHRACFMNNSGILEGFDPPHPCGVQGCPAGYECKDWIGPNDGITQFDNILFAVLTVFQCITMEGWTTVLYNTNDALGATWNWLYFIPLIIIGSFFVLNLVLGVLSGEFAKERERVENRRAFMKLRRQQQIERELNGYRAWIDKAEEVMLAEENKNAGTSALEVLRRATIKRSRTEAMTRDSSDEHCVDISSV

SEQ ID NO: 25500 - protein, 2270 aa, Homo sapiens
  REGION 1..2270: note = ENSP00000356542
MARFGEAVVARPGSGDGDSDQSRNRQGTPVPASGQAAAYKQTKAQRARTMALYNPIPVRQNCFTVNRSLFIFGEDNIVRKYAKKLIDWPPFEYMILATIIANCIVLALEQHLPEDDKTPMSRRLEKTEPYFIGIFCFEAGIKIVALGFIFHKGSYLRNGWNVMDFIVVLSGILATAGTHFNTHVDLRTLRAVRVLRPLKLVSGIPSLQIVLKSIMKAMVPLLQIGLLLFFAILMFAIIGLEFYSGKLHRACFMNNSGILEGFDPPHPCGVQGCPAGYECKDWIGPNDGITQFDNILFAVLTVFQCITMEGWTTVLYNTNDALGATWNWLYFIPLIIIGSFFVLNLVLGVLSGEFAKERERVENRRAFMKLRRQQQIERELNGYRAWIDKAEEVMLAEENKNAGTSALEVLRRATIKRSRTEAMTRDSSDEHCVDISSVGTPLARASIKSAKVDGVSYFRHKERLLRISIRHMVKSQVFYWIVLSLVALNTACVAIVHHNQPQWLTHLLYYAEFLFLGLFLLEMSLKMYGMGPRLYFHSSFNCFDFGVTVGSIFEVVWAIFRPGTSFGISVLRALRLLRIFKITKYWASLRNLVVSLMSSMKSIISLLFLLFLFIVVFALLGMQLFGGRFNFNDGTPSANFDTFPAAIMTVFQILTGEDWNEVMYNGIRSQGGVSSGMWSAIYFIVLTLFGNYTLLNVFLAIAVDNLANAQELTKDEQEEEEAFNQKHALQKAKEVSPMSAPNMPSIERDRRRRHHMSMWEPRSSHLRERRRRHHMSVWEQRTSQLRKHMQMSSQEALNREEAPTMNPLNPLNPLSSLNPLNAHPSLYRRPRAIEGLALGLALEKFEEERISRGGSLKGDGGDRSSALDNQRTPLSLGQREPPWLARPCHGNCDPTQQEAGGGEAVVTFEDRARHRQSQRRSRHRRVRTEGKESSSASRSRSASQERSLDEAMPTEGEKDHELRGNHGAKEPTIQEERAQDLRRTNSLMVSRGSGLAGGLDEADTPLVLPHPELEVGKHVVLTEQEPEGSSEQALLGNVQLDMGRVISQSEPDLSCITANTDKATTESTSVTVAIPDVDPLVDSTVVHISNKTDGEASPLKEAEIREDEEEVEKKKQKKEKRETGKAMVPHSSMFIFSTTNPIRRACHYIVNLRYFEMCILLVIAASSIALAAEDPVLTNSERNKVLRYFDYVFTGVFTFEMVIKMIDQGLILQDGSYFRDLWNILDFVVVVGALVAFALANALGTNKGRDIKTIKSLRVLRVLRPLKTIKRLPKLKAVFDCVVTSLKNVFNILIVYKLFMFIFAVIAVQLFKGKFFYCTDSSKDTEKECIGNYVDHEKNKMEVKGREWKRHEFHYDNIIWALLTLFTVSTGEGWPQVLQHSVDVTEEDRGPSRSNRMEMSIFYVVYFVVFPFFFVNIFVALIIITFQEQGDKMMEECSLEKNERACIDFAISAKPLTRYMPQNRHTFQYRVWHFVVSPSFEYTIMAMIALNTVVLMMKYYSAPCTYELALKYLNIAFTMVFSLECVLKVIAFGFLNYFRDTWNIFDFITVIGSITEIILTDSKLVNTSGFNMSFLKLFRAARLIKLLRQGYTIRILLWTFVQSFKALPYVCLLIAMLFFIYAIIGMQVFGNIKLDEESHINRHNNFRSFFGSLMLLFRSATGEAWQEIMLSCLGEKGCEPDTTAPSGQNENERCGTDLAYVYFVSFIFFCSFLMLNLFVAVIMDNFEYLTRDSSILGPHHLDEFVRVWAEYDRAACGRIHYTEMYEMLTLMSPPLGLGKRCPSKVAYKRLVLMNMPVAEDMTVHFTSTLMALIRTALDIKIAKGGADRQQLDSELQKETLAIWPHLSQKMLDLLVPMPKASDLTVGKIYAAMMIMDYYKQSKVKKQRQQLEEQKNAPMFQRMEPSSLPQEIIANAKALPYLQQDPVSGLSGRSGYPSMSPLSPQDIFQLACMDPADDGQFQERQSLVVTDPSSMRRSFSTIRDKRSNSSWLEEFSMERSSENTYKSRRRSYHSSLRLSAHRLNSDSGHKSDTHRSGGRERGRSKERKHLLSPDVSRCNSEERGTQADWESPERRQSRSPSEGRSQTPNRQGTGSLSESSIPSVSDTSTPRRSRRQLPPVPPKPRPLLSYSSLIRHAGSISPPADGSEEGSPLTSQALESNNACLTESSNSPHPQQSQHASPQRYISEPYLALHEDSHASDCGEEETLTFEAAVATSLGRSNTIGSAPPLRHSWQMPNGHYRRRRRGGPGPGMMCGAVNNLLSDTEEDDKC

SEQ ID NO: 25501 - protein, 2251 aa, Homo sapiens
  REGION 1..2251: note = ENSP00000481619
MARFGEAVVARPGSGDGDSDQSRNRQGTPVPASGQAAAYKQTKAQRARTMALYNPIPVRQNCFTVNRSLFIFGEDNIVRKYAKKLIDWPPFEYMILATIIANCIVLALEQHLPEDDKTPMSRRLEKTEPYFIGIFCFEAGIKIVALGFIFHKGSYLRNGWNVMDFIVVLSGILATAGTHFNTHVDLRTLRAVRVLRPLKLVSGIPSLQIVLKSIMKAMVPLLQIGLLLFFAILMFAIIGLEFYSGKLHRACFMNNSGILEGFDPPHPCGVQGCPAGYECKDWIGPNDGITQFDNILFAVLTVFQCITMEGWTTVLYNTNDALGATWNWLYFIPLIIIGSFFVLNLVLGVLSGEFAKERERVENRRAFMKLRRQQQIERELNGYRAWIDKAEEVMLAEENKNAGTSALEVLRRATIKRSRTEAMTRDSSDEHCVDISSVGTPLARASIKSAKVDGVSYFRHKERLLRISIRHMVKSQVFYWIVLSLVALNTACVAIVHHNQPQWLTHLLYYAEFLFLGLFLLEMSLKMYGMGPRLYFHSSFNCFDFGVTVGSIFEVVWAIFRPGTSFGISVLRALRLLRIFKITKYWASLRNLVVSLMSSMKSIISLLFLLFLFIVVFALLGMQLFGGRFNFNDGTPSANFDTFPAAIMTVFQILTGEDWNEVMYNGIRSQGGVSSGMWSAIYFIVLTLFGNYTLLNVFLAIAVDNLANAQELTKDEQEEEEAFNQKHALQKAKEVSPMSAPNMPSIERERRRRHHMSVWEQRTSQLRKHMQMSSQEALNREEAPTMNPLNPLNPLSSLNPLNAHPSLYRRPRAIEGLALGLALEKFEEERISRGGSLKGDGGDRSSALDNQRTPLSLGQREPPWLARPCHGNCDPTQQEAGGGEAVVTFEDRARHRQSQRRSRHRRVRTEGKESSSASRSRSASQERSLDEAMPTEGEKDHELRGNHGAKEPTIQEERAQDLRRTNSLMVSRGSGLAGGLDEADTPLVLPHPELEVGKHVVLTEQEPEGSSEQALLGNVQLDMGRVISQSEPDLSCITANTDKATTESTSVTVAIPDVDPLVDSTVVHISNKTDGEASPLKEAEIREDEEEVEKKKQKKEKRETGKAMVPHSSMFIFSTTNPIRRACHYIVNLRYFEMCILLVIAASSIALAAEDPVLTNSERNKVLRYFDYVFTGVFTFEMVIKMIDQGLILQDGSYFRDLWNILDFVVVVGALVAFALANALGTNKGRDIKTIKSLRVLRVLRPLKTIKRLPKLKAVFDCVVTSLKNVFNILIVYKLFMFIFAVIAVQLFKGKFFYCTDSSKDTEKECIGNYVDHEKNKMEVKGREWKRHEFHYDNIIWALLTLFTVSTGEGWPQVLQHSVDVTEEDRGPSRSNRMEMSIFYVVYFVVFPFFFVNIFVALIIITFQEQGDKMMEECSLEKNERACIDFAISAKPLTRYMPQNRHTFQYRVWHFVVSPSFEYTIMAMIALNTVVLMMKYYSAPCTYELALKYLNIAFTMVFSLECVLKVIAFGFLNYFRDTWNIFDFITVIGSITEIILTDSKLVNTSGFNMSFLKLFRAARLIKLLRQGYTIRILLWTFVQSFKALPYVCLLIAMLFFIYAIIGMQVFGNIKLDEESHINRHNNFRSFFGSLMLLFRSATGEAWQEIMLSCLGEKGCEPDTTAPSGQNENERCGTDLAYVYFVSFIFFCSFLMLNLFVAVIMDNFEYLTRDSSILGPHHLDEFVRVWAEYDRAACGRIHYTEMYEMLTLMSPPLGLGKRCPSKVAYKRLVLMNMPVAEDMTVHFTSTLMALIRTALDIKIAKGGADRQQLDSELQKETLAIWPHLSQKMLDLLVPMPKASDLTVGKIYAAMMIMDYYKQSKVKKQRQQLEEQKNAPMFQRMEPSSLPQEIIANAKALPYLQQDPVSGLSGRSGYPSMSPLSPQDIFQLACMDPADDGQFQERQSLVVTDPSSMRRSFSTIRDKRSNSSWLEEFSMERSSENTYKSRRRSYHSSLRLSAHRLNSDSGHKSDTHRSGGRERGRSKERKHLLSPDVSRCNSEERGTQADWESPERRQSRSPSEGRSQTPNRQGTGSLSESSIPSVSDTSTPRRSRRQLPPVPPKPRPLLSYSSLIRHAGSISPPADGSEEGSPLTSQALESNNACLTESSNSPHPQQSQHASPQRYISEPYLALHEDSHASDCGEEETLTFEAAVATSLGRSNTIGSAPPLRHSWQMPNGHYRRRRRGGPGPGMMCGAVNNLLSDTEEDDKC

SEQ ID NO: 25502 - protein, 2294 aa, Homo sapiens
  REGION 1..2294: note = ENSP00000353222
MARFGEAVVARPGSGDGDSDQSRNRQGTPVPASGQAAAYKQTKAQRARTMALYNPIPVRQNCFTVNRSLFIFGEDNIVRKYAKKLIDWPPFEYMILATIIANCIVLALEQHLPEDDKTPMSRRLEKTEPYFIGIFCFEAGIKIVALGFIFHKGSYLRNGWNVMDFIVVLSGILATAGTHFNTHVDLRTLRAVRVLRPLKLVSGIPSLQIVLKSIMKAMVPLLQIGLLLFFAILMFAIIGLEFYSGKLHRACFMNNSGILEGFDPPHPCGVQGCPAGYECKDWIGPNDGITQFDNILFAVLTVFQCITMEGWTTVLYNTNDALGATWNWLYFIPLIIIGSFFVLNLVLGVLSGEFAKERERVENRRAFMKLRRQQQIERELNGYRAWIDKAEEVMLAEENKNAGTSALEVLRRATIKRSRTEAMTRDSSDEHCVDISSVGTPLARASIKSAKVDGVSYFRHKERLLRISIRHMVKSQVFYWIVLSLVALNTACVAIVHHNQPQWLTHLLYYAEFLFLGLFLLEMSLKMYGMGPRLYFHSSFNCFDFGVTVGSIFEVVWAIFRPGTSFGISVLRALRLLRIFKITKYWASLRNLVVSLMSSMKSIISLLFLLFLFIVVFALLGMQLFGGRFNFNDGTPSANFDTFPAAIMTVFQILTGEDWNEVMYNGIRSQGGVSSGMWSAIYFIVLTLFGNYTLLNVFLAIAVDNLANAQELTKDEQEEEEAFNQKHALQKAKEVSPMSAPNMPSIERERRRRHHMSVWEQRTSQLRKHMQMSSQEALNREEAPTMNPLNPLNPLSSLNPLNAHPSLYRRPRAIEGLALGLALEKFEEERISRGGSLKGDGGDRSSALDNQRTPLSLGQREPPWLARPCHGNCDPTQQEAGGGEAVVTFEDRARHRQSQRRSRHRRVRTEGKESSSASRSRSASQERSLDEAMPTEGEKDHELRGNHGAKEPTIQEERAQDLRRTNSLMVSRGSGLAGGLDEADTPLVLPHPELEVGKHVVLTEQEPEGSSEQALLGNVQLDMGRVISQSEPDLSCITANTDKATTESTSVTVAIPDVDPLVDSTVVHISNKTDGEASPLKEAEIREDEEEVEKKKQKKEKRETGKAMVPHSSMFIFSTTNPIRRACHYIVNLRYFEMCILLVIAASSIALAAEDPVLTNSERNKVLRYFDYVFTGVFTFEMVIKMIDQGLILQDGSYFRDLWNILDFVVVVGALVAFALANALGTNKGRDIKTIKSLRVLRVLRPLKTIKRLPKLKAVFDCVVTSLKNVFNILIVYKLFMFIFAVIAVQLFKGKFFYCTDSSKDTEKECIGNYVDHEKNKMEVKGREWKRHEFHYDNIIWALLTLFTVSTGEGWPQVLQHSVDVTEEDRGPSRSNRMEMSIFYVVYFVVFPFFFVNIFVALIIITFQEQGDKMMEECSLEKNERACIDFAISAKPLTRYMPQNRHTFQYRVWHFVVSPSFEYTIMAMIALNTVVLMMKYYSAPCTYELALKYLNIAFTMVFSLECVLKVIAFGFLNYFRDTWNIFDFITVIGSITEIILTDSKLVNTSGFNMSFLKLFRAARLIKLLRQGYTIRILLWTFVQSFKALPYVCLLIAMLFFIYAIIGMQVFGNIKLDEESHINRHNNFRSFFGSLMLLFRSATGEAWQEIMLSCLGEKGCEPDTTAPSGQNENERCGTDLAYVYFVSFIFFCSFLMLNLFVAVIMDNFEYLTRDSSILGPHHLDEFVRVWAEYDRAACGRIHYTEMYEMLTLMSPPLGLGKRCPSKVAYKRLVLMNMPVAEDMTVHFTSTLMALIRTALDIKIAKGGADRQQLDSELQKETLAIWPHLSQKMLDLLVPMPKASDLTVGKIYAAMMIMDYYKQSKVKKQRQQLEEQKNAPMFQRMEPSSLPQEIIANAKALPYLQQDPVSGLSGRSGYPSMSPLSPQDIFQLACMDPADDGQFQERQSLEPEVSELKSVQPSNHGIYLPSDTQEHAGSGRASSMPRLTVDPQVVTDPSSMRRSFSTIRDKRSNSSWLEEFSMERSSENTYKSRRRSYHSSLRLSAHRLNSDSGHKSDTHRSGGRERGRSKERKHLLSPDVSRCNSEERGTQADWESPERRQSRSPSEGRSQTPNRQGTGSLSESSIPSVSDTSTPRRSRRQLPPVPPKPRPLLSYSSLIRHAGSISPPADGSEEGSPLTSQALESNNACLTESSNSPHPQQSQHASPQRYISEPYLALHEDSHASDCGEEETLTFEAAVATSLGRSNTIGSAPPLRHSWQMPNGHYRRRRRGGPGPGMMCGAVNNLLSDTEEDDKC

SEQ ID NO: 25503 - protein, 2313 aa, Homo sapiens
  REGION 1..2313: note = ENSP00000356545
MARFGEAVVARPGSGDGDSDQSRNRQGTPVPASGQAAAYKQTKAQRARTMALYNPIPVRQNCFTVNRSLFIFGEDNIVRKYAKKLIDWPPFEYMILATIIANCIVLALEQHLPEDDKTPMSRRLEKTEPYFIGIFCFEAGIKIVALGFIFHKGSYLRNGWNVMDFIVVLSGILATAGTHFNTHVDLRTLRAVRVLRPLKLVSGIPSLQIVLKSIMKAMVPLLQIGLLLFFAILMFAIIGLEFYSGKLHRACFMNNSGILEGFDPPHPCGVQGCPAGYECKDWIGPNDGITQFDNILFAVLTVFQCITMEGWTTVLYNTNDALGATWNWLYFIPLIIIGSFFVLNLVLGVLSGEFAKERERVENRRAFMKLRRQQQIERELNGYRAWIDKAEEVMLAEENKNAGTSALEVLRRATIKRSRTEAMTRDSSDEHCVDISSVGTPLARASIKSAKVDGVSYFRHKERLLRISIRHMVKSQVFYWIVLSLVALNTACVAIVHHNQPQWLTHLLYYAEFLFLGLFLLEMSLKMYGMGPRLYFHSSFNCFDFGVTVGSIFEVVWAIFRPGTSFGISVLRALRLLRIFKITKYWASLRNLVVSLMSSMKSIISLLFLLFLFIVVFALLGMQLFGGRFNFNDGTPSANFDTFPAAIMTVFQILTGEDWNEVMYNGIRSQGGVSSGMWSAIYFIVLTLFGNYTLLNVFLAIAVDNLANAQELTKDEQEEEEAFNQKHALQKAKEVSPMSAPNMPSIERDRRRRHHMSMWEPRSSHLRERRRRHHMSVWEQRTSQLRKHMQMSSQEALNREEAPTMNPLNPLNPLSSLNPLNAHPSLYRRPRAIEGLALGLALEKFEEERISRGGSLKGDGGDRSSALDNQRTPLSLGQREPPWLARPCHGNCDPTQQEAGGGEAVVTFEDRARHRQSQRRSRHRRVRTEGKESSSASRSRSASQERSLDEAMPTEGEKDHELRGNHGAKEPTIQEERAQDLRRTNSLMVSRGSGLAGGLDEADTPLVLPHPELEVGKHVVLTEQEPEGSSEQALLGNVQLDMGRVISQSEPDLSCITANTDKATTESTSVTVAIPDVDPLVDSTVVHISNKTDGEASPLKEAEIREDEEEVEKKKQKKEKRETGKAMVPHSSMFIFSTTNPIRRACHYIVNLRYFEMCILLVIAASSIALAAEDPVLTNSERNKVLRYFDYVFTGVFTFEMVIKMIDQGLILQDGSYFRDLWNILDFVVVVGALVAFALANALGTNKGRDIKTIKSLRVLRVLRPLKTIKRLPKLKAVFDCVVTSLKNVFNILIVYKLFMFIFAVIAVQLFKGKFFYCTDSSKDTEKECIGNYVDHEKNKMEVKGREWKRHEFHYDNIIWALLTLFTVSTGEGWPQVLQHSVDVTEEDRGPSRSNRMEMSIFYVVYFVVFPFFFVNIFVALIIITFQEQGDKMMEECSLEKNERACIDFAISAKPLTRYMPQNRHTFQYRVWHFVVSPSFEYTIMAMIALNTVVLMMKYYSAPCTYELALKYLNIAFTMVFSLECVLKVIAFGFLNYFRDTWNIFDFITVIGSITEIILTDSKLVNTSGFNMSFLKLFRAARLIKLLRQGYTIRILLWTFVQSFKALPYVCLLIAMLFFIYAIIGMQVFGNIKLDEESHINRHNNFRSFFGSLMLLFRSATGEAWQEIMLSCLGEKGCEPDTTAPSGQNENERCGTDLAYVYFVSFIFFCSFLMLNLFVAVIMDNFEYLTRDSSILGPHHLDEFVRVWAEYDRAACGRIHYTEMYEMLTLMSPPLGLGKRCPSKVAYKRLVLMNMPVAEDMTVHFTSTLMALIRTALDIKIAKGGADRQQLDSELQKETLAIWPHLSQKMLDLLVPMPKASDLTVGKIYAAMMIMDYYKQSKVKKQRQQLEEQKNAPMFQRMEPSSLPQEIIANAKALPYLQQDPVSGLSGRSGYPSMSPLSPQDIFQLACMDPADDGQFQERQSLEPEVSELKSVQPSNHGIYLPSDTQEHAGSGRASSMPRLTVDPQVVTDPSSMRRSFSTIRDKRSNSSWLEEFSMERSSENTYKSRRRSYHSSLRLSAHRLNSDSGHKSDTHRSGGRERGRSKERKHLLSPDVSRCNSEERGTQADWESPERRQSRSPSEGRSQTPNRQGTGSLSESSIPSVSDTSTPRRSRRQLPPVPPKPRPLLSYSSLIRHAGSISPPADGSEEGSPLTSQALESNNACLTESSNSPHPQQSQHASPQRYISEPYLALHEDSHASDCGEEETLTFEAAVATSLGRSNTIGSAPPLRHSWQMPNGHYRRRRRGGPGPGMMCGAVNNLLSDTEEDDKC

SEQ ID NO: 25504 - protein, 2312 aa, Homo sapiens [sequence omitted]

SEQ ID NO: 25505 - protein, 2270 aa, Homo sapiens; identical to SEQ ID NO: 25500
  REGION 1..2270: note = ENSP00000356539

SEQ ID NO: 25506 - protein, 2313 aa, Homo sapiens; identical to SEQ ID NO: 25503
  REGION 1..2313: note = ENSP00000483914

SEQ ID NO: 25507 - protein, 2251 aa, Homo sapiens; identical to SEQ ID NO: 25501
  REGION 1..2251: note = ENSP00000351101

SEQ ID NO: 25508 - protein, 2261 aa, Homo sapiens
  REGION 1..2261: note = ENSP00000353990
MDEEEDGAGAEESGQPRSFMRLNDLSGAGGRPGPGSAEKDPGSADSEAEGLPYPALAPVVFFYLSQDSRPRSWCLRTVCNPWFERISMLVILLNCVTLGMFRPCEDIACDSQRCRILQAFDDFIFAFFAVEMVVKMVALGIFGKKCYLGDTWNRLDFFIVIAGMLEYSLDLQNVSFSAVRTVRVLRPLRAINRVPSMRILVTLLLDTLPMLGNVLLLCFFVFFIFGIVGVQLWAGLLRNRCFLPENFSLPLSVDLERYYQTENEDESPFICSQPRENGMRSCRSVPTLRGDGGGGPPCGLDYEAYNSSSNTTCVNWNQYYTNCSAGEHNPFKGAINFDNIGYAWIAIFQVITLEGWVDIMYFVMDAHSFYNFIYFILLIIVGSFFMINLCLVVIATQFSETKQRESQLMREQRVRFLSNASTLASFSEPGSCYEELLKYLVYILRKAARRLAQVSRAAGVRVGLLSSPAPLGGQETQPSSSCSRSHRRLSVHHLVHHHHHHHHHYHLGNGTLRAPRASPEIQDRDANGSRRLMLPPPSTPALSGAPPGGAESVHSFYHADCHLEPVRCQAPPPRSPSEASGRTVGSGKVYPTVHTSPPPETLKEKALVEVAASSGPPTLTSLNIPPGPYSSMHKLLETQSTGACQSSCKISSPCLKADSGACGPDSCPYCARAGAGEVELADREMPDSDSEAVYEFTQDAQHSDLRDPHSRRQRSLGPDAEPSSVLAFWRLICDTFRKIVDSKYFGRGIMIAILVNTLSMGIEYHEQPEELTNALEISNIVFTSLFALEMLLKLLVYGPFGYIKNPYNIFDGVIVVISVWEIVGQQGGGLSVLRTFRLMRVLKLVRFLPALQRQLVVLMKTMDNVATFCMLLMLFIFIFSILGMHLFGCKFASERDGDTLPDRKNFDSLLWAIVTVFQILTQEDWNKVLYNGMASTSSWAALYFIALMTFGNYVLFNLLVAILVEGFQAEGDANKSESEPDFFSPSLDGDGDRKKCLALVSLGEHPELRKSLLPPLIIHTAATPMSLPKSTSTGLGEALGPASRRTSSSGSAEPGAAHEMKSPPSARSSPHSPWSAASSWTSRRSSRNSLGRAPSLKRRSPSGERRSLLSGEGQESQDEEESSEEERASPAGSDHRHRGSLEREAKSSFDLPDTLQVPGLHRTASGRGSASEHQDCNGKSASGRLARALRPDDPPLDGDDADDEGNLSKGERVRAWIRARLPACCLERDSWSAYIFPPQSRFRLLCHRIITHKMFDHVVLVIIFLNCITIAMERPKIDPHSAERIFLTLSNYIFTAVFLAEMTVKVVALGWCFGEQAYLRSSWNVLDGLLVLISVIDILVSMVSDSGTKILGMLRVLRLLRTLRPLRVISRAQGLKLVVETLMSSLKPIGNIVVICCAFFIIFGILGVQLFKGKFFVCQGEDTRNITNKSDCAEASYRWVRHKYNFDNLGQALMSLFVLASKDGWVDIMYDGLDAVGVDQQPIMNHNPWMLLYFISFLLIVAFFVLNMFVGVVVENFHKCRQHQEEEEARRREEKRLRRLEKKRRNLMLDDVIASGSSASAASEAQCKPYYSDYSRFRLLVHHLCTSHYLDLFITGVIGLNVVTMAMEHYQQPQILDEALKICNYIFTVIFVLESVFKLVAFGFRRFFQDRWNQLDLAIVLLSIMGITLEEIEVNASLPINPTIIRIMRVLRIARVLKLLKMAVGMRALLDTVMQALPQVGNLGLLFMLLFFIFAALGVELFGDLECDETHPCEGLGRHATFRNFGMAFLTLFRVSTGDNWNGIMKDTLRDCDQESTCYNTVISPIYFVSFVLTAQFVLVNVVIAVLMKHLEESNKEAKEEAELEAELELEMKTLSPQPHSPLGSPFLWPGVEGPDSPDSPKPGALHPAAHARSASHFSLEHPTMQPHPTELPGPDLLTVRKSGVSRTHSLPNDSYMCRHGSTAEGPLGHRGWGLPKAQSGSVLSVHSQPADTSYILQLPKDAPHLLQPHSAPTWGTIPKLPPPGRSPLAQRPLRRQAAIRTDSLDVQGLGSREDLLAEVSGPSPPLARAYSFWGQSSTQAQQHSRSHSKISKHMTPPAPCPGPEPNWGKGPPETRSSLELDTELSWISGDLLPPGGQEEPPSPRDLKKCYSVEAQSCQRRPTSWLDEQRRHSIAVSCLDSGSQPHLGTDPSNLGGQPLGGPGSRPKKKLSPPSITIDPPESQGPRTPPSPGICLRRRAPSSDSKDPLASGPPDSMAASPSPKKDVLSLSGLSSDPADLDP

SEQ ID NO: 25509 - protein, 2250 aa, Homo sapiens
  REGION 1..2250: note = ENSP00000339302
MDEEEDGAGAEESGQPRSFMRLNDLSGAGGRPGPGSAEKDPGSADSEAEGLPYPALAPVVFFYLSQDSRPRSWCLRTVCNPWFERISMLVILLNCVTLGMFRPCEDIACDSQRCRILQAFDDFIFAFFAVEMVVKMVALGIFGKKCYLGDTWNRLDFFIVIAGMLEYSLDLQNVSFSAVRTVRVLRPLRAINRVPSMRILVTLLLDTLPMLGNVLLLCFFVFFIFGIVGVQLWAGLLRNRCFLPENFSLPLSVDLERYYQTENEDESPFICSQPRENGMRSCRSVPTLRGDGGGGPPCGLDYEAYNSSSNTTCVNWNQYYTNCSAGEHNPFKGAINFDNIGYAWIAIFQVITLEGWVDIMYFVMDAHSFYNFIYFILLIIVGSFFMINLCLVVIATQFSETKQRESQLMREQRVRFLSNASTLASFSEPGSCYEELLKYLVYILRKAARRLAQVSRAAGVRVGLLSSPAPLGGQETQPSSSCSRSHRRLSVHHLVHHHHHHHHHYHLGNGTLRAPRASPEIQDRDANGSRRLMLPPPSTPALSGAPPGGAESVHSFYHADCHLEPVRCQAPPPRSPSEASGRTVGSGKVYPTVHTSPPPETLKEKALVEVAASSGPPTLTSLNIPPGPYSSMHKLLETQSTGACQSSCKISSPCLKADSGACGPDSCPYCARAGAGEVELADREMPDSDSEAVYEFTQDAQHSDLRDPHSRRQRSLGPDAEPSSVLAFWRLICDTFRKIVDSKYFGRGIMIAILVNTLSMGIEYHEQPEELTNALEISNIVFTSLFALEMLLKLLVYGPFGYIKNPYNIFDGVIVVISVWEIVGQQGGGLSVLRTFRLMRVLKLVRFLPALQRQLVVLMKTMDNVATFCMLLMLFIFIFSILGMHLFGCKFASERDGDTLPDRKNFDSLLWAIVTVFQILTQEDWNKVLYNGMASTSSWAALYFIALMTFGNYVLFNLLVAILVEGFQAEGDANKSESEPDFFSPSLDGDGDRKKCLALVSLGEHPELRKSLLPPLIIHTAATPMSLPKSTSTGLGEALGPASRRTSSSGSAEPGAAHEMKSPPSARSSPHSPWSAASSWTSRRSSRNSLGRAPSLKRRSPSGERRSLLSGEGQESQDEEESSEEERASPAGSDHRHRGSLEREAKSSFDLPDTLQVPGLHRTASGRGSASEHQDCNGKSASGRLARALRPDDPPLDGDDADDEGNLSKGERVRAWIRARLPACCLERDSWSAYIFPPQSRFRLLCHRIITHKMFDHVVLVIIFLNCITIAMERPKIDPHSAERIFLTLSNYIFTAVFLAEMTVKVVALGWCFGEQAYLRSSWNVLDGLLVLISVIDILVSMVSDSGTKILGMLRVLRLLRTLRPLRVISRAQGLKLVVETLMSSLKPIGNIVVICCAFFIIFGILGVQLFKGKFFVCQGEDTRNITNKSDCAEASYRWVRHKYNFDNLGQALMSLFVLASKDGWVDIMYDGLDAVGVDQQPIMNHNPWMLLYFISFLLIVAFFVLNMFVGVVVENFHKCRQHQEEEEARRREEKRLRRLEKKRRSKEKQMAEAQCKPYYSDYSRFRLLVHHLCTSHYLDLFITGVIGLNVVTMAMEHYQQPQILDEALKICNYIFTVIFVLESVFKLVAFGFRRFFQDRWNQLDLAIVLLSIMGITLEEIEVNASLPINPTIIRIMRVLRIARVLKLLKMAVGMRALLDTVMQALPQVGNLGLLFMLLFFIFAALGVELFGDLECDETHPCEGLGRHATFRNFGMAFLTLFRVSTGDNWNGIMKDTLRDCDQESTCYNTVISPIYFVSFVLTAQFVLVNVVIAVLMKHLEESNKEAKEEAELEAELELEMKTLSPQPHSPLGSPFLWPGVEGPDSPDSPKPGALHPAAHARSASHFSLEHPTMQPHPTELPGPDLLTVRKSGVSRTHSLPNDSYMCRHGSTAEGPLGHRGWGLPKAQSGSVLSVHSQPADTSYILQLPKDAPHLLQPHSAPTWGTIPKLPPPGRSPLAQRPLRRQAAIRTDSLDVQGLGSREDLLAEVSGPSPPLARAYSFWGQSSTQAQQHSRSHSKISKHMTPPAPCPGPEPNWGKGPPETRSSLELDTELSWISGDLLPPGGQEEPPSPRDLKKCYSVEAQSCQRRPTSWLDEQRRHSIAVSCLDSGSQPHLGTDPSNLGGQPLGGPGSRPKKKLSPPSITIDPPESQGPRTPPSPGICLRRRAPSSDSKDPLASGPPDSMAASPSPKKDVLSLSGLSSDPADLDP

SEQ ID NO: 25510 - protein, 2243 aa, Homo sapiens
  REGION 1..2243: note = ENSP00000409759
MDEEEDGAGAEESGQPRSFMRLNDLSGAGGRPGPGSAEKDPGSADSEAEGLPYPALAPVVFFYLSQDSRPRSWCLRTVCNPWFERISMLVILLNCVTLGMFRPCEDIACDSQRCRILQAFDDFIFAFFAVEMVVKMVALGIFGKKCYLGDTWNRLDFFIVIAGMLEYSLDLQNVSFSAVRTVRVLRPLRAINRVPSMRILVTLLLDTLPMLGNVLLLCFFVFFIFGIVGVQLWAGLLRNRCFLPENFSLPLSVDLERYYQTENEDESPFICSQPRENGMRSCRSVPTLRGDGGGGPPCGLDYEAYNSSSNTTCVNWNQYYTNCSAGEHNPFKGAINFDNIGYAWIAIFQVITLEGWVDIMYFVMDAHSFYNFIYFILLIIVGSFFMINLCLVVIATQFSETKQRESQLMREQRVRFLSNASTLASFSEPGSCYEELLKYLVYILRKAARRLAQVSRAAGVRVGLLSSPAPLGGQETQPSSSCSRSHRRLSVHHLVHHHHHHHHHYHLGNGTLRAPRASPEIQDRDANGSRRLMLPPPSTPALSGAPPGGAESVHSFYHADCHLEPVRCQAPPPRSPSEASGRTVGSGKVYPTVHTSPPPETLKEKALVEVAASSGPPTLTSLNIPPGPYSSMHKLLETQSTGACQSSCKISSPCLKADSGACGPDSCPYCARAGAGEVELADREMPDSDSEAVYEFTQDAQHSDLRDPHSRRQRSLGPDAEPSSVLAFWRLICDTFRKIVDSKYFGRGIMIAILVNTLSMGIEYHEQPEELTNALEISNIVFTSLFALEMLLKLLVYGPFGYIKNPYNIFDGVIVVISVWEIVGQQGGGLSVLRTFRLMRVLKLVRFLPALQRQLVVLMKTMDNVATFCMLLMLFIFIFSILGMHLFGCKFASERDGDTLPDRKNFDSLLWAIVTVFQILTQEDWNKVLYNGMASTSSWAALYFIALMTFGNYVLFNLLVAILVEGFQAEGDANKSESEPDFFSPSLDGDGDRKKCLALVSLGEHPELRKSLLPPLIIHTAATPMSLPKSTSTGLGEALGPASRRTSSSGSAEPGAAHEMKSPPSARSSPHSPWSAASSWTSRRSSRNSLGRAPSLKRRSPSGERRSLLSGEGQESQDEEESSEEERASPAGSDHRHRGSLEREAKSSFDLPDTLQVPGLHRTASGRGSASEHQDCNGKSASGRLARALRPDDPPLDGDDADDEGNLSKGERVRAWIRARLPACCLERDSWSAYIFPPQSRFRLLCHRIITHKMFDHVVLVIIFLNCITIAMERPKIDPHSAERIFLTLSNYIFTAVFLAEMTVKVVALGWCFGEQAYLRSSWNVLDGLLVLISVIDILVSMVSDSGTKILGMLRVLRLLRTLRPLRVISRAQGLKLVVETLMSSLKPIGNIVVICCAFFIIFGILGVQLFKGKFFVCQGEDTRNITNKSDCAEASYRWVRHKYNFDNLGQALMSLFVLASKDGWVDIMYDGLDAVGVDQQPIMNHNPWMLLYFISFLLIVAFFVLNMFVGVVVENFHKCRQHQEEEEARRREEKRLRRLEKKRRKAQCKPYYSDYSRFRLLVHHLCTSHYLDLFITGVIGLNVVTMAMEHYQQPQILDEALKICNYIFTVIFVLESVFKLVAFGFRRFFQDRWNQLDLAIVLLSIMGITLEEIEVNASLPINPTIIRIMRVLRIARVLKLLKMAVGMRALLDTVMQALPQVGNLGLLFMLLFFIFAALGVELFGDLECDETHPCEGLGRHATFRNFGMAFLTLFRVSTGDNWNGIMKDTLRDCDQESTCYNTVISPIYFVSFVLTAQFVLVNVVIAVLMKHLEESNKEAKEEAELEAELELEMKTLSPQPHSPLGSPFLWPGVEGPDSPDSPKPGALHPAAHARSASHFSLEHPTMQPHPTELPGPDLLTVRKSGVSRTHSLPNDSYMCRHGSTAEGPLGHRGWGLPKAQSGSVLSVHSQPADTSYILQLPKDAPHLLQPHSAPTWGTIPKLPPPGRSPLAQRPLRRQAAIRTDSLDVQGLGSREDLLAEVSGPSPPLARAYSFWGQSSTQAQQHSRSHSKISKHMTPPAPCPGPEPNWGKGPPETRSSLELDTELSWISGDLLPPGGQEEPPSPRDLKKCYSVEAQSCQRRPTSWLDEQRRHSIAVSCLDSGSQPHLGTDPSNLGGQPLGGPGSRPKKKLSPPSITIDPPESQGPRTPPSPGICLRRRAPSSDSKDPLASGPPDSMAASPSPKKDVLSLSGLSSDPADLDP

SEQ ID NO: 25511 - protein, 1555 aa, Homo sapiens
  REGION 1..1555: note = ENSP00000392390
MDEEEDGAGAEESGQPRSFMRLNDLSGAGGRPGPGSAEKDPGSADSEAEGLPYPALAPVVFFYLSQDSRPRSWCLRTVCNPWFERISMLVILLNCVTLGMFRPCEDIACDSQRCRILQAFDDFIFAFFAVEMVVKMVALGIFGKKCYLGDTWNRLDFFIVIAGMLEYSLDLQNVSFSAVRTVRVLRPLRAINRVPSMRILVTLLLDTLPMLGNVLLLCFFVFFIFGIVGVQLWAGLLRNRCFLPENFSLPLSVDLERYYQTENEDESPFICSQPRENGMRSCRSVPTLRGDGGGGPPCGLDYEAYNSSSNTTCVNWNQYYTNCSAGEHNPFKGAINFDNIGYAWIAIFQVITLEGWVDIMYFVMDAHSFYNFIYFILLIIVGSFFMINLCLVVIATQFSETKQRESQLMREQRVRFLSNASTLASFSEPGSCYEELLKYLVYILRKAARRLAQVSRAAGVRVGLLSSPAPLGGQETQPSSSCSRSHRRLSVHHLVHHHHHHHHHYHLGNGTLRAPRASPEIQDRDANGSRRLMLPPPSTPALSGAPPGGAESVHSFYHADCHLEPVRCQAPPPRSPSEASGRTVGSGKVYPTVHTSPPPETLKEKALVEVAASSGPPTLTSLNIPPGPYSSMHKLLETQSTGACQSSCKISSPCLKADSGACGPDSCPYCARAGAGEVELADREMPDSDSEAVYEFTQDAQHSDLRDPHSRRQRSLGPDAEPSSVLAFWRLICDTFRKIVDSKYFGRGIMIAILVNTLSMGIEYHEQPEELTNALEISNIVFTSLFALEMLLKLLVYGPFGYIKNPYNIFDGVIVVISVWEIVGQQGGGLSVLRTFRLMRVLKLVRFLPALQRQLVVLMKTMDNVATFCMLLMLFIFIFSILGMHLFGCKFASERDGDTLPDRKNFDSLLWAIVTVFQILTQEDWNKVLYNGMASTSSWAALYFIALMTFGNYVLFNLLVAILVEGFQAEEISKREDASGQLSCIQLPVDSQGGDANKSESEPDFFSPSLDGDGDRKKCLALVSLGEHPELRKSLLPPLIIHTAATPMSLPKSTSTGLGEALGPASRRTSSSGSAEPGAAHEMKSPPSARSSPHSPWSAASSWTSRRSSRNSLGRAPSLKRRSPSGERRSLLSGEGQESQDEEESSEEERASPAGSDHRHRGSLEREAKSSFDLPDTLQVPGLHRTASGRGSASEHQDCNGKSASGRLARALRPDDPPLDGDDADDEGNLSKGERVRAWIRARLPACCLERDSWSAYIFPPQSRFRLLCHRIITHKMFDHVVLVIIFLNCITIAMERPKIDPHSAERIFLTLSNYIFTAVFLAEMTVKVVALGWCFGEQAYLRSSWNVLDGLLVLISVIDILVSMVSDSGTKILGMLRVLRLLRTLRPLRVISRAQGLKLVVETLMSSLKPIGNIVVICCAFFIIFGILGVQLFKGKFFVCQGEDTRNITNKSDCAEASYRWVRHKYNFDNLGQVSPRLRGGAVVKEAGGGTGPCLVIPADSGGGGLHEEISPSHPLLSNHQHVAKPSPSHSAPKSGPMGSLAVLKDEETEAQRG

SEQ ID NO: 25512 - protein, 2306 aa, Homo sapiens
  REGION 1..2306: note = ENSP00000425522
MDEEEDGAGAEESGQPRSFMRLNDLSGAGGRPGPGSAEKDPGSADSEAEGLPYPALAPVVFFYLSQDSRPRSWCLRTVCNPWFERISMLVILLNCVTLGMFRPCEDIACDSQRCRILQAFDDFIFAFFAVEMVVKMVALGIFGKKCYLGDTWNRLDFFIVIAGMLEYSLDLQNVSFSAVRTVRVLRPLRAINRVPSMRILVTLLLDTLPMLGNVLLLCFFVFFIFGIVGVQLWAGLLRNRCFLPENFSLPLSVDLERYYQTENEDESPFICSQPRENGMRSCRSVPTLRGDGGGGPPCGLDYEAYNSSSNTTCVNWNQYYTNCSAGEHNPFKGAINFDNIGYAWIAIFQVITLEGWVDIMYFVMDAHSFYNFIYFILLIIVGSFFMINLCLVVIATQFSETKQRESQLMREQRVRFLSNASTLASFSEPGSCYEELLKYLVYILRKAARRLAQVSRAAGVRVGLLSSPAPLGGQETQPSSSCSRSHRRLSVHHLVHHHHHHHHHYHLGNGTLRAPRASPEIQDRDANGSRRLMLPPPSTPALSGAPPGGAESVHSFYHADCHLEPVRCQAPPPRSPSEASGRTVGSGKVYPTVHTSPPPETLKEKALVEVAASSGPPTLTSLNIPPGPYSSMHKLLETQSTGACQSSCKISSPCLKADSGACGPDSCPYCARAGAGEVELADREMPDSDSEAVYEFTQDAQHSDLRDPHSRRQRSLGPDAEPSSVLAFWRLICDTFRKIVDSKYFGRGIMIAILVNTLSMGIEYHEQPEELTNALEISNIVFTSLFALEMLLKLLVYGPFGYIKNPYNIFDGVIVVISVWEIVGQQGGGLSVLRTFRLMRVLKLVRFLPALQRQLVVLMKTMDNVATFCMLLMLFIFIFSILGMHLFGCKFASERDGDTLPDRKNFDSLLWAIVTVFQILTQEDWNKVLYNGMASTSSWAALYFIALMTFGNYVLFNLLVAILVEGFQAEGDANKSESEPDFFSPSLDGDGDRKKCLALVSLGEHPELRKSLLPPLIIHTAATPMSLPKSTSTGLGEALGPASRRTSSSGSAEPGAAHEMKSPPSARSSPHSPWSAASSWTSRRSSRNSLGRAPSLKRRSPSGERRSLLSGEGQESQDEEESSEEERASPAGSDHRHRGSLEREAKSSFDLPDTLQVPGLHRTASGRGSASEHQDCNGKSASGRLARALRPDDPPLDGDDADDEGNLSKGERVRAWIRARLPACCLERDSWSAYIFPPQSRFRLLCHRIITHKMFDHVVLVIIFLNCITIAMERPKIDPHSAERIFLTLSNYIFTAVFLAEMTVKVVALGWCFGEQAYLRSSWNVLDGLLVLISVIDILVSMVSDSGTKILGMLRVLRLLRTLRPLRVISRAQGLKLVVETLMSSLKPIGNIVVICCAFFIIFGILGVQLFKGKFFVCQGEDTRNITNKSDCAEASYRWVRHKYNFDNLGQALMSLFVLASKDGWVDIMYDGLDAVGVDQQPIMNHNPWMLLYFISFLLIVAFFVLNMFVGVVVENFHKCRQHQEEEEARRREEKRLRRLEKKRRNLMLDDVIASGSSASAASEAQCKPYYSDYSRFRLLVHHLCTSHYLDLFITGVIGLNVVTMAMEHYQQPQILDEALKICNYIFTVIFVLESVFKLVAFGFRRFFQDRWNQLDLAIVLLSIMGITLEEIEVNASLPINPTIIRIMRVLRIARVLKLLKMAVGMRALLDTVMQALPQVGNLGLLFMLLFFIFAALGVELFGDLECDETHPCEGLGRHATFRNFGMAFLTLFRVSTGDNWNGIMKDTLRDCDQESTCYNTVISPIYFVSFVLTAQFVLVNVVIAVLMKHLEESNKEAKEEAELEAELELEMKTLSPQPHSPLGSPFLWPGVEGPDSPDSPKPGALHPAAHARSASHFSLEHPTIPLAEMEALSLTSEIVSEPSCSLALTDDSLPDDMHTLLLSALESNMQPHPTELPGPDLLTVRKSGVSRTHSLPNDSYMCRHGSTAEGPLGHRGWGLPKAQSGSVLSVHSQPADTSYILQLPKDAPHLLQPHSAPTWGTIPKLPPPGRSPLAQRPLRRQAAIRTDSLDVQGLGSREDLLAEVSGPSPPLARAYSFWGQSSTQAQQHSRSHSKISKHMTPPAPCPGPEPNWGKGPPETRSSLELDTELSWISGDLLPPGGQEEPPSPRDLKKCYSVEAQSCQRRPTSWLDEQRRHSIAVSCLDSGSQPHLGTDPSNLGGQPLGGPGSRPKKKLSPPSITIDPPESQGPRTPPSPGICLRRRAPSSDSKDPLASGPPDSMAASPSPKKDVLSLSGLSSDPADLDP

SEQ ID NO: 25513 - protein, 2273 aa, Homo sapiens
  REGION 1..2273: note = ENSP00000426261
MDEEEDGAGAEESGQPRSFMRLNDLSGAGGRPGPGSAEKDPGSADSEAEGLPYPALAPVVFFYLSQDSRPRSWCLRTVCNPWFERISMLVILLNCVTLGMFRPCEDIACDSQRCRILQAFDDFIFAFFAVEMVVKMVALGIFGKKCYLGDTWNRLDFFIVIAGMLEYSLDLQNVSFSAVRTVRVLRPLRAINRVPSMRILVTLLLDTLPMLGNVLLLCFFVFFIFGIVGVQLWAGLLRNRCFLPENFSLPLSVDLERYYQTENEDESPFICSQPRENGMRSCRSVPTLRGDGGGGPPCGLDYEAYNSSSNTTCVNWNQYYTNCSAGEHNPFKGAINFDNIGYAWIAIFQVITLEGWVDIMYFVMDAHSFYNFIYFILLIIVGSFFMINLCLVVIATQFSETKQRESQLMREQRVRFLSNASTLASFSEPGSCYEELLKYLVYILRKAARRLAQVSRAAGVRVGLLSSPAPLGGQETQPSSSCSRSHRRLSVHHLVHHHHHHHHHYHLGNGTLRAPRASPEIQDRDANGSRRLMLPPPSTPALSGAPPGGAESVHSFYHADCHLEPVRCQAPPPRSPSEASGRTVGSGKVYPTVHTSPPPETLKEKALVEVAASSGPPTLTSLNIPPGPYSSMHKLLETQSTGACQSSCKISSPCLKADSGACGPDSCPYCARAGAGEVELADREMPDSDSEAVYEFTQDAQHSDLRDPHSRRQRSLGPDAEPSSVLAFWRLICDTFRKIVDSKYFGRGIMIAILVNTLSMGIEYHEQPEELTNALEISNIVFTSLFALEMLLKLLVYGPFGYIKNPYNIFDGVIVVISVWEIVGQQGGGLSVLRTFRLMRVLKLVRFLPALQRQLVVLMKTMDNVATFCMLLMLFIFIFSILGMHLFGCKFASERDGDTLPDRKNFDSLLWAIVTVFQILTQEDWNKVLYNGMASTSSWAALYFIALMTFGNYVLFNLLVAILVEGFQAEEISKREDASGQLSCIQLPVDSQGGDANKSESEPDFFSPSLDGDGDRKKCLALVSLGEHPELRKSLLPPLIIHTAATPMSLPKSTSTGLGEALGPASRRTSSSGSAEPGAAHEMKSPPSARSSPHSPWSAASSWTSRRSSRNSLGRAPSLKRRSPSGERRSLLSGEGQESQDEEESSEEERASPAGSDHRHRGSLEREAKSSFDLPDTLQVPGLHRTASGRGSASEHQDCNGKSASGRLARALRPDDPPLDGDDADDEGNLSKGERVRAWIRARLPACCLERDSWSAYIFPPQSRFRLLCHRIITHKMFDHVVLVIIFLNCITIAMERPKIDPHSAERIFLTLSNYIFTAVFLAEMTVKVVALGWCFGEQAYLRSSWNVLDGLLVLISVIDILVSMVSDSGTKILGMLRVLRLLRTLRPLRVISRAQGLKLVVETLMSSLKPIGNIVVICCAFFIIFGILGVQLFKGKFFVCQGEDTRNITNKSDCAEASYRWVRHKYNFDNLGQALMSLFVLASKDGWVDIMYDGLDAVGVDQQPIMNHNPWMLLYFISFLLIVAFFVLNMFVGVVVENFHKCRQHQEEEEARRREEKRLRRLEKKRRSKEKQMAEAQCKPYYSDYSRFRLLVHHLCTSHYLDLFITGVIGLNVVTMAMEHYQQPQILDEALKICNYIFTVIFVLESVFKLVAFGFRRFFQDRWNQLDLAIVLLSIMGITLEEIEVNASLPINPTIIRIMRVLRIARVLKLLKMAVGMRALLDTVMQALPQVGNLGLLFMLLFFIFAALGVELFGDLECDETHPCEGLGRHATFRNFGMAFLTLFRVSTGDNWNGIMKDTLRDCDQESTCYNTVISPIYFVSFVLTAQFVLVNVVIAVLMKHLEESNKEAKEEAELEAELELEMKTLSPQPHSPLGSPFLWPGVEGPDSPDSPKPGALHPAAHARSASHFSLEHPTMQPHPTELPGPDLLTVRKSGVSRTHSLPNDSYMCRHGSTAEGPLGHRGWGLPKAQSGSVLSVHSQPADTSYILQLPKDAPHLLQPHSAPTWGTIPKLPPPGRSPLAQRPLRRQAAIRTDSLDVQGLGSREDLLAEVSGPSPPLARAYSFWGQSSTQAQQHSRSHSKISKHMTPPAPCPGPEPNWGKGPPETRSSLELDTELSWISGDLLPPGGQEEPPSPRDLKKCYSVEAQSCQRRPTSWLDEQRRHSIAVSCLDSGSQPHLGTDPSNLGGQPLGGPGSRPKKKLSPPSITIDPPESQGPRTPPSPGICLRRRAPSSDSKDPLASGPPDSMAASPSPKKDVLSLSGLSSDPADLDP

SEQ ID NO: 25514 - protein, 2239 aa, Homo sapiens
  REGION 1..2239: note = ENSP00000425451
MDEEEDGAGAEESGQPRSFMRLNDLSGAGGRPGPGSAEKDPGSADSEAEGLPYPALAPVVFFYLSQDSRPRSWCLRTVCNPWFERISMLVILLNCVTLGMFRPCEDIACDSQRCRILQAFDDFIFAFFAVEMVVKMVALGIFGKKCYLGDTWNRLDFFIVIAGMLEYSLDLQNVSFSAVRTVRVLRPLRAINRVPSMRILVTLLLDTLPMLGNVLLLCFFVFFIFGIVGVQLWAGLLRNRCFLPENFSLPLSVDLERYYQTENEDESPFICSQPRENGMRSCRSVPTLRGDGGGGPPCGLDYEAYNSSSNTTCVNWNQYYTNCSAGEHNPFKGAINFDNIGYAWIAIFQVITLEGWVDIMYFVMDAHSFYNFIYFILLIIVGSFFMINLCLVVIATQFSETKQRESQLMREQRVRFLSNASTLASFSEPGSCYEELLKYLVYILRKAARRLAQVSRAAGVRVGLLSSPAPLGGQETQPSSSCSRSHRRLSVHHLVHHHHHHHHHYHLGNGTLRAPRASPEIQDRDANGSRRLMLPPPSTPALSGAPPGGAESVHSFYHADCHLEPVRCQAPPPRSPSEASGRTVGSGKVYPTVHTSPPPETLKEKALVEVAASSGPPTLTSLNIPPGPYSSMHKLLETQSTGACQSSCKISSPCLKADSGACGPDSCPYCARAGAGEVELADREMPDSDSEAVYEFTQDAQHSDLRDPHSRRQRSLGPDAEPSSVLAFWRLICDTFRKIVDSKYFGRGIMIAILVNTLSMGIEYHEQPEELTNALEISNIVFTSLFALEMLLKLLVYGPFGYIKNPYNIFDGVIVVISVWEIVGQQGGGLSVLRTFRLMRVLKLVRFLPALQRQLVVLMKTMDNVATFCMLLMLFIFIFSILGMHLFGCKFASERDGDTLPDRKNFDSLLWAIVTVFQILTQEDWNKVLYNGMASTSSWAALYFIALMTFGNYVLFNLLVAILVEGFQAEEISKREDASGQLSCIQLPVDSQGGDANKSESEPDFFSPSLDGDGDRKKCLALVSLGEHPELRKSLLPPLIIHTAATPMSLPKSTSTGLGEALGPASRRTSSSGSAEPGAAHEMKSPPSARSSPHSPWSAASSWTSRRSSRNSLGRAPSLKRRSPSGERRSLLSGEGQESQDEEESSEEERASPAGSDHRHRGSLEREAKSSFDLPDTLQVPGLHRTASGRGSASEHQDCNGKSASGRLARALRPDDPPLDGDDADDEGNLSKGERVRAWIRARLPACCLERDSWSAYIFPPQSRFRLLCHRIITHKMFDHVVLVIIFLNCITIAMERPKIDPHSAERIFLTLSNYIFTAVFLAEMTVKVVALGWCFGEQAYLRSSWNVLDGLLVLISVIDILVSMVSDSGTKILGMLRVLRLLRTLRPLRVISRAQGLKLVVETLMSSLKPIGNIVVICCAFFIIFGILGVQLFKGKFFVCQGEDTRNITNKSDCAEASYRWVRHKYNFDNLGQALMSLFVLASKDGWVDIMYDGLDAVGVDQQNFHKCRQHQEEEEARRREEKRLRRLEKKRRSKEKQMAEAQCKPYYSDYSRFRLLVHHLCTSHYLDLFITGVIGLNVVTMAMEHYQQPQILDEALKICNYIFTVIFVLESVFKLVAFGFRRFFQDRWNQLDLAIVLLSIMGITLEEIEVNASLPINPTIIRIMRVLRIARVLKLLKMAVGMRALLDTVMQALPQVGNLGLLFMLLFFIFAALGVELFGDLECDETHPCEGLGRHATFRNFGMAFLTLFRVSTGDNWNGIMKDTLRDCDQESTCYNTVISPIYFVSFVLTAQFVLVNVVIAVLMKHLEESNKEAKEEAELEAELELEMKTLSPQPHSPLGSPFLWPGVEGPDSPDSPKPGALHPAAHARSASHFSLEHPTMQPHPTELPGPDLLTVRKSGVSRTHSLPNDSYMCRHGSTAEGPLGHRGWGLPKAQSGSVLSVHSQPADTSYILQLPKDAPHLLQPHSAPTWGTIPKLPPPGRSPLAQRPLRRQAAIRTDSLDVQGLGSREDLLAEVSGPSPPLARAYSFWGQSSTQAQQHSRSHSKISKHMTPPAPCPGPEPNWGKGPPETRSSLELDTELSWISGDLLPPGGQEEPPSPRDLKKCYSVEAQSCQRRPTSWLDEQRRHSIAVSCLDSGSQPHLGTDPSNLGGQPLGGPGSRPKKKLSPPSITIDPPESQGPRTPPSPGICLRRRAPSSDSKDPLASGPPDSMAASPSPKKDVLSLSGLSSDPADLDP

SEQ ID NO: 25515 - protein, 2227 aa, Homo sapiens
  REGION 1..2227: note = ENSP00000422407
MDEEEDGAGAEESGQPRSFMRLNDLSGAGGRPGPGSAEKDPGSADSEAEGLPYPALAPVVFFYLSQDSRPRSWCLRTVCNPWFERISMLVILLNCVTLGMFRPCEDIACDSQRCRILQAFDDFIFAFFAVEMVVKMVALGIFGKKCYLGDTWNRLDFFIVIAGMLEYSLDLQNVSFSAVRTVRVLRPLRAINRVPSMRILVTLLLDTLPMLGNVLLLCFFVFFIFGIVGVQLWAGLLRNRCFLPENFSLPLSVDLERYYQTENEDESPFICSQPRENGMRSCRSVPTLRGDGGGGPPCGLDYEAYNSSSNTTCVNWNQYYTNCSAGEHNPFKGAINFDNIGYAWIAIFQVITLEGWVDIMYFVMDAHSFYNFIYFILLIIVGSFFMINLCLVVIATQFSETKQRESQLMREQRVRFLSNASTLASFSEPGSCYEELLKYLVYILRKAARRLAQVSRAAGVRVGLLSSPAPLGGQETQPSSSCSRSHRRLSVHHLVHHHHHHHHHYHLGNGTLRAPRASPEIQDRDANGSRRLMLPPPSTPALSGAPPGGAESVHSFYHADCHLEPVRCQAPPPRSPSEASGRTVGSGKVYPTVHTSPPPETLKEKALVEVAASSGPPTLTSLNIPPGPYSSMHKLLETQSTGACQSSCKISSPCLKADSGACGPDSCPYCARAGAGEVELADREMPDSDSEAVYEFTQDAQHSDLRDPHSRRQRSLGPDAEPSSVLAFWRLICDTFRKIVDSKYFGRGIMIAILVNTLSMGIEYHEQPEELTNALEISNIVFTSLFALEMLLKLLVYGPFGYIKNPYNIFDGVIVVISVWEIVGQQGGGLSVLRTFRLMRVLKLVRFLPALQRQLVVLMKTMDNVATFCMLLMLFIFIFSILGMHLFGCKFASERDGDTLPDRKNFDSLLWAIVTVFQILTQEDWNKVLYNGMASTSSWAALYFIALMTFGNYVLFNLLVAILVEGFQAEGDANKSESEPDFFSPSLDGDGDRKKCLALVSLGEHPELRKSLLPPLIIHTAATPMSLPKSTSTGLGEALGPASRRTSSSGSAEPGAAHEMKSPPSARSSPHSPWSAASSWTSRRSSRNSLGRAPSLKRRSPSGERRSLLSGEGQESQDEEESSEEERASPAGSDHRHRGSLEREAKSSFDLPDTLQVPGLHRTASGRGSASEHQDCNGKSASGRLARALRPDDPPLDGDDADDEGNLSKGERVRAWIRARLPACCLERDSWSAYIFPPQSRFRLLCHRIITHKMFDHVVLVIIFLNCITIAMERPKIDPHSAERIFLTLSNYIFTAVFLAEMTVKVVALGWCFGEQAYLRSSWNVLDGLLVLISVIDILVSMVSDSGTKILGMLRVLRLLRTLRPLRVISRAQGLKLVVETLMSSLKPIGNIVVICCAFFIIFGILGVQLFKGKFFVCQGEDTRNITNKSDCAEASYRWVRHKYNFDNLGQALMSLFVLASKDGWVDIMYDGLDAVGVDQQNFHKCRQHQEEEEARRREEKRLRRLEKKRRNLMLDDVIASGSSASAASEAQCKPYYSDYSRFRLLVHHLCTSHYLDLFITGVIGLNVVTMAMEHYQQPQILDEALKICNYIFTVIFVLESVFKLVAFGFRRFFQDRWNQLDLAIVLLSIMGITLEEIEVNASLPINPTIIRIMRVLRIARVLKLLKMAVGMRALLDTVMQALPQVGNLGLLFMLLFFIFAALGVELFGDLECDETHPCEGLGRHATFRNFGMAFLTLFRVSTGDNWNGIMKDTLRDCDQESTCYNTVISPIYFVSFVLTAQFVLVNVVIAVLMKHLEESNKEAKEEAELEAELELEMKTLSPQPHSPLGSPFLWPGVEGPDSPDSPKPGALHPAAHARSASHFSLEHPTMQPHPTELPGPDLLTVRKSGVSRTHSLPNDSYMCRHGSTAEGPLGHRGWGLPKAQSGSVLSVHSQPADTSYILQLPKDAPHLLQPHSAPTWGTIPKLPPPGRSPLAQRPLRRQAAIRTDSLDVQGLGSREDLLAEVSGPSPPLARAYSFWGQSSTQAQQHSRSHSKISKHMTPPAPCPGPEPNWGKGPPETRSSLELDTELSWISGDLLPPGGQEEPPSPRDLKKCYSVEAQSCQRRPTSWLDEQRRHSIAVSCLDSGSQPHLGTDPSNLGGQPLGGPGSRPKKKLSPPSITIDPPESQGPRTPPSPGICLRRRAPSSDSKDPLASGPPDSMAASPSPKKDVLSLSGLSSDPADLDP

SEQ ID NO: 25516 - protein, 2232 aa, Homo sapiens
  REGION 1..2232: note = ENSP00000426814
MDEEEDGAGAEESGQPRSFMRLNDLSGAGGRPGPGSAEKDPGSADSEAEGLPYPALAPVVFFYLSQDSRPRSWCLRTVCNPWFERISMLVILLNCVTLGMFRPCEDIACDSQRCRILQAFDDFIFAFFAVEMVVKMVALGIFGKKCYLGDTWNRLDFFIVIAGMLEYSLDLQNVSFSAVRTVRVLRPLRAINRVPSMRILVTLLLDTLPMLGNVLLLCFFVFFIFGIVGVQLWAGLLRNRCFLPENFSLPLSVDLERYYQTENEDESPFICSQPRENGMRSCRSVPTLRGDGGGGPPCGLDYEAYNSSSNTTCVNWNQYYTNCSAGEHNPFKGAINFDNIGYAWIAIFQVITLEGWVDIMYFVMDAHSFYNFIYFILLIIVGSFFMINLCLVVIATQFSETKQRESQLMREQRVRFLSNASTLASFSEPGSCYEELLKYLVYILRKAARRLAQVSRAAGVRVGLLSSPAPLGGQETQPSSSCSRSHRRLSVHHLVHHHHHHHHHYHLGNGTLRAPRASPEIQDRDANGSRRLMLPPPSTPALSGAPPGGAESVHSFYHADCHLEPVRCQAPPPRSPSEASGRTVGSGKVYPTVHTSPPPETLKEKALVEVAASSGPPTLTSLNIPPGPYSSMHKLLETQSTGACQSSCKISSPCLKADSGACGPDSCPYCARAGAGEVELADREMPDSDSEAVYEFTQDAQHSDLRDPHSRRQRSLGPDAEPSSVLAFWRLICDTFRKIVDSKYFGRGIMIAILVNTLSMGIEYHEQPEELTNALEISNIVFTSLFALEMLLKLLVYGPFGYIKNPYNIFDGVIVVISVWEIVGQQGGGLSVLRTFRLMRVLKLVRFLPALQRQLVVLMKTMDNVATFCMLLMLFIFIFSILGMHLFGCKFASERDGDTLPDRKNFDSLLWAIVTVFQILTQEDWNKVLYNGMASTSSWAALYFIALMTFGNYVLFNLLVAILVEGFQAEEISKREDASGQLSCIQLPVDSQGGDANKSESEPDFFSPSLDGDGDRKKCLALVSLGEHPELRKSLLPPLIIHTAATPMSLPKSTSTGLGEALGPASRRTSSSGSAEPGAAHEMKSPPSARSSPHSPWSAASSWTSRRSSRNSLGRAPSLKRRSPSGERRSLLSGEGQESQDEEESSEEERASPAGSDHRHRGSLEREAKSSFDLPDTLQVPGLHRTASGRGSASEHQDCNGKSASGRLARALRPDDPPLDGDDADDEGNLSKGERVRAWIRARLPACCLERDSWSAYIFPPQSRFRLLCHRIITHKMFDHVVLVIIFLNCITIAMERPKIDPHSAERIFLTLSNYIFTAVFLAEMTVKVVALGWCFGEQAYLRSSWNVLDGLLVLISVIDILVSMVSDSGTKILGMLRVLRLLRTLRPLRVISRAQGLKLVVETLMSSLKPIGNIVVICCAFFIIFGILGVQLFKGKFFVCQGEDTRNITNKSDCAEASYRWVRHKYNFDNLGQALMSLFVLASKDGWVDIMYDGLDAVGVDQQNFHKCRQHQEEEEARRREEKRLRRLEKKRRKAQCKPYYSDYSRFRLLVHHLCTSHYLDLFITGVIGLNVVTMAMEHYQQPQILDEALKICNYIFTVIFVLESVFKLVAFGFRRFFQDRWNQLDLAIVLLSIMGITLEEIEVNASLPINPTIIRIMRVLRIARVLKLLKMAVGMRALLDTVMQALPQVGNLGLLFMLLFFIFAALGVELFGDLECDETHPCEGLGRHATFRNFGMAFLTLFRVSTGDNWNGIMKDTLRDCDQESTCYNTVISPIYFVSFVLTAQFVLVNVVIAVLMKHLEESNKEAKEEAELEAELELEMKTLSPQPHSPLGSPFLWPGVEGPDSPDSPKPGALHPAAHARSASHFSLEHPTMQPHPTELPGPDLLTVRKSGVSRTHSLPNDSYMCRHGSTAEGPLGHRGWGLPKAQSGSVLSVHSQPADTSYILQLPKDAPHLLQPHSAPTWGTIPKLPPPGRSPLAQRPLRRQAAIRTDSLDVQGLGSREDLLAEVSGPSPPLARAYSFWGQSSTQAQQHSRSHSKISKHMTPPAPCPGPEPNWGKGPPETRSSLELDTELSWISGDLLPPGGQEEPPSPRDLKKCYSVEAQSCQRRPTSWLDEQRRHSIAVSCLDSGSQPHLGTDPSNLGGQPLGGPGSRPKKKLSPPSITIDPPESQGPRTPPSPGICLRRRAPSSDSKDPLASGPPDSMAASPSPKKDVLSLSGLSSDPADLDP

SEQ ID NO: 25517 - protein, 2250 aa, Homo sapiens
  REGION 1..2250: note = ENSP00000427238
MDEEEDGAGAEESGQPRSFMRLNDLSGAGGRPGPGSAEKDPGSADSEAEGLPYPALAPVVFFYLSQDSRPRSWCLRTVCNPWFERISMLVILLNCVTLGMFRPCEDIACDSQRCRILQAFDDFIFAFFAVEMVVKMVALGIFGKKCYLGDTWNRLDFFIVIAGMLEYSLDLQNVSFSAVRTVRVLRPLRAINRVPSMRILVTLLLDTLPMLGNVLLLCFFVFFIFGIVGVQLWAGLLRNRCFLPENFSLPLSVDLERYYQTENEDESPFICSQPRENGMRSCRSVPTLRGDGGGGPPCGLDYEAYNSSSNTTCVNWNQYYTNCSAGEHNPFKGAINFDNIGYAWIAIFQVITLEGWVDIMYFVMDAHSFYNFIYFILLIIVGSFFMINLCLVVIATQFSETKQRESQLMREQRVRFLSNASTLASFSEPGSCYEELLKYLVYILRKAARRLAQVSRAAGVRVGLLSSPAPLGGQETQPSSSCSRSHRRLSVHHLVHHHHHHHHHYHLGNGTLRAPRASPEIQDRDANGSRRLMLPPPSTPALSGAPPGGAESVHSFYHADCHLEPVRCQAPPPRSPSEASGRTVGSGKVYPTVHTSPPPETLKEKALVEVAASSGPPTLTSLNIPPGPYSSMHKLLETQSTGACQSSCKISSPCLKADSGACGPDSCPYCARAGAGEVELADREMPDSDSEAVYEFTQDAQHSDLRDPHSRRQRSLGPDAEPSSVLAFWRLICDTFRKIVDSKYFGRGIMIAILVNTLSMGIEYHEQPEELTNALEISNIVFTSLFALEMLLKLLVYGPFGYIKNPYNIFDGVIVVISVWEIVGQQGGGLSVLRTFRLMRVLKLVRFLPALQRQLVVLMKTMDNVATFCMLLMLFIFIFSILGMHLFGCKFASERDGDTLPDRKNFDSLLWAIVTVFQILTQEDWNKVLYNGMASTSSWAALYFIALMTFGNYVLFNLLVAILVEGFQAEEISKREDASGQLSCIQLPVDSQGGDANKSESEPDFFSPSLDGDGDRKKCLALVSLGEHPELRKSLLPPLIIHTAATPMSLPKSTSTGLGEALGPASRRTSSSGSAEPGAAHEMKSPPSARSSPHSPWSAASSWTSRRSSRNSLGRAPSLKRRSPSGERRSLLSGEGQESQDEEESSEEERASPAGSDHRHRGSLEREAKSSFDLPDTLQVPGLHRTASGRGSASEHQDCNGKSASGRLARALRPDDPPLDGDDADDEGNLSKGERVRAWIRARLPACCLERDSWSAYIFPPQSRFRLLCHRIITHKMFDHVVLVIIFLNCITIAMERPKIDPHSAERIFLTLSNYIFTAVFLAEMTVKVVALGWCFGEQAYLRSSWNVLDGLLVLISVIDILVSMVSDSGTKILGMLRVLRLLRTLRPLRVISRAQGLKLVVETLMSSLKPIGNIVVICCAFFIIFGILGVQLFKGKFFVCQGEDTRNITNKSDCAEASYRWVRHKYNFDNLGQALMSLFVLASKDGWVDIMYDGLDAVGVDQQNFHKCRQHQEEEEARRREEKRLRRLEKKRRNLMLDDVIASGSSASAASEAQCKPYYSDYSRFRLLVHHLCTSHYLDLFITGVIGLNVVTMAMEHYQQPQILDEALKICNYIFTVIFVLESVFKLVAFGFRRFFQDRWNQLDLAIVLLSIMGITLEEIEVNASLPINPTIIRIMRVLRIARVLKLLKMAVGMRALLDTVMQALPQVGNLGLLFMLLFFIFAALGVELFGDLECDETHPCEGLGRHATFRNFGMAFLTLFRVSTGDNWNGIMKDTLRDCDQESTCYNTVISPIYFVSFVLTAQFVLVNVVIAVLMKHLEESNKEAKEEAELEAELELEMKTLSPQPHSPLGSPFLWPGVEGPDSPDSPKPGALHPAAHARSASHFSLEHPTMQPHPTELPGPDLLTVRKSGVSRTHSLPNDSYMCRHGSTAEGPLGHRGWGLPKAQSGSVLSVHSQPADTSYILQLPKDAPHLLQPHSAPTWGTIPKLPPPGRSPLAQRPLRRQAAIRTDSLDVQGLGSREDLLAEVSGPSPPLARAYSFWGQSSTQAQQHSRSHSKISKHMTPPAPCPGPEPNWGKGPPETRSSLELDTELSWISGDLLPPGGQEEPPSPRDLKKCYSVEAQSCQRRPTSWLDEQRRHSIAVSCLDSGSQPHLGTDPSNLGGQPLGGPGSRPKKKLSPPSITIDPPESQGPRTPPSPGICLRRRAPSSDSKDPLASGPPDSMAASPSPKKDVLSLSGLSSDPADLDP

SEQ ID NO: 25518 - protein, 2332 aa, Homo sapiens
  REGION 1..2332: note = ENSP00000423112
MDEEEDGAGAEESGQPRSFMRLNDLSGAGGRPGPGSAEKDPGSADSEAEGLPYPALAPVVFFYLSQDSRPRSWCLRTVCNPWFERISMLVILLNCVTLGMFRPCEDIACDSQRCRILQAFDDFIFAFFAVEMVVKMVALGIFGKKCYLGDTWNRLDFFIVIAGMLEYSLDLQNVSFSAVRTVRVLRPLRAINRVPSMRILVTLLLDTLPMLGNVLLLCFFVFFIFGIVGVQLWAGLLRNRCFLPENFSLPLSVDLERYYQTENEDESPFICSQPRENGMRSCRSVPTLRGDGGGGPPCGLDYEAYNSSSNTTCVNWNQYYTNCSAGEHNPFKGAINFDNIGYAWIAIFQVITLEGWVDIMYFVMDAHSFYNFIYFILLIIVGSFFMINLCLVVIATQFSETKQRESQLMREQRVRFLSNASTLASFSEPGSCYEELLKYLVYILRKAARRLAQVSRAAGVRVGLLSSPAPLGGQETQPSSSCSRSHRRLSVHHLVHHHHHHHHHYHLGNGTLRAPRASPEIQDRDANGSRRLMLPPPSTPALSGAPPGGAESVHSFYHADCHLEPVRCQAPPPRSPSEASGRTVGSGKVYPTVHTSPPPETLKEKALVEVAASSGPPTLTSLNIPPGPYSSMHKLLETQSTGACQSSCKISSPCLKADSGACGPDSCPYCARAGAGEVELADREMPDSDSEAVYEFTQDAQHSDLRDPHSRRQRSLGPDAEPSSVLAFWRLICDTFRKIVDSKYFGRGIMIAILVNTLSMGIEYHEQPEELTNALEISNIVFTSLFALEMLLKLLVYGPFGYIKNPYNIFDGVIVVISVWEIVGQQGGGLSVLRTFRLMRVLKLVRFLPALQRQLVVLMKTMDNVATFCMLLMLFIFIFSILGMHLFGCKFASERDGDTLPDRKNFDSLLWAIVTVFQILTQEDWNKVLYNGMASTSSWAALYFIALMTFGNYVLFNLLVAILVEGFQAEEISKREDASGQLSCIQLPVDSQGGDANKSESEPDFFSPSLDGDGDRKKCLALVSLGEHPELRKSLLPPLIIHTAATPMSLPKSTSTGLGEALGPASRRTSSSGSAEPGAAHEMKSPPSARSSPHSPWSAASSWTSRRSSRNSLGRAPSLKRRSPSGERRSLLSGEGQESQDEEESSEEERASPAGSDHRHRGSLEREAKSSFDLPDTLQVPGLHRTASGRGSASEHQDCNGKSASGRLARALRPDDPPLDGDDADDEGNLSKGERVRAWIRARLPACCLERDSWSAYIFPPQSRFRLLCHRIITHKMFDHVVLVIIFLNCITIAMERPKIDPHSAERIFLTLSNYIFTAVFLAEMTVKVVALGWCFGEQAYLRSSWNVLDGLLVLISVIDILVSMVSDSGTKILGMLRVLRLLRTLRPLRVISRAQGLKLVVETLMSSLKPIGNIVVICCAFFIIFGILGVQLFKGKFFVCQGEDTRNITNKSDCAEASYRWVRHKYNFDNLGQALMSLFVLASKDGWVDIMYDGLDAVGVDQQPIMNHNPWMLLYFISFLLIVAFFVLNMFVGVVVENFHKCRQHQEEEEARRREEKRLRRLEKKRRNLMLDDVIASGSSASAASEAQCKPYYSDYSRFRLLVHHLCTSHYLDLFITGVIGLNVVTMAMEHYQQPQILDEALKICNYIFTVIFVLESVFKLVAFGFRRFFQDRWNQLDLAIVLLSIMGITLEEIEVNASLPINPTIIRIMRVLRIARVLKLLKMAVGMRALLDTVMQALPQVGNLGLLFMLLFFIFAALGVELFGDLECDETHPCEGLGRHATFRNFGMAFLTLFRVSTGDNWNGIMKDTLRDCDQESTCYNTVISPIYFVSFVLTAQFVLVNVVIAVLMKHLEESNKEAKEEAELEAELELEMKTLSPQPHSPLGSPFLWPGVEGPDSPDSPKPGALHPAAHARSASHFSLEHPTDRQLFDTISLLIQGSLEWELKLMDELAGPGGQPSAFPSAPSLGGSDPQMQPHPTELPGPDLLTVRKSGVSRTHSLPNDSYMCRHGSTAEGPLGHRGWGLPKAQSGSVLSVHSQPADTSYILQLPKDAPHLLQPHSAPTWGTIPKLPPPGRSPLAQRPLRRQAAIRTDSLDVQGLGSREDLLAEVSGPSPPLARAYSFWGQSSTQAQQHSRSHSKISKHMTPPAPCPGPEPNWGKGPPETRSSLELDTELSWISGDLLPPGGQEEPPSPRDLKKCYSVEAQSCQRRPTSWLDEQRRHSIAVSCLDSGSQPHLGTDPSNLGGQPLGGPGSRPKKKLSPPSITIDPPESQGPRTPPSPGICLRRRAPSSDSKDPLASGPPDSMAASPSPKKDVLSLSGLSSDPADLDP

SEQ ID NO: 25519 - protein, 1758 aa, Homo sapiens
  REGION 1..1758: note = ENSP00000427247
MDEEEDGAGAEESGQPRSFMRLNDLSGAGGRPGPGSAEKDPGSADSEAEGLPYPALAPVVFFYLSQDSRPRSWCLRTVCNPWFERISMLVILLNCVTLGMFRPCEDIACDSQRCRILQAFDDFIFAFFAVEMVVKMVALGIFGKKCYLGDTWNRLDFFIVIAGMLEYSLDLQNVSFSAVRTVRVLRPLRAINRVPSMRILVTLLLDTLPMLGNVLLLCFFVFFIFGIVGVQLWAGLLRNRCFLPENFSLPLSVDLERYYQTENEDESPFICSQPRENGMRSCRSVPTLRGDGGGGPPCGLDYEAYNSSSNTTCVNWNQYYTNCSAGEHNPFKGAINFDNIGYAWIAIFQVITLEGWVDIMYFVMDAHSFYNFIYFILLIIVGSFFMINLCLVVIATQFSETKQRESQLMREQRVRFLSNASTLASFSEPGSCYEELLKYLVYILRKAARRLAQVSRAAGVRVGLLSSPAPLGGQETQPSSSCSRSHRRLSVHHLVHHHHHHHHHYHLGNGTLRAPRASPEIQDRDANGSRRLMLPPPSTPALSGAPPGGAESVHSFYHADCHLEPVRCQAPPPRSPSEASGRTVGSGKVYPTVHTSPPPETLKEKALVEVAASSGPPTLTSLNIPPGPYSSMHKLLETQSTGACQSSCKISSPCLKADSGACGPDSCPYCARAGAGEVELADREMPDSDSEAVYEFTQDAQHSDLRDPHSRRQRSLGPDAEPSSVLAFWRLICDTFRKIVDSKYFGRGIMIAILVNTLSMGIEYHEQPEELTNALEISNIVFTSLFALEMLLKLLVYGPFGYIKNPYNIFDGVIVVISVWEIVGQQGGGLSVLRTFRLMRVLKLVRFLPALQRQLVVLMKTMDNVATFCMLLMLFIFIFSILGMHLFGCKFASERDGDTLPDRKNFDSLLWAIVTVFQILTQEDWNKVLYNGMASTSSWAALYFIALMTFGNYVLFNLLVAILVEGFQAEEISKREDASGQLSCIQLPVDSQGGDANKSESEPDFFSPSLDGDGDRKKCLALVSLGEHPELRKSLLPPLIIHTAATPMSLPKSTSTGLGEALGPASRRTSSSGSAEPGAAHEMKSPPSARSSPHSPWSAASSWTSRRSSRNSLGRAPSLKRRSPSGERRSLLSGEGQESQDEEESSEEERASPAGSDHRHRGSLEREAKSSFDLPDTLQVPGLHRTASGRGSASEHQDCNGKSASGRLARALRPDDPPLDGDDADDEGNLSKGERVRAWIRARLPACCLERDSWSAYIFPPQSRFRLLCHRIITHKMFDHVVLVIIFLNCITIAMERPKIDPHSAERIFLTLSNYIFTAVFLAEMTVKVVALGWCFGEQAYLRSSWNVLDGLLVLISVIDILVSMVSDSGTKILGMLRVLRLLRTLRPLRVISRAQGLKLVVETLMSSLKPIGNIVVICCAFFIIFGILGVQLFKGKFFVCQGEDTRNITNKSDCAEASYRWVRHKYNFDNLGQALMSLFVLASKDGWVDIMYDGLDAVGVDQQPIMNHNPWMLLYFISFLLIVAFFVLNMFVGVVVENFHKCRQHQEEEEARRREEKRLRRLEKKRRKAQCKPYYSDYSRFRLLVHHLCTSHYLDLFITGVIGLNVVTMAMEHYQQPQILDEALKICNYIFTVIFVLESVFKLVAFGFRRFFQDRWNQLDLAIVLLSIMGITLEEIEVNASLPINPTIIRIMRVLRIARVLKLLKMAVGMRALLDTVMQALPQLWAWSSLETWSVTRHTPVRAWAVMPPFGTLAWPS

SEQ ID NO: 25520 - protein, 2366 aa, Homo sapiens
  REGION 1..2366: note = ENSP00000420918
MDEEEDGAGAEESGQPRSFMRLNDLSGAGGRPGPGSAEKDPGSADSEAEGLPYPALAPVVFFYLSQDSRPRSWCLRTVCNPWFERISMLVILLNCVTLGMFRPCEDIACDSQRCRILQAFDDFIFAFFAVEMVVKMVALGIFGKKCYLGDTWNRLDFFIVIAGMLEYSLDLQNVSFSAVRTVRVLRPLRAINRVPSMRILVTLLLDTLPMLGNVLLLCFFVFFIFGIVGVQLWAGLLRNRCFLPENFSLPLSVDLERYYQTENEDESPFICSQPRENGMRSCRSVPTLRGDGGGGPPCGLDYEAYNSSSNTTCVNWNQYYTNCSAGEHNPFKGAINFDNIGYAWIAIFQVITLEGWVDIMYFVMDAHSFYNFIYFILLIIVGSFFMINLCLVVIATQFSETKQRESQLMREQRVRFLSNASTLASFSEPGSCYEELLKYLVYILRKAARRLAQVSRAAGVRVGLLSSPAPLGGQETQPSSSCSRSHRRLSVHHLVHHHHHHHHHYHLGNGTLRAPRASPEIQDRDANGSRRLMLPPPSTPALSGAPPGGAESVHSFYHADCHLEPVRCQAPPPRSPSEASGRTVGSGKVYPTVHTSPPPETLKEKALVEVAASSGPPTLTSLNIPPGPYSSMHKLLETQSTGACQSSCKISSPCLKADSGACGPDSCPYCARAGAGEVELADREMPDSDSEAVYEFTQDAQHSDLRDPHSRRQRSLGPDAEPSSVLAFWRLICDTFRKIVDSKYFGRGIMIAILVNTLSMGIEYHEQPEELTNALEISNIVFTSLFALEMLLKLLVYGPFGYIKNPYNIFDGVIVVISVWEIVGQQGGGLSVLRTFRLMRVLKLVRFLPALQRQLVVLMKTMDNVATFCMLLMLFIFIFSILGMHLFGCKFASERDGDTLPDRKNFDSLLWAIVTVFQILTQEDWNKVLYNGMASTSSWAALYFIALMTFGNYVLFNLLVAILVEGFQAEEISKREDASGQLSCIQLPVDSQGGDANKSESEPDFFSPSLDGDGDRKKCLALVSLGEHPELRKSLLPPLIIHTAATPMSLPKSTSTGLGEALGPASRRTSSSGSAEPGAAHEMKSPPSARSSPHSPWSAASSWTSRRSSRNSLGRAPSLKRRSPSGERRSLLSGEGQESQDEEESSEEERASPAGSDHRHRGSLEREAKSSFDLPDTLQVPGLHRTASGRGSASEHQDCNGKSASGRLARALRPDDPPLDGDDADDEGNLSKGERVRAWIRARLPACCLERDSWSAYIFPPQSRFRLLCHRIITHKMFDHVVLVIIFLNCITIAMERPKIDPHSAERIFLTLSNYIFTAVFLAEMTVKVVALGWCFGEQAYLRSSWNVLDGLLVLISVIDILVSMVSDSGTKILGMLRVLRLLRTLRPLRVISRAQGLKLVVETLMSSLKPIGNIVVICCAFFIIFGILGVQLFKGKFFVCQGEDTRNITNKSDCAEASYRWVRHKYNFDNLGQALMSLFVLASKDGWVDIMYDGLDAVGVDQQPIMNHNPWMLLYFISFLLIVAFFVLNMFVGVVVENFHKCRQHQEEEEARRREEKRLRRLEKKRRSKEKQMAEAQCKPYYSDYSRFRLLVHHLCTSHYLDLFITGVIGLNVVTMAMEHYQQPQILDEALKICNYIFTVIFVLESVFKLVAFGFRRFFQDRWNQLDLAIVLLSIMGITLEEIEVNASLPINPTIIRIMRVLRIARVLKLLKMAVGMRALLDTVMQALPQVGNLGLLFMLLFFIFAALGVELFGDLECDETHPCEGLGRHATFRNFGMAFLTLFRVSTGDNWNGIMKDTLRDCDQESTCYNTVISPIYFVSFVLTAQFVLVNVVIAVLMKHLEESNKEAKEEAELEAELELEMKTLSPQPHSPLGSPFLWPGVEGPDSPDSPKPGALHPAAHARSASHFSLEHPTDRQLFDTISLLIQGSLEWELKLMDELAGPGGQPSAFPSAPSLGGSDPQIPLAEMEALSLTSEIVSEPSCSLALTDDSLPDDMHTLLLSALESNMQPHPTELPGPDLLTVRKSGVSRTHSLPNDSYMCRHGSTAEGPLGHRGWGLPKAQSGSVLSVHSQPADTSYILQLPKDAPHLLQPHSAPTWGTIPKLPPPGRSPLAQRPLRRQAAIRTDSLDVQGLGSREDLLAEVSGPSPPLARAYSFWGQSSTQAQQHSRSHSKISKHMTPPAPCPGPEPNWGKGPPETRSSLELDTELSWISGDLLPPGGQEEPPSPRDLKKCYSVEAQSCQRRPTSWLDEQRRHSIAVSCLDSGSQPHLGTDPSNLGGQPLGGPGSRPKKKLSPPSITIDPPESQGPRTPPSPGICLRRRAPSSDSKDPLASGPPDSMAASPSPKKDVLSLSGLSSDPADLDP

SEQ ID NO: 25521 - protein, 1776 aa, Homo sapiens
  REGION 1..1776: note = ENSP00000426313
MDEEEDGAGAEESGQPRSFMRLNDLSGAGGRPGPGSAEKDPGSADSEAEGLPYPALAPVVFFYLSQDSRPRSWCLRTVCNPWFERISMLVILLNCVTLGMFRPCEDIACDSQRCRILQAFDDFIFAFFAVEMVVKMVALGIFGKKCYLGDTWNRLDFFIVIAGMLEYSLDLQNVSFSAVRTVRVLRPLRAINRVPSMRILVTLLLDTLPMLGNVLLLCFFVFFIFGIVGVQLWAGLLRNRCFLPENFSLPLSVDLERYYQTENEDESPFICSQPRENGMRSCRSVPTLRGDGGGGPPCGLDYEAYNSSSNTTCVNWNQYYTNCSAGEHNPFKGAINFDNIGYAWIAIFQVITLEGWVDIMYFVMDAHSFYNFIYFILLIIVGSFFMINLCLVVIATQFSETKQRESQLMREQRVRFLSNASTLASFSEPGSCYEELLKYLVYILRKAARRLAQVSRAAGVRVGLLSSPAPLGGQETQPSSSCSRSHRRLSVHHLVHHHHHHHHHYHLGNGTLRAPRASPEIQDRDANGSRRLMLPPPSTPALSGAPPGGAESVHSFYHADCHLEPVRCQAPPPRSPSEASGRTVGSGKVYPTVHTSPPPETLKEKALVEVAASSGPPTLTSLNIPPGPYSSMHKLLETQSTGACQSSCKISSPCLKADSGACGPDSCPYCARAGAGEVELADREMPDSDSEAVYEFTQDAQHSDLRDPHSRRQRSLGPDAEPSSVLAFWRLICDTFRKIVDSKYFGRGIMIAILVNTLSMGIEYHEQPEELTNALEISNIVFTSLFALEMLLKLLVYGPFGYIKNPYNIFDGVIVVISVWEIVGQQGGGLSVLRTFRLMRVLKLVRFLPALQRQLVVLMKTMDNVATFCMLLMLFIFIFSILGMHLFGCKFASERDGDTLPDRKNFDSLLWAIVTVFQILTQEDWNKVLYNGMASTSSWAALYFIALMTFGNYVLFNLLVAILVEGFQAEEISKREDASGQLSCIQLPVDSQGGDANKSESEPDFFSPSLDGDGDRKKCLALVSLGEHPELRKSLLPPLIIHTAATPMSLPKSTSTGLGEALGPASRRTSSSGSAEPGAAHEMKSPPSARSSPHSPWSAASSWTSRRSSRNSLGRAPSLKRRSPSGERRSLLSGEGQESQDEEESSEEERASPAGSDHRHRGSLEREAKSSFDLPDTLQVPGLHRTASGRGSASEHQDCNGKSASGRLARALRPDDPPLDGDDADDEGNLSKGERVRAWIRARLPACCLERDSWSAYIFPPQSRFRLLCHRIITHKMFDHVVLVIIFLNCITIAMERPKIDPHSAERIFLTLSNYIFTAVFLAEMTVKVVALGWCFGEQAYLRSSWNVLDGLLVLISVIDILVSMVSDSGTKILGMLRVLRLLRTLRPLRVISRAQGLKLVVETLMSSLKPIGNIVVICCAFFIIFGILGVQLFKGKFFVCQGEDTRNITNKSDCAEASYRWVRHKYNFDNLGQALMSLFVLASKDGWVDIMYDGLDAVGVDQQPIMNHNPWMLLYFISFLLIVAFFVLNMFVGVVVENFHKCRQHQEEEEARRREEKRLRRLEKKRRNLMLDDVIASGSSASAASEAQCKPYYSDYSRFRLLVHHLCTSHYLDLFITGVIGLNVVTMAMEHYQQPQILDEALKICNYIFTVIFVLESVFKLVAFGFRRFFQDRWNQLDLAIVLLSIMGITLEEIEVNASLPINPTIIRIMRVLRIARVLKLLKMAVGMRALLDTVMQALPQLWAWSSLETWSVTRHTPVRAWAVMPPFGTLAWPS

SEQ ID NO: 25522 - protein, 1765 aa, Homo sapiens
  REGION 1..1765: note = ENSP00000425153
MDEEEDGAGAEESGQPRSFMRLNDLSGAGGRPGPGSAEKDPGSADSEAEGLPYPALAPVVFFYLSQDSRPRSWCLRTVCNPWFERISMLVILLNCVTLGMFRPCEDIACDSQRCRILQAFDDFIFAFFAVEMVVKMVALGIFGKKCYLGDTWNRLDFFIVIAGMLEYSLDLQNVSFSAVRTVRVLRPLRAINRVPSMRILVTLLLDTLPMLGNVLLLCFFVFFIFGIVGVQLWAGLLRNRCFLPENFSLPLSVDLERYYQTENEDESPFICSQPRENGMRSCRSVPTLRGDGGGGPPCGLDYEAYNSSSNTTCVNWNQYYTNCSAGEHNPFKGAINFDNIGYAWIAIFQVITLEGWVDIMYFVMDAHSFYNFIYFILLIIVGSFFMINLCLVVIATQFSETKQRESQLMREQRVRFLSNASTLASFSEPGSCYEELLKYLVYILRKAARRLAQVSRAAGVRVGLLSSPAPLGGQETQPSSSCSRSHRRLSVHHLVHHHHHHHHHYHLGNGTLRAPRASPEIQDRDANGSRRLMLPPPSTPALSGAPPGGAESVHSFYHADCHLEPVRCQAPPPRSPSEASGRTVGSGKVYPTVHTSPPPETLKEKALVEVAASSGPPTLTSLNIPPGPYSSMHKLLETQSTGACQSSCKISSPCLKADSGACGPDSCPYCARAGAGEVELADREMPDSDSEAVYEFTQDAQHSDLRDPHSRRQRSLGPDAEPSSVLAFWRLICDTFRKIVDSKYFGRGIMIAILVNTLSMGIEYHEQPEELTNALEISNIVFTSLFALEMLLKLLVYGPFGYIKNPYNIFDGVIVVISVWEIVGQQGGGLSVLRTFRLMRVLKLVRFLPALQRQLVVLMKTMDNVATFCMLLMLFIFIFSILGMHLFGCKFASERDGDTLPDRKNFDSLLWAIVTVFQILTQEDWNKVLYNGMASTSSWAALYFIALMTFGNYVLFNLLVAILVEGFQAEEISKREDASGQLSCIQLPVDSQGGDANKSESEPDFFSPSLDGDGDRKKCLALVSLGEHPELRKSLLPPLIIHTAATPMSLPKSTSTGLGEALGPASRRTSSSGSAEPGAAHEMKSPPSARSSPHSPWSAASSWTSRRSSRNSLGRAPSLKRRSPSGERRSLLSGEGQESQDEEESSEEERASPAGSDHRHRGSLEREAKSSFDLPDTLQVPGLHRTASGRGSASEHQDCNGKSASGRLARALRPDDPPLDGDDADDEGNLSKGERVRAWIRARLPACCLERDSWSAYIFPPQSRFRLLCHRIITHKMFDHVVLVIIFLNCITIAMERPKIDPHSAERIFLTLSNYIFTAVFLAEMTVKVVALGWCFGEQAYLRSSWNVLDGLLVLISVIDILVSMVSDSGTKILGMLRVLRLLRTLRPLRVISRAQGLKLVVETLMSSLKPIGNIVVICCAFFIIFGILGVQLFKGKFFVCQGEDTRNITNKSDCAEASYRWVRHKYNFDNLGQALMSLFVLASKDGWVDIMYDGLDAVGVDQQPIMNHNPWMLLYFISFLLIVAFFVLNMFVGVVVENFHKCRQHQEEEEARRREEKRLRRLEKKRRSKEKQMAEAQCKPYYSDYSRFRLLVHHLCTSHYLDLFITGVIGLNVVTMAMEHYQQPQILDEALKICNYIFTVIFVLESVFKLVAFGFRRFFQDRWNQLDLAIVLLSIMGITLEEIEVNASLPINPTIIRIMRVLRIARVLKLLKMAVGMRALLDTVMQALPQLWAWSSLETWSVTRHTPVRAWAVMPPFGTLAWPS

SEQ ID NO: 25523 - protein, 2287 aa, Homo sapiens
  REGION 1..2287: note = ENSP00000426172
MDEEEDGAGAEESGQPRSFMRLNDLSGAGGRPGPGSAEKDPGSADSEAEGLPYPALAPVVFFYLSQDSRPRSWCLRTVCNPWFERISMLVILLNCVTLGMFRPCEDIACDSQRCRILQAFDDFIFAFFAVEMVVKMVALGIFGKKCYLGDTWNRLDFFIVIAGMLEYSLDLQNVSFSAVRTVRVLRPLRAINRVPSMRILVTLLLDTLPMLGNVLLLCFFVFFIFGIVGVQLWAGLLRNRCFLPENFSLPLSVDLERYYQTENEDESPFICSQPRENGMRSCRSVPTLRGDGGGGPPCGLDYEAYNSSSNTTCVNWNQYYTNCSAGEHNPFKGAINFDNIGYAWIAIFQVITLEGWVDIMYFVMDAHSFYNFIYFILLIIVGSFFMINLCLVVIATQFSETKQRESQLMREQRVRFLSNASTLASFSEPGSCYEELLKYLVYILRKAARRLAQVSRAAGVRVGLLSSPAPLGGQETQPSSSCSRSHRRLSVHHLVHHHHHHHHHYHLGNGTLRAPRASPEIQDRDANGSRRLMLPPPSTPALSGAPPGGAESVHSFYHADCHLEPVRCQAPPPRSPSEASGRTVGSGKVYPTVHTSPPPETLKEKALVEVAASSGPPTLTSLNIPPGPYSSMHKLLETQSTGACQSSCKISSPCLKADSGACGPDSCPYCARAGAGEVELADREMPDSDSEAVYEFTQDAQHSDLRDPHSRRQRSLGPDAEPSSVLAFWRLICDTFRKIVDSKYFGRGIMIAILVNTLSMGIEYHEQPEELTNALEISNIVFTSLFALEMLLKLLVYGPFGYIKNPYNIFDGVIVVISVWEIVGQQGGGLSVLRTFRLMRVLKLVRFLPALQRQLVVLMKTMDNVATFCMLLMLFIFIFSILGMHLFGCKFASERDGDTLPDRKNFDSLLWAIVTVFQILTQEDWNKVLYNGMASTSSWAALYFIALMTFGNYVLFNLLVAILVEGFQAEEISKREDASGQLSCIQLPVDSQGGDANKSESEPDFFSPSLDGDGDRKKCLALVSLGEHPELRKSLLPPLIIHTAATPMSLPKSTSTGLGEALGPASRRTSSSGSAEPGAAHEMKSPPSARSSPHSPWSAASSWTSRRSSRNSLGRAPSLKRRSPSGERRSLLSGEGQESQDEEESSEEERASPAGSDHRHRGSLEREAKSSFDLPDTLQVPGLHRTASGRGSASEHQDCNGKSASGRLARALRPDDPPLDGDDADDEGNLSKGERVRAWIRARLPACCLERDSWSAYIFPPQSRFRLLCHRIITHKMFDHVVLVIIFLNCITIAMERPKIDPHSAERIFLTLSNYIFTAVFLAEMTVKVVALGWCFGEQAYLRSSWNVLDGLLVLISVIDILVSMVSDSGTKILGMLRVLRLLRTLRPLRVISRAQGLKLVVETLMSSLKPIGNIVVICCAFFIIFGILGVQLFKGKFFVCQGEDTRNITNKSDCAEASYRWVRHKYNFDNLGQALMSLFVLASKDGWVDIMYDGLDAVGVDQQNFHKCRQHQEEEEARRREEKRLRRLEKKRRSKEKQMAEAQCKPYYSDYSRFRLLVHHLCTSHYLDLFITGVIGLNVVTMAMEHYQQPQILDEALKICNYIFTVIFVLESVFKLVAFGFRRFFQDRWNQLDLAIVLLSIMGITLEEIEVNASLPINPTIIRIMRVLRIARVLKLLKMAVGMRALLDTVMQALPQVGNLGLLFMLLFFIFAALGVELFGDLECDETHPCEGLGRHATFRNFGMAFLTLFRVSTGDNWNGIMKDTLRDCDQESTCYNTVISPIYFVSFVLTAQFVLVNVVIAVLMKHLEESNKEAKEEAELEAELELEMKTLSPQPHSPLGSPFLWPGVEGPDSPDSPKPGALHPAAHARSASHFSLEHPTDRQLFDTISLLIQGSLEWELKLMDELAGPGGQPSAFPSAPSLGGSDPQMQPHPTELPGPDLLTVRKSGVSRTHSLPNDSYMCRHGSTAEGPLGHRGWGLPKAQSGSVLSVHSQPADTSYILQLPKDAPHLLQPHSAPTWGTIPKLPPPGRSPLAQRPLRRQAAIRTDSLDVQGLGSREDLLAEVSGPSPPLARAYSFWGQSSTQAQQHSRSHSKISKHMTPPAPCPGPEPNWGKGPPETRSSLELDTELSWISGDLLPPGGQEEPPSPRDLKKCYSVEAQSCQRRPTSWLDEQRRHSIAVSCLDSGSQPHLGTDPSNLGGQPLGGPGSRPKKKLSPPSITIDPPESQGPRTPPSPGICLRRRAPSSDSKDPLASGPPDSMAASPSPKKDVLSLSGLSSDPADLDP

SEQ ID NO: 25524 - protein, 2277 aa, Homo sapiens
  REGION 1..2277: note = ENSP00000423045
MDEEEDGAGAEESGQPRSFMRLNDLSGAGGRPGPGSAEKDPGSADSEAEGLPYPALAPVVFFYLSQDSRPRSWCLRTVCNPWFERISMLVILLNCVTLGMFRPCEDIACDSQRCRILQAFDDFIFAFFAVEMVVKMVALGIFGKKCYLGDTWNRLDFFIVIAGMLEYSLDLQNVSFSAVRTVRVLRPLRAINRVPSMRILVTLLLDTLPMLGNVLLLCFFVFFIFGIVGVQLWAGLLRNRCFLPENFSLPLSVDLERYYQTENEDESPFICSQPRENGMRSCRSVPTLRGDGGGGPPCGLDYEAYNSSSNTTCVNWNQYYTNCSAGEHNPFKGAINFDNIGYAWIAIFQVITLEGWVDIMYFVMDAHSFYNFIYFILLIIVGSFFMINLCLVVIATQFSETKQRESQLMREQRVRFLSNASTLASFSEPGSCYEELLKYLVYILRKAARRLAQVSRAAGVRVGLLSSPAPLGGQETQPSSSCSRSHRRLSVHHLVHHHHHHHHHYHLGNGTLRAPRASPEIQDRDANGSRRLMLPPPSTPALSGAPPGGAESVHSFYHADCHLEPVRCQAPPPRSPSEASGRTVGSGKVYPTVHTSPPPETLKEKALVEVAASSGPPTLTSLNIPPGPYSSMHKLLETQSTGACQSSCKISSPCLKADSGACGPDSCPYCARAGAGEVELADREMPDSDSEAVYEFTQDAQHSDLRDPHSRRQRSLGPDAEPSSVLAFWRLICDTFRKIVDSKYFGRGIMIAILVNTLSMGIEYHEQPEELTNALEISNIVFTSLFALEMLLKLLVYGPFGYIKNPYNIFDGVIVVISVWEIVGQQGGGLSVLRTFRLMRVLKLVRFLPALQRQLVVLMKTMDNVATFCMLLMLFIFIFSILGMHLFGCKFASERDGDTLPDRKNFDSLLWAIVTVFQILTQEDWNKVLYNGMASTSSWAALYFIALMTFGNYVLFNLLVAILVEGFQAEEISKREDASGQLSCIQLPVDSQGGDANKSESEPDFFSPSLDGDGDRKKCLALVSLGEHPELRKSLLPPLIIHTAATPMSLPKSTSTGLGEALGPASRRTSSSGSAEPGAAHEMKSPPSARSSPHSPWSAASSWTSRRSSRNSLGRAPSLKRRSPSGERRSLLSGEGQESQDEEESSEEERASPAGSDHRHRGSLEREAKSSFDLPDTLQVPGLHRTASGRGSASEHQDCNGKSASGRLARALRPDDPPLDGDDADDEGNLSKGERVRAWIRARLPACCLERDSWSAYIFPPQSRFRLLCHRIITHKMFDHVVLVIIFLNCITIAMERPKIDPHSAERIFLTLSNYIFTAVFLAEMTVKVVALGWCFGEQAYLRSSWNVLDGLLVLISVIDILVSMVSDSGTKILGMLRVLRLLRTLRPLRVISRAQGLKLVVETLMSSLKPIGNIVVICCAFFIIFGILGVQLFKGKFFVCQGEDTRNITNKSDCAEASYRWVRHKYNFDNLGQALMSLFVLASKDGWVDIMYDGLDAVGVDQQPIMNHNPWMLLYFISFLLIVAFFVLNMFVGVVVENFHKCRQHQEEEEARRREEKRLRRLEKKRRNLMLDDVIASGSSASAASEAQCKPYYSDYSRFRLLVHHLCTSHYLDLFITGVIGLNVVTMAMEHYQQPQILDEALKICNYIFTVIFVLESVFKLVAFGFRRFFQDRWNQLDLAIVLLSIMGITLEEIEVNASLPINPTIIRIMRVLRIARVLKLLKMAVGMRALLDTVGNLGLLFMLLFFIFAALGVELFGDLECDETHPCEGLGRHATFRNFGMAFLTLFRVSTGDNWNGIMKDTLRDCDQESTCYNTVISPIYFVSFVLTAQFVLVNVVIAVLMKHLEESNKEAKEEAELEAELELEMKTLSPQPHSPLGSPFLWPGVEGPDSPDSPKPGALHPAAHARSASHFSLEHPTMQPHPTELPGPDLLTVRKSGVSRTHSLPNDSYMCRHGSTAEGPLGHRGWGLPKAQSGSVLSVHSQPADTSYILQLPKDAPHLLQPHSAPTWGTIPKLPPPGRSPLAQRPLRRQAAIRTDSLDVQGLGSREDLLAEVSGPSPPLARAYSFWGQSSTQAQQHSRSHSKISKHMTPPAPCPGPEPNWGKGPPETRSSLELDTELSWISGDLLPPGGQEEPPSPRDLKKCYSVEAQSCQRRPTSWLDEQRRHSIAVSCLDSGSQPHLGTDPSNLGGQPLGGPGSRPKKKLSPPSITIDPPESQGPRTPPSPGICLRRRAPSSDSKDPLASGPPDSMAASPSPKKDVLSLSGLSSDPADLDP

SEQ ID NO: 25525 - protein, 1753 aa, Homo sapiens
  REGION 1..1753: note = ENSP00000427231
MDEEEDGAGAEESGQPRSFMRLNDLSGAGGRPGPGSAEKDPGSADSEAEGLPYPALAPVVFFYLSQDSRPRSWCLRTVCNPWFERISMLVILLNCVTLGMFRPCEDIACDSQRCRILQAFDDFIFAFFAVEMVVKMVALGIFGKKCYLGDTWNRLDFFIVIAGMLEYSLDLQNVSFSAVRTVRVLRPLRAINRVPSMRILVTLLLDTLPMLGNVLLLCFFVFFIFGIVGVQLWAGLLRNRCFLPENFSLPLSVDLERYYQTENEDESPFICSQPRENGMRSCRSVPTLRGDGGGGPPCGLDYEAYNSSSNTTCVNWNQYYTNCSAGEHNPFKGAINFDNIGYAWIAIFQVITLEGWVDIMYFVMDAHSFYNFIYFILLIIVGSFFMINLCLVVIATQFSETKQRESQLMREQRVRFLSNASTLASFSEPGSCYEELLKYLVYILRKAARRLAQVSRAAGVRVGLLSSPAPLGGQETQPSSSCSRSHRRLSVHHLVHHHHHHHHHYHLGNGTLRAPRASPEIQDRDANGSRRLMLPPPSTPALSGAPPGGAESVHSFYHADCHLEPVRCQAPPPRSPSEASGRTVGSGKVYPTVHTSPPPETLKEKALVEVAASSGPPTLTSLNIPPGPYSSMHKLLETQSTGACQSSCKISSPCLKADSGACGPDSCPYCARAGAGEVELADREMPDSDSEAVYEFTQDAQHSDLRDPHSRRQRSLGPDAEPSSVLAFWRLICDTFRKIVDSKYFGRGIMIAILVNTLSMGIEYHEQPEELTNALEISNIVFTSLFALEMLLKLLVYGPFGYIKNPYNIFDGVIVVISVWEIVGQQGGGLSVLRTFRLMRVLKLVRFLPALQRQLVVLMKTMDNVATFCMLLMLFIFIFSILGMHLFGCKFASERDGDTLPDRKNFDSLLWAIVTVFQILTQEDWNKVLYNGMASTSSWAALYFIALMTFGNYVLFNLLVAILVEGFQAEGDANKSESEPDFFSPSLDGDGDRKKCLALVSLGEHPELRKSLLPPLIIHTAATPMSLPKSTSTGLGEALGPASRRTSSSGSAEPGAAHEMKSPPSARSSPHSPWSAASSWTSRRSSRNSLGRAPSLKRRSPSGERRSLLSGEGQESQDEEESSEEERASPAGSDHRHRGSLEREAKSSFDLPDTLQVPGLHRTASGRGSASEHQDCNGKSASGRLARALRPDDPPLDGDDADDEGNLSKGERVRAWIRARLPACCLERDSWSAYIFPPQSRFRLLCHRIITHKMFDHVVLVIIFLNCITIAMERPKIDPHSAERIFLTLSNYIFTAVFLAEMTVKVVALGWCFGEQAYLRSSWNVLDGLLVLISVIDILVSMVSDSGTKILGMLRVLRLLRTLRPLRVISRAQGLKLVVETLMSSLKPIGNIVVICCAFFIIFGILGVQLFKGKFFVCQGEDTRNITNKSDCAEASYRWVRHKYNFDNLGQALMSLFVLASKDGWVDIMYDGLDAVGVDQQPIMNHNPWMLLYFISFLLIVAFFVLNMFVGVVVENFHKCRQHQEEEEARRREEKRLRRLEKKRRNLMLDDVIASGSSASAASEAQCKPYYSDYSRFRLLVHHLCTSHYLDLFITGVIGLNVVTMAMEHYQQPQILDEALKICNYIFTVIFVLESVFKLVAFGFRRFFQDRWNQLDLAIVLLSIMGITLEEIEVNASLPINPTIIRIMRVLRIARVLKLLKMAVGMRALLDTVMQALPQLWAWSSLETWSVTRHTPVRAWAVMPPFGTLAWPS

SEQ ID NO: 25526 - protein, 2298 aa, Homo sapiens
  REGION 1..2298: note = ENSP00000427173
MDEEEDGAGAEESGQPRSFMRLNDLSGAGGRPGPGSAEKDPGSADSEAEGLPYPALAPVVFFYLSQDSRPRSWCLRTVCNPWFERISMLVILLNCVTLGMFRPCEDIACDSQRCRILQAFDDFIFAFFAVEMVVKMVALGIFGKKCYLGDTWNRLDFFIVIAGMLEYSLDLQNVSFSAVRTVRVLRPLRAINRVPSMRILVTLLLDTLPMLGNVLLLCFFVFFIFGIVGVQLWAGLLRNRCFLPENFSLPLSVDLERYYQTENEDESPFICSQPRENGMRSCRSVPTLRGDGGGGPPCGLDYEAYNSSSNTTCVNWNQYYTNCSAGEHNPFKGAINFDNIGYAWIAIFQVITLEGWVDIMYFVMDAHSFYNFIYFILLIIVGSFFMINLCLVVIATQFSETKQRESQLMREQRVRFLSNASTLASFSEPGSCYEELLKYLVYILRKAARRLAQVSRAAGVRVGLLSSPAPLGGQETQPSSSCSRSHRRLSVHHLVHHHHHHHHHYHLGNGTLRAPRASPEIQDRDANGSRRLMLPPPSTPALSGAPPGGAESVHSFYHADCHLEPVRCQAPPPRSPSEASGRTVGSGKVYPTVHTSPPPETLKEKALVEVAASSGPPTLTSLNIPPGPYSSMHKLLETQSTGACQSSCKISSPCLKADSGACGPDSCPYCARAGAGEVELADREMPDSDSEAVYEFTQDAQHSDLRDPHSRRQRSLGPDAEPSSVLAFWRLICDTFRKIVDSKYFGRGIMIAILVNTLSMGIEYHEQPEELTNALEISNIVFTSLFALEMLLKLLVYGPFGYIKNPYNIFDGVIVVISVWEIVGQQGGGLSVLRTFRLMRVLKLVRFLPALQRQLVVLMKTMDNVATFCMLLMLFIFIFSILGMHLFGCKFASERDGDTLPDRKNFDSLLWAIVTVFQILTQEDWNKVLYNGMASTSSWAALYFIALMTFGNYVLFNLLVAILVEGFQAEGDANKSESEPDFFSPSLDGDGDRKKCLALVSLGEHPELRKSLLPPLIIHTAATPMSLPKSTSTGLGEALGPASRRTSSSGSAEPGAAHEMKSPPSARSSPHSPWSAASSWTSRRSSRNSLGRAPSLKRRSPSGERRSLLSGEGQESQDEEESSEEERASPAGSDHRHRGSLEREAKSSFDLPDTLQVPGLHRTASGRGSASEHQDCNGKSASGRLARALRPDDPPLDGDDADDEGNLSKGERVRAWIRARLPACCLERDSWSAYIFPPQSRFRLLCHRIITHKMFDHVVLVIIFLNCITIAMERPKIDPHSAERIFLTLSNYIFTAVFLAEMTVKVVALGWCFGEQAYLRSSWNVLDGLLVLISVIDILVSMVSDSGTKILGMLRVLRLLRTLRPLRVISRAQGLKLVVETLMSSLKPIGNIVVICCAFFIIFGILGVQLFKGKFFVCQGEDTRNITNKSDCAEASYRWVRHKYNFDNLGQALMSLFVLASKDGWVDIMYDGLDAVGVDQQPIMNHNPWMLLYFISFLLIVAFFVLNMFVGVVVENFHKCRQHQEEEEARRREEKRLRRLEKKRRSKEKQMAEAQCKPYYSDYSRFRLLVHHLCTSHYLDLFITGVIGLNVVTMAMEHYQQPQILDEALKICNYIFTVIFVLESVFKLVAFGFRRFFQDRWNQLDLAIVLLSIMGITLEEIEVNASLPINPTIIRIMRVLRIARVLKLLKMAVGMRALLDTVMQALPQVGNLGLLFMLLFFIFAALGVELFGDLECDETHPCEGLGRHATFRNFGMAFLTLFRVSTGDNWNGIMKDTLRDCDQESTCYNTVISPIYFVSFVLTAQFVLVNVVIAVLMKHLEESNKEAKEEAELEAELELEMKTLSPQPHSPLGSPFLWPGVEGPDSPDSPKPGALHPAAHARSASHFSLEHPTDRQLFDTISLLIQGSLEWELKLMDELAGPGGQPSAFPSAPSLGGSDPQMQPHPTELPGPDLLTVRKSGVSRTHSLPNDSYMCRHGSTAEGPLGHRGWGLPKAQSGSVLSVHSQPADTSYILQLPKDAPHLLQPHSAPTWGTIPKLPPPGRSPLAQRPLRRQAAIRTDSLDVQGLGSREDLLAEVSGPSPPLARAYSFWGQSSTQAQQHSRSHSKISKHMTPPAPCPGPEPNWGKGPPETRSSLELDTELSWISGDLLPPGGQEEPPSPRDLKKCYSVEAQSCQRRPTSWLDEQRRHSIAVSCLDSGSQPHLGTDPSNLGGQPLGGPGSRPKKKLSPPSITIDPPESQGPRTPPSPGICLRRRAPSSDSKDPLASGPPDSMAASPSPKKDVLSLSGLSSDPADLDP

SEQ ID NO: 25527 - protein, 2284 aa, Homo sapiens
  REGION 1..2284: note = ENSP00000426098
MDEEEDGAGAEESGQPRSFMRLNDLSGAGGRPGPGSAEKDPGSADSEAEGLPYPALAPVVFFYLSQDSRPRSWCLRTVCNPWFERISMLVILLNCVTLGMFRPCEDIACDSQRCRILQAFDDFIFAFFAVEMVVKMVALGIFGKKCYLGDTWNRLDFFIVIAGMLEYSLDLQNVSFSAVRTVRVLRPLRAINRVPSMRILVTLLLDTLPMLGNVLLLCFFVFFIFGIVGVQLWAGLLRNRCFLPENFSLPLSVDLERYYQTENEDESPFICSQPRENGMRSCRSVPTLRGDGGGGPPCGLDYEAYNSSSNTTCVNWNQYYTNCSAGEHNPFKGAINFDNIGYAWIAIFQVITLEGWVDIMYFVMDAHSFYNFIYFILLIIVGSFFMINLCLVVIATQFSETKQRESQLMREQRVRFLSNASTLASFSEPGSCYEELLKYLVYILRKAARRLAQVSRAAGVRVGLLSSPAPLGGQETQPSSSCSRSHRRLSVHHLVHHHHHHHHHYHLGNGTLRAPRASPEIQDRDANGSRRLMLPPPSTPALSGAPPGGAESVHSFYHADCHLEPVRCQAPPPRSPSEASGRTVGSGKVYPTVHTSPPPETLKEKALVEVAASSGPPTLTSLNIPPGPYSSMHKLLETQSTGACQSSCKISSPCLKADSGACGPDSCPYCARAGAGEVELADREMPDSDSEAVYEFTQDAQHSDLRDPHSRRQRSLGPDAEPSSVLAFWRLICDTFRKIVDSKYFGRGIMIAILVNTLSMGIEYHEQPEELTNALEISNIVFTSLFALEMLLKLLVYGPFGYIKNPYNIFDGVIVVISVWEIVGQQGGGLSVLRTFRLMRVLKLVRFLPALQRQLVVLMKTMDNVATFCMLLMLFIFIFSILGMHLFGCKFASERDGDTLPDRKNFDSLLWAIVTVFQILTQEDWNKVLYNGMASTSSWAALYFIALMTFGNYVLFNLLVAILVEGFQAEEISKREDASGQLSCIQLPVDSQGGDANKSESEPDFFSPSLDGDGDRKKCLALVSLGEHPELRKSLLPPLIIHTAATPMSLPKSTSTGLGEALGPASRRTSSSGSAEPGAAHEMKSPPSARSSPHSPWSAASSWTSRRSSRNSLGRAPSLKRRSPSGERRSLLSGEGQESQDEEESSEEERASPAGSDHRHRGSLEREAKSSFDLPDTLQVPGLHRTASGRGSASEHQDCNGKSASGRLARALRPDDPPLDGDDADDEGNLSKGERVRAWIRARLPACCLERDSWSAYIFPPQSRFRLLCHRIITHKMFDHVVLVIIFLNCITIAMERPKIDPHSAERIFLTLSNYIFTAVFLAEMTVKVVALGWCFGEQAYLRSSWNVLDGLLVLISVIDILVSMVSDSGTKILGMLRVLRLLRTLRPLRVISRAQGLKLVVETLMSSLKPIGNIVVICCAFFIIFGILGVQLFKGKFFVCQGEDTRNITNKSDCAEASYRWVRHKYNFDNLGQALMSLFVLASKDGWVDIMYDGLDAVGVDQQPIMNHNPWMLLYFISFLLIVAFFVLNMFVGVVVENFHKCRQHQEEEEARRREEKRLRRLEKKRRNLMLDDVIASGSSASAASEAQCKPYYSDYSRFRLLVHHLCTSHYLDLFITGVIGLNVVTMAMEHYQQPQILDEALKICNYIFTVIFVLESVFKLVAFGFRRFFQDRWNQLDLAIVLLSIMGITLEEIEVNASLPINPTIIRIMRVLRIARVLKLLKMAVGMRALLDTVMQALPQVGNLGLLFMLLFFIFAALGVELFGDLECDETHPCEGLGRHATFRNFGMAFLTLFRVSTGDNWNGIMKDTLRDCDQESTCYNTVISPIYFVSFVLTAQFVLVNVVIAVLMKHLEESNKEAKEEAELEAELELEMKTLSPQPHSPLGSPFLWPGVEGPDSPDSPKPGALHPAAHARSASHFSLEHPTMQPHPTELPGPDLLTVRKSGVSRTHSLPNDSYMCRHGSTAEGPLGHRGWGLPKAQSGSVLSVHSQPADTSYILQLPKDAPHLLQPHSAPTWGTIPKLPPPGRSPLAQRPLRRQAAIRTDSLDVQGLGSREDLLAEVSGPSPPLARAYSFWGQSSTQAQQHSRSHSKISKHMTPPAPCPGPEPNWGKGPPETRSSLELDTELSWISGDLLPPGGQEEPPSPRDLKKCYSVEAQSCQRRPTSWLDEQRRHSIAVSCLDSGSQPHLGTDPSNLGGQPLGGPGSRPKKKLSPPSITIDPPESQGPRTPPSPGICLRRRAPSSDSKDPLASGPPDSMAASPSPKKDVLSLSGLSSDPADLDP

SEQ ID NO: 25528 - protein, 2259 aa, Homo sapiens
  REGION 1..2259: note = ENSP00000425698
MDEEEDGAGAEESGQPRSFMRLNDLSGAGGRPGPGSAEKDPGSADSEAEGLPYPALAPVVFFYLSQDSRPRSWCLRTVCNPWFERISMLVILLNCVTLGMFRPCEDIACDSQRCRILQAFDDFIFAFFAVEMVVKMVALGIFGKKCYLGDTWNRLDFFIVIAGMLEYSLDLQNVSFSAVRTVRVLRPLRAINRVPSMRILVTLLLDTLPMLGNVLLLCFFVFFIFGIVGVQLWAGLLRNRCFLPENFSLPLSVDLERYYQTENEDESPFICSQPRENGMRSCRSVPTLRGDGGGGPPCGLDYEAYNSSSNTTCVNWNQYYTNCSAGEHNPFKGAINFDNIGYAWIAIFQVITLEGWVDIMYFVMDAHSFYNFIYFILLIIVGSFFMINLCLVVIATQFSETKQRESQLMREQRVRFLSNASTLASFSEPGSCYEELLKYLVYILRKAARRLAQVSRAAGVRVGLLSSPAPLGGQETQPSSSCSRSHRRLSVHHLVHHHHHHHHHYHLGNGTLRAPRASPEIQDRDANGSRRLMLPPPSTPALSGAPPGGAESVHSFYHADCHLEPVRCQAPPPRSPSEASGRTVGSGKVYPTVHTSPPPETLKEKALVEVAASSGPPTLTSLNIPPGPYSSMHKLLETQSTGACQSSCKISSPCLKADSGACGPDSCPYCARAGAGEVELADREMPDSDSEAVYEFTQDAQHSDLRDPHSRRQRSLGPDAEPSSVLAFWRLICDTFRKIVDSKYFGRGIMIAILVNTLSMGIEYHEQPEELTNALEISNIVFTSLFALEMLLKLLVYGPFGYIKNPYNIFDGVIVVISVWEIVGQQGGGLSVLRTFRLMRVLKLVRFLPALQRQLVVLMKTMDNVATFCMLLMLFIFIFSILGMHLFGCKFASERDGDTLPDRKNFDSLLWAIVTVFQILTQEDWNKVLYNGMASTSSWAALYFIALMTFGNYVLFNLLVAILVEGFQAEEISKREDASGQLSCIQLPVDSQGGDANKSESEPDFFSPSLDGDGDRKKCLALVSLGEHPELRKSLLPPLIIHTAATPMSLPKSTSTGLGEALGPASRRTSSSGSAEPGAAHEMKSPPSARSSPHSPWSAASSWTSRRSSRNSLGRAPSLKRRSPSGERRSLLSGEGQESQDEEESSEEERASPAGSDHRHRGSLEREAKSSFDLPDTLQVPGLHRTASGRGSASEHQDCNGKSASGRLARALRPDDPPLDGDDADDEGNLSKGERVRAWIRARLPACCLERDSWSAYIFPPQSRFRLLCHRIITHKMFDHVVLVIIFLNCITIAMERPKIDPHSAERIFLTLSNYIFTAVFLAEMTVKVVALGWCFGEQAYLRSSWNVLDGLLVLISVIDILVSMVSDSGTKILGMLRVLRLLRTLRPLRVISRAQGLKLVVETLMSSLKPIGNIVVICCAFFIIFGILGVQLFKGKFFVCQGEDTRNITNKSDCAEASYRWVRHKYNFDNLGQALMSLFVLASKDGWVDIMYDGLDAVGVDQQPIMNHNPWMLLYFISFLLIVAFFVLNMFVGVVVENFHKCRQHQEEEEARRREEKRLRRLEKKRRKAQCKPYYSDYSRFRLLVHHLCTSHYLDLFITGVIGLNVVTMAMEHYQQPQILDEALKICNYIFTVIFVLESVFKLVAFGFRRFFQDRWNQLDLAIVLLSIMGITLEEIEVNASLPINPTIIRIMRVLRIARVLKLLKMAVGMRALLDTVGNLGLLFMLLFFIFAALGVELFGDLECDETHPCEGLGRHATFRNFGMAFLTLFRVSTGDNWNGIMKDTLRDCDQESTCYNTVISPIYFVSFVLTAQFVLVNVVIAVLMKHLEESNKEAKEEAELEAELELEMKTLSPQPHSPLGSPFLWPGVEGPDSPDSPKPGALHPAAHARSASHFSLEHPTMQPHPTELPGPDLLTVRKSGVSRTHSLPNDSYMCRHGSTAEGPLGHRGWGLPKAQSGSVLSVHSQPADTSYILQLPKDAPHLLQPHSAPTWGTIPKLPPPGRSPLAQRPLRRQAAIRTDSLDVQGLGSREDLLAEVSGPSPPLARAYSFWGQSSTQAQQHSRSHSKISKHMTPPAPCPGPEPNWGKGPPETRSSLELDTELSWISGDLLPPGGQEEPPSPRDLKKCYSVEAQSCQRRPTSWLDEQRRHSIAVSCLDSGSQPHLGTDPSNLGGQPLGGPGSRPKKKLSPPSITIDPPESQGPRTPPSPGICLRRRAPSSDSKDPLASGPPDSMAASPSPKKDVLSLSGLSSDPADLDP

SEQ ID NO: 25529 - protein, 2321 aa, Homo sapiens
  REGION 1..2321: note = ENSP00000426232
MDEEEDGAGAEESGQPRSFMRLNDLSGAGGRPGPGSAEKDPGSADSEAEGLPYPALAPVVFFYLSQDSRPRSWCLRTVCNPWFERISMLVILLNCVTLGMFRPCEDIACDSQRCRILQAFDDFIFAFFAVEMVVKMVALGIFGKKCYLGDTWNRLDFFIVIAGMLEYSLDLQNVSFSAVRTVRVLRPLRAINRVPSMRILVTLLLDTLPMLGNVLLLCFFVFFIFGIVGVQLWAGLLRNRCFLPENFSLPLSVDLERYYQTENEDESPFICSQPRENGMRSCRSVPTLRGDGGGGPPCGLDYEAYNSSSNTTCVNWNQYYTNCSAGEHNPFKGAINFDNIGYAWIAIFQVITLEGWVDIMYFVMDAHSFYNFIYFILLIIVGSFFMINLCLVVIATQFSETKQRESQLMREQRVRFLSNASTLASFSEPGSCYEELLKYLVYILRKAARRLAQVSRAAGVRVGLLSSPAPLGGQETQPSSSCSRSHRRLSVHHLVHHHHHHHHHYHLGNGTLRAPRASPEIQDRDANGSRRLMLPPPSTPALSGAPPGGAESVHSFYHADCHLEPVRCQAPPPRSPSEASGRTVGSGKVYPTVHTSPPPETLKEKALVEVAASSGPPTLTSLNIPPGPYSSMHKLLETQSTGACQSSCKISSPCLKADSGACGPDSCPYCARAGAGEVELADREMPDSDSEAVYEFTQDAQHSDLRDPHSRRQRSLGPDAEPSSVLAFWRLICDTFRKIVDSKYFGRGIMIAILVNTLSMGIEYHEQPEELTNALEISNIVFTSLFALEMLLKLLVYGPFGYIKNPYNIFDGVIVVISVWEIVGQQGGGLSVLRTFRLMRVLKLVRFLPALQRQLVVLMKTMDNVATFCMLLMLFIFIFSILGMHLFGCKFASERDGDTLPDRKNFDSLLWAIVTVFQILTQEDWNKVLYNGMASTSSWAALYFIALMTFGNYVLFNLLVAILVEGFQAEEISKREDASGQLSCIQLPVDSQGGDANKSESEPDFFSPSLDGDGDRKKCLALVSLGEHPELRKSLLPPLIIHTAATPMSLPKSTSTGLGEALGPASRRTSSSGSAEPGAAHEMKSPPSARSSPHSPWSAASSWTSRRSSRNSLGRAPSLKRRSPSGERRSLLSGEGQESQDEEESSEEERASPAGSDHRHRGSLEREAKSSFDLPDTLQVPGLHRTASGRGSASEHQDCNGKSASGRLARALRPDDPPLDGDDADDEGNLSKGERVRAWIRARLPACCLERDSWSAYIFPPQSRFRLLCHRIITHKMFDHVVLVIIFLNCITIAMERPKIDPHSAERIFLTLSNYIFTAVFLAEMTVKVVALGWCFGEQAYLRSSWNVLDGLLVLISVIDILVSMVSDSGTKILGMLRVLRLLRTLRPLRVISRAQGLKLVVETLMSSLKPIGNIVVICCAFFIIFGILGVQLFKGKFFVCQGEDTRNITNKSDCAEASYRWVRHKYNFDNLGQALMSLFVLASKDGWVDIMYDGLDAVGVDQQPIMNHNPWMLLYFISFLLIVAFFVLNMFVGVVVENFHKCRQHQEEEEARRREEKRLRRLEKKRRSKEKQMAEAQCKPYYSDYSRFRLLVHHLCTSHYLDLFITGVIGLNVVTMAMEHYQQPQILDEALKICNYIFTVIFVLESVFKLVAFGFRRFFQDRWNQLDLAIVLLSIMGITLEEIEVNASLPINPTIIRIMRVLRIARVLKLLKMAVGMRALLDTVMQALPQVGNLGLLFMLLFFIFAALGVELFGDLECDETHPCEGLGRHATFRNFGMAFLTLFRVSTGDNWNGIMKDTLRDCDQESTCYNTVISPIYFVSFVLTAQFVLVNVVIAVLMKHLEESNKEAKEEAELEAELELEMKTLSPQPHSPLGSPFLWPGVEGPDSPDSPKPGALHPAAHARSASHFSLEHPTDRQLFDTISLLIQGSLEWELKLMDELAGPGGQPSAFPSAPSLGGSDPQMQPHPTELPGPDLLTVRKSGVSRTHSLPNDSYMCRHGSTAEGPLGHRGWGLPKAQSGSVLSVHSQPADTSYILQLPKDAPHLLQPHSAPTWGTIPKLPPPGRSPLAQRPLRRQAAIRTDSLDVQGLGSREDLLAEVSGPSPPLARAYSFWGQSSTQAQQHSRSHSKISKHMTPPAPCPGPEPNWGKGPPETRSSLELDTELSWISGDLLPPGGQEEPPSPRDLKKCYSVEAQSCQRRPTSWLDEQRRHSIAVSCLDSGSQPHLGTDPSNLGGQPLGGPGSRPKKKLSPPSITIDPPESQGPRTPPSPGICLRRRAPSSDSKDPLASGPPDSMAASPSPKKDVLSLSGLSSDPADLDP

SEQ ID NO: 25530 - protein, 2291 aa, Homo sapiens
  REGION 1..2291: note = ENSP00000423317
MDEEEDGAGAEESGQPRSFMRLNDLSGAGGRPGPGSAEKDPGSADSEAEGLPYPALAPVVFFYLSQDSRPRSWCLRTVCNPWFERISMLVILLNCVTLGMFRPCEDIACDSQRCRILQAFDDFIFAFFAVEMVVKMVALGIFGKKCYLGDTWNRLDFFIVIAGMLEYSLDLQNVSFSAVRTVRVLRPLRAINRVPSMRILVTLLLDTLPMLGNVLLLCFFVFFIFGIVGVQLWAGLLRNRCFLPENFSLPLSVDLERYYQTENEDESPFICSQPRENGMRSCRSVPTLRGDGGGGPPCGLDYEAYNSSSNTTCVNWNQYYTNCSAGEHNPFKGAINFDNIGYAWIAIFQVITLEGWVDIMYFVMDAHSFYNFIYFILLIIVGSFFMINLCLVVIATQFSETKQRESQLMREQRVRFLSNASTLASFSEPGSCYEELLKYLVYILRKAARRLAQVSRAAGVRVGLLSSPAPLGGQETQPSSSCSRSHRRLSVHHLVHHHHHHHHHYHLGNGTLRAPRASPEIQDRDANGSRRLMLPPPSTPALSGAPPGGAESVHSFYHADCHLEPVRCQAPPPRSPSEASGRTVGSGKVYPTVHTSPPPETLKEKALVEVAASSGPPTLTSLNIPPGPYSSMHKLLETQSTGACQSSCKISSPCLKADSGACGPDSCPYCARAGAGEVELADREMPDSDSEAVYEFTQDAQHSDLRDPHSRRQRSLGPDAEPSSVLAFWRLICDTFRKIVDSKYFGRGIMIAILVNTLSMGIEYHEQPEELTNALEISNIVFTSLFALEMLLKLLVYGPFGYIKNPYNIFDGVIVVISVWEIVGQQGGGLSVLRTFRLMRVLKLVRFLPALQRQLVVLMKTMDNVATFCMLLMLFIFIFSILGMHLFGCKFASERDGDTLPDRKNFDSLLWAIVTVFQILTQEDWNKVLYNGMASTSSWAALYFIALMTFGNYVLFNLLVAILVEGFQAEEISKREDASGQLSCIQLPVDSQGGDANKSESEPDFFSPSLDGDGDRKKCLALVSLGEHPELRKSLLPPLIIHTAATPMSLPKSTSTGLGEALGPASRRTSSSGSAEPGAAHEMKSPPSARSSPHSPWSAASSWTSRRSSRNSLGRAPSLKRRSPSGERRSLLSGEGQESQDEEESSEEERASPAGSDHRHRGSLEREAKSSFDLPDTLQVPGLHRTASGRGSASEHQDCNGKSASGRLARALRPDDPPLDGDDADDEGNLSKGERVRAWIRARLPACCLERDSWSAYIFPPQSRFRLLCHRIITHKMFDHVVLVIIFLNCITIAMERPKIDPHSAERIFLTLSNYIFTAVFLAEMTVKVVALGWCFGEQAYLRSSWNVLDGLLVLISVIDILVSMVSDSGTKILGMLRVLRLLRTLRPLRVISRAQGLKLVVETLMSSLKPIGNIVVICCAFFIIFGILGVQLFKGKFFVCQGEDTRNITNKSDCAEASYRWVRHKYNFDNLGQALMSLFVLASKDGWVDIMYDGLDAVGVDQQPIMNHNPWMLLYFISFLLIVAFFVLNMFVGVVVENFHKCRQHQEEEEARRREEKRLRRLEKKRRSKEKQMADLMLDDVIASGSSASAASEAQCKPYYSDYSRFRLLVHHLCTSHYLDLFITGVIGLNVVTMAMEHYQQPQILDEALKICNYIFTVIFVLESVFKLVAFGFRRFFQDRWNQLDLAIVLLSIMGITLEEIEVNASLPINPTIIRIMRVLRIARVLKLLKMAVGMRALLDTVMQALPQVGNLGLLFMLLFFIFAALGVELFGDLECDETHPCEGLGRHATFRNFGMAFLTLFRVSTGDNWNGIMKDTLRDCDQESTCYNTVISPIYFVSFVLTAQFVLVNVVIAVLMKHLEESNKEAKEEAELEAELELEMKTLSPQPHSPLGSPFLWPGVEGPDSPDSPKPGALHPAAHARSASHFSLEHPTMQPHPTELPGPDLLTVRKSGVSRTHSLPNDSYMCRHGSTAEGPLGHRGWGLPKAQSGSVLSVHSQPADTSYILQLPKDAPHLLQPHSAPTWGTIPKLPPPGRSPLAQRPLRRQAAIRTDSLDVQGLGSREDLLAEVSGPSPPLARAYSFWGQSSTQAQQHSRSHSKISKHMTPPAPCPGPEPNWGKGPPETRSSLELDTELSWISGDLLPPGGQEEPPSPRDLKKCYSVEAQSCQRRPTSWLDEQRRHSIAVSCLDSGSQPHLGTDPSNLGGQPLGGPGSRPKKKLSPPSITIDPPESQGPRTPPSPGICLRRRAPSSDSKDPLASGPPDSMAASPSPKKDVLSLSGLSSDPADLDP

SEQ ID NO: 25531 - protein, 2194 aa, Homo sapiens
  REGION 1..2194: note = ENSP00000421518
MDEEEDGAGAEESGQPRSFMRLNDLSGAGGRPGPGSAEKDPGSADSEAEGLPYPALAPVVFFYLSQDSRPRSWCLRTVCNPWFERISMLVILLNCVTLGMFRPCEDIACDSQRCRILQAFDDFIFAFFAVEMVVKMVALGIFGKKCYLGDTWNRLDFFIVIAGMLEYSLDLQNVSFSAVRTVRVLRPLRAINRVPSMRILVTLLLDTLPMLGNVLLLCFFVFFIFGIVGVQLWAGLLRNRCFLPENFSLPLSVDLERYYQTENEDESPFICSQPRENGMRSCRSVPTLRGDGGGGPPCGLDYEAYNSSSNTTCVNWNQYYTNCSAGEHNPFKGAINFDNIGYAWIAIFQVITLEGWVDIMYFVMDAHSFYNFIYFILLIIVGSFFMINLCLVVIATQFSETKQRESQLMREQRVRFLSNASTLASFSEPGSCYEELLKYLVYILRKAARRLAQVSRAAGVRVGLLSSPAPLGGQETQPSSSCSRSHRRLSVHHLVHHHHHHHHHYHLGNGTLRAPRASPEIQDRDANGSRRLMLPPPSTPALSGAPPGGAESVHSFYHADCHLEPVRCQAPPPRSPSEASGRTVGSGKVYPTVHTSPPPETLKEKALVEVAASSGPPTLTSLNIPPGPYSSMHKLLETQSTGACQSSCKISSPCLKADSGACGPDSCPYCARAGAGEVELADREMPDSDSEAVYEFTQDAQHSDLRDPHSRRQRSLGPDAEPSSVLAFWRLICDTFRKIVDSKYFGRGIMIAILVNTLSMGIEYHEQPEELTNALEISNIVFTSLFALEMLLKLLVYGPFGYIKNPYNIFDGVIVVISVWEIVGQQGGGLSVLRTFRLMRVLKLVRFLPALQRQLVVLMKTMDNVATFCMLLMLFIFIFSILGMHLFGCKFASERDGDTLPDRKNFDSLLWAIVTVFQILTQEDWNKVLYNGMASTSSWAALYFIALMTFGNYVLFNLLVAILVEGFQAEEISKREDASGQLSCIQLPVDSQGGDANKSESEPDFFSPSLDGDGDRKKCLALVSLGEHPELRKSLLPPLIIHTAATPMSLPKSTSTGLGEALGPASRRTSSSGSAEPGAAHEMKSPPSARSSPHSPWSAASSWTSRRSSRNSLGRAPSLKRRSPSGERRSLLSGEGQESQDEEESSEEERASPAGSDHRHRGSLEREAKSSFDLPDTLQVPGLHRTASGRGSASEHQDCNGKSASGRLARALRPDDPPLDGDDADDEGNLSKGERVRAWIRARLPACCLERDSWSAYIFPPQSRFRLLCHRIITHKMFDHVVLVIIFLNCITIAMERPKIDPHSAERIFLTLSNYIFTAVFLAEMTVKVVALGWCFGEQAYLRSSWNVLDGLLVLISVIDILVSMVSDSGTKILGMLRVLRLLRTLRPLRVISRAQGLKLVVETLMSSLKPIGNIVVICCAFFIIFGILGVQLFKGKFFVCQGEDTRNITNKSDCAEASYRWVRHKYNFDNLGQALMSLFVLASKDGWVDIMYDGLDAVGVDQQPIMNHNPWMLLYFISFLLIVAFFVLNMFVGVVVENFHKCRQHQEEEEARRREEKRLRRLEKKRRSKEKQMAEAQCKPYYSDYSRFRLLVHHLCTSHYLDLFITGVIGLNVVTMAMEHYQQPQILDEALKICNYIFTVIFVLESVFKLVAFGFRRFFQDRWNQLDLAIVLLSIMGITLEEIEVNASLPINPTIIRIMRVLRIARVLKLLKMAVGMRALLDTVMQALPQVGNLGLLFMLLFFIFAALGVELFGDLECDETHPCEGLGRHATFRNFGMAFLTLFRVSTGDNWNGIMKDTLRDCDQESTCYNTVISPIYFVSFVLTAQFVLVNVVIAVLMKHLEESNKEAKEEAELEAELELEMKTLSPQPHSPLGSPFLWPGVEGPDSPDSPKPGALHPAAHARSASHFSLEHPTMQPHPTELPGPDLLTVRKSGVSRTHSLPNDSYMCRHGSTAEGPLGHRGWGLPKAQSGSVLSVHSQPADTSYILQLPKDAPHLLQPHSAPTWGTIPKLPPPGRSPLAQRPLRRQAAIRTDSLDVQGLGSREDLLAEEEPPSPRDLKKCYSVEAQSCQRRPTSWLDEQRRHSIAVSCLDSGSQPHLGTDPSNLGGQPLGGPGSRPKKKLSPPSITIDPPESQGPRTPPSPGICLRRRAPSSDSKDPLASGPPDSMAASPSPKKDVLSLSGLSSDPADLDP

SEQ ID NO: 25532 - protein, 1746 aa, Homo sapiens
  REGION 1..1746: note = ENSP00000424664
MDEEEDGAGAEESGQPRSFMRLNDLSGAGGRPGPGSAEKDPGSADSEAEGLPYPALAPVVFFYLSQDSRPRSWCLRTVCNPWFERISMLVILLNCVTLGMFRPCEDIACDSQRCRILQAFDDFIFAFFAVEMVVKMVALGIFGKKCYLGDTWNRLDFFIVIAGMLEYSLDLQNVSFSAVRTVRVLRPLRAINRVPSMRILVTLLLDTLPMLGNVLLLCFFVFFIFGIVGVQLWAGLLRNRCFLPENFSLPLSVDLERYYQTENEDESPFICSQPRENGMRSCRSVPTLRGDGGGGPPCGLDYEAYNSSSNTTCVNWNQYYTNCSAGEHNPFKGAINFDNIGYAWIAIFQVITLEGWVDIMYFVMDAHSFYNFIYFILLIIVGSFFMINLCLVVIATQFSETKQRESQLMREQRVRFLSNASTLASFSEPGSCYEELLKYLVYILRKAARRLAQVSRAAGVRVGLLSSPAPLGGQETQPSSSCSRSHRRLSVHHLVHHHHHHHHHYHLGNGTLRAPRASPEIQDRDANGSRRLMLPPPSTPALSGAPPGGAESVHSFYHADCHLEPVRCQAPPPRSPSEASGRTVGSGKVYPTVHTSPPPETLKEKALVEVAASSGPPTLTSLNIPPGPYSSMHKLLETQSTGACQSSCKISSPCLKADSGACGPDSCPYCARAGAGEVELADREMPDSDSEAVYEFTQDAQHSDLRDPHSRRQRSLGPDAEPSSVLAFWRLICDTFRKIVDSKYFGRGIMIAILVNTLSMGIEYHEQPEELTNALEISNIVFTSLFALEMLLKLLVYGPFGYIKNPYNIFDGVIVVISVWEIVGQQGGGLSVLRTFRLMRVLKLVRFLPALQRQLVVLMKTMDNVATFCMLLMLFIFIFSILGMHLFGCKFASERDGDTLPDRKNFDSLLWAIVTVFQILTQEDWNKVLYNGMASTSSWAALYFIALMTFGNYVLFNLLVAILVEGFQAEGDANKSESEPDFFSPSLDGDGDRKKCLALVSLGEHPELRKSLLPPLIIHTAATPMSLPKSTSTGLGEALGPASRRTSSSGSAEPGAAHEMKSPPSARSSPHSPWSAASSWTSRRSSRNSLGRAPSLKRRSPSGERRSLLSGEGQESQDEEESSEEERASPAGSDHRHRGSLEREAKSSFDLPDTLQVPGLHRTASGRGSASEHQDCNGKSASGRLARALRPDDPPLDGDDADDEGNLSKGERVRAWIRARLPACCLERDSWSAYIFPPQSRFRLLCHRIITHKMFDHVVLVIIFLNCITIAMERPKIDPHSAERIFLTLSNYIFTAVFLAEMTVKVVALGWCFGEQAYLRSSWNVLDGLLVLISVIDILVSMVSDSGTKILGMLRVLRLLRTLRPLRVISRAQGLKLVVETLMSSLKPIGNIVVICCAFFIIFGILGVQLFKGKFFVCQGEDTRNITNKSDCAEASYRWVRHKYNFDNLGQALMSLFVLASKDGWVDIMYDGLDAVGVDQQPIMNHNPWMLLYFISFLLIVAFFVLNMFVGVVVENFHKCRQHQEEEEARRREEKRLRRLEKKRRNLMLDDVIASGSSASAASEAQCKPYYSDYSRFRLLVHHLCTSHYLDLFITGVIGLNVVTMAMEHYQQPQILDEALKICNYIFTVIFVLESVFKLVAFGFRRFFQDRWNQLDLAIVLLSIMGITLEEIEVNASLPINPTIIRIMRVLRIARVLKLLKMAVGMRALLDTLWAWSSLETWSVTRHTPVRAWAVMPPFGTLAWPS

SEQ ID NO: 25533 - protein, 2205 aa, Homo sapiens
  REGION 1..2205: note = ENSP00000422268
MDEEEDGAGAEESGQPRSFMRLNDLSGAGGRPGPGSAEKDPGSADSEAEGLPYPALAPVVFFYLSQDSRPRSWCLRTVCNPWFERISMLVILLNCVTLGMFRPCEDIACDSQRCRILQAFDDFIFAFFAVEMVVKMVALGIFGKKCYLGDTWNRLDFFIVIAGMLEYSLDLQNVSFSAVRTVRVLRPLRAINRVPSMRILVTLLLDTLPMLGNVLLLCFFVFFIFGIVGVQLWAGLLRNRCFLPENFSLPLSVDLERYYQTENEDESPFICSQPRENGMRSCRSVPTLRGDGGGGPPCGLDYEAYNSSSNTTCVNWNQYYTNCSAGEHNPFKGAINFDNIGYAWIAIFQVITLEGWVDIMYFVMDAHSFYNFIYFILLIIVGSFFMINLCLVVIATQFSETKQRESQLMREQRVRFLSNASTLASFSEPGSCYEELLKYLVYILRKAARRLAQVSRAAGVRVGLLSSPAPLGGQETQPSSSCSRSHRRLSVHHLVHHHHHHHHHYHLGNGTLRAPRASPEIQDRDANGSRRLMLPPPSTPALSGAPPGGAESVHSFYHADCHLEPVRCQAPPPRSPSEASGRTVGSGKVYPTVHTSPPPETLKEKALVEVAASSGPPTLTSLNIPPGPYSSMHKLLETQSTGACQSSCKISSPCLKADSGACGPDSCPYCARAGAGEVELADREMPDSDSEAVYEFTQDAQHSDLRDPHSRRQRSLGPDAEPSSVLAFWRLICDTFRKIVDSKYFGRGIMIAILVNTLSMGIEYHEQPEELTNALEISNIVFTSLFALEMLLKLLVYGPFGYIKNPYNIFDGVIVVISVWEIVGQQGGGLSVLRTFRLMRVLKLVRFLPALQRQLVVLMKTMDNVATFCMLLMLFIFIFSILGMHLFGCKFASERDGDTLPDRKNFDSLLWAIVTVFQILTQEDWNKVLYNGMASTSSWAALYFIALMTFGNYVLFNLLVAILVEGFQAEEISKREDASGQLSCIQLPVDSQGGDANKSESEPDFFSPSLDGDGDRKKCLALVSLGEHPELRKSLLPPLIIHTAATPMSLPKSTSTGLGEALGPASRRTSSSGSAEPGAAHEMKSPPSARSSPHSPWSAASSWTSRRSSRNSLGRAPSLKRRSPSGERRSLLSGEGQESQDEEESSEEERASPAGSDHRHRGSLEREAKSSFDLPDTLQVPGLHRTASGRGSASEHQDCNGKSASGRLARALRPDDPPLDGDDADDEGNLSKGERVRAWIRARLPACCLERDSWSAYIFPPQSRFRLLCHRIITHKMFDHVVLVIIFLNCITIAMERPKIDPHSAERIFLTLSNYIFTAVFLAEMTVKVVALGWCFGEQAYLRSSWNVLDGLLVLISVIDILVSMVSDSGTKILGMLRVLRLLRTLRPLRVISRAQGLKLVVETLMSSLKPIGNIVVICCAFFIIFGILGVQLFKGKFFVCQGEDTRNITNKSDCAEASYRWVRHKYNFDNLGQALMSLFVLASKDGWVDIMYDGLDAVGVDQQPIMNHNPWMLLYFISFLLIVAFFVLNMFVGVVVENFHKCRQHQEEEEARRREEKRLRRLEKKRRNLMLDDVIASGSSASAASEAQCKPYYSDYSRFRLLVHHLCTSHYLDLFITGVIGLNVVTMAMEHYQQPQILDEALKICNYIFTVIFVLESVFKLVAFGFRRFFQDRWNQLDLAIVLLSIMGITLEEIEVNASLPINPTIIRIMRVLRIARVLKLLKMAVGMRALLDTVMQALPQVGNLGLLFMLLFFIFAALGVELFGDLECDETHPCEGLGRHATFRNFGMAFLTLFRVSTGDNWNGIMKDTLRDCDQESTCYNTVISPIYFVSFVLTAQFVLVNVVIAVLMKHLEESNKEAKEEAELEAELELEMKTLSPQPHSPLGSPFLWPGVEGPDSPDSPKPGALHPAAHARSASHFSLEHPTMQPHPTELPGPDLLTVRKSGVSRTHSLPNDSYMCRHGSTAEGPLGHRGWGLPKAQSGSVLSVHSQPADTSYILQLPKDAPHLLQPHSAPTWGTIPKLPPPGRSPLAQRPLRRQAAIRTDSLDVQGLGSREDLLAEEEPPSPRDLKKCYSVEAQSCQRRPTSWLDEQRRHSIAVSCLDSGSQPHLGTDPSNLGGQPLGGPGSRPKKKLSPPSITIDPPESQGPRTPPSPGICLRRRAPSSDSKDPLASGPPDSMAASPSPKKDVLSLSGLSSDPADLDP

SEQ ID NO: 25534 - protein, 1735 aa, Homo sapiens
  REGION 1..1735: note = ENSP00000426558
MDEEEDGAGAEESGQPRSFMRLNDLSGAGGRPGPGSAEKDPGSADSEAEGLPYPALAPVVFFYLSQDSRPRSWCLRTVCNPWFERISMLVILLNCVTLGMFRPCEDIACDSQRCRILQAFDDFIFAFFAVEMVVKMVALGIFGKKCYLGDTWNRLDFFIVIAGMLEYSLDLQNVSFSAVRTVRVLRPLRAINRVPSMRILVTLLLDTLPMLGNVLLLCFFVFFIFGIVGVQLWAGLLRNRCFLPENFSLPLSVDLERYYQTENEDESPFICSQPRENGMRSCRSVPTLRGDGGGGPPCGLDYEAYNSSSNTTCVNWNQYYTNCSAGEHNPFKGAINFDNIGYAWIAIFQVITLEGWVDIMYFVMDAHSFYNFIYFILLIIVGSFFMINLCLVVIATQFSETKQRESQLMREQRVRFLSNASTLASFSEPGSCYEELLKYLVYILRKAARRLAQVSRAAGVRVGLLSSPAPLGGQETQPSSSCSRSHRRLSVHHLVHHHHHHHHHYHLGNGTLRAPRASPEIQDRDANGSRRLMLPPPSTPALSGAPPGGAESVHSFYHADCHLEPVRCQAPPPRSPSEASGRTVGSGKVYPTVHTSPPPETLKEKALVEVAASSGPPTLTSLNIPPGPYSSMHKLLETQSTGACQSSCKISSPCLKADSGACGPDSCPYCARAGAGEVELADREMPDSDSEAVYEFTQDAQHSDLRDPHSRRQRSLGPDAEPSSVLAFWRLICDTFRKIVDSKYFGRGIMIAILVNTLSMGIEYHEQPEELTNALEISNIVFTSLFALEMLLKLLVYGPFGYIKNPYNIFDGVIVVISVWEIVGQQGGGLSVLRTFRLMRVLKLVRFLPALQRQLVVLMKTMDNVATFCMLLMLFIFIFSILGMHLFGCKFASERDGDTLPDRKNFDSLLWAIVTVFQILTQEDWNKVLYNGMASTSSWAALYFIALMTFGNYVLFNLLVAILVEGFQAEGDANKSESEPDFFSPSLDGDGDRKKCLALVSLGEHPELRKSLLPPLIIHTAATPMSLPKSTSTGLGEALGPASRRTSSSGSAEPGAAHEMKSPPSARSSPHSPWSAASSWTSRRSSRNSLGRAPSLKRRSPSGERRSLLSGEGQESQDEEESSEEERASPAGSDHRHRGSLEREAKSSFDLPDTLQVPGLHRTASGRGSASEHQDCNGKSASGRLARALRPDDPPLDGDDADDEGNLSKGERVRAWIRARLPACCLERDSWSAYIFPPQSRFRLLCHRIITHKMFDHVVLVIIFLNCITIAMERPKIDPHSAERIFLTLSNYIFTAVFLAEMTVKVVALGWCFGEQAYLRSSWNVLDGLLVLISVIDILVSMVSDSGTKILGMLRVLRLLRTLRPLRVISRAQGLKLVVETLMSSLKPIGNIVVICCAFFIIFGILGVQLFKGKFFVCQGEDTRNITNKSDCAEASYRWVRHKYNFDNLGQALMSLFVLASKDGWVDIMYDGLDAVGVDQQPIMNHNPWMLLYFISFLLIVAFFVLNMFVGVVVENFHKCRQHQEEEEARRREEKRLRRLEKKRRKAQCKPYYSDYSRFRLLVHHLCTSHYLDLFITGVIGLNVVTMAMEHYQQPQILDEALKICNYIFTVIFVLESVFKLVAFGFRRFFQDRWNQLDLAIVLLSIMGITLEEIEVNASLPINPTIIRIMRVLRIARVLKLLKMAVGMRALLDTVMQALPQLWAWSSLETWSVTRHTPVRAWAVMPPFGTLAWPS

SEQ ID NO: 25535 - protein, 2314 aa, Homo sapiens
  REGION 1..2314: note = ENSP00000423155
MDEEEDGAGAEESGQPRSFMRLNDLSGAGGRPGPGSAEKDPGSADSEAEGLPYPALAPVVFFYLSQDSRPRSWCLRTVCNPWFERISMLVILLNCVTLGMFRPCEDIACDSQRCRILQAFDDFIFAFFAVEMVVKMVALGIFGKKCYLGDTWNRLDFFIVIAGMLEYSLDLQNVSFSAVRTVRVLRPLRAINRVPSMRILVTLLLDTLPMLGNVLLLCFFVFFIFGIVGVQLWAGLLRNRCFLPENFSLPLSVDLERYYQTENEDESPFICSQPRENGMRSCRSVPTLRGDGGGGPPCGLDYEAYNSSSNTTCVNWNQYYTNCSAGEHNPFKGAINFDNIGYAWIAIFQVITLEGWVDIMYFVMDAHSFYNFIYFILLIIVGSFFMINLCLVVIATQFSETKQRESQLMREQRVRFLSNASTLASFSEPGSCYEELLKYLVYILRKAARRLAQVSRAAGVRVGLLSSPAPLGGQETQPSSSCSRSHRRLSVHHLVHHHHHHHHHYHLGNGTLRAPRASPEIQDRDANGSRRLMLPPPSTPALSGAPPGGAESVHSFYHADCHLEPVRCQAPPPRSPSEASGRTVGSGKVYPTVHTSPPPETLKEKALVEVAASSGPPTLTSLNIPPGPYSSMHKLLETQSTGACQSSCKISSPCLKADSGACGPDSCPYCARAGAGEVELADREMPDSDSEAVYEFTQDAQHSDLRDPHSRRQRSLGPDAEPSSVLAFWRLICDTFRKIVDSKYFGRGIMIAILVNTLSMGIEYHEQPEELTNALEISNIVFTSLFALEMLLKLLVYGPFGYIKNPYNIFDGVIVVISVWEIVGQQGGGLSVLRTFRLMRVLKLVRFLPALQRQLVVLMKTMDNVATFCMLLMLFIFIFSILGMHLFGCKFASERDGDTLPDRKNFDSLLWAIVTVFQILTQEDWNKVLYNGMASTSSWAALYFIALMTFGNYVLFNLLVAILVEGFQAEEISKREDASGQLSCIQLPVDSQGGDANKSESEPDFFSPSLDGDGDRKKCLALVSLGEHPELRKSLLPPLIIHTAATPMSLPKSTSTGLGEALGPASRRTSSSGSAEPGAAHEMKSPPSARSSPHSPWSAASSWTSRRSSRNSLGRAPSLKRRSPSGERRSLLSGEGQESQDEEESSEEERASPAGSDHRHRGSLEREAKSSFDLPDTLQVPGLHRTASGRGSASEHQDCNGKSASGRLARALRPDDPPLDGDDADDEGNLSKGERVRAWIRARLPACCLERDSWSAYIFPPQSRFRLLCHRIITHKMFDHVVLVIIFLNCITIAMERPKIDPHSAERIFLTLSNYIFTAVFLAEMTVKVVALGWCFGEQAYLRSSWNVLDGLLVLISVIDILVSMVSDSGTKILGMLRVLRLLRTLRPLRVISRAQGLKLVVETLMSSLKPIGNIVVICCAFFIIFGILGVQLFKGKFFVCQGEDTRNITNKSDCAEASYRWVRHKYNFDNLGQALMSLFVLASKDGWVDIMYDGLDAVGVDQQPIMNHNPWMLLYFISFLLIVAFFVLNMFVGVVVENFHKCRQHQEEEEARRREEKRLRRLEKKRRKAQCKPYYSDYSRFRLLVHHLCTSHYLDLFITGVIGLNVVTMAMEHYQQPQILDEALKICNYIFTVIFVLESVFKLVAFGFRRFFQDRWNQLDLAIVLLSIMGITLEEIEVNASLPINPTIIRIMRVLRIARVLKLLKMAVGMRALLDTVMQALPQVGNLGLLFMLLFFIFAALGVELFGDLECDETHPCEGLGRHATFRNFGMAFLTLFRVSTGDNWNGIMKDTLRDCDQESTCYNTVISPIYFVSFVLTAQFVLVNVVIAVLMKHLEESNKEAKEEAELEAELELEMKTLSPQPHSPLGSPFLWPGVEGPDSPDSPKPGALHPAAHARSASHFSLEHPTDRQLFDTISLLIQGSLEWELKLMDELAGPGGQPSAFPSAPSLGGSDPQMQPHPTELPGPDLLTVRKSGVSRTHSLPNDSYMCRHGSTAEGPLGHRGWGLPKAQSGSVLSVHSQPADTSYILQLPKDAPHLLQPHSAPTWGTIPKLPPPGRSPLAQRPLRRQAAIRTDSLDVQGLGSREDLLAEVSGPSPPLARAYSFWGQSSTQAQQHSRSHSKISKHMTPPAPCPGPEPNWGKGPPETRSSLELDTELSWISGDLLPPGGQEEPPSPRDLKKCYSVEAQSCQRRPTSWLDEQRRHSIAVSCLDSGSQPHLGTDPSNLGGQPLGGPGSRPKKKLSPPSITIDPPESQGPRTPPSPGICLRRRAPSSDSKDPLASGPPDSMAASPSPKKDVLSLSGLSSDPADLDP

SEQ ID NO: 25536 - protein, 2266 aa, Homo sapiens
  REGION 1..2266: note = ENSP00000414388
MDEEEDGAGAEESGQPRSFMRLNDLSGAGGRPGPGSAEKDPGSADSEAEGLPYPALAPVVFFYLSQDSRPRSWCLRTVCNPWFERISMLVILLNCVTLGMFRPCEDIACDSQRCRILQAFDDFIFAFFAVEMVVKMVALGIFGKKCYLGDTWNRLDFFIVIAGMLEYSLDLQNVSFSAVRTVRVLRPLRAINRVPSMRILVTLLLDTLPMLGNVLLLCFFVFFIFGIVGVQLWAGLLRNRCFLPENFSLPLSVDLERYYQTENEDESPFICSQPRENGMRSCRSVPTLRGDGGGGPPCGLDYEAYNSSSNTTCVNWNQYYTNCSAGEHNPFKGAINFDNIGYAWIAIFQVITLEGWVDIMYFVMDAHSFYNFIYFILLIIVGSFFMINLCLVVIATQFSETKQRESQLMREQRVRFLSNASTLASFSEPGSCYEELLKYLVYILRKAARRLAQVSRAAGVRVGLLSSPAPLGGQETQPSSSCSRSHRRLSVHHLVHHHHHHHHHYHLGNGTLRAPRASPEIQDRDANGSRRLMLPPPSTPALSGAPPGGAESVHSFYHADCHLEPVRCQAPPPRSPSEASGRTVGSGKVYPTVHTSPPPETLKEKALVEVAASSGPPTLTSLNIPPGPYSSMHKLLETQSTGACQSSCKISSPCLKADSGACGPDSCPYCARAGAGEVELADREMPDSDSEAVYEFTQDAQHSDLRDPHSRRQRSLGPDAEPSSVLAFWRLICDTFRKIVDSKYFGRGIMIAILVNTLSMGIEYHEQPEELTNALEISNIVFTSLFALEMLLKLLVYGPFGYIKNPYNIFDGVIVVISVWEIVGQQGGGLSVLRTFRLMRVLKLVRFLPALQRQLVVLMKTMDNVATFCMLLMLFIFIFSILGMHLFGCKFASERDGDTLPDRKNFDSLLWAIVTVFQILTQEDWNKVLYNGMASTSSWAALYFIALMTFGNYVLFNLLVAILVEGFQAEEISKREDASGQLSCIQLPVDSQGGDANKSESEPDFFSPSLDGDGDRKKCLALVSLGEHPELRKSLLPPLIIHTAATPMSLPKSTSTGLGEALGPASRRTSSSGSAEPGAAHEMKSPPSARSSPHSPWSAASSWTSRRSSRNSLGRAPSLKRRSPSGERRSLLSGEGQESQDEEESSEEERASPAGSDHRHRGSLEREAKSSFDLPDTLQVPGLHRTASGRGSASEHQDCNGKSASGRLARALRPDDPPLDGDDADDEGNLSKGERVRAWIRARLPACCLERDSWSAYIFPPQSRFRLLCHRIITHKMFDHVVLVIIFLNCITIAMERPKIDPHSAERIFLTLSNYIFTAVFLAEMTVKVVALGWCFGEQAYLRSSWNVLDGLLVLISVIDILVSMVSDSGTKILGMLRVLRLLRTLRPLRVISRAQGLKLVVETLMSSLKPIGNIVVICCAFFIIFGILGVQLFKGKFFVCQGEDTRNITNKSDCAEASYRWVRHKYNFDNLGQALMSLFVLASKDGWVDIMYDGLDAVGVDQQPIMNHNPWMLLYFISFLLIVAFFVLNMFVGVVVENFHKCRQHQEEEEARRREEKRLRRLEKKRRKAQCKPYYSDYSRFRLLVHHLCTSHYLDLFITGVIGLNVVTMAMEHYQQPQILDEALKICNYIFTVIFVLESVFKLVAFGFRRFFQDRWNQLDLAIVLLSIMGITLEEIEVNASLPINPTIIRIMRVLRIARVLKLLKMAVGMRALLDTVMQALPQVGNLGLLFMLLFFIFAALGVELFGDLECDETHPCEGLGRHATFRNFGMAFLTLFRVSTGDNWNGIMKDTLRDCDQESTCYNTVISPIYFVSFVLTAQFVLVNVVIAVLMKHLEESNKEAKEEAELEAELELEMKTLSPQPHSPLGSPFLWPGVEGPDSPDSPKPGALHPAAHARSASHFSLEHPTMQPHPTELPGPDLLTVRKSGVSRTHSLPNDSYMCRHGSTAEGPLGHRGWGLPKAQSGSVLSVHSQPADTSYILQLPKDAPHLLQPHSAPTWGTIPKLPPPGRSPLAQRPLRRQAAIRTDSLDVQGLGSREDLLAEVSGPSPPLARAYSFWGQSSTQAQQHSRSHSKISKHMTPPAPCPGPEPNWGKGPPETRSSLELDTELSWISGDLLPPGGQEEPPSPRDLKKCYSVEAQSCQRRPTSWLDEQRRHSIAVSCLDSGSQPHLGTDPSNLGGQPLGGPGSRPKKKLSPPSITIDPPESQGPRTPPSPGICLRRRAPSSDSKDPLASGPPDSMAASPSPKKDVLSLSGLSSDPADLDP

SEQ ID NO: 25537 - protein, 2377 aa, Homo sapiens
  REGION 1..2377: note = ENSP00000352011
MDEEEDGAGAEESGQPRSFMRLNDLSGAGGRPGPGSAEKDPGSADSEAEGLPYPALAPVVFFYLSQDSRPRSWCLRTVCNPWFERISMLVILLNCVTLGMFRPCEDIACDSQRCRILQAFDDFIFAFFAVEMVVKMVALGIFGKKCYLGDTWNRLDFFIVIAGMLEYSLDLQNVSFSAVRTVRVLRPLRAINRVPSMRILVTLLLDTLPMLGNVLLLCFFVFFIFGIVGVQLWAGLLRNRCFLPENFSLPLSVDLERYYQTENEDESPFICSQPRENGMRSCRSVPTLRGDGGGGPPCGLDYEAYNSSSNTTCVNWNQYYTNCSAGEHNPFKGAINFDNIGYAWIAIFQVITLEGWVDIMYFVMDAHSFYNFIYFILLIIVGSFFMINLCLVVIATQFSETKQRESQLMREQRVRFLSNASTLASFSEPGSCYEELLKYLVYILRKAARRLAQVSRAAGVRVGLLSSPAPLGGQETQPSSSCSRSHRRLSVHHLVHHHHHHHHHYHLGNGTLRAPRASPEIQDRDANGSRRLMLPPPSTPALSGAPPGGAESVHSFYHADCHLEPVRCQAPPPRSPSEASGRTVGSGKVYPTVHTSPPPETLKEKALVEVAASSGPPTLTSLNIPPGPYSSMHKLLETQSTGACQSSCKISSPCLKADSGACGPDSCPYCARAGAGEVELADREMPDSDSEAVYEFTQDAQHSDLRDPHSRRQRSLGPDAEPSSVLAFWRLICDTFRKIVDSKYFGRGIMIAILVNTLSMGIEYHEQPEELTNALEISNIVFTSLFALEMLLKLLVYGPFGYIKNPYNIFDGVIVVISVWEIVGQQGGGLSVLRTFRLMRVLKLVRFLPALQRQLVVLMKTMDNVATFCMLLMLFIFIFSILGMHLFGCKFASERDGDTLPDRKNFDSLLWAIVTVFQILTQEDWNKVLYNGMASTSSWAALYFIALMTFGNYVLFNLLVAILVEGFQAEEISKREDASGQLSCIQLPVDSQGGDANKSESEPDFFSPSLDGDGDRKKCLALVSLGEHPELRKSLLPPLIIHTAATPMSLPKSTSTGLGEALGPASRRTSSSGSAEPGAAHEMKSPPSARSSPHSPWSAASSWTSRRSSRNSLGRAPSLKRRSPSGERRSLLSGEGQESQDEEESSEEERASPAGSDHRHRGSLEREAKSSFDLPDTLQVPGLHRTASGRGSASEHQDCNGKSASGRLARALRPDDPPLDGDDADDEGNLSKGERVRAWIRARLPACCLERDSWSAYIFPPQSRFRLLCHRIITHKMFDHVVLVIIFLNCITIAMERPKIDPHSAERIFLTLSNYIFTAVFLAEMTVKVVALGWCFGEQAYLRSSWNVLDGLLVLISVIDILVSMVSDSGTKILGMLRVLRLLRTLRPLRVISRAQGLKLVVETLMSSLKPIGNIVVICCAFFIIFGILGVQLFKGKFFVCQGEDTRNITNKSDCAEASYRWVRHKYNFDNLGQALMSLFVLASKDGWVDIMYDGLDAVGVDQQPIMNHNPWMLLYFISFLLIVAFFVLNMFVGVVVENFHKCRQHQEEEEARRREEKRLRRLEKKRRNLMLDDVIASGSSASAASEAQCKPYYSDYSRFRLLVHHLCTSHYLDLFITGVIGLNVVTMAMEHYQQPQILDEALKICNYIFTVIFVLESVFKLVAFGFRRFFQDRWNQLDLAIVLLSIMGITLEEIEVNASLPINPTIIRIMRVLRIARVLKLLKMAVGMRALLDTVMQALPQVGNLGLLFMLLFFIFAALGVELFGDLECDETHPCEGLGRHATFRNFGMAFLTLFRVSTGDNWNGIMKDTLRDCDQESTCYNTVISPIYFVSFVLTAQFVLVNVVIAVLMKHLEESNKEAKEEAELEAELELEMKTLSPQPHSPLGSPFLWPGVEGPDSPDSPKPGALHPAAHARSASHFSLEHPTDRQLFDTISLLIQGSLEWELKLMDELAGPGGQPSAFPSAPSLGGSDPQIPLAEMEALSLTSEIVSEPSCSLALTDDSLPDDMHTLLLSALESNMQPHPTELPGPDLLTVRKSGVSRTHSLPNDSYMCRHGSTAEGPLGHRGWGLPKAQSGSVLSVHSQPADTSYILQLPKDAPHLLQPHSAPTWGTIPKLPPPGRSPLAQRPLRRQAAIRTDSLDVQGLGSREDLLAEVSGPSPPLARAYSFWGQSSTQAQQHSRSHSKISKHMTPPAPCPGPEPNWGKGPPETRSSLELDTELSWISGDLLPPGGQEEPPSPRDLKKCYSVEAQSCQRRPTSWLDEQRRHSIAVSCLDSGSQPHLGTDPSNLGGQPLGGPGSRPKKKLSPPSITIDPPESQGPRTPPSPGICLRRRAPSSDSKDPLASGPPDSMAASPSPKKDVLSLSGLSSDPADLDP

SEQ ID NO: 25538 - protein, 2171 aa, Homo sapiens
  REGION 1..2171: note = ENSP00000350979
MDEEEDGAGAEESGQPRSFMRLNDLSGAGGRPGPGSAEKDPGSADSEAEGLPYPALAPVVFFYLSQDSRPRSWCLRTVCNPWFERISMLVILLNCVTLGMFRPCEDIACDSQRCRILQAFDDFIFAFFAVEMVVKMVALGIFGKKCYLGDTWNRLDFFIVIAGMLEYSLDLQNVSFSAVRTVRVLRPLRAINRVPSMRILVTLLLDTLPMLGNVLLLCFFVFFIFGIVGVQLWAGLLRNRCFLPENFSLPLSVDLERYYQTENEDESPFICSQPRENGMRSCRSVPTLRGDGGGGPPCGLDYEAYNSSSNTTCVNWNQYYTNCSAGEHNPFKGAINFDNIGYAWIAIFQVITLEGWVDIMYFVMDAHSFYNFIYFILLIIVGSFFMINLCLVVIATQFSETKQRESQLMREQRVRFLSNASTLASFSEPGSCYEELLKYLVYILRKAARRLAQVSRAAGVRVGLLSSPAPLGGQETQPSSSCSRSHRRLSVHHLVHHHHHHHHHYHLGNGTLRAPRASPEIQDRDANGSRRLMLPPPSTPALSGAPPGGAESVHSFYHADCHLEPVRCQAPPPRSPSEASGRTVGSGKVYPTVHTSPPPETLKEKALVEVAASSGPPTLTSLNIPPGPYSSMHKLLETQSTGACQSSCKISSPCLKADSGACGPDSCPYCARAGAGEVELADREMPDSDSEAVYEFTQDAQHSDLRDPHSRRQRSLGPDAEPSSVLAFWRLICDTFRKIVDSKYFGRGIMIAILVNTLSMGIEYHEQPEELTNALEISNIVFTSLFALEMLLKLLVYGPFGYIKNPYNIFDGVIVVISVWEIVGQQGGGLSVLRTFRLMRVLKLVRFLPALQRQLVVLMKTMDNVATFCMLLMLFIFIFSILGMHLFGCKFASERDGDTLPDRKNFDSLLWAIVTVFQILTQEDWNKVLYNGMASTSSWAALYFIALMTFGNYVLFNLLVAILVEGFQAEGDANKSESEPDFFSPSLDGDGDRKKCLALVSLGEHPELRKSLLPPLIIHTAATPMSLPKSTSTGLGEALGPASRRTSSSGSAEPGAAHEMKSPPSARSSPHSPWSAASSWTSRRSSRNSLGRAPSLKRRSPSGERRSLLSGEGQESQDEEESSEEERASPAGSDHRHRGSLEREAKSSFDLPDTLQVPGLHRTASGRGSASEHQDCNGKSASGRLARALRPDDPPLDGDDADDEGNLSKGERVRAWIRARLPACCLERDSWSAYIFPPQSRFRLLCHRIITHKMFDHVVLVIIFLNCITIAMERPKIDPHSAERIFLTLSNYIFTAVFLAEMTVKVVALGWCFGEQAYLRSSWNVLDGLLVLISVIDILVSMVSDSGTKILGMLRVLRLLRTLRPLRVISRAQGLKLVVETLMSSLKPIGNIVVICCAFFIIFGILGVQLFKGKFFVCQGEDTRNITNKSDCAEASYRWVRHKYNFDNLGQALMSLFVLASKDGWVDIMYDGLDAVGVDQQPIMNHNPWMLLYFISFLLIVAFFVLNMFVGVVVENFHKCRQHQEEEEARRREEKRLRRLEKKRRSKEKQMAEAQCKPYYSDYSRFRLLVHHLCTSHYLDLFITGVIGLNVVTMAMEHYQQPQILDEALKICNYIFTVIFVLESVFKLVAFGFRRFFQDRWNQLDLAIVLLSIMGITLEEIEVNASLPINPTIIRIMRVLRIARVLKLLKMAVGMRALLDTVMQALPQVGNLGLLFMLLFFIFAALGVELFGDLECDETHPCEGLGRHATFRNFGMAFLTLFRVSTGDNWNGIMKDTLRDCDQESTCYNTVISPIYFVSFVLTAQFVLVNVVIAVLMKHLEESNKEAKEEAELEAELELEMKTLSPQPHSPLGSPFLWPGVEGPDSPDSPKPGALHPAAHARSASHFSLEHPTMQPHPTELPGPDLLTVRKSGVSRTHSLPNDSYMCRHGSTAEGPLGHRGWGLPKAQSGSVLSVHSQPADTSYILQLPKDAPHLLQPHSAPTWGTIPKLPPPGRSPLAQRPLRRQAAIRTDSLDVQGLGSREDLLAEEEPPSPRDLKKCYSVEAQSCQRRPTSWLDEQRRHSIAVSCLDSGSQPHLGTDPSNLGGQPLGGPGSRPKKKLSPPSITIDPPESQGPRTPPSPGICLRRRAPSSDSKDPLASGPPDSMAASPSPKKDVLSLSGLSSDPADLDP

SEQ ID NO: 25539 - protein, 277 aa, Homo sapiens
  REGION 1..277: note = ENSP00000459988
AFDDFIFAFFAVEMVVKMVALGIFGKKCYLGDTWNRLDFFIVIAGMLEYSLDLQNVSFSAVRTVRVLRPLRAINRVPSMRILVTLLLDTLPMLGNVLLLCFFVFFIFGIVGVQLWAGLLRNRCFLPENFSLPLSVDLERYYQTENEDESPFICSQPRENGMRSCRSVPTLRGDGGGGPPCGLDYEAYNSSSNTTCVNWNQYYTNCSAGEHNPFKGAINFDNIGYAWIAIFQVITLEGWVDIMYFVMDAHSFYNFIYFILLIIFLALRTSPVERASII

SEQ ID NO: 25540 - protein, 337 aa, Homo sapiens
  REGION 1..337: note = ENSP00000427697
TASGRGSASEHQDCNGKSASGRLARALRPDDPPLDGDDADDEGNLSKGERVRAWIRARLPACCLERDSWSAYIFPPQSRFRLLCHRIITHKMFDHVVLVIIFLNCITIAMERPKIDPHSAERIFLTLSNYIFTAVFLAEMTVKVVALGWCFGEQAYLRSSWNVLDGLLVLISVIDILVSMVSDSGTKILGMLRVLRLLRTLRPLRVISRAQGLKLVVETLMSSLKPIGNIVVICCAFFIIFGILGVQLFKGKFFVCQGEDTRNITNKSDCAEASYRWVRHKYNFDNLGQALMSLFVLASKDGWVDIMYDGLDAVGVDQQVGLRWAGSICGLRSLSMG

SEQ ID NO: 25541 - protein, 2343 aa, Homo sapiens
  REGION 1..2343: note = ENSP00000347078
MDEEEDGAGAEESGQPRSFMRLNDLSGAGGRPGPGSAEKDPGSADSEAEGLPYPALAPVVFFYLSQDSRPRSWCLRTVCNPWFERISMLVILLNCVTLGMFRPCEDIACDSQRCRILQAFDDFIFAFFAVEMVVKMVALGIFGKKCYLGDTWNRLDFFIVIAGMLEYSLDLQNVSFSAVRTVRVLRPLRAINRVPSMRILVTLLLDTLPMLGNVLLLCFFVFFIFGIVGVQLWAGLLRNRCFLPENFSLPLSVDLERYYQTENEDESPFICSQPRENGMRSCRSVPTLRGDGGGGPPCGLDYEAYNSSSNTTCVNWNQYYTNCSAGEHNPFKGAINFDNIGYAWIAIFQVITLEGWVDIMYFVMDAHSFYNFIYFILLIIVGSFFMINLCLVVIATQFSETKQRESQLMREQRVRFLSNASTLASFSEPGSCYEELLKYLVYILRKAARRLAQVSRAAGVRVGLLSSPAPLGGQETQPSSSCSRSHRRLSVHHLVHHHHHHHHHYHLGNGTLRAPRASPEIQDRDANGSRRLMLPPPSTPALSGAPPGGAESVHSFYHADCHLEPVRCQAPPPRSPSEASGRTVGSGKVYPTVHTSPPPETLKEKALVEVAASSGPPTLTSLNIPPGPYSSMHKLLETQSTGACQSSCKISSPCLKADSGACGPDSCPYCARAGAGEVELADREMPDSDSEAVYEFTQDAQHSDLRDPHSRRQRSLGPDAEPSSVLAFWRLICDTFRKIVDSKYFGRGIMIAILVNTLSMGIEYHEQPEELTNALEISNIVFTSLFALEMLLKLLVYGPFGYIKNPYNIFDGVIVVISVWEIVGQQGGGLSVLRTFRLMRVLKLVRFLPALQRQLVVLMKTMDNVATFCMLLMLFIFIFSILGMHLFGCKFASERDGDTLPDRKNFDSLLWAIVTVFQILTQEDWNKVLYNGMASTSSWAALYFIALMTFGNYVLFNLLVAILVEGFQAEGDANKSESEPDFFSPSLDGDGDRKKCLALVSLGEHPELRKSLLPPLIIHTAATPMSLPKSTSTGLGEALGPASRRTSSSGSAEPGAAHEMKSPPSARSSPHSPWSAASSWTSRRSSRNSLGRAPSLKRRSPSGERRSLLSGEGQESQDEEESSEEERASPAGSDHRHRGSLEREAKSSFDLPDTLQVPGLHRTASGRGSASEHQDCNGKSASGRLARALRPDDPPLDGDDADDEGNLSKGERVRAWIRARLPACCLERDSWSAYIFPPQSRFRLLCHRIITHKMFDHVVLVIIFLNCITIAMERPKIDPHSAERIFLTLSNYIFTAVFLAEMTVKVVALGWCFGEQAYLRSSWNVLDGLLVLISVIDILVSMVSDSGTKILGMLRVLRLLRTLRPLRVISRAQGLKLVVETLMSSLKPIGNIVVICCAFFIIFGILGVQLFKGKFFVCQGEDTRNITNKSDCAEASYRWVRHKYNFDNLGQALMSLFVLASKDGWVDIMYDGLDAVGVDQQPIMNHNPWMLLYFISFLLIVAFFVLNMFVGVVVENFHKCRQHQEEEEARRREEKRLRRLEKKRRSKEKQMAEAQCKPYYSDYSRFRLLVHHLCTSHYLDLFITGVIGLNVVTMAMEHYQQPQILDEALKICNYIFTVIFVLESVFKLVAFGFRRFFQDRWNQLDLAIVLLSIMGITLEEIEVNASLPINPTIIRIMRVLRIARVLKLLKMAVGMRALLDTVMQALPQVGNLGLLFMLLFFIFAALGVELFGDLECDETHPCEGLGRHATFRNFGMAFLTLFRVSTGDNWNGIMKDTLRDCDQESTCYNTVISPIYFVSFVLTAQFVLVNVVIAVLMKHLEESNKEAKEEAELEAELELEMKTLSPQPHSPLGSPFLWPGVEGPDSPDSPKPGALHPAAHARSASHFSLEHPTDRQLFDTISLLIQGSLEWELKLMDELAGPGGQPSAFPSAPSLGGSDPQIPLAEMEALSLTSEIVSEPSCSLALTDDSLPDDMHTLLLSALESNMQPHPTELPGPDLLTVRKSGVSRTHSLPNDSYMCRHGSTAEGPLGHRGWGLPKAQSGSVLSVHSQPADTSYILQLPKDAPHLLQPHSAPTWGTIPKLPPPGRSPLAQRPLRRQAAIRTDSLDVQGLGSREDLLAEVSGPSPPLARAYSFWGQSSTQAQQHSRSHSKISKHMTPPAPCPGPEPNWGKGPPETRSSLELDTELSWISGDLLPPGGQEEPPSPRDLKKCYSVEAQSCQRRPTSWLDEQRRHSIAVSCLDSGSQPHLGTDPSNLGGQPLGGPGSRPKKKLSPPSITIDPPESQGPRTPPSPGICLRRRAPSSDSKDPLASGPPDSMAASPSPKKDVLSLSGLSSDPADLDP

SEQ ID NO: 25542 - protein, 1091 aa, Homo sapiens
  REGION 1..1091: note = ENSP00000349320
MAAGCLLALTLTLFQSLLIGPSSEEPFPSAVTIKSWVDKMQEDLVTLAKTASGVNQLVDIYEKYQDLYTVEPNNARQLVEIAARDIEKLLSNRSKALVRLALEAEKVQAAHQWREDFASNEVVYYNAKDDLDPEKNDSEPGSQRIKPVFIEDANFGRQISYQHAAVHIPTDIYEGSTIVLNELNWTSALDEVFKKNREEDPSLLWQVFGSATGLARYYPASPWVDNSRTPNKIDLYDVRRRPWYIQGAASPKDMLILVDVSGSVSGLTLKLIRTSVSEMLETLSDDDFVNVASFNSNAQDVSCFQHLVQANVRNKKVLKDAVNNITAKGITDYKKGFSFAFEQLLNYNVSRANCNKIIMLFTDGGEERAQEIFNKYNKDKKVRVFTFSVGQHNYDRGPIQWMACENKGYYYEIPSIGAIRINTQEYLDVLGRPMVLAGDKAKQVQWTNVYLDALELGLVITGTLPVFNITGQFENKTNLKNQLILGVMGVDVSLEDIKRLTPRFTLCPNGYYFAIDPNGYVLLHPNLQPKNPKSQEPVTLDFLDAELENDIKVEIRNKMIDGESGEKTFRTLVKSQDERYIDKGNRTYTWTPVNGTDYSLALVLPTYSFYYIKAKLEETITQARSKKGKMKDSETLKPDNFEESGYTFIAPRDYCNDLKISDNNTEFLLNFNEFIDRKTPNNPSCNADLINRVLLDAGFTNELVQNYWSKQKNIKGVKARFVVTDGGITRVYPKEAGENWQENPETYEDSFYKRSLDNDNYVFTAPYFNKSGPGAYESGIMVSKAVEIYIQGKLLKPAVVGIKIDVNSWIENFTKTSIRDPCAGPVCDCKRNSDVMDCVILDDGGFLLMANHDDYTNQIGRFFGEIDPSLMRHLVNISVYAFNKSYDYQSVCEPGAAPKQGAGHRSAYVPSVADILQIGWWATAAAWSILQQFLLSLTFPRLLEAVEMEDDDFTASLSKQSCITEQTQYFFDNDSKSFSGVLDCGNCSRIFHGEKLMNTNLIFIMVESKGTCPCDTRLLIQAEQTSDGPNPCDMVKQPRYRKGPDVCFDNNVLEDYTDCGGVSGLNPSLWYIIGIQFLLLWLVSGSTHRLL

SEQ ID NO: 25543 - protein, 280 aa, Homo sapiens
  REGION 1..280: note = ENSP00000409374
  VARIANT 1: note = Any amino acid
XKRLTPRFTLCPNGYYFAIDPNGYVLLHPNLQPKPIGVGIPTINLRKRRPNIQEPVTLDFLDAELENDIKVEIRNKMIDGESGEKTFRTLVKSQDERYIDKGNRTYTWTPVNGTDYSLALVLPTYSFYYIKAKLEETITQARYSETLKPDNFEESGYTFIAPRDYCNDLKISDNNTEFLLNFNEFIDRKTPNNPSCNADLINRVLLDAGFTNELVQNYWSKQKNIKGVKARFVVTDGGITRVYPKEAGENWQENPETYEDSFYKRSLDNDNYVFTAPYFN

SEQ ID NO: 25544 - protein, 309 aa, Homo sapiens
  REGION 1..309: note = ENSP00000405395
MAAGCLLALTLTLFQSLLIGPSSEEPFPSAVTIKSWVDKMQEDLVTLAKTASGVNQLVDIYEKYQDLYTVEPNNARQLVEIAARDIEKLLSNRSKALVRLALEAEKVQAAHQWREDFASNEVVYYNAKDDLDPEKNDSEPGSQRIKPVFIEDANFGRQISYQHAAVHIPTDIYEGSTIVLNELNWTSALDEVFKKNREEDPSLLWQVFGSATGLARYYPASPWVDNSRTPNKIDLYDVRRRPWYIQGAASPKDMLILVDVSGSVSGLTLKLIRTSVSEMLETLSDDDFVNVASDSKEISPSPEEIFNAE

SEQ ID NO: 25545 - protein, 1103 aa, Homo sapiens
  REGION 1..1103: note = ENSP00000348589
MAAGCLLALTLTLFQSLLIGPSSEEPFPSAVTIKSWVDKMQEDLVTLAKTASGVNQLVDIYEKYQDLYTVEPNNARQLVEIAARDIEKLLSNRSKALVRLALEAEKVQAAHQWREDFASNEVVYYNAKDDLDPEKNDSEPGSQRIKPVFIEDANFGRQISYQHAAVHIPTDIYEGSTIVLNELNWTSALDEVFKKNREEDPSLLWQVFGSATGLARYYPASPWVDNSRTPNKIDLYDVRRRPWYIQGAASPKDMLILVDVSGSVSGLTLKLIRTSVSEMLETLSDDDFVNVASFNSNAQDVSCFQHLVQANVRNKKVLKDAVNNITAKGITDYKKGFSFAFEQLLNYNVSRANCNKIIMLFTDGGEERAQEIFNKYNKDKKVRVFTFSVGQHNYDRGPIQWMACENKGYYYEIPSIGAIRINTQEYLDVLGRPMVLAGDKAKQVQWTNVYLDALELGLVITGTLPVFNITGQFENKTNLKNQLILGVMGVDVSLEDIKRLTPRFTLCPNGYYFAIDPNGYVLLHPNLQPKPIGVGIPTINLRKRRPNIQNPKSQEPVTLDFLDAELENDIKVEIRNKMIDGESGEKTFRTLVKSQDERYIDKGNRTYTWTPVNGTDYSLALVLPTYSFYYIKAKLEETITQARYSETLKPDNFEESGYTFIAPRDYCNDLKISDNNTEFLLNFNEFIDRKTPNNPSCNADLINRVLLDAGFTNELVQNYWSKQKNIKGVKARFVVTDGGITRVYPKEAGENWQENPETYEDSFYKRSLDNDNYVFTAPYFNKSGPGAYESGIMVSKAVEIYIQGKLLKPAVVGIKIDVNSWIENFTKTSIRDPCAGPVCDCKRNSDVMDCVILDDGGFLLMANHDDYTNQIGRFFGEIDPSLMRHLVNISVYAFNKSYDYQSVCEPGAAPKQGAGHRSAYVPSVADILQIGWWATAAAWSILQQFLLSLTFPRLLEAVEMEDDDFTASLSKQSCITEQTQYFFDNDSKSFSGVLDCGNCSRIFHGEKLMNTNLIFIMVESKGTCPCDTRLLIQAEQTSDGPNPCDMVKQPRYRKGPDVCFDNNVLEDYTDCGGVSGLNPSLWYIIGIQFLLLWLVSGSTHRLL

SEQ ID NO: 25546 - protein, 1153 aa, Homo sapiens
  REGION 1..1153: note = ENSP00000407393
MAVPARTCGASRPGPARTARPWPGCGPHPGPGTRRPTSGPPRPLWLLLPLLPLLAAPGASAYSFPQQHTMQHWARRLEQEVDGVMRIFGGVQQLREIYKDNRNLFEVQENEPQKLVEKVAGDIESLLDRKVQALKRLADAAENFQKAHRWQDNIKEEDIVYYDAKADAELDDPESEDVERGSKASTLRLDFIEDPNFKNKVNYSYAAVQIPTDIYKGSTVILNELNWTEALENVFMENRRQDPTLLWQVFGSATGVTRYYPATPWRAPKKIDLYDVRRRPWYIQGASSPKDMVIIVDVSGSVSGLTLKLMKTSVCEMLDTLSDDDYVNVASFNEKAQPVSCFTHLVQANVRNKKVFKEAVQGMVAKGTTGYKAGFEYAFDQLQNSNITRANCNKMIMMFTDGGEDRVQDVFEKYNWPNRTVRVFTFSVGQHNYDVTPLQWMACANKGYYFEIPSIGAIRINTQEYLDVLGRPMVLAGKEAKQVQWTNVYEDALGLGLVVTGTLPVFNLTQDGPGEKKNQLILGVMGIDVALNDIKRLTPNYTLGANGYVFAIDLNGYVLLHPNLKPQTTNFREPVTLDFLDAELEDENKEEIRRSMIDGNKGHKQIRTLVKSLDERYIDEVTRNYTWVPIRSTNYSLGLVLPPYSTFYLQANLSDQILQVKLPISKLKDFEFLLPSSFESEGHVFIAPREYCKDLNASDNNTEFLKNFIELMEKVTPDSKQCNNFLLHNLILDTGITQQLVERVWRDQDLNTYSLLAVFAATDGGITRVFPNKAAEDWTENPEPFNASFYRRSLDNHGYVFKPPHQDALLRPLELENDTVGILVSTAVELSLGRRTLRPAVVGVKLDLEAWAEKFKVLASNRTHQDQPQKQCGPNSHCEMDCEVNNEDLLCVLIDDGGFLVLSNQNHQWDQVGRFFSEVDANLMLALYNNSFYTRKESYDYQAACAPQPPGNLGAAPRGVFVPTVADFLNLAWWTSAAAWSLFQQLLYGLIYHSWFQADPAEAEGSPETRESSCVMKQTQYYFGSVNASYNAIIDCGNCSRLFHAQRLTNTNLLFVVAEKPLCSQCEAGRLLQKETHCPADGPEQCELVQRPRYRRGPHICFDYNATEDTSDCGRGASFPPSLGVLVSLQLLLLLGLPPRPQPQVLVHASRRL

SEQ ID NO: 25547 - protein, 1144 aa, Homo sapiens
  REGION 1..1144: note = ENSP00000404631
MAVPARTCGASRPGPARTARPWPGCGPHPGPGTRRPTSGPPRPLWLLLPLLPLLAAPGASAYSFPQQHTMQHWARRLEQEVDGVMRIFGGVQQLREIYKDNRNLFEVQENEPQKLVEKVAGDIESLLDRKVQALKRLADAAENFQKAHRWQDNIKEEDIVYYDAKADAELDDPESEDVERGSKASTLRLDFIEDPNFKNKVNYSYAAVQIPTDIYKGSTVILNELNWTEALENVFMENRRQDPTLLWQVFGSATGVTRYYPATPWRAPKKIDLYDVRRRPWYIQGASSPKDMVIIVDVSGSVSGLTLKLMKTSVCEMLDTLSDDDYVNVASFNEKAQPVSCFTHLVQANVRNKKVFKEAVQGMVAKGTTGYKAGFEYAFDQLQNSNITRANCNKMIMMFTDGGEDRVQDVFEKYNWPNRTVRVFTFSVGQHNYDVTPLQWMACANKGYYFEIPSIGAIRINTQEYLDVLGRPMVLAGKEAKQVQWTNVYEDALGLGLVVTGTLPVFNLTQDGPGEKKNQLILGVMGIDVALNDIKRLTPNYTLGANGYVFAIDLNGYVLLHPNLKPQTTNFREPVTLDFLDAELEDENKEEIRRSMIDGNKGHKQIRTLVKSLDERYIDEVTRNYTWVPIRSTNYSLGLVLPPYSTFYLQANLSDQILQVKYFEFLLPSSFESEGHVFIAPREYCKDLNASDNNTEFLKNFIELMEKVTPDSKQCNNFLLHNLILDTGITQQLVERVWRDQDLNTYSLLAVFAATDGGITRVFPNKAAEDWTENPEPFNASFYRRSLDNHGYVFKPPHQDALLRPLELENDTVGILVSTAVELSLGRRTLRPAVVGVKLDLEAWAEKFKVLASNRTHQDQPQKQCGPNSHCEMDCEVNNEDLLCVLIDDGGFLVLSNQNHQWDQVGRFFSEVDANLMLALYNNSFYTRKESYDYQAACAPQPPGNLGAAPRGVFVPTVADFLNLAWWTSAAAWSLFQQLLYGLIYHSWFQADPAEAEGSPETRESSCVMKQTQYYFGSVNASYNAIIDCGNCSRLFHAQRLTNTNLLFVVAEKPLCSQCEAGRLLQKETHSDGPEQCELVQRPRYRRGPHICFDYNATEDTSDCGRGASFPPSLGVLVSLQLLLLLGLPPRPQPQVLVHASRRL

SEQ ID NO: 25548 - protein, 1145 aa, Homo sapiens
  REGION 1..1145: note = ENSP00000266039
MAVPARTCGASRPGPARTARPWPGCGPHPGPGTRRPTSGPPRPLWLLLPLLPLLAAPGASAYSFPQQHTMQHWARRLEQEVDGVMRIFGGVQQLREIYKDNRNLFEVQENEPQKLVEKVAGDIESLLDRKVQALKRLADAAENFQKAHRWQDNIKEEDIVYYDAKADAELDDPESEDVERGSKASTLRLDFIEDPNFKNKVNYSYAAVQIPTDIYKGSTVILNELNWTEALENVFMENRRQDPTLLWQVFGSATGVTRYYPATPWRAPKKIDLYDVRRRPWYIQGASSPKDMVIIVDVSGSVSGLTLKLMKTSVCEMLDTLSDDDYVNVASFNEKAQPVSCFTHLVQANVRNKKVFKEAVQGMVAKGTTGYKAGFEYAFDQLQNSNITRANCNKMIMMFTDGGEDRVQDVFEKYNWPNRTVRVFTFSVGQHNYDVTPLQWMACANKGYYFEIPSIGAIRINTQEYLDVLGRPMVLAGKEAKQVQWTNVYEDALGLGLVVTGTLPVFNLTQDGPGEKKNQLILGVMGIDVALNDIKRLTPNYTLGANGYVFAIDLNGYVLLHPNLKPQTTNFREPVTLDFLDAELEDENKEEIRRSMIDGNKGHKQIRTLVKSLDERYIDEVTRNYTWVPIRSTNYSLGLVLPPYSTFYLQANLSDQILQVKYFEFLLPSSFESEGHVFIAPREYCKDLNASDNNTEFLKNFIELMEKVTPDSKQCNNFLLHNLILDTGITQQLVERVWRDQDLNTYSLLAVFAATDGGITRVFPNKAAEDWTENPEPFNASFYRRSLDNHGYVFKPPHQDALLRPLELENDTVGILVSTAVELSLGRRTLRPAVVGVKLDLEAWAEKFKVLASNRTHQDQPQKCGPNSHCEMDCEVNNEDLLCVLIDDGGFLVLSNQNHQWDQVGRFFSEVDANLMLALYNNSFYTRKESYDYQAACAPQPPGNLGAAPRGVFVPTVADFLNLAWWTSAAAWSLFQQLLYGLIYHSWFQADPAEAEGSPETRESSCVMKQTQYYFGSVNASYNAIIDCGNCSRLFHAQRLTNTNLLFVVAEKPLCSQCEAGRLLQKETHCPADGPEQCELVQRPRYRRGPHICFDYNATEDTSDCGRGASFPPSLGVLVSLQLLLLLGLPPRPQPQVLVHASRRL

SEQ ID NO: 25549 - protein, 1076 aa, Homo sapiens
  REGION 1..1076: note = ENSP00000354228
MQHWARRLEQEVDGVMRIFGGVQQLREIYKDNRNLFEVQENEPQKLVEKVAGDIESLLDRKVQALKRLADAAENFQKAHRWQDNIKEEDIVYYDAKADAELDDPESEDVERGSKASTLRLDFIEDPNFKNKVNYSYAAVQIPTDIYKGSTVILNELNWTEALENVFMENRRQDPTLLWQVFGSATGVTRYYPATPWRAPKKIDLYDVRRRPWYIQGASSPKDMVIIVDVSGSVSGLTLKLMKTSVCEMLDTLSDDDYVNVASFNEKAQPVSCFTHLVQANVRNKKVFKEAVQGMVAKGTTGYKAGFEYAFDQLQNSNITRANCNKMIMMFTDGGEDRVQDVFEKYNWPNRTVRVFTFSVGQHNYDVTPLQWMACANKGYYFEIPSIGAIRINTQEYLDVLGRPMVLAGKEAKQVQWTNVYEDALGLGLVVTGTLPVFNLTQDGPGEKKNQLILGVMGIDVALNDIKRLTPNYTLGANGYVFAIDLNGYVLLHPNLKPQTTNFREPVTLDFLDAELEDENKEEIRRSMIDGNKGHKQIRTLVKSLDERYIDEVTRNYTWVPIRSTNYSLGLVLPPYSTFYLQANLSDQILQVKYFEFLLPSSFESEGHVFIAPREYCKDLNASDNNTEFLKNFIELMEKVTPDSKQCNNFLLHNLILDTGITQQLVERVWRDQDLNTYSLLAVFAATDGGITRVFPNKAAEDWTENPEPFNASFYRRSLDNHGYVFKPPHQDALLRPLELENDTVGILVSTAVELSLGRRTLRPAVVGVKLDLEAWAEKFKVLASNRTHQDQPQKCGPNSHCEMDCEVNNEDLLCVLIDDGGFLVLSNQNHQWDQVGRFFSEVDANLMLALYNNSFYTRKESYDYQAACAPQPPGNLGAAPRGVFVPTVADFLNLAWWTSAAAWSLFQQLLYGLIYHSWFQADPAEAEGSPETRESSCVMKQTQYYFGSVNASYNAIIDCGNCSRLFHAQRLTNTNLLFVVAEKPLCSQCEAGRLLQKETHCPADGPEQCELVQRPRYRRGPHICFDYNATEDTSDCGRGASFPPSLGVLVSLQLLLLLGLPPRPQPQVLVHASRRL

SEQ ID NO: 25550 - protein, 1143 aa, Homo sapiens
  REGION 1..1143: note = ENSP00000390329
MAVPARTCGASRPGPARTARPWPGCGPHPGPGTRRPTSGPPRPLWLLLPLLPLLAAPGASAYSFPQQHTMQHWARRLEQEVDGVMRIFGGVQQLREIYKDNRNLFEVQENEPQKLVEKVAGDIESLLDRKVQALKRLADAAENFQKAHRWQDNIKEEDIVYYDAKADAELDDPESEDVERGSKASTLRLDFIEDPNFKNKVNYSYAAVQIPTDIYKGSTVILNELNWTEALENVFMENRRQDPTLLWQVFGSATGVTRYYPATPWRAPKKIDLYDVRRRPWYIQGASSPKDMVIIVDVSGSVSGLTLKLMKTSVCEMLDTLSDDDYVNVASFNEKAQPVSCFTHLVQANVRNKKVFKEAVQGMVAKGTTGYKAGFEYAFDQLQNSNITRANCNKMIMMFTDGGEDRVQDVFEKYNWPNRTVRVFTFSVGQHNYDVTPLQWMACANKGYYFEIPSIGAIRINTQEYLDVLGRPMVLAGKEAKQVQWTNVYEDALGLGLVVTGTLPVFNLTQDGPGEKKNQLILGVMGIDVALNDIKRLTPNYTLGANGYVFAIDLNGYVLLHPNLKPQTTNFREPVTLDFLDAELEDENKEEIRRSMIDGNKGHKQIRTLVKSLDERYIDEVTRNYTWVPIRSTNYSLGLVLPPYSTFYLQANLSDQILQVKYFEFLLPSSFESEGHVFIAPREYCKDLNASDNNTEFLKNFIELMEKVTPDSKQCNNFLLHNLILDTGITQQLVERVWRDQDLNTYSLLAVFAATDGGITRVFPNKAAEDWTENPEPFNASFYRRSLDNHGYVFKPPHQDALLRPLELENDTVGILVSTAVELSLGRRTLRPAVVGVKLDLEAWAEKFKVLASNRTHQDQPQKCGPNSHCEMDCEVNNEDLLCVLIDDGGFLVLSNQNHQWDQVGRFFSEVDANLMLALYNNSFYTRKESYDYQAACAPQPPGNLGAAPRGVFVPTVADFLNLAWWTSAAAWSLFQQLLYGLIYHSWFQADPAEAEGSPETRESSCVMKQTQYYFGSVNASYNAIIDCGNCSRLFHAQRLTNTNLLFVVAEKPLCSQCEAGRLLQKETHSDGPEQCELVQRPRYRRGPHICFDYNATEDTSDCGRGASFPPSLGVLVSLQLLLLLGLPPRPQPQVLVHASRRL

SEQ ID NO: 25551 - protein, 1150 aa, Homo sapiens
  REGION 1..1150: note = ENSP00000418081
MAVPARTCGASRPGPARTARPWPGCGPHPGPGTRRPTSGPPRPLWLLLPLLPLLAAPGASAYSFPQQHTMQHWARRLEQEVDGVMRIFGGVQQLREIYKDNRNLFEVQENEPQKLVEKVAGDIESLLDRKVQALKRLADAAENFQKAHRWQDNIKEEDIVYYDAKADAELDDPESEDVERGSKASTLRLDFIEDPNFKNKVNYSYAAVQIPTDIYKGSTVILNELNWTEALENVFMENRRQDPTLLWQVFGSATGVTRYYPATPWRAPKKIDLYDVRRRPWYIQGASSPKDMVIIVDVSGSVSGLTLKLMKTSVCEMLDTLSDDDYVNVASFNEKAQPVSCFTHLVQANVRNKKVFKEAVQGMVAKGTTGYKAGFEYAFDQLQNSNITRANCNKMIMMFTDGGEDRVQDVFEKYNWPNRTVRVFTFSVGQHNYDVTPLQWMACANKGYYFEIPSIGAIRINTQEYLDVLGRPMVLAGKEAKQVQWTNVYEDALGLGLVVTGTLPVFNLTQDGPGEKKNQLILGVMGIDVALNDIKRLTPNYTLGANGYVFAIDLNGYVLLHPNLKPQTTNFREPVTLDFLDAELEDENKEEIRRSMIDGNKGHKQIRTLVKSLDERYIDEVTRNYTWVPIRSTNYSLGLVLPPYSTFYLQANLSDQILQVKLPISKLKDFEFLLPSSFESEGHVFIAPREYCKDLNASDNNTEFLKNFIELMEKVTPDSKQCNNFLLHNLILDTGITQQLVERVWRDQDLNTYSLLAVFAATDGGITRVFPNKAAEDWTENPEPFNASFYRRSLDNHGYVFKPPHQDALLRPLELENDTVGILVSTAVELSLGRRTLRPAVVGVKLDLEAWAEKFKVLASNRTHQDQPQKCGPNSHCEMDCEVNNEDLLCVLIDDGGFLVLSNQNHQWDQVGRFFSEVDANLMLALYNNSFYTRKESYDYQAACAPQPPGNLGAAPRGVFVPTVADFLNLAWWTSAAAWSLFQQLLYGLIYHSWFQADPAEAEGSPETRESSCVMKQTQYYFGSVNASYNAIIDCGNCSRLFHAQRLTNTNLLFVVAEKPLCSQCEAGRLLQKETHSDGPEQCELVQRPRYRRGPHICFDYNATEDTSDCGRGASFPPSLGVLVSLQLLLLLGLPPRPQPQVLVHASRRL

SEQ ID NO: 25552 - protein, 1091 aa, Homo sapiens
  REGION 1..1091: note = ENSP00000419101
MAGPGSPRRASRGASALLAAALLYAALGDVVRSEQQIPLSVVKLWASAFGGEIKSIAAKYSGSQLLQKKYKEYEKDVAIEEIDGLQLVKKLAKNMEEMFHKKSEAVRRLVEAAEEAHLKHEFDADLQYEYFNAVLINERDKDGNFLELGKEFILAPNDHFNNLPVNISLSDVQVPTNMYNKDPAIVNGVYWSESLNKVFVDNFDRDPSLIWQYFGSAKGFFRQYPGIKWEPDENGVIAFDCRNRKWYIQAATSPKDVVILVDVSGSMKGLRLTIAKQTVSSILDTLGDDDFFNIIAYNEELHYVEPCLNGTLVQADRTNKEHFREHLDKLFAKGIGMLDIALNEAFNILSDFNHTGQGSICSQAIMLITDGAVDTYDTIFAKYNWPDRKVRIFTYLIGREAAFADNLKWMACANKGFFTQISTLADVQENVMEYLHVLSRPKVIDQEHDVVWTEAYIDSTLPQAQKLTDDQGPVLMTTVAMPVFSKQNETRSKGILLGVVGTDVPVKELLKTIPKYKLGIHGYAFAITNNGYILTHPELRLLYEEGKKRRKPNYSSVDLSEVEWEDRDDVLRNAMVNRKTGKFSMEVKKTVDKGKRVLVMTNDYYYTDIKGTPFSLGVALSRGHGKYFFRGNVTIEEGLHDLEHPDVSLADEWSYCNTDLHPEHRHLSQLEAIKLYLKGKEPLLQCDKELIQEVLFDAVVSAPIEAYWTSLALNKSENSDKGVEVAFLGTRTGLSRINLFVGAEQLTNQDFLKAGDKENIFNADHFPLWYRRAAEQIPGSFVYSIPFSTGPVNKSNVVTASTSIQLLDERKSPVVAAVGIQMKLEFFQRKFWTASRQCASLDGKCSISCDDETVNCYLIDNNGFILVSEDYTQTGDFFGEIEGAVMNKLLTMGSFKRITLYDYQAMCRANKESSDGAHGLLDPYNAFLSAVKWIMTELVLFLVEFNLCSWWHSDMTAKAQKLKQTLEPCDTEYPAFVSERTIKETTGNIACEDCSKSFVIQQIPSSNLFMVVVDSSCLCESVAPITMAPIEIRYNESLKCERLKAQKIRRRPESCHGFHPEENARECGGAPSLQAQTVLLLLPLLLMLFSR

SEQ ID NO: 25553 - protein, 997 aa, Homo sapiens
  REGION 1..997: note = ENSP00000417279
MEEMFHKKSEAVRRLVEAAEEAHLKHEFDADLQYEYFNAVLINERDKDGNFLELGKEFILAPNDHFNNLPVNISLSDVQVPTNMYNKDPAIVNGVYWSESLNKVFVDNFDRDPSLIWQYFGSAKGFFRQYPGIKWEPDENGVIAFDCRNRKWYIQAATSPKDVVILVDVSGSMKGLRLTIAKQTVSSILDTLGDDDFFNIIAYNEELHYVEPCLNGTLVQADRTNKEHFREHLDKLFAKGIGMLDIALNEAFNILSDFNHTGQGSICSQAIMLITDGAVDTYDTIFAKYNWPDRKVRIFTYLIGREAAFADNLKWMACANKGFFTQISTLADVQENVMEYLHVLSRPKVIDQEHDVVWTEAYIDSTLPQAQKLTDDQGPVLMTTVAMPVFSKQNETRSKGILLGVVGTDVPVKELLKTIPKYKLGIHGYAFAITNNGYILTHPELRLLYEEGKKRRKPNYSSVDLSEVEWEDRDDVLRNAMVNRKTGKFSMEVKKTVDKGKRVLVMTNDYYYTDIKGTPFSLGVALSRGHGKYFFRGNVTIEEGLHDLEHPDVSLADEWSYCNTDLHPEHRHLSQLEAIKLYLKGKEPLLQCDKELIQEVLFDAVVSAPIEAYWTSLALNKSENSDKGVEVAFLGTRTGLSRINLFVGAEQLTNQDFLKAGDKENIFNADHFPLWYRRAAEQIPGSFVYSIPFSTGPVNKSNVVTASTSIQLLDERKSPVVAAVGIQMKLEFFQRKFWTASRQCASLDGKCSISCDDETVNCYLIDNNGFILVSEDYTQTGDFFGEIEGAVMNKLLTMGSFKRITLYDYQAMCRANKESSDGAHGLLDPYNAFLSAVKWIMTELVLFLVEFNLCSWWHSDMTAKAQKLKQTLEPCDTEYPAFVSERTIKETTGNIACEDCSKSFVIQQIPSSNLFMVVVDSSCLCESVAPITMAPIEIRYNESLKCERLKAQKIRRRPESCHGFHPEENARECGGAPSLQAQTVLLLLPLLLMLFSR

SEQ ID NO: 25554 - protein, 519 aa, Homo sapiens
  REGION 1..519: note = ENSP00000418228
MEEMFHKKSEAVRRLVEAAEEAHLKHEFDADLQYEYFNAVLINERDKDGNFLELGKEFILAPNDHFNNLPVNISLSDVQVPTNMYNKDPAIVNGVYWSESLNKVFVDNFDRDPSLIWQYFGSAKGFFRQYPGIKWEPDENGVIAFDCRNRKWYIQAATSPKDVVILVDVSGSMKGLRLTIAKQTVSSILDTLGDDDFFNIIAYNEELHYVEPCLNGTLVQADRTNKEHFREHLDKLFAKGIGMLDIALNEAFNILSDFNHTGQGSICSQAIMLITDGAVDTYDTIFAKYNWPDRKVRIFTYLIGREAAFADNLKWMACANKGFFTQISTLADVQENVMEYLHVLSRPKVIDQEHDVVWTEAYIDSTLTDDQGPVLMTTVAMPVFSKQNETRSKGILLGVVGTDVPVKELLKTIPKYKLGIHGYAFAITNNGYILTHPELRLLYEEGKKRRKPNYSSVDLSEVEWEDRDDVLRNAMVNRKTGKFSMEVKKTVDKGFRCGAFQRSWEIFLPRECNHRRRPA

SEQ ID NO: 25555 - protein, 525 aa, Homo sapiens
  REGION 1..525: note = ENSP00000417318
MEEMFHKKSEAVRRLVEAAEEAHLKHEFDADLQYEYFNAVLINERDKDGNFLELGKEFILAPNDHFNNLPVNISLSDVQVPTNMYNKDPAIVNGVYWSESLNKVFVDNFDRDPSLIWQYFGSAKGFFRQYPGIKWEPDENGVIAFDCRNRKWYIQAATSPKDVVILVDVSGSMKGLRLTIAKQTVSSILDTLGDDDFFNIIAYNEELHYVEPCLNGTLVQADRTNKEHFREHLDKLFAKGIGMLDIALNEAFNILSDFNHTGQGSICSQAIMLITDGAVDTYDTIFAKYNWPDRKVRIFTYLIGREAAFADNLKWMACANKGFFTQISTLADVQENVMEYLHVLSRPKVIDQEHDVVWTEAYIDSTLPQAQKLTDDQGPVLMTTVAMPVFSKQNETRSKGILLGVVGTDVPVKELLKTIPKYKLGIHGYAFAITNNGYILTHPELRLLYEEGKKRRKPNYSSVDLSEVEWEDRDDVLRNAMVNRKTGKFSMEVKKTVDKGFRCGAFQRSWEIFLPRECNHRRRPA

SEQ ID NO: 25556 - protein, 126 aa, Homo sapiens
  REGION 1..126: note = ENSP00000418028
MEEMFHKKSEAVRRLVEAAEEAHLKHEFDADLQYEYFNAVLINERDKDGNFLELGKEFILAPNDHFNNLPVNISLSDVQVPTNMYNKDPAIVNGVYWSESLNKVFVDNFDRDPSLIWQYFGSAKGF

SEQ ID NO: 25557 - protein, 46 aa, Homo sapiens
  REGION 1..46: note = ENSP00000417455
MEEMFHKKSEAVRRLVEAAEEAHLKHEFDADLQTLQLSMGFIGLNL

SEQ ID NO: 25558 - protein, 1091 aa, Homo sapiens; identical to SEQ ID NO: 25552
  REGION 1..1091: note = ENSP00000389506

SEQ ID NO: 25559 - protein, 519 aa, Homo sapiens; identical to SEQ ID NO: 25554
  REGION 1..519: note = ENSP00000478969

SEQ ID NO: 25560 - protein, 1091 aa, Homo sapiens; identical to SEQ ID NO: 25552
  REGION 1..1091: note = ENSP00000288197

SEQ ID NO: 25561 - protein, 151 aa, Homo sapiens
  REGION 1..151: note = ENSP00000449389
MEGSADSYTSRPSLDSDVSLEEDRESARREVESQAQQQLERAKHKPVAFAVRTNVSYCGVLDEECPVQGSGVNFEAKDFLHIKEKYSNDWWIGRLVKEGGDIAFIPSPQRLESIRLKQEQKARRSGNPSSLSDIGNRRSPPPSLGGTCSPI

SEQ ID NO: 25562 - protein, 471 aa, Homo sapiens
  REGION 1..471: note = ENSP00000445495
MEGSADSYTSRPSLDSDVSLEEDRESARREVESQAQQQLERAKHKPVAFAVRTNVSYCGVLDEECPVQGSGVNFEAKDFLHIKEKYSNDWWIGRLVKEGGDIAFIPSPQRLESIRLKQEQKARRSGNPSSLSDIGNRRSPPPSLAKQKQKQAEHVPPYDVVPSMRPVVLVGPSLKGYEVTDMMQKALFDFLKHRFDGRISITRVTADLSLAKRSVLNNPGKRTIIERSSARSSIAEVQSEIERIFELAKSLQLVVLDADTINHPAQLAKTSLAPIIVFVKVSSPKVLQRLIRSRGKSQMKHLTVQMMAYDKLVQCPPESFDVILDENQLEDACEHLAEYLEVYWRATHHPAPGPGLLGPPSAIPGLQNQQLLGERGEEHSPLERDSLMPSDEASESSRQAWTGSSQRSSRHLEEDYADAYQDLYQPHRQHTSGLPSANGHDPQDRLLAQDSEHNHSDRNWQRNRPWPKDSY

SEQ ID NO: 25563 - protein, 483 aa, Homo sapiens
  REGION 1..483: note = ENSP00000444160
MSFSDSSATFLLNEGSADSYTSRPSLDSDVSLEEDRESARREVESQAQQQLERAKHKPVAFAVRTNVSYCGVLDEECPVQGSGVNFEAKDFLHIKEKYSNDWWIGRLVKEGGDIAFIPSPQRLESIRLKQEQKARRSGNPSSLSDIGNRRSPPPSLAKQKQKQAEHVPPYDVVPSMRPVVLVGPSLKGYEVTDMMQKALFDFLKHRFDGRISITRVTADLSLAKRSVLNNPGKRTIIERSSARSSIAEVQSEIERIFELAKSLQLVVLDADTINHPAQLAKTSLAPIIVFVKVSSPKVLQRLIRSRGKSQMKHLTVQMMAYDKLVQCPPESFDVILDENQLEDACEHLAEYLEVYWRATHHPAPGPGLLGPPSAIPGLQNQQLLGERGEEHSPLERDSLMPSDEASESSRQAWTGSSQRSSRHLEEDYADAYQDLYQPHRQHTSGLPSANGHDPQDRLLAQDSEHNHSDRNWQRNRPWPKDSY

SEQ ID NO: 25564 - protein, 105 aa, Homo sapiens
  REGION 1..105: note = ENSP00000446611
MSFSDSSATFLLNEGSADSYTSRPSLDSDVSLEEDRESARREVESQAQQQLERAKHKPVAFAVRTNVSYCGVLDEECPVQGSGVNFEAKDFLHIKEEIWEPFQPE

SEQ ID NO: 25565 - protein, 55 aa, Homo sapiens
  REGION 1..55: note = ENSP00000448074
MRPVVLVGPSLKGYEVTDMMQKALFDFLKHRFDGRISITRVTADLSLAKRSVLNN

SEQ ID NO: 25566 - protein, 122 aa, Homo sapiens
  REGION 1..122: note = ENSP00000448137
MRPVVLVGPSLKGYEVTDMMQKALFDFLKHRFDGRISITRVTADLSLAKRSVLNNPGKRTIIERSSARSSIAEVQSEIERIFELAKSLQLVVLDADTINHPAQLAKTSLAPIIVFVKVSSPK

SEQ ID NO: 25567 - protein, 457 aa, Homo sapiens
  REGION 1..457: note = ENSP00000446529
MYDDSYVPGFEDSEAGSADSYTSRPSLDSDVSLEEDRESARREVESQAQQQLERAKHKPVAFAVRTNVSYCGVLDEECPVQGSGVNFEAKDFLHIKEKYSNDWWIGRLVKEGGDIAFIPSPQRLESIRLKQEQKARRSGNPSSLSDIGNRRSPPPSLAKQKQKQVTDMMQKALFDFLKHRFDGRISITRVTADLSLAKRSVLNNPGKRTIIERSSARSSIAEVQSEIERIFELAKSLQLVVLDADTINHPAQLAKTSLAPIIVFVKVSSPKVLQRLIRSRGKSQMKHLTVQMMAYDKLVQCPPESFDVILDENQLEDACEHLAEYLEVYWRATHHPAPGPGLLGPPSAIPGLQNQQLLGERGEEHSPLERDSLMPSDEASESSRQAWTGSSQRSSRHLEEDYADAYQDLYQPHRQHTSGLPSANGHDPQDRLLAQDSEHNHSDRNWQRNRPWPKDSY

SEQ ID NO: 25568 - protein, 484 aa, Homo sapiens
  REGION 1..484: note = ENSP00000301050
MYDDSYVPGFEDSEAGSADSYTSRPSLDSDVSLEEDRESARREVESQAQQQLERAKHKPVAFAVRTNVSYCGVLDEECPVQGSGVNFEAKDFLHIKEKYSNDWWIGRLVKEGGDIAFIPSPQRLESIRLKQEQKARRSGNPSSLSDIGNRRSPPPSLAKQKQKQAEHVPPYDVVPSMRPVVLVGPSLKGYEVTDMMQKALFDFLKHRFDGRISITRVTADLSLAKRSVLNNPGKRTIIERSSARSSIAEVQSEIERIFELAKSLQLVVLDADTINHPAQLAKTSLAPIIVFVKVSSPKVLQRLIRSRGKSQMKHLTVQMMAYDKLVQCPPESFDVILDENQLEDACEHLAEYLEVYWRATHHPAPGPGLLGPPSAIPGLQNQQLLGERGEEHSPLERDSLMPSDEASESSRQAWTGSSQRSSRHLEEDYADAYQDLYQPHRQHTSGLPSANGHDPQDRLLAQDSEHNHSDRNWQRNRPWPKDSY

SEQ ID NO: 25569 - protein, 144 aa, Homo sapiens
  REGION 1..144: note = ENSP00000449497
MYDDSYVPGFEDSEAGSADSYTSRPSLDSDVSLEEDRESARREVESQAQQQLERAKHKPVAFAVRTNVSYCGVLDEECPVQGSGVNFEAKDFLHIKEYSNDWWIGRLVKEGGDIAFIPSPQRLESIRLKQEQKARRSGNPSSLS

SEQ ID NO: 25570 - protein, 443 aa, Homo sapiens
  REGION 1..443: note = ENSP00000448304
MYDDSYVPGFEDSEAGSADSYTSRPSLDSDVSLEEDRESARREVESQAQQQLERAKKYSNDWWIGRLVKEGGDIAFIPSPQRLESIRLKQEQKARRSGNPSSLSDIGNRRSPPPSLAKQKQKQAEHVPPYDVVPSMRPVVLVGPSLKGYEVTDMMQKALFDFLKHRFDGRISITRVTADLSLAKRSVLNNPGKRTIIERSSARSSIAEVQSEIERIFELAKSLQLVVLDADTINHPAQLAKTSLAPIIVFVKVSSPKVLQRLIRSRGKSQMKHLTVQMMAYDKLVQCPPESFDVILDENQLEDACEHLAEYLEVYWRATHHPAPGPGLLGPPSAIPGLQNQQLLGERGEEHSPLERDSLMPSDEASESSRQAWTGSSQRSSRHLEEDYADAYQDLYQPHRQHTSGLPSANGHDPQDRLLAQDSEHNHSDRNWQRNRPWPKDSY

SEQ ID NO: 25571 - protein, 37 aa, Homo sapiens
  REGION 1..37: note = ENSP00000447462
MYDDSYVPGFEDSEAPPAEASSAAGILSSCPAWRAWR

SEQ ID NO: 25572 - protein, 84 aa, Homo sapiens
  REGION 1..84: note = ENSP00000447261
QQLERAKHKPVAFAVRTNVSYCGVLDEECPVQGSGVNFEAKDFLHIKENLGGPPCLSHSFALHPVISVLVPHTSLENRAPDFVP

SEQ ID NO: 25573 - protein, 76 aa, Homo sapiens
  REGION 1..76: note = ENSP00000448076
  VARIANT 1: note = Any amino acid
XKDFLHIKEKYSNDWWIGRLVKEGGDIAFIPSPQRLESIRLKQEQKARRSGNPSSLSDIGNRRSPPPSLGGTCSPI

SEQ ID NO: 25574 - protein, 520 aa, Homo sapiens
  REGION 1..520: note = ENSP00000438949
MSSSSYAKNGTADGPHSPTSQVARGTTTRRSRLKRSDGSTTSTSFILRQGSADSYTSRPSDSDVSLEEDREAIRQEREQQAAIQLERAKSKPVAFAVKTNVSYCGALDEDVPVPSTAISFDAKDFLHIKEKYNNDWWIGRLVKEGCEIGFIPSPLRLENIRIQQEQKRGRFHGGKSSGNSSSSLGEMVSGTFRATPTSTAKQKQKVTEHIPPYDVVPSMRPVVLVGPSLKGYEVTDMMQKALFDFLKHRFDGRISITRVTADISLAKRSVLNNPSKRAIIERSNTRSSLAEVQSEIERIFELARSLQLVVLDADTINHPAQLIKTSLAPIIVHVKVSSPKVLQRLIKSRGKSQSKHLNVQLVAADKLAQCPPEMFDVILDENQLEDACEHLGEYLEAYWRATHTTSSTPMTPLLGRNLGSTALSPYPTAISGLQSQRMRHSNHSTENSPIERRSLMTSDENYHNERARKSRNRLSSSSQHSRDHYPLVEEDYPDSYQDTYKPHRNRGSPGGYSHDSRHRL

SEQ ID NO: 25575 - protein, 307 aa, Homo sapiens
  REGION 1..307: note = ENSP00000490124
MAGSADSYTSRPSDSDVSLEEDREAIRQEREQQAAIQLERAKSKPVAFAVKTNVSYCGALDEDVPVPSTAISFDAKDFLHIKEKYNNDWWIGRLVKEGCEIGFIPSPLRLENIRIQQEQKRGRFHGGKSSGNSSSSLGEMVSGTFRATPTSTAKQKQKVEMFDVILDENQLEDACEHLGEYLEAYWRATHTTSSTPMTPLLGRNLGSTALSPYPTAISGLQSQRMRHSNHSTENSPIERRSLMTSDENYHNERARKSRNRLSSSSQHSRDHYPLVEEDYPDSYQDTYKPHRNRGSPGGYSHDSRHRL

SEQ ID NO: 25576 - protein, 392 aa, Homo sapiens
  REGION 1..392: note = ENSP00000490145
MYDNLYLHGIEDSEAGSADSYTSRPSDSDVSLEEDREAIRQEREQQAAIQLERAKSKPVAFAVKTNVSYCGALDEDVPVPSTAISFDAKDFLHIKEKYNNDWWIGRLVKEGCEIGFIPSPLRLENIRIQQEQKRGRFHGGKSSGNSSSSLGEMVSGTFRATPTSTAKQKQKVTEHIPPYDVVPSMRPVVLVGPSLKGYEVTDMMQKALFDFLKHRFDGRISITRVTADISLAKRSVLNNPSKRAIIERSNTRSSLAEVQSEIERIFELARSLQLVVLDADTINHPAQLIKTSLAPIIVHVKVSSPKSQRMRHSNHSTENSPIERRSLMTSDENYHNERARKSRNRLSSSSQHSRDHYPLVEEDYPDSYQDTYKPHRNRGSPGGYSHDSRHRL

SEQ ID NO: 25577 - protein, 180 aa, Homo sapiens
  REGION 1..180: note = ENSP00000489881
MYDNLYLHGIEDSEAGSADSYTSRPSDSDVSLEEDREAIRQEREQQAAIQLERAKSKPVAFAVKTNVSYCGALDEDVPVPSTAISFDAKDFLHIKEKYNNDWWIGRLVKEGCEIGFIPSPLRLENIRIQQEQKRGRFHGGKSSGNSSSSLGEMVSGTFRATPTSTAKQKQKVDFNNESDS

SEQ ID NO: 25578 - protein, 411 aa, Homo sapiens
  REGION 1..411: note = ENSP00000490607
MAGSADSYTSRPSDSDVSLEEDREAIRQEREQQAAIQLERAKSKPVAFAVKTNVSYCGALDEDVPVPSTAISFDAKDFLHIKEKYNNDWWIGRLVKEGCEIGFIPSPLRLENIRIQQEQKRGRFHGGKSSGNSSSSLGEMVSGTFRATPTSTAKQKQKVTEHIPPYDVVPSMRPVVLVGPSLKGYEVTDMMQKALFDFLKHRFDGRISITRVTADISLAKRSVLNNPSKRAIIERSNTRSSLAEVQSEIERIFELARSLQLVVLDADTINHPAQLIKTSLAPIIVHVKVSSPKVLQRLIKSRGKSQSKHLNVQLVAADKLAQCPPSQRMRHSNHSTENSPIERRSLMTSDENYHNERARKSRNRLSSSSQHSRDHYPLVEEDYPDSYQDTYKPHRNRGSPGGYSHDSRHRL

SEQ ID NO: 25579 - protein, 473 aa, Homo sapiens
  REGION 1..473: note = ENSP00000490250
MAGSADSYTSRPSDSDVSLEEDREAIRQEREQQAAIQLERAKSKPVAFAVKTNVSYCGALDEDVPVPSTAISFDAKDFLHIKEKYNNDWWIGRLVKEGCEIGFIPSPLRLENIRIQQEQKRGRFHGGKSSGNSSSSLGEMVSGTFRATPTSTAKQKQKVTEHIPPYDVVPSMRPVVLVGPSLKGYEVTDMMQKALFDFLKHRFDGRISITRVTADISLAKRSVLNNPSKRAIIERSNTRSSLAEVQSEIERIFELARSLQLVVLDADTINHPAQLIKTSLAPIIVHVKVSSPKVLQRLIKSRGKSQSKHLNVQLVAADKLAQCPPEMFDVILDENQLEDACEHLGEYLEAYWRATHTTSSTPMTPLLGRNLGSTALSPYPTAISGLQSQRMRHSNHSTENSPIERRSLMTSDENYHNERARKSRNRLSSSSQHSRDHYPLVEEDYPDSYQDTYKPHRNRGSPGGYSHDSRHRL

SEQ ID NO: 25580 - protein, 256 aa, Homo sapiens
  REGION 1..256: note = ENSP00000490127
MSSSSYAKNGTADGPHSPTSQVARGTTTRRSRLKRSDGSTTSTSFILRQGSADSYTSRPSDSDVSLEEDREAIRQEREQQAAIQLERAKSKPVAFAVKTNVSYCGALDEDVPVPSTAISFDAKDFLHIKEKYNNDWWIGRLVKEGCEIGFIPSPLRLENIRIQQEQKRGRFHGGKSSGNSSSSLGEMVSGTFRATPTSTAKQKQKVTEHIPPYDVVPSMRPVVLVGPSLKGYEVTDMMQKALFDFLKHRFDGRVSE

SEQ ID NO: 25581 - protein, 452 aa, Homo sapiens
  REGION 1..452: note = ENSP00000489621
MYDNLYLHGIEDSEAGSADSYTSRPSDSDVSLEEDREAIRQEREQQAAIQLERAKKYNNDWWIGRLVKEGCEIGFIPSPLRLENIRIQQEQKRGRFHGGKSSGNSSSSLGEMVSGTFRATPTSTAKQKQKVTEHIPPYDVVPSMRPVVLVGPSLKGYEVTDMMQKALFDFLKHRFDGRISITRVTADISLAKRSVLNNPSKRAIIERSNTRSSLAEVQSEIERIFELARSLQLVVLDADTINHPAQLIKTSLAPIIVHVKVSSPKVHVFFYQVLQRLIKSRGKSQSKHLNVQLVAADKLAQCPPEMFDVILDENQLEDACEHLGEYLEAYWRATHTTSSTPMTPLLGRNLGSTALSPYPTAISGLQSQRMRHSNHSTENSPIERRSLMTSDENYHNERARKSRNRLSSSSQHSRDHYPLVEEDYPDSYQDTYKPHRNRGSPGGYSHDSRHRL

SEQ ID NO: 25582 - protein, 473 aa, Homo sapiens; identical to SEQ ID NO: 25579
  REGION 1..473: note = ENSP00000490247

SEQ ID NO: 25583 - protein, 407 aa, Homo sapiens
  REGION 1..407: note = ENSP00000490660
MYDNLYLHGIEDSEAGSADSYTSRPSDSDVSLEEDREAIRQEREQQAAIQLERAKSKPVAFAVKTNVSYCGALDEDVPVPSTAISFDAKDFLHIKEKYNNDWWIGRLVKEGCEIGFIPSPLRLENIRIQQEQKRGRFHGGISITRVTADISLAKRSVLNNPSKRAIIERSNTRSSLAEVQSEIERIFELARSLQLVVLDADTINHPAQLIKTSLAPIIVHVKVSSPKVLQRLIKSRGKSQSKHLNVQLVAADKLAQCPPEMFDVILDENQLEDACEHLGEYLEAYWRATHTTSSTPMTPLLGRNLGSTALSPYPTAISGLQSQRMRHSNHSTENSPIERRSLMTSDENYHNERARKSRNRLSSSSQHSRDHYPLVEEDYPDSYQDTYKPHRNRGSPGGYSHDSRHRL

SEQ ID NO: 25584 - protein, 113 aa, Homo sapiens
  REGION 1..113: note = ENSP00000489915
  VARIANT 1: note = Any amino acid
XKRAIIERSNTRSSLAEVQSEIERIFELARSLQLVVLDADTINHPAQLIKTSLAPIIVHVKVSSPKVLQRLIKSRGKSQSKHLNVQLVAADKLAQCPPSANEAQQPLHRELSN

SEQ ID NO: 25585 - protein, 502 aa, Homo sapiens
  REGION 1..502: note = ENSP00000489677
MDVVARGTTTRRSRLKRSDGSTTSTSFILRQGSADSYTSRPSDSDVSLEEDREAIRQEREQQAAIQLERAKSKPVAFAVKTNVSYCGALDEDVPVPSTAISFDAKDFLHIKEKYNNDWWIGRLVKEGCEIGFIPSPLRLENIRIQQEQKRGRFHGGKSSGNSSSSLGEMVSGTFRATPTSTAKQKQKVTEHIPPYDVVPSMRPVVLVGPSLKGYEVTDMMQKALFDFLKHRFDGRISITRVTADISLAKRSVLNNPSKRAIIERSNTRSSLAEVQSEIERIFELARSLQLVVLDADTINHPAQLIKTSLAPIIVHVKVSSPKVLQRLIKSRGKSQSKHLNVQLVAADKLAQCPPEMFDVILDENQLEDACEHLGEYLEAYWRATHTTSSTPMTPLLGRNLGSTALSPYPTAISGLQSQRMRHSNHSTENSPIERRSLMTSDENYHNERARKSRNRLSSSSQHSRDHYPLVEEDYPDSYQDTYKPHRNRGSPGGYSHDSRHRL

SEQ ID NO: 25586 - protein, 194 aa, Homo sapiens
  REGION 1..194: note = ENSP00000490252
MAGSADSYTSRPSDSDVSLEEDREAIRQEREQQAAIQLERAKSKPVAFAVKTNVSYCGALDEDVPVPSTAISFDAKDFLHIKEKYNNDWWIGRLVKEGCEIGFIPSPLRLENIRIQQEQKRGRFHGGKSSGNSSSSLGEMVSGTFRATPTSTAKQKQKVTEHIPPYDVVPSMRPVVLVGPSLKGYEDFNNESDS

SEQ ID NO: 25587 - protein, 145 aa, Homo sapiens
  REGION 1..145: note = ENSP00000490138
MAGSADSYTSRPSDSDVSLEEDREAIRQEREQQAAIQLERAKSKPVAFAVKTNVSYCGALDEDVPVPSTAISFDAKDFLHIKEKYNNDWWIGRLVKEGCEIGFIPSPLRLENIRIQQEQKRGRFHGGKCLMLYWMKISLRMHVNI

SEQ ID NO: 25588 - protein, 80 aa, Homo sapiens
  REGION 1..80: note = ENSP00000489953
MVSGTFRATPTSTAKQKQKVTEHIPPYDVVPSMRPVVLVGPSLKGYERKYKVKLKESLSWQDLCNWLFLMQTPSITQHNL

SEQ ID NO: 25589 - protein, 461 aa, Homo sapiens
  REGION 1..461: note = ENSP00000489779
MDVVARGTTTRRSRLKRSDGSTTSTSFILRQGSADSYTSRPSDSDVSLEEDREAIRQEREQQAAIQLERAKKYNNDWWIGRLVKEGCEIGFIPSPLRLENIRIQQEQKRGRFHGGKSSGNSSSSLGEMVSGTFRATPTSTAKQKQKVTEHIPPYDVVPSMRPVVLVGPSLKGYEVTDMMQKALFDFLKHRFDGRISITRVTADISLAKRSVLNNPSKRAIIERSNTRSSLAEVQSEIERIFELARSLQLVVLDADTINHPAQLIKTSLAPIIVHVKVSSPKVLQRLIKSRGKSQSKHLNVQLVAADKLAQCPPEMFDVILDENQLEDACEHLGEYLEAYWRATHTTSSTPMTPLLGRNLGSTALSPYPTAISGLQSQRMRHSNHSTENSPIERRSLMTSDENYHNERARKSRNRLSSSSQHSRDHYPLVEEDYPDSYQDTYKPHRNRGSPGGYSHDSRHRL

SEQ ID NO: 25590 - protein, 363 aa, Homo sapiens
  REGION 1..363: note = ENSP00000489788
MDVVARGTTTRRSRLKRSDGSTTSTSFILRQGSADSYTSRPSDSDVSLEEDREAIRQEREQQAAIQLERAKSKPVAFAVKTNVSYCGALDEDVPVPSTAISFDAKDFLHIKEKYNNDWWIGRLVKEGCEIGFIPSPLRLENIRIQQEQKRGRFHGGKSSGNSSSSLGEMVSGTFRATPTSTAKQKQKVTEHIPPYDVVPSMRPVVLVGPSLKGYEEMFDVILDENQLEDACEHLGEYLEAYWRATHTTSSTPMTPLLGRNLGSTALSPYPTAISGLQSQRMRHSNHSTENSPIERRSLMTSDENYHNERARKSRNRLSSSSQHSRDHYPLVEEDYPDSYQDTYKPHRNRGSPGGYSHDSRHRL

SEQ ID NO: 25591 - protein, 424 aa, Homo sapiens
  REGION 1..424: note = ENSP00000489967
MYDNLYLHGIEDSEAGSADSYTSRPSDSDVSLEEDREAIRQEREQQAAIQLERAKSKPVAFAVKTNVSYCGALDEDVPVPSTAISFDAKDFLHIKEKYNNDWWIGRLVKEGCEIGFIPSPLRLENIRIQQEQKRGRFHGGKSSGNSSSSLGEMVSGTFRATPTSTAKQKQKVTEHIPPYDVVPSMRPVVLVGPSLKGYEVTDMMQKALFDFLKHRFDGRISITRVTADISLAKRSVLNNPSKRAIIERSNTRSSLAEVQSEIERIFELARSLQLVVLDADTINHPAQLIKTSLAPIIVHVKVSSPKVLQRLIKSRGKSQSKHLNVQLVAADKLAQCPPSQRMRHSNHSTENSPIERRSLMTSDENYHNERARKSRNRLSSSSQHSRDHYPLVEEDYPDSYQDTYKPHRNRGSPGGYSHDSRHRL

SEQ ID NO: 25592 - protein, 411 aa, Homo sapiens; identical to SEQ ID NO: 25578
  REGION 1..411: note = ENSP00000489818

SEQ ID NO: 25593 - protein, 219 aa, Homo sapiens
  REGION 1..219: note = ENSP00000490651
MAGSADSYTSRPSDSDVSLEEDREAIRQEREQQAAIQLERAKSKPVAFAVKTNVSYCGALDEDVPVPSTAISFDAKDFLHIKEKYNNDWWIGRLVKEGCEIGFIPSPLRLENIRIQQEQKRGRFHGGKSSGNSSSSLGEMVSGTFRATPTSTAKQKQKVTEHIPPYDVVPSMRPVVLVGPSLKGYERKYKVKLKESLSWQDLCNWLFLMQTPSITQHNL

SEQ ID NO: 25594 - protein, 490 aa, Homo sapiens
  REGION 1..490: note = ENSP00000489876
MAGSADSYTSRPSDSDVSLEEDREAIRQEREQQAAIQLERAKSKPVAFAVKTNVSYCGALDEDVPVPSTAISFDAKDFLHIKEKYNNDWWIGRLVKEGCEIGFIPSPLRLENIRIQQEQKRGRFHGGLFVASLVSWYLGEDSFRKSSGNSSSSLGEMVSGTFRATPTSTAKQKQKVTEHIPPYDVVPSMRPVVLVGPSLKGYEVTDMMQKALFDFLKHRFDGRISITRVTADISLAKRSVLNNPSKRAIIERSNTRSSLAEVQSEIERIFELARSLQLVVLDADTINHPAQLIKTSLAPIIVHVKVSSPKVLQRLIKSRGKSQSKHLNVQLVAADKLAQCPPEMFDVILDENQLEDACEHLGEYLEAYWRATHTTSSTPMTPLLGRNLGSTALSPYPTAISGLQSQRMRHSNHSTENSPIERRSLMTSDENYHNERARKSRNRLSSSSQHSRDHYPLVEEDYPDSYQDTYKPHRNRGSPGGYSHDSRHRL

SEQ ID NO: 25595 - protein, 158 aa, Homo sapiens
  REGION 1..158: note = ENSP00000489943
MYDNLYLHGIEDSEAGSADSYTSRPSDSDVSLEEDREAIRQEREQQAAIQLERAKSKPVAFAVKTNVSYCGALDEDVPVPSTAISFDAKDFLHIKEKYNNDWWIGRLVKEGCEIGFIPSPLRLENIRIQQEQKRGRFHGGKCLMLYWMKISLRMHVNI

SEQ ID NO: 25596 - protein, 202 aa, Homo sapiens
  REGION 1..202: note = ENSP00000490144
MYDNLYLHGIEDSEAGSADSYTSRPSDSDVSLEEDREAIRQEREQQAAIQLERAKSKPVAFAVKTNVSYCGALDEDVPVPSTAISFDAKDFLHIKEKYNNDWWIGRLVKEGCEIGFIPSPLRLENIRIQQEQKRGRFHGGKSSGNSSSSLGEMVSGTFRATPTSTDGAHSSLRCCTVNASGGVSGAVTERLRGNRHDAESPL

SEQ ID NO: 25597 - protein, 48 aa, Homo sapiens
  REGION 1..48: note = ENSP00000489746
MYDNLYLHGIEDSEALTKQLGVGRISKTEIGLLSDPNGFSGFLHKQAV

SEQ ID NO: 25598 - protein, 194 aa, Homo sapiens
  REGION 1..194: note = ENSP00000490918
MDVVARGTTTRRSRLKRSDGSTTSTSFILRQGSADSYTSRPSDSDVSLEEDREAIRQEREQQAAIQLERAKSKPVAFAVKTNVSYCGALDEDVPVPSTAISFDAKDFLHIKEKYNNDWWIGRLVKEGCEIGFIPSPLRLENIRIQQEQKRGRFHGGKSSGNSSSSLGEMVSGTFRATPTSTEFTYFDMALVIVF

SEQ ID NO: 25599 - protein, 486 aa, Homo sapiens
  REGION 1..486: note = ENSP00000443893
MYDNLYLHGIEDSEAGSADSYTSRPSDSDVSLEEDREAIRQEREQQAAIQLERAKSKPVAFAVKTNVSYCGALDEDVPVPSTAISFDAKDFLHIKEKYNNDWWIGRLVKEGCEIGFIPSPLRLENIRIQQEQKRGRFHGGKSSGNSSSSLGEMVSGTFRATPTSTAKQKQKVTEHIPPYDVVPSMRPVVLVGPSLKGYEVTDMMQKALFDFLKHRFDGRISITRVTADISLAKRSVLNNPSKRAIIERSNTRSSLAEVQSEIERIFELARSLQLVVLDADTINHPAQLIKTSLAPIIVHVKVSSPKVLQRLIKSRGKSQSKHLNVQLVAADKLAQCPPEMFDVILDENQLEDACEHLGEYLEAYWRATHTTSSTPMTPLLGRNLGSTALSPYPTAISGLQSQRMRHSNHSTENSPIERRSLMTSDENYHNERARKSRNRLSSSSQHSRDHYPLVEEDYPDSYQDTYKPHRNRGSPGGYSHDSRHRL

SEQ ID NO: 25600 - protein, 334 aa, Homo sapiens
  REGION 1..334: note = ENSP00000489787
MVSGTFRATPTSTAKQKQKVTEHIPPYDVVPSMRPVVLVGPSLKGYEVTDMMQKALFDFLKHRFDGRISITRVTADISLAKRSVLNNPSKRAIIERSNTRSSLAEVQSEIERIFELARSLQLVVLDADTINHPAQLIKTSLAPIIVHVKVSSPKVLQRLIKSRGKSQSKHLNVQLVAADKLAQCPPEMFDVILDENQLEDACEHLGEYLEAYWRATHTTSSTPMTPLLGRNLGSTALSPYPTAISGLQSQRMRHSNHSTENSPIERRSLMTSDENYHNERARKSRNRLSSSSQHSRDHYPLVEEDYPDSYQDTYKPHRNRGSPGGYSHDSRHRL

SEQ ID NO: 25601 - protein, 473 aa, Homo sapiens; identical to SEQ ID NO: 25579
  REGION 1..473: note = ENSP00000390161

SEQ ID NO: 25602 - protein, 445 aa, Homo sapiens
  REGION 1..445: note = ENSP00000489679
MYDNLYLHGIEDSEAGSADSYTSRPSDSDVSLEEDREAIRQEREQQAAIQLERAKKYNNDWWIGRLVKEGCEIGFIPSPLRLENIRIQQEQKRGRFHGGKSSGNSSSSLGEMVSGTFRATPTSTAKQKQKVTEHIPPYDVVPSMRPVVLVGPSLKGYEVTDMMQKALFDFLKHRFDGRISITRVTADISLAKRSVLNNPSKRAIIERSNTRSSLAEVQSEIERIFELARSLQLVVLDADTINHPAQLIKTSLAPIIVHVKVSSPKVLQRLIKSRGKSQSKHLNVQLVAADKLAQCPPEMFDVILDENQLEDACEHLGEYLEAYWRATHTTSSTPMTPLLGRNLGSTALSPYPTAISGLQSQRMRHSNHSTENSPIERRSLMTSDENYHNERARKSRNRLSSSSQHSRDHYPLVEEDYPDSYQDTYKPHRNRGSPGGYSHDSRHRL

SEQ ID NO: 25603 - protein, 441 aa, Homo sapiens
  REGION 1..441: note = ENSP00000380490
MAGSADSYTSRPSDSDVSLEEDREAIRQEREQQAAIQLERAKSKPVAFAVKTNVSYCGALDEDVPVPSTAISFDAKDFLHIKEKYNNDWWIGRLVKEGCEIGFIPSPLRLENIRIQQEQKRGRFHGGKSSGNSSSSLGEMVSGTFRATPTSTAKQKQKVTEHIPPYDVVPSMRPVVLVGPSLKGYEVTDMMQKALFDFLKHRFDGRISITRVTADISLAKRSVLNNPSKRAIIERSNTRSSLAEVQSEIERIFELARSLQLVVLDADTINHPAQLIKTSLAPIIVHVKVSSPKEMFDVILDENQLEDACEHLGEYLEAYWRATHTTSSTPMTPLLGRNLGSTALSPYPTAISGLQSQRMRHSNHSTENSPIERRSLMTSDENYHNERARKSRNRLSSSSQHSRDHYPLVEEDYPDSYQDTYKPHRNRGSPGGYSHDSRHRL

SEQ ID NO: 25604 - protein, 38 aa, Homo sapiens
  REGION 1..38: note = ENSP00000490817
MYDNLYLHGIEDSEANNVMCYPRWCEQSFKPMEKTRPK

SEQ ID NO: 25605 - protein, 410 aa, Homo sapiens
  REGION 1..410: note = ENSP00000489883
MAGSADSYTSRPSDSDVSLEEDREAIRQEREQQAAIQLERAKSKPVAFAVKTNVSYCGALDEDVPVPSTAISFDAKDFLHIKEKYNNDWWIGRLVKEGCEIGFIPSPLRLENIRIQQEQKRGRFHGGKSSGNSSSSLGEMVSGTFRATPTSTDGAHSSLRCCTVNASGGVSGAVTERLRAEVQSEIERIFELARSLQLVVLDADTINHPAQLIKTSLAPIIVHVKVSSPKVLQRLIKSRGKSQSKHLNVQLVAADKLAQCPPEMFDVILDENQLEDACEHLGEYLEAYWRATHTTSSTPMTPLLGRNLGSTALSPYPTAISGLQSQRMRHSNHSTENSPIERRSLMTSDENYHNERARKSRNRLSSSSQHSRDHYPLVEEDYPDSYQDTYKPHRNRGSPGGYSHDSRHRL

SEQ ID NO: 25606 - protein, 479 aa, Homo sapiens
  REGION 1..479: note = ENSP00000410978
MSSSSYAKNGTADGPHSPTSQVARGTTTRRSRLKRSDGSTTSTSFILRQGSADSYTSRPSDSDVSLEEDREAIRQEREQQAAIQLERAKKYNNDWWIGRLVKEGCEIGFIPSPLRLENIRIQQEQKRGRFHGGKSSGNSSSSLGEMVSGTFRATPTSTAKQKQKVTEHIPPYDVVPSMRPVVLVGPSLKGYEVTDMMQKALFDFLKHRFDGRISITRVTADISLAKRSVLNNPSKRAIIERSNTRSSLAEVQSEIERIFELARSLQLVVLDADTINHPAQLIKTSLAPIIVHVKVSSPKVLQRLIKSRGKSQSKHLNVQLVAADKLAQCPPEMFDVILDENQLEDACEHLGEYLEAYWRATHTTSSTPMTPLLGRNLGSTALSPYPTAISGLQSQRMRHSNHSTENSPIERRSLMTSDENYHNERARKSRNRLSSSSQHSRDHYPLVEEDYPDSYQDTYKPHRNRGSPGGYSHDSRHRL

SEQ ID NO: 25607 - protein, 272 aa, Homo sapiens
  REGION 1..272: note = ENSP00000490795
MAGSADSYTSRPSDSDVSLEEDREAIRQEREQQAAIQLERAKSKPVAFAVKTNVSYCGALDEDVPVPSTAISFDAKDFLHIKEKYNNDWWIGRLVKEGCEIGFIPSPLRLENIRIQQEQKRGRFHGGKSSGNSSSSLGEMVSGTFRATPTSTAKQKQKVTEHIPPYDVVPSMRPVVLVGPSLKGYESQRMRHSNHSTENSPIERRSLMTSDENYHNERARKSRNRLSSSSQHSRDHYPLVEEDYPDSYQDTYKPHRNRGSPGGYSHDSRHRL

SEQ ID NO: 25608 - protein, 232 aa, Homo sapiens
  REGION 1..232: note = ENSP00000490572
MYDNLYLHGIEDSEAGSADSYTSRPSDSDVSLEEDREAIRQEREQQAAIQLERAKSKPVAFAVKTNVSYCGALDEDVPVPSTAISFDAKDFLHIKEKYNNDWWIGRLVKEGCEIGFIPSPLRLENIRIQQEQKRGRFHGGKSSGNSSSSLGEMVSGTFRATPTSTAKQKQKVTEHIPPYDVVPSMRPVVLVGPSLKGYERKYKVKLKESLSWQDLCNWLFLMQTPSITQHNL

SEQ ID NO: 25609 - protein, 423 aa, Homo sapiens
  REGION 1..423: note = ENSP00000489732
MYDNLYLHGIEDSEAGSADSYTSRPSDSDVSLEEDREAIRQEREQQAAIQLERAKSKPVAFAVKTNVSYCGALDEDVPVPSTAISFDAKDFLHIKEKYNNDWWIGRLVKEGCEIGFIPSPLRLENIRIQQEQKRGRFHGGKSSGNSSSSLGEMVSGTFRATPTSTDGAHSSLRCCTVNASGGVSGAVTERLRAEVQSEIERIFELARSLQLVVLDADTINHPAQLIKTSLAPIIVHVKVSSPKVLQRLIKSRGKSQSKHLNVQLVAADKLAQCPPEMFDVILDENQLEDACEHLGEYLEAYWRATHTTSSTPMTPLLGRNLGSTALSPYPTAISGLQSQRMRHSNHSTENSPIERRSLMTSDENYHNERARKSRNRLSSSSQHSRDHYPLVEEDYPDSYQDTYKPHRNRGSPGGYSHDSRHRL

SEQ ID NO: 25610 - protein, 351 aa, Homo sapiens
  REGION 1..351: note = ENSP00000490488
MAGSADSYTSRPSDSDVSLEEDREAIRQEREQQAAIQLERAKSKPVAFAVKTNVSYCGALDEDVPVPSTAISFDAKDFLHIKEKYNNDWWIGRLVKEGCEIGFIPSPLRLENIRIQQEQKRGRFHGGKSSGNSSSSLGEMVSGTFRATPTSTAEVQSEIERIFELARSLQLVVLDADTINHPAQLIKTSLAPIIVHVKVSSPKEMFDVILDENQLEDACEHLGEYLEAYWRATHTTSSTPMTPLLGRNLGSTALSPYPTAISGLQSQRMRHSNHSTENSPIERRSLMTSDENYHNERARKSRNRLSSSSQHSRDHYPLVEEDYPDSYQDTYKPHRNRGSPGGYSHDSRHRL

SEQ ID NO: 25611 - protein, 334 aa, Homo sapiens
  REGION 1..334: note = ENSP00000490176
MAGSADSYTSRPSDSDVSLEEDREAIRQEREQQAAIQLERAKSKPVAFAVKTNVSYCGALDEDVPVPSTAISFDAKDFLHIKEKYNNDWWIGRLVKEGCEIGFIPSPLRLENIRIQQEQKRGRFHGGKSSGNSSSSLGEMVSGTFRATPTSTAKQKQKVTEHIPPYDVVPSMRPVVLVGPSLKGYEEMFDVILDENQLEDACEHLGEYLEAYWRATHTTSSTPMTPLLGRNLGSTALSPYPTAISGLQSQRMRHSNHSTENSPIERRSLMTSDENYHNERARKSRNRLSSSSQHSRDHYPLVEEDYPDSYQDTYKPHRNRGSPGGYSHDSRHRL

SEQ ID NO: 25612 - protein, 232 aa, Homo sapiens; identical to SEQ ID NO: 25608
  REGION 1..232: note = ENSP00000490891

SEQ ID NO: 25613 - protein, 207 aa, Homo sapiens
  REGION 1..207: note = ENSP00000490510
MYDNLYLHGIEDSEAGSADSYTSRPSDSDVSLEEDREAIRQEREQQAAIQLERAKSKPVAFAVKTNVSYCGALDEDVPVPSTAISFDAKDFLHIKEKYNNDWWIGRLVKEGCEIGFIPSPLRLENIRIQQEQKRGRFHGGKSSGNSSSSLGEMVSGTFRATPTSTAKQKQKVTEHIPPYDVVPSMRPVVLVGPSLKGYEDFNNESDS

SEQ ID NO: 25614 - protein, 215 aa, Homo sapiens
  REGION 1..215: note = ENSP00000490430
MAGSADSYTSRPSDSDVSLEEDREAIRQEREQQAAIQLERAKSKPVAFAVKTNVSYCGALDEDVPVPSTAISFDAKDFLHIKEKYNNDWWIGRLVKEGCEIGFIPSPLRLENIRIQQEQKRGRFHGGKSSGNSSSSLGEMVSGTFRATPTSTAKQKQKVTEHIPPYDVVPSMRPVVLVGPSLKGYESWKCQRDEQESGLQKSSHGHGEFPPTYTN

SEQ ID NO: 25615 - protein, 472 aa, Homo sapiens
  REGION 1..472: note = ENSP00000353425
MYDNLYLHGIEDSEAGSADSYTSRPSDSDVSLEEDREAIRQEREQQAAIQLERAKSKPVAFAVKTNVSYCGALDEDVPVPSTAISFDAKDFLHIKEKYNNDWWIGRLVKEGCEIGFIPSPLRLENIRIQQEQKRGRFHGGKSSGNSSSSLGEMVSGTFRATPTSTAKQKQKVTEHIPPYDVVPSMRPVVLVGPSLKGYEHRFDGRISITRVTADISLAKRSVLNNPSKRAIIERSNTRSSLAEVQSEIERIFELARSLQLVVLDADTINHPAQLIKTSLAPIIVHVKVSSPKVLQRLIKSRGKSQSKHLNVQLVAADKLAQCPPEMFDVILDENQLEDACEHLGEYLEAYWRATHTTSSTPMTPLLGRNLGSTALSPYPTAISGLQSQRMRHSNHSTENSPIERRSLMTSDENYHNERARKSRNRLSSSSQHSRDHYPLVEEDYPDSYQDTYKPHRNRGSPGGYSHDSRHRL

SEQ ID NO: 25616 - protein, 334 aa, Homo sapiens; identical to SEQ ID NO: 25600
  REGION 1..334: note = ENSP00000490304

SEQ ID NO: 25617 - protein, 168 aa, Homo sapiens
  REGION 1..168: note = ENSP00000490501
MYDNLYLHGIEDSEAGSADSYTSRPSDSDVSLEEDREAIRQEREQQAAIQLERAKSKPVAFAVKTNVSYCGALDEDVPVPSTAISFDAKDFLHIKEKYNNDWWIGRLVKEGCEIGFIPSPLRLENIRIQQEQKRGRFHGGKSSGNSSSSLGEMVSGTFRATPTSTGFQ

SEQ ID NO: 25618 - protein, 80 aa, Homo sapiens; identical to SEQ ID NO: 25588
  REGION 1..80: note = ENSP00000490298

SEQ ID NO: 25619 - protein, 110 aa, Homo sapiens
  REGION 1..110: note = ENSP00000489772
  VARIANT 1: note = Any amino acid
XDAKDFLHIKEKYNNDWWIGRLVKEGCEIGFIPSPLRLENIRIQQEQKRGRFHGGKSSGNSSSSLGEMVSGTFRATPTSTDGAHSSLRCCTVNASGGVSGAVTERLRGNV

SEQ ID NO: 25620 - protein, 393 aa, Homo sapiens
  REGION 1..393: note = ENSP00000490443
MAGSADSYTSRPSDSDVSLEEDREAIRQEREQQAAIQLERAKSKPVAFAVKTNVSYCGALDEDVPVPSTAISFDAKDFLHIKEKYNNDWWIGRLVKEGCEIGFIPSPLRLENIRIQQEQKRGRFHGGKSSGNSSSSLGEMVSGTFRATPTSTAKQKQKVTEHIPPYDVVPSMRPVVLVGPSLKGYEVTDMMQKALFDFLKHRFDGRISITRVTADISLAKRSVLNNPSKRAIIERSNTRSSLAEVQSEIERIFELARSLQLVVLDADTINHPAQLIKTSLAPIIVHVKVSSPKVLQRLIKSRGKSQSKHLNVQLVAADKLAQCPPEMFDVILDENQLEDACEHLGEYLEAYWRATHTTSSTPMTPLLGRNLGSTALSPYPTAISGLQRKLPRD

SEQ ID NO: 25621 - protein, 458 aa, Homo sapiens
  REGION 1..458: note = ENSP00000201943
MSSSSYAKNGTADGPHSPTSQVARGTTTRRSRLKRSDGSTTSTSFILRQGSADSYTSRPSDSDVSLEEDREAIRQEREQQAAIQLERAKSKPVAFAVKTNVSYCGALDEDVPVPSTAISFDAKDFLHIKEKYNNDWWIGRLVKEGCEIGFIPSPLRLENIRIQQEQKRGRFHGGKSSGNSSSSLGEMVSGTFRATPTSTAKQKQKVTEHIPPYDVVPSMRPVVLVGPSLKGYEVTDMMQKALFDFLKHRFDGRISITRVTADISLAKRSVLNNPSKRAIIERSNTRSSLAEVQSEIERIFELARSLQLVVLDADTINHPAQLIKTSLAPIIVHVKVSSPKVLQRLIKSRGKSQSKHLNVQLVAADKLAQCPPSQRMRHSNHSTENSPIERRSLMTSDENYHNERARKSRNRLSSSSQHSRDHYPLVEEDYPDSYQDTYKPHRNRGSPGGYSHDSRHRL

SEQ ID NO: 25622 - protein, 341 aa, Homo sapiens
  REGION 1..341: note = ENSP00000490910
MYDNLYLHGIEDSEAGSADSYTSRPSDSDVSLEEDREAIRQEREQQAAIQLERAKSKPVAFAVKTNVSYCGALDEDVPVPSTAISFDAKDFLHIKEKYNNDWWIGRLVKEGCEIGFIPSPLRLENIRIQQEQKRGRFHGGKSSGNSSSSLGEMVSGTFRATPTSTAKQKQKVTEHIPPYDVVPSMRPVVLVGPSLKGYEVTDMMQKALFDFLKHRFDGRISITRVTADISLAKRSVLNNPSKRAIIERSNTRSSLAEVQSEIERIFELARSLQLVVLDADTINHPAQLIKTSLAPIIVHVKVSSPKEMFDVILDENQLEDACEHLGEYLEAYWRATHTTSS

SEQ ID NO: 25623 - protein, 79 aa, Homo sapiens
  REGION 1..79: note = ENSP00000490603
  VARIANT 1: note = Any amino acid
XPSPLRLENIRIQQEQKRGRFHGGKSSGNSSSSLGEMVSGTFRATPTSTDGAHSSLRCCTVNASGGVSGAVTERLRGFQ

SEQ ID NO: 25624 - protein, 307 aa, Homo sapiens
  REGION 1..307: note = ENSP00000490337
MYDNLYLHGIEDSEAGSADSYTSRPSDSDVSLEEDREAIRQEREQQAAIQLERAKSKPVAFAVKTNVSYCGALDEDVPVPSTAISFDAKDFLHIKEKYNNDWWIGRLVKEGCEIGFIPSPLRLENIRIQQEQKRGRFHGGKSSGNSSSSLGEMVSGTFRATPTSTAKQKQKVTEHIPPYDVVPSMRPVVLVGPSLKGYEVQISSVTLQFLIEHPGDSHVDACSSRVCFHVGPDGSQCSAWEGRGYRVGLMRPSALSFLSCTLLIFYVLHCLEIPPSKYSQWEDLVKDLLYIKCKEKDFICLDHSHYY

SEQ ID NO: 25625 - protein, 323 aa, Homo sapiens
  REGION 1..323: note = ENSP00000489912
MDVVARGTTTRRSRLKRSDGSTTSTSFILRQGSADSYTSRPSDSDVSLEEDREAIRQEREQQAAIQLERAKSKPVAFAVKTNVSYCGALDEDVPVPSTAISFDAKDFLHIKEKYNNDWWIGRLVKEGCEIGFIPSPLRLENIRIQQEQKRGRFHGGKSSGNSSSSLGEMVSGTFRATPTSTAKQKQKVTEHIPPYDVVPSMRPVVLVGPSLKGYEVQISSVTLQFLIEHPGDSHVDACSSRVCFHVGPDGSQCSAWEGRGYRVGLMRPSALSFLSCTLLIFYVLHCLEIPPSKYSQWEDLVKDLLYIKCKEKDFICLDHSHYY

SEQ ID NO: 25626 - protein, 124 aa, Homo sapiens
  REGION 1..124: note = ENSP00000490787
  VARIANT 1: note = Any amino acid
XDFLHIKEKYNNDWWIGRLVKEGCEIGFIPSPLRLENIRIQQEQKRGRFHGGKSSGNSSSSLGEMVSGTFRATPTSTDGAHSSLRCCTVNASGGVSGAVTERLRGTNIICYSSVLDRAPRRQSC

SEQ ID NO: 25627 - protein, 125 aa, Homo sapiens
  REGION 1..125: note = ENSP00000399242
MAGSADSYTSRPSDSDVSLEEDREAIRQEREQQAAIQLERAKKYNNDWWIGRLVKEGCEIGFIPSPLRLENIRIQQEQKRGRFHGGKSSGNSSSSLGEMVSGTFRATPTSTAKQKQKVTEHIPPY

SEQ ID NO: 25628 - protein, 40 aa, Homo sapiens
  REGION 1..40: note = ENSP00000490249
MAGSADSYTSRPSDSDVSLEEDREAIRQEREQQAAIQLER

SEQ ID NO: 25629 - protein, 315 aa, Homo sapiens
  REGION 1..315: note = ENSP00000005284
MRMCDRGIQMLITTVGAFAAFSLMTIAVGTDYWLYSRGVCRTKSTSDNETSRKNEEVMTHSGLWRTCCLEGAFRGVCKKIDHFPEDADYEQDTAEYLLRAVRASSVFPILSVTLLFFGGLCVAASEFHRSRHNVILSAGIFFVSAGLSNIIGIIVYISANAGDPGQRDSKKSYSYGWSFYFGAFSFIIAEIVGVVAVHIYIEKHQQLRAKSHSEFLKKSTFARLPPYRYRFRRRSSSRSTEPRSRDLSPISKGFHTIPSTDISMFTLSRDPSKITMGTLLNSDRDHAFLQFHNSTPKEFKESLHNNPANRRTTPV

SEQ ID NO: 25630 - protein, 327 aa, Homo sapiens
  REGION 1..327: note = ENSP00000262138
MVRCDRGLQMLLTTAGAFAAFSLMAIAIGTDYWLYSSAHICNGTNLTMDDGPPPRRARGDLTHSGLWRVCCIEGIYKGHCFRINHFPEDNDYDHDSSEYLLRIVRASSVFPILSTILLLLGGLCIGAGRIYSRKNNIVLSAGILFVAAGLSNIIGIIVYISSNTGDPSDKRDEDKKNHYNYGWSFYFGALSFIVAETVGVLAVNIYIEKNKELRFKTKREFLKASSSSPYARMPSYRYRRRRSRSSSRSTEASPSRDVSPMGLKITGAIPMGELSMYTLSREPLKVTTAASYSPDQEASFLQVHDFFQQDLKEGFHVSMLNRRTTPV

SEQ ID NO: 25631 - protein, 275 aa, Homo sapiens
  REGION 1..275: note = ENSP00000436836
MSACGRKALTLLSSVFAVCGLGLLGIAVSTDYWLYLEEGVIVPQNQSTEIKMSLHSGLWRVCFLAGEERGRCFTIEYVMPMNTQLTSESTVNVLKMIRSATPFPLVSLFFMFIGFILNNIGHIRPHRTILAFVSGIFFILSGLSLVVGLVLYISSINDEMLNRTKDAETYFNYKYGWSFAFAAISFLLTESAGVMSVYLFMKRYTAEDMYRPHPGFYRPRLSNCSDYSGQFLHPDAWVRGRSPSDISSEASLQMNSNYPALLKCPDYDQMSSSPC

SEQ ID NO: 25632 - protein, 275 aa, Homo sapiens; identical to SEQ ID NO: 25631
  REGION 1..275: note = ENSP00000303092

SEQ ID NO: 25633 - protein, 425 aa, Homo sapiens
  REGION 1..425: note = ENSP00000270458
LESLKRWNEERGLWCEKGVQVLLTTVGAFAAFGLMTIAISTDYWLYTRALICNTTNLTAGGDDGTPHRGGGGASEKKDPGGLTHSGLWRICCLEGLKRGVCVKINHFPEDTDYDHDSAEYLLRVVRASSIFPILSAILLLLGGVCVAASRVYKSKRNIILGAGILFVAAGLSNIIGVIVYISANAGEPGPKRDEEKKNHYSYGWSFYFGGLSFILAEVIGVLAVNIYIERSREAHCQSRSDLLKAGGGAGGSGGSGPSAILRLPSYRFRYRRRSRSSSRSSEPSPSRDASPGGPGGPGFASTDISMYTLSRDPSKGSVAAGLAGAGGGGGGAVGAFGGAAGGAGGGGGGGGGAGAERDRGGASGFLTLHNAFPKEAGGGVTVTVTGPPAPPAPAPPAPSAPAPGTLAKEAAASNTNTLNRKTTPV

SEQ ID NO: 25634 - protein, 425 aa, Homo sapiens
  REGION 1..425: note = ENSP00000492637
MESLKRWNEERGLWCEKGVQVLLTTVGAFAAFGLMTIAISTDYWLYTRALICNTTNLTAGGDDGTPHRGGGGASEKKDPGGLTHSGLWRICCLEGLKRGVCVKINHFPEDTDYDHDSAEYLLRVVRASSIFPILSAILLLLGGVCVAASRVYKSKRNIILGAGILFVAAGLSNIIGVIVYISANAGEPGPKRDEEKKNHYSYGWSFYFGGLSFILAEVIGVLAVNIYIERSREAHCQSRSDLLKAGGGAGGSGGSGPSAILRLPSYRFRYRRRSRSSSRSSEPSPSRDASPGGPGGPGFASTDISMYTLSRDPSKGSVAAGLAGAGGGGGGAVGAFGGAAGGAGGGGGGGGGAGAERDRGGASGFLTLHNAFPKEAGGGVTVTVTGPPAPPAPAPPAPSAPAPGTLAKEAAASNTNTLNRKTTPV

SEQ ID NO: 25635 - protein, 185 aa, Homo sapiens
  REGION 1..185: note = ENSP00000479414
MQQKSQKKAELLDNEKPAAVVAPITTGYTVKISNYGWDQSDKFVKIYITLTGVHQVPTENVQVHFTERSFDLLVKNLNGKSYSMIVNNLLKPISVEGSSKKVKTDTVLILCRKKVENTRWDYLTQVEKECKEKEKPSYDTETDPSEGLMNVLKKIYEDGDDDMKRTINKAWVESREKQAKGDTEF

SEQ ID NO: 25636 - protein, 50 aa, Homo sapiens
  REGION 1..50: note = ENSP00000403674
MASEELQKDLEEVKVLLEKATRKRVRDALTAEKSKIETEIKNKMQQKSQK

SEQ ID NO: 25637 - protein, 228 aa, Homo sapiens
  REGION 1..228: note = ENSP00000356652
MASEELQKDLEEVKVLLEKATRKRVRDALTAEKSKIETEIKNKMQQKSQKKAELLDNEKPAAVVAPITTGYTVKISNYGWDQSDKFVKIYITLTGVHQVPTENVQVHFTERSFDLLVKNLNGKSYSMIVNNLLKPISVEGSSKKVKTDTVLILCRKKVENTRWDYLTQVEKECKEKEKPSYDTETDPSEGLMNVLKKIYEDGDDDMKRTINKAWVESREKQAKGDTEF

SEQ ID NO: 25638 - protein, 80 aa, Homo sapiens
  REGION 1..80: note = ENSP00000384139
MASEELQKDLEEVKVLLEKATRKRVRDALTAEKSKIETEIKNKMQQKSQKKAELLDNEKPAAVVAPITTGYTDGISQISL

SEQ ID NO: 25639 - protein, 185 aa, Homo sapiens; identical to SEQ ID NO: 25635
  REGION 1..185: note = ENSP00000385771

SEQ ID NO: 25640 - protein, 432 aa, Homo sapiens
  REGION 1..432: note = ENSP00000357106
MGAPAASLLLLLLLFACCWAPGGANLSQDGYWQEQDLELGTLAPLDEAISSTVWSSPDMLASQDSQPWTSDETVVAGGTVVLKCQVKDHEDSSLQWSNPAQQTLYFGEKRALRDNRIQLVTSTPHELSISISNVALADEGEYTCSIFTMPVRTAKSLVTVLGIPQKPIITGYKSSLREKDTATLNCQSSGSKPAARLTWRKGDQELHGEPTRIQEDPNGKTFTVSSSVTFQVTREDDGASIVCSVNHESLKGADRSTSQRIEVLYTPTAMIRPDPPHPREGQKLLLHCEGRGNPVPQQYLWEKEGSVPPLKMTQESALIFPFLNKSDSGTYGCTATSNMGSYKAYYTLNVNDPSPVPSSSSTYHAIIGGIVAFIVFLLLIMLIFLGHYLIRHKGTYLTHEAKGSDDAPDADTAIINAEGGQSGGDDKKEYFI

SEQ ID NO: 25641 - protein, 398 aa, Homo sapiens
  REGION 1..398: note = ENSP00000357107
MGAPAASLLLLLLLFACCWAPGGANLSQDDSQPWTSDETVVAGGTVVLKCQVKDHEDSSLQWSNPAQQTLYFGEKRALRDNRIQLVTSTPHELSISISNVALADEGEYTCSIFTMPVRTAKSLVTVLGIPQKPIITGYKSSLREKDTATLNCQSSGSKPAARLTWRKGDQELHGEPTRIQEDPNGKTFTVSSSVTFQVTREDDGASIVCSVNHESLKGADRSTSQRIEVLYTPTAMIRPDPPHPREGQKLLLHCEGRGNPVPQQYLWEKEGSVPPLKMTQESALIFPFLNKSDSGTYGCTATSNMGSYKAYYTLNVNDPSPVPSSSSTYHAIIGGIVAFIVFLLLIMLIFLGHYLIRHKGTYLTHEAKGSDDAPDADTAIINAEGGQSGGDDKKEYFI

SEQ ID NO: 25642 - protein, 234 aa, Homo sapiens
  REGION 1..234: note = ENSP00000387802
MGAPAASLLLLLLLFACCWAPGGANLSQDDSQPWTSDETVVAGGTVVLKCQVKDHEDSSLQWSNPAQQTLYFGEKRALRDNRIQLVTSTPHELSISISNVALADEGEYTCSIFTMPVRTAKSLVTVLGIPQKPIITGYKSSLREKDTATLNCQSSGSKPAARLTWRKGDQELHGEPTRIQEDPNDTPTAMIRPDPPHPREGQKLLLHCEGRGNPVPQQYLWEKEGSVPPLKMTQ

SEQ ID NO: 25643 - protein, 1353 aa, Homo sapiens
  REGION 1..1353: note = ENSP00000373215
MLDPSSSEEESDEIVEEESGKEVLGSAPSGARLSPSRTSEGSAGSAGLGGGGAGAGAGVGAGGGGGSGASSGGGAGGLQPSSRAGGGRPSSPSPSVVSEKEKEELERLQKEEEERKKRLQLYVFVMRCIAYPFNAKQPTDMARRQQKISKQQLQTVKDRFQAFLNGETQIMADEAFMNAVQSYYEVFLKSDRVARMVQSGGCSANDSREVFKKHIEKRVRSLPEIDGLSKETVLSSWMAKFDAIYRGEEDPRKQQARMTASAASELILSKEQLYEMFQNILGIKKFEHQLLYNACQLDNPDEQAAQIRRELDGRLQMADQIARERKFPKFVSKEMENMYIEELKSSVNLLMANLESMPVSKGGEFKLQKLKRSHNASIIDMGEESENQLSKSDVVLSFSLEVVIMEVQGLKSLAPNRIVYCTMEVEGGEKLQTDQAEASKPTWGTQGDFSTTHALPAVKVKLFTESTGVLALEDKELGRVILHPTPNSPKQSEWHKMTVSKNCPDQDLKIKLAVRMDKPQNMKHSGYLWAIGKNVWKRWKKRFFVLVQVSQYTFAMCSYREKKAEPQELLQLDGYTVDYTDPQPGLEGGRAFFNAVKEGDTVIFASDDEQDRILWVQAMYRATGQSHKPVPPTQVQKLNAKGGNVPQLDAPISQFYADRAQKHGMDEFISSNPCNFDHASLFEMVQRLTLDHRLNDSYSCLGWFSPGQVFVLDEYCARNGVRGCHRHLCYLRDLLERAENGAMIDPTLLHYSFAFCASHVHGNRPDGIGTVTVEEKERFEEIKERLRVLLENQITHFRYCFPFGRPEGALKATLSLLERVLMKDIVTPVPQEEVKTVIRKCLEQAALVNYSRLSEYAKIEENQKDAENVGRLITPAKKLEDTIRLAELVIEVLQQNEEHHAEPHVDKGEAFAWWSDLMVEHAETFLSLFAVDMDAALEVQPPDTWDSFPLFQLLNDFLRTDYNLCNGKFHKHLQDLFAPLVVRYVDLMESSIAQSIHRGFERESWEPVKSLTSNLPNVNLPNVNLPKVPNLPVNIPLGIPQMPTFSAPSWMAAIYDADNGSGTSEDLFWKLDALQTFIRDLHWPEEEFGKHLEQRLKLMASDMIESCVKRTRIAFEVKLQKTSRSTDFRVPQSICTMFNVMVDAKAQSTKLCSMEMGQEHQYHSKIDELIEETVKEMITLLVAKFVTILEGVLAKLSRYDEGTLFSSFLSFTVKAASKYVDVPKPGMDVADAYVTFVRHSQDVLRDKVNEEMYIERLFDQWYNSSMNVICTWLTDRMDLQLHIYQLKTLIRMVKKTYRDFRLQGVLDSTLNSKTYETIRNRLTVEEATASVSEGGGLQGISMKDSDEEDEEDD

SEQ ID NO: 25644 - protein, 345 aa, Homo sapiens
  REGION 1..345: note = ENSP00000418889
  VARIANT 1: note = Any amino acid
XLPNVNLPNVNLPKVPNLPVNIPLGIPQMPTFSAPSWMAAIYDADNGSGTSEDLFWKLDALQTFIRDLHWPEEEFGKHLEQRLKLMASDMIESCVKRTRIAFEVKLQKTSRSTDFRVPQSICTMFNVMVDAKAQSTKLCSMEMGQEFAKMWHQYHSKIDELIEETVKEMITLLVAKFVTILEGVLAKLSRYDEGTLFSSFLSFTVKAASKYVDVPKPGMDVADAYVTFVRHSQDVLRDKVNEEMYIERLFDQWYNSSMNVICTWLTDRMDLQLHIYQLKTLIRMVKKTYRDFRLQGVLDSTLNSKTYETIRNRLTVEEATASVSEGGGLQGISMKDSDEEDEEDD

SEQ ID NO: 25645 - protein, 1274 aa, Homo sapiens
  REGION 1..1274: note = ENSP00000350632
MLDPSSSEEESDEIVEEESGKEVLGSAPSGARLSPSRTSEGSAGSAGLGGGGAGAGAGVGAGGGGGSGASSGGGAGGLQPSSRAGGGRPSSPSPSVVSEKEKEELERLQKEEEERKKRLQLYVFVMRCIAYPFNAKQPTDMARRQQKISKQQLQTVKDRFQAFLNGETQIMADEAFMNAVQSYYEVFLKSDRVARMVQSGGCSANDSREVFKKHIEKRVRSLPEIDGLSKETVLSSWMAKFDAIYRGEEDPRKQQARMTASAASELILSKEQLYEMFQNILGIKKFEHQLLYNACQLDNPDEQAAQIRRELDGRLQMADQIARERKFPKFVSKEMENMYIEELKSSVNLLMANLESMPVSKGGEFKLQKLKRSHNASIIDMGEESENQLSKSDVVLSFSLEVVIMEVQGLKSLAPNRIVYCTMEVEGGEKLQTDQAEASKPTWGTQGDFSTTHALPAVKVKLFTESTGVLALEDKELGRVILHPTPNSPKQSEWHKMTVSKNCPDQDLKIKLAVRMDKPQNMKHSGYLWAIGKNVWKRWKKRFFVLVQVSQYTFAMCSYREKKAEPQELLQLDGYTVDYTDPQPGLEGGRAFFNAVKEGDTVIFASDDEQDRILWVQAMYRATGQSHKPVPPTQVQKLNAKGGNVPQLDAPISQFYADRAQKHGMDEFISSNPCNFDHASLFEMGWFSPGQVFVLDEYCARNGVRGCHRHLCYLRDLLERAENGAMIDPTLLHYSFAFCASHVHGNRPDGIGTVTVEEKERFEEIKERLRVLLENQITHFRYCFPFGRPEGALKATLSLLERVLMKDIVTPVPQEEVKTVIRKCLEQAALVNYSRLSEYAKIEENVGRLITPAKKLEDTIRLAELVIEVLQQNEEHHAEAFAWWSDLMVEHAETFLSLFAVDMDAALEVQPPDTWDSFPLFQLLNDFLRTDYNLCNGKFHKHLQDLFAPLVVRYVDLMESSIAQSIHRGFERESWEPVNNGSGTSEDLFWKLDALQTFIRDLHWPEEEFGKHLEQRLKLMASDMIESCVKRTRIAFEVKLQKTSRSTDFRVPQSICTMFNVMVDAKAQSTKLCSMEMGQEHQYHSKIDELIEETVKEMITLLVAKFVTILEGVLAKLSRYDEGTLFSSFLSFTVKAASKYVDVPKPGMDVADAYVTFVRHSQDVLRDKVNEEMYIERLFDQWYNSSMNVICTWLTDRMDLQLHIYQLKTLIRMVKKTYRDFRLQGVLDSTLNSKTYETIRNRLTVEEATASVSEGGGLQGISMKDSDEEDEEDD

SEQ ID NO: 25646 - protein, 1314 aa, Homo sapiens
  REGION 1..1314: note = ENSP00000283269
MLDPSSSEEESDEIVEEESGKEVLGSAPSGARLSPSRTSEGSAGSAGLGGGGAGAGAGVGAGGGGGSGASSGGGAGGLQPSSRAGGGRPSSPSPSVVSEKEKEELERLQKEEEERKKRLQLYVFVMRCIAYPFNAKQPTDMARRQQKISKQQLQTVKDRFQAFLNGETQIMADEAFMNAVQSYYEVFLKSDRVARMVQSGGCSANDSREVFKKHIEKRVRSLPEIDGLSKETVLSSWMAKFDAIYRGEEDPRKQQARMTASAASELILSKEQLYEMFQNILGIKKFEHQLLYNACQLDNPDEQAAQIRRELDGRLQMADQIARERKFPKFVSKEMENMYIEELKSSVNLLMANLESMPVSKGGEFKLQKLKRSHNASIIDMGEESENQLSKSDVVLSFSLEVVIMEVQGLKSLAPNRIVYCTMEVEGGEKLQTDQAEASKPTWGTQGDFSTTHALPAVKVKLFTESTGVLALEDKELGRVILHPTPNSPKQSEWHKMTVSKNCPDQDLKIKLAVRMDKPQNMKHSGYLWAIGKNVWKRWKKRFFVLVQVSQYTFAMCSYREKKAEPQELLQLDGYTVDYTDPQPGLEGGRAFFNAVKEGDTVIFASDDEQDRILWVQAMYRATGQSHKPVPPTQVQKLNAKGGNVPQLDAPISQFYADRAQKHGMDEFISSNPCNFDHASLFEMVQRLTLDHRLNDSYSCLGWFSPGQVFVLDEYCARNGVRGCHRHLCYLRDLLERAENGAMIDPTLLHYSFAFCASHVHGNRPDGIGTVTVEEKERFEEIKERLRVLLENQITHFRYCFPFGRPEGALKATLSLLERVLMKDIVTPVPQEEVKTVIRKCLEQAALVNYSRLSEYAKIEGKKREMYEHPVFCLASQVMDLTIQNVGRLITPAKKLEDTIRLAELVIEVLQQNEEHHAEAFAWWSDLMVEHAETFLSLFAVDMDAALEVQPPDTWDSFPLFQLLNDFLRTDYNLCNGKFHKHLQDLFAPLVVRYVDLMESSIAQSIHRGFERESWEPVNNGSGTSEDLFWKLDALQTFIRDLHWPEEEFGKHLEQRLKLMASDMIESCVKRTRIAFEVKLQKTSRSTDFRVPQSICTMFNVMVDAKAQSTKLCSMEMGQEHQYHSKIDELIEETVKEMITLLVAKFVTILEGVLAKLSRYDEGTLFSSFLSFTVKAASKYVDVPKPGMDVADAYVTFVRHSQDVLRDKVNEEMYIERLFDQWYNSSMNVICTWLTDRMDLQLHIYQLKTLIRMVKKTYRDFRLQGVLDSTLNSKTYETIRNRLTVEEATASVSEGGGLQGISMKDSDEEDEEDD

SEQ ID NO: 25647 - protein, 190 aa, Homo sapiens
  REGION 1..190: note = ENSP00000417568
  VARIANT 1: note = Any amino acid
XKHLEQRLKLMASDMIESCVKRTRIAFEVKLQKTSRSTDFRVPQSICTMFNVMVDAKAQSTKLCSMEMGQEHQYHSKIDELIEETVKEMITLLVAKFVTILEGVLAKLSRYDEGTLFSSFLSFTKPGMDVADAYVTFVRHSQDVLRDKVNEEMYIERLFDQWYNSSMNVICTWLTDRMDLQLHIYQLKTL

SEQ ID NO: 25648 - protein, 311 aa, Homo sapiens
  REGION 1..311: note = ENSP00000418110
  VARIANT 1: note = Any amino acid
XNDSYSCLGWFSPGQVFVLDEYCARNGVRGCHRHLCYLRDLLERAENGAMIDPTLLHYSFAFCASHVHGNRPDGIGTVTVEEKERFEEIKERLRVLLENQITHFRYCFPFGRPEGALKATLSLLERVLMKDIVTPVPQEEVKTVIRKCLEQAALVNYSRLSEYAKIEENQKDAENVGRLITPAKKLEDTIRLAELVIEVLQQNEEHHAEGKEAFAWWSDLMVEHAETFLSLFAVDMDAALEVQPPDTWDSFPLFQLLNDFLRTDYNLCNGKFHKHLQDLFAPLVVRYVDLMESSIAQSIHRGFERESWEPV

SEQ ID NO: 25649 - protein, 240 aa, Homo sapiens
  REGION 1..240: note = ENSP00000417827
  VARIANT 1: note = Any amino acid
XADRAQKHGMDEFISSNPCNFDHASLFEMVQRLTLDHRLNDSYSCLGWFSPGQVFVLDEYCARNGVRGCHRHLCYLRDLLERAENGAMIDPTLLHYSFAFCASHVHGNSQQMHVYLSGLPPNTDPEGSKTPSPPEPEAKKDTKKESKKRKDSKTQANQELKRPDGIGTVTVEEKERFEEIKERLRVLLENQITHFRYCFPFGRPEGALKATLSLLERVLMKDIVTPVPQEEVKTVIRKCL

SEQ ID NO: 25650 - protein, 212 aa, Homo sapiens
  REGION 1..212: note = ENSP00000439528
QDLKIKLAVRMDKPQNMKHSGYLWAIGKNVWKRWKKRFFVLVQVSQYTFAMCSYREKKAEPQELLQLDGYTVDYTDPQPGLEGGRAFFNAVKEGDTVIFASDDEQDRILWVQAMYRATGQSHKPVPPTQVQKLNAKGGNVPQLDAPISQFSGLKDADRAQKHGMDEFISSNPCNFDHASLFEMVQRLTLDHRLNDSYSCLGWFSPGQVFVLD

SEQ ID NO: 25651 - protein, 457 aa, Homo sapiens
  REGION 1..457: note = ENSP00000418736
MLDPSSSEEESDEIVEEESGKEVLGSAPSGARLSPSRTSEGSAGSAGLGGGGAGAGAGVGAGGGGGSGASSGGGAGGLQPSSRAGGGRPSSPSPSVVSEKEKEELERLQKEEEERKKRLQLYVFVMRCIAYPFNAKQPTDMARRQQKISKQQLQTVKDRFQAFLNGETQIMADEAFMNAVQSYYEVFLKSDRVARMVQSGGCSANDSREVFKKHIEKRVRSLPEIDGLSKETVLSSWMAKFDAIYRGEEDPRKQQARMTASAASELILSKEQLYEMFQNILGIKKFEHQLLYNACQLDNPDEQAAQIRRELDGRLQMADQIARERKFPKFVSKEMENMYIEELKSSVNLLMANLESMPVSKGGEFKLQKLKRSHNASIIDMGEESENQLSKSDVVLSFSLEVVIMEVQGLKSLAPNRIVYCTMEVEGGEKLQTDQAEASKPTVIRRNRREQLPHSAI

SEQ ID NO: 25652 - protein, 222 aa, Homo sapiens
  REGION 1..222: note = ENSP00000482556
MFNVMVDAKAQSTKLCSMEMGQEFAKMWHQYHSKIDELIEETVKEMITLLVAKFVTILEGVLAKLSRYDEGTLFSSFLSFTVKAASKYVDVPKPGMDVADAYVTFVRHSQDVLRDKVNEEMYIERLFDQWYNSSMNVICTWLTDRMDLQLHIYQLKTLIRMVKKTYRDFRLQGVLDSTLNSKTYETIRNRLTVEEATASVSEGGGLQGISMKDSDEEDEEDD

SEQ ID NO: 25653 - protein, 1344 aa, Homo sapiens
  REGION 1..1344: note = ENSP00000484365
MLDPSSSEEESDEIVEEESGKEVLGSAPSGARLSPSRTSEGSAGSAGLGGGGAGAGAGVGAGGGGGSGASSGGGAGGLQPSSRAGGGRPSSPSPSVVSEKEKEELERLQKEEEERKKRLQLYVFVMRCIAYPFNAKQPTDMARRQQKISKQQLQTVKDRFQAFLNGETQIMADEAFMNAVQSYYEVFLKSDRVARMVQSGGCSANDSREVFKKHIEKRVRSLPEIDGLSKETVLSSWMAKFDAIYRGEEDPRKQQARMTASAASELILSKEQLYEMFQNILGIKKFEHQLLYNACQLDNPDEQAAQIRRELDGRLQMADQIARERKFPKFVSKEMENMYIEELKSSVNLLMANLESMPVSKGGEFKLQKLKRSHNASIIDMGEESENQLSKSDVVLSFSLEVVIMEVQGLKSLAPNRIVYCTMEVEGGEKLQTDQAEASKPTWGTQGDFSTTHALPAVKVKLFTESTGVLALEDKELGRVILHPTPNSPKQSEWHKMTVSKNCPDQDLKIKLAVRMDKPQNMKHSGYLWAIGKNVWKRWKKRFFVLVQVSQYTFAMCSYREKKAEPQELLQLDGYTVDYTDPQPGLEGGRAFFNAVKEGDTVIFASDDEQDRILWVQAMYRATGQSHKPVPPTQVQKLNAKGGNVPQLDAPISQFYADRAQKHGMDEFISSNPCNFDHASLFEMVQRLTLDHRLNDSYSCLGWFSPGQVFVLDEYCARNGVRGCHRHLCYLRDLLERAENGAMIDPTLLHYSFAFCASHVHGNSQQMHVYLSGLPPNTDPEGSKTPSPPEPEAKKDTKKESKKRKDSKTQANQELKRPDGIGTVTVEEKERFEEIKERLRVLLENQITHFRYCFPFGRPEGALKATLSLLERVLMKDIVTPVPQEEVKTVIRKCLEQAALVNYSRLSEYAKIEENVGRLITPAKKLEDTIRLAELVIEVLQQNEEHHAEAFAWWSDLMVEHAETFLSLFAVDMDAALEVQPPDTWDSFPLFQLLNDFLRTDYNLCNGKFHKHLQDLFAPLVVRYVDLMESSIAQSIHRGFERESWEPVNNGSGTSEDLFWKLDALQTFIRDLHWPEEEFGKHLEQRLKLMASDMIESCVKRTRIAFEVKLQKTSRSTDFRVPQSICTMFNVMVDAKAQSTKLCSMEMGQEHQYHSKIDELIEETVKEMITLLVAKFVTILEGVLAKLSRYDEGTLFSSFLSFTVKAASKYVDVPKPGMDVADAYVTFVRHSQDVLRDKVNEEMYIERLFDQWYNSSMNVICTWLTDRMDLQLHIYQLKTLIRMVKKTYRDFRLQGVLDSTLNSKTYETIRNRLTVEEATASVSEGGGLQGISMKDSDEEDEEDD

SEQ ID NO: 25654 - protein, 490 aa, Homo sapiens
  REGION 1..490: note = ENSP00000419418
  VARIANT 1: note = Any amino acid
XYTRLTEYAKIEGPAEKETETMNQASPARKLEEILHLAELCIEVLQQNEEHHAEGREAFAWWPDLLAEHAEKFWALFTVDMDTALEAQPQDSWDSFPLFQLLNNFLRNDTLLCNGKFHKHLQEIFVPLVVRYVDLMESSIAQSIHRGFEQETWQPVKNIANSLPNVALPKVPSLPLNLPQIPNISTASWMPSLYESTNGSATSEDLFWKLDALQMFVFDLHWPEQEFAHHLEQRLKLMASDMLEACVKRTRTAFELKLQKASKTTDLRIPASVCTMFNVLVDAKKQSTKLCALDGGQEQQYHSKIDDLIDNSVKEIISLLVSKFVSVLEGVLSKLSRYDEGTFFSSILSFTVKAAAKYVDVPKPGMDLADTYIMFVRQNQDILREKVNEEMYIEKLFDQWYSSSMKVICVWLTDRLDLQLHIYQLKTLIKIVKKTYRDFRLQGVLEGTLNSKTYDTVHRRLTVEEATASVSEGGGLQGITMKDSDEEEEG

SEQ ID NO: 25655 - protein, 1255 aa, Homo sapiens
  REGION 1..1255: note = ENSP00000400401
MLDPSSSEEESDEGLEEESRDVLVAAGSSQRAPPAPTREGRRDAPGRAGGGGAARSVSPSPSVLSEGRDEPQRQLDDEQERRIRLQLYVFVVRCIAYPFNAKQPTDMARRQQKLNKQQLQLLKERFQAFLNGETQIVADEAFCNAVRSYYEVFLKSDRVARMVQSGGCSANDFREVFKKNIEKRVRSLPEIDGLSKETVLSSWIAKYDAIYRGEEDLCKQPNRMALSAVSELILSKEQLYEMFQQILGIKKLEHQLLYNACQLDNADEQAAQIRRELDGRLQLADKMAKERKFPKFIAKDMENMYIEELRSSVNLLMANLESLPVSKGGPEFKLQKLKRSQNSAFLDIGDENEIQLSKSDVVLSFTLEIVIMEVQGLKSVAPNRIVYCTMEVEGEKLQTDQAEASRPQWGTQGDFTTTHPRPVVKVKLFTESTGVLALEDKELGRVILYPTSNSSKSAELHRMVVPKNSQDSDLKIKLAVRMDKPAHMKHSGYLYALGQKVWKRWKKRYFVLVQVSQYTFAMCSYREKKSEPQELMQLEGYTVDYTDPHPGLQGGCMFFNAVKEGDTVIFASDDEQDRILWVQAMYRATGQSYKPVPAIQTQKLNPKGGTLHADAQLYADRFQKHGMDEFISANPCKLDHAFLFRILQRQTLDHRLNDSYSCLGWFSPGQVFVLDEYCARYGVRGCHRHLCYLAELMEHSENGAVIDPTLLHYSFAFCASHVHGNRPDGIGTVSVEEKERFEEIKERLSSLLENQISHFRYCFPFGRPEGALKATLSLLERVLMKDIATPIPAEEVKKVVRKCLEKAALINYTRLTEYAKIEETMNQASPARKLEEILHLAELCIEVLQQNEEHHAEAFAWWPDLLAEHAEKFWALFTVDMDTALEAQPQDSWDSFPLFQLLNNFLRNDTLLCNGKFHKHLQEIFVPLVVRYVDLMESSIAQSIHRGFEQETWQPVNNGSATSEDLFWKLDALQMFVFDLHWPEQEFAHHLEQRLKLMASDMLEACVKRTRTAFELKLQKASKTTDLRIPASVCTMFNVLVDAKKQSTKLCALDGGQEFGSQWQQYHSKIDDLIDNSVKEIISLLVSKFVSVLEGVLSKLSRYDEGTFFSSILSFTVKAAAKYVDVPKPGMDLADTYIMFVRQNQDILREKVNEEMYIEKLFDQWYSSSMKVICVWLTDRLDLQLHIYQLKTLIKIVKKTYRDFRLQGVLEGTLNSKTYDTVHRRLTVEEATASVSEGGGLQGITMKDSDEEEEG

SEQ ID NO: 25656 - protein, 1296 aa, Homo sapiens
  REGION 1..1296: note = ENSP00000398481
MLDPSSSEEESDEGLEEESRDVLVAAGSSQRAPPAPTREGRRDAPGRAGGGGAARSVSPSPSVLSEGRDEPQRQLDDEQERRIRLQLYVFVVRCIAYPFNAKQPTDMARRQQKLNKQQLQLLKERFQAFLNGETQIVADEAFCNAVRSYYEVFLKSDRVARMVQSGGCSANDFREVFKKNIEKRVRSLPEIDGLSKETVLSSWIAKYDAIYRGEEDLCKQPNRMALSAVSELILSKEQLYEMFQQILGIKKLEHQLLYNACQLDNADEQAAQIRRELDGRLQLADKMAKERKFPKFIAKDMENMYIEELRSSVNLLMANLESLPVSKGGPEFKLQKLKRSQNSAFLDIGDENEIQLSKSDVVLSFTLEIVIMEVQGLKSVAPNRIVYCTMEVEGEKLQTDQAEASRPQWGTQGDFTTTHPRPVVKVKLFTESTGVLALEDKELGRVILYPTSNSSKSAELHRMVVPKNSQDSDLKIKLAVRMDKPAHMKHSGYLYALGQKVWKRWKKRYFVLVQVSQYTFAMCSYREKKSEPQELMQLEGYTVDYTDPHPGLQGGCMFFNAVKEGDTVIFASDDEQDRILWVQAMYRATGQSYKPVPAIQTQKLNPKGGTLHADAQLSGKDADRFQKHGMDEFISANPCKLDHAFLFRILQRQTLDHRLNDSYSCLGWFSPGQVFVLDEYCARYGVRGCHRHLCYLAELMEHSENGAVIDPTLLHYSFAFCASHVHGNRPDGIGTVSVEEKERFEEIKERLSSLLENQISHFRYCFPFGRPEGALKATLSLLERVLMKDIATPIPAEEVKKVVRKCLEKAALINYTRLTEYAKIEETMNQASPARKLEEILHLAELCIEVLQQNEEHHAEGREAFAWWPDLLAEHAEKFWALFTVDMDTALEAQPQDSWDSFPLFQLLNNFLRNDTLLCNGKFHKHLQEIFVPLVVRYVDLMESSIAQSIHRGFEQETWQPVKNIANSLPNVALPKVPSLPLNLPQIPNISTASWMPSLYESTNGSATSEDLFWKLDALQMFVFDLHWPEQEFAHHLEQRLKLMASDMLEACVKRTRTAFELKLQKASKTTDLRIPASVCTMFNVLVDAKKQSTKLCALDGGQEQQYHSKIDDLIDNSVKEIISLLVSKFVSVLEGVLSKLSRYDEGTFFSSILSFTVKAAAKYVDVPKPGMDLADTYIMFVRQNQDILREKVNEEMYIEKLFDQWYSSSMKVICVWLTDRLDLQLHIYQLKTLIKIVKKTYRDFRLQGVLEGTLNSKTYDTVHRRLTVEEATASVSEGGGLQGITMKDSDEEEEG

SEQ ID NO: 25657 - protein, 899 aa, Homo sapiens
  REGION 1..899: note = ENSP00000380833
  VARIANT 1: note = Any amino acid
XEIQLSKSDVVLSFTLEIVIMEVQGLKSVAPNRIVYCTMEVEGEKLQTDQAEASRPQWGTQGDFTTTHPRPVVKVKLFTESTGVLALEDKELGRVILYPTSNSSKSAELHRMVVPKNSQDSDLKIKLAVRMDKPAHMKHSGYLYALGQKVWKRWKKRYFVLVQVSQYTFAMCSYREKKSEPQELMQLEGYTVDYTDPHPGLQGGCMFFNAVKEGDTVIFASDDEQDRILWVQAMYRATGQSYKPVPAIQTQKLNPKGGTLHADAQLYADRFQKHGMDEFISANPCKLDHAFLFRILQRQTLDHRLNDSYSCLGWFSPGQVFVLDEYCARYGVRGCHRHLCYLAELMEHSENGAVIDPTLLHYSFAFCASHVHGNRPDGIGTVSVEEKERFEEIKERLSSLLENQISHFRYCFPFGRPEGALKATLSLLERVLMKDIATPIPAEEVKKVVRKCLEKAALINYTRLTEYAKIEETMNQASPARKLEEILHLAELCIEVLQQNEEHHAEAFAWWPDLLAEHAEKFWALFTVDMDTALEAQPQDSWDSFPLFQLLNNFLRNDTLLCNGKFHKHLQEIFVPLVVRYVDLMESSIAQSIHRGFEQETWQPVNNGSATSEDLFWKLDALQMFVFDLHWPEQEFAHHLEQRLKLMASDMLEACVKRTRTAFELKLQKASKTTDLRIPASVCTMFNVLVDAKKQSTKLCALDGGQEQQYHSKIDDLIDNSVKEIISLLVSKFVSVLEGVLSKLSRYDEGTFFSSILSFTVKAAAKYVDVPKPGMDLADTYIMFVRQNQDILREKVNEEMYIEKLFDQWYSSSMKVICVWLTDRLDLQLHIYQLKTLIKIVKKTYRDFRLQGVLEGTLNSKTYDTVHRRLTVEEATASVSEGGGLQGITMKDSDEEEEG

SEQ ID NO: 25658 - protein, 1294 aa, Homo sapiens [sequence omitted]

SEQ ID NO: 25659 - protein, 1301 aa, Homo sapiens [sequence omitted]

SEQ ID NO: 25660 - protein, 1194 aa, Homo sapiens
  REGION 1..1194: note = ENSP00000325581
MARRQQKLNKQQLQLLKERFQAFLNGETQIVADEAFCNAVRSYYEVFLKSDRVARMVQSGGCSANDFREVFKKNIEKRVRSLPEIDGLSKETVLSSWIAKYDAIYRGEEDLCKQPNRMALSAVSELILSKEQLYEMFQQILGIKKLEHQLLYNACQLDNADEQAAQIRRELDGRLQLADKMAKERKFPKFIAKDMENMYIEELRSSVNLLMANLESLPVSKGGPEFKLQKLKRSQNSAFLDIGDENEIQLSKSDVVLSFTLEIVIMEVQGLKSVAPNRIVYCTMEVEGEKLQTDQAEASRPQWGTQGDFTTTHPRPVVKVKLFTESTGVLALEDKELGRVILYPTSNSSKSAELHRMVVPKNSQDSDLKIKLAVRMDKPAHMKHSGYLYALGQKVWKRWKKRYFVLVQVSQYTFAMCSYREKKSEPQELMQLEGYTVDYTDPHPGLQGGCMFFNAVKEGDTVIFASDDEQDRILWVQAMYRATGQSYKPVPAIQTQKLNPKGGTLHADAQLSGKDADRFQKHGMDEFISANPCKLDHAFLFRILQRQTLDHRLNDSYSCLGWFSPGQVFVLDEYCARYGVRGCHRHLCYLAELMEHSENGAVIDPTLLHYSFAFCASHVHGNRPDGIGTVSVEEKERFEEIKERLSSLLENQISHFRYCFPFGRPEGALKATLSLLERVLMKDIATPIPAEEVKKVVRKCLEKAALINYTRLTEYAKIEGPAEKETETMNQASPARKLEEILHLAELCIEVLQQNEEHHAEAFAWWPDLLAEHAEKFWALFTVDMDTALEAQPQDSWDSFPLFQLLNNFLRNDTLLCNGKFHKHLQEIFVPLVVRYVDLMESSIAQSIHRGFEQETWQPVKNIANSLPNVALPKVPSLPLNLPQIPNISTASWMPSLYESTNGSATSEDLFWKLDALQMFVFDLHWPEQEFAHHLEQRLKLMASDMLEACVKRTRTAFELKLQKASKTTDLRIPASVCTMFNVLVDAKKQSTKLCALDGGQEQQYHSKIDDLIDNSVKEIISLLVSKFVSVLEGVLSKLSRYDEGTFFSSILSFTVKAAAKYVDVPKPGMDLADTYIMFVRQNQDILREKVNEEMYIEKLFDQWYSSSMKVICVWLTDRLDLQLHIYQLKTLIKIVKKTYRDFRLQGVLEGTLNSKTYDTVHRRLTVEEATASVSEGGGLQGITMKDSDEEEEG

SEQ ID NO: 25661 - protein, 261 aa, Homo sapiens
  REGION 1..261: note = ENSP00000265431
MAESHLQSSLITASQFFEIWLHFDADGSGYLEGKELQNLIQELQQARKKAGLELSPEMKTFVDQYGQRDDGKIGIVELAHVLPTEENFLLLFRCQQLKSCEEFMKTWRKYDTDHSGFIETEELKNFLKDLLEKANKTVDDTKLAEYTDLMLKLFDSNNDGKLELTEMARLLPVQENFLLKFQGIKMCGKEFNKAFELYDQDGNGYIDENELDALLKDLCEKNKQDLDINNITTYKKNIMALSDGGKLYRTDLALILCAGDN

SEQ ID NO: 25662 - protein, 204 aa, Homo sapiens
  REGION 1..204: note = ENSP00000429602
MKTFVDQYGQRDDGKIGIVELAHVLPTEENFLLLFRCQQLKSCEEFMKTWRKYDTDHSGFIETEELKNFLKDLLEKANKTVDDTKLAEYTDLMLKLFDSNNDGKLELTEMARLLPVQENFLLKFQGIKMCGKEFNKAFELYDQDGNGYIDENELDALLKDLCEKNKQDLDINNITTYKKNIMALSDGGKLYRTDLALILCAGDN

SEQ ID NO: 25663 - protein, 119 aa, Homo sapiens
  REGION 1..119: note = ENSP00000429246
MKTFVDQYGQRDDGKIGIVELAHVLPTEENFLLLFRCQQLKSCEEFMKTWRKYDTDHSGFIETEELKNFLKDLLEKANKTVDDTKLAEYTDLMLKLFDSNNDGKLELTEMARLLPVQEN

SEQ ID NO: 25664 - protein, 102 aa, Homo sapiens
  REGION 1..102: note = ENSP00000430281
MKTFVDQYGQRDDGKIGIVELAHVLPTEENFLLLFRCQQLKSCEEFMKTWRKYDTDHSGFIETEELKNFLKDLLEKANKTVDDTKLAEYTDLMLKLFDSNND

SEQ ID NO: 25665 - skipped

SEQ ID NO: 25666 - protein, 271 aa, Homo sapiens
  REGION 1..271: note = ENSP00000307508
MAGPQQQPPYLHLAELTASQFLEIWKHFDADGNGYIEGKELENFFQELEKARKGSGMMSKSDNFGEKMKEFMQKYDKNSDGKIEMAELAQILPTEENFLLCFRQHVGSSAEFMEAWRKYDTDRSGYIEANELKGFLSDLLKKANRPYDEPKLQEYTQTILRMFDLNGDGKLGLSEMSRLLPVQENFLLKFQGMKLTSEEFNAIFTFYDKDRSGYIDEHELDALLKDLYEKNKKEMNIQQLTNYRKSVMSLAEAGKLYRKDLEIVLCSEPPM

SEQ ID NO: 25667 - protein, 235 aa, Homo sapiens
  REGION 1..235: note = ENSP00000454639
  VARIANT 1: note = Any amino acid
XAGPQQQPPYLHLAELTASQFLEIWKHFDADGNGYIEGKELENFFQELEKARKGSGMMSKSDNFGEKMKEFMQKYDKNSDGKIEMAELAQILPTEENFLLCFRQHVGSSAEFMEAWRKYDTDRSGYIEANELKGFLSDLLKKANRPYDEPKLQEYTQTILRMFDLNGDGKLGLSEMSRLLPVQENFLLKFQGMKLTSEEFNAIFTFYDKEMNIQQLTNYRKSVMSLAEAGKLYRK

SEQ ID NO: 25668 - protein, 158 aa, Homo sapiens
  REGION 1..158: note = ENSP00000454467
  VARIANT 1: note = Any amino acid
XLENFFQELEKARKGSGMLAQILPTEENFLLCFRQHVGSSAEFMEAWRKYDTDRSGYIEANELKGFLSDLLKKANRPYDEPKLQEYTQTILRMFDLNGDGKLGLSEILLPVQENFLLKFQGMKLTSEEFNAIFTFYDKDRSGYIDEHELDALLKDLYE

SEQ ID NO: 25669 - protein, 192 aa, Homo sapiens
  REGION 1..192: note = ENSP00000340294
MAGPQQQPPYLHLAELTASQFLEIWKHFDADGNGYIEGKELENFFQELEKARKGSGMMSKSDNFGEKMKEFMQKYDKNSDGKIEMAELAQILPTEENFLLCFRQHVGSSAEFMEAWRKYDTDRSGYIEANELKGFLSDLLKKANRPYDEPKLQEYTQTILRMFDLNGDGKLGLSEMSRIEAATLTSMSWMPF

SEQ ID NO: 25670 - protein, 192 aa, Homo sapiens; identical to SEQ ID NO: 25669
  REGION 1..192: note = ENSP00000489007

SEQ ID NO: 25671 - protein, 271 aa, Homo sapiens; identical to SEQ ID NO: 25666
  REGION 1..271: note = ENSP00000488916

SEQ ID NO: 25672 - protein, 235 aa, Homo sapiens; identical to SEQ ID NO: 25667
  REGION 1..235: note = ENSP00000489176
  VARIANT 1: note = Any amino acid

SEQ ID NO: 25673 - protein, 158 aa, Homo sapiens; identical to SEQ ID NO: 25668
  REGION 1..158: note = ENSP00000489458
  VARIANT 1: note = Any amino acid

SEQ ID NO: 25674 - protein, 461 aa, Homo sapiens [sequence omitted]

SEQ ID NO: 25675 - protein, 461 aa, Homo sapiens [sequence omitted]

SEQ ID NO: 25676 - protein, 461 aa, Homo sapiens [sequence omitted]

SEQ ID NO: 25677 - protein, 77 aa, Homo sapiens
  REGION 1..77: note = ENSP00000415626
MEKKCTLYFLVLLPFFMILVTAELEESPEDSIQLGVTRNKIMTAQYECYQKIMQDPIQQAEGVYCNRTWDGWLCWND

SEQ ID NO: 25678 - protein, 37 aa, Homo sapiens
  REGION 1..37: note = ENSP00000386599
MEKKCTLYFLVLLPFFMILVTAELEESPEDSIQLGVT

SEQ ID NO: 25679 - protein, 344 aa, Homo sapiens
  REGION 1..344: note = ENSP00000358798
MDKFRMLFQHFQSSSESVMNGICLLLAAVTVKLYSSFDFNCPCLVHYNALYGLGLLLTPPLALFLCGLLANRQSVVMVEEWRRPAGHRRKDPGIIRYMCSSVLQRALAAPLVWILLALLDGKCFVCAFSSSVDPEKFLDFANMTPSQVQLFLAKVPCKEDELVRDSPARKAVSRYLRCLSQAIGWSVTLLLIIAAFLARCLRPCFDQTVFLQRRYWSNYVDLEQKLFDETCCEHARDFAHRCVLHFFASMRSELQARGLRRGNAGRRLELPAVPEPPEGLDSGSGKAHLRAISSREQVDRLLSTWYSSKPPLDLAASPGLCGGGLSHRAPTLALGTRLSQHTDV

SEQ ID NO: 25680 - protein, 219 aa, Homo sapiens
  REGION 1..219: note = ENSP00000332498
MPFHHVTAGLLYKGNYLNRSLSAGSDSEQLANISVEELDEIREAFRVLDRDGNGFISKQELGMAMRSLGYMPSEVELAIIMQRLDMDGDGQVDFDEFMTILGPKLVSSEGRDGFLGNTIDSIFWQFDMQRITLEELKHILYHAFRDHLTMKDIENIIINEEESLNETSGNCQTEFEGVHSQKQNRQTCVRKSLICAFAMAFIISVMLIAANQILRSGME

SEQ ID NO: 25681 - protein, 261 aa, Homo sapiens
  REGION 1..261: note = ENSP00000378690
MRLPEQPGEGKPENEKKGDGGALGGGEEPPRSQAPDFPTWEKMPFHHVTAGLLYKGNYLNRSLSAGSDSEQLANISVEELDEIREAFRVLDRDGNGFISKQELGMAMRSLGYMPSEVELAIIMQRLDMDGDGQVDFDEFMTILGPKLVSSEGRDGFLGNTIDSIFWQFDMQRITLEELKHILYHAFRDHLTMKDIENIIINEEESLNETSGNCQTEFEGVHSQKQNRQTCVRKSLICAFAMAFIISVMLIAANQILRSGME

SEQ ID NO: 25682 - protein, 219 aa, Homo sapiens; identical to SEQ ID NO: 25680
  REGION 1..219: note = ENSP00000378691

SEQ ID NO: 25683 - protein, 219 aa, Homo sapiens; identical to SEQ ID NO: 25680
  REGION 1..219: note = ENSP00000410704

SEQ ID NO: 25684 - protein, 125 aa, Homo sapiens
  REGION 1..125: note = ENSP00000411806
MPFHHVTAGLLYKGNYLNRSLSAGSDSEQLANISVEELDEIREAFRVLDRDGNGFISKQELGMAMRSLGYMPSEVELAIIMQRLDMDGDGQVDFDEFMTILGPKLVSSEGRDGFLGNTIDSIFWQ

SEQ ID NO: 25685 - protein, 95 aa, Homo sapiens
  REGION 1..95: note = ENSP00000384354
QFDMQRITLEELKHILYHAFRDHLTMKDIENIIINEEESLNETSGNCQTEFEGVHSQKQNRQTCVRKSLICAFAMAFIISVMLIAANQILRSGME

SEQ ID NO: 25686 - protein, 417 aa, Homo sapiens
  REGION 1..417: note = ENSP00000320866
MLLSVPLLLGLLGLAVAEPAVYFKEQFLDGDGWTSRWIESKHKSDFGKFVLSSGKFYGDEEKDKGLQTSQDARFYALSASFEPFSNKGQTLVVQFTVKHEQNIDCGGGYVKLFPNSLDQTDMHGDSEYNIMFGPDICGPGTKKVHVIFNYKGKNVLINKDIRCKDDEFTHLYTLIVRPDNTYEVKIDNSQVESGSLEDDWDFLPPKKIKDPDASKPEDWDERAKIDDPTDSKPEDWDKPEHIPDPDAKKPEDWDEEMDGEWEPPVIQNPEYKGEWKPRQIDNPDYKGTWIHPEIDNPEYSPDPSIYAYDNFGVLGLDLWQVKSGTIFDNFLITNDEAYAEEFGNETWGVTKAAEKQMKDKQDEEQRLKEEEEDKKRKEEEEAEDKEDDEDKDEDEEDEEDKEEDEEEDVPGQAKDEL

SEQ ID NO: 25687 - protein, 247 aa, Homo sapiens
  REGION 1..247: note = ENSP00000465105
MLLSVPLLLGLLGLAVAEPAVYFKEQFLDGDGWTSRWIESKHKSDFGKFVLSSGKFYGDEEKDKGPDICGPGTKKVHVIFNYKGKNVLINKDIRCKDDEFTHLYTLIVRPDNTYEVKIDNSQVESGSLEDDWDFLPPKKIKDPDASKPEDWDERAKIDDPTDSKPEDWDKPEHIPDPDAKKPEDWDEEMDGEWEPPVIQNPEYKGEWKPRQIDNPDYKGTWIHPEIDNPEYSPDPSIYAYDNFGVLG

SEQ ID NO: 25688 - protein, 163 aa, Homo sapiens
  REGION 1..163: note = ENSP00000465918
  VARIANT 1: note = Any amino acid
XEDWDERAKIDDPTDSKPEDWDKPEHIPDPDAKKPEDWDEEMDGEWEPPVIQNPEYKGEWKPRQIDNPDYKGTWIHPEIDNPEYSPDPSIYAYDNFGVLGLDLWQVKSGTIFDNFLITNDEAYAEEFGNETWGVTKAAEKQMKDKQDEEQRPERSCRRAGRAK

SEQ ID NO: 25689 - protein, 13 aa, Homo sapiens
  REGION 1..13: note = ENSP00000466037
  VARIANT 1: note = Any amino acid
XEEDVPGQAKDEL

SEQ ID NO: 25690 - protein, 217 aa, Homo sapiens
  REGION 1..217: note = ENSP00000252939
MVKLGCSFSGKPGKDPGDQDGAAMDSVPLISPLDISQLQPPLPDQVVIKTQTEYQLSSPDQQNFPDLEGQRLNCSHPEEGRRLPTARMIAFAMALLGCVLIMYKAIWYDQFTCPDGFLLRHKICTPLTLEMYYTEMDPERHRSILAAIGAYPLSRKHGTETPAAWGDGYRAAKEERKGPTQAGAAAAATEPPGKPSAKAEKEAARKAAGSAAPPPAQ

SEQ ID NO: 25691 - protein, 124 aa, Homo sapiens
  REGION 1..124: note = ENSP00000357546
MVKLGCSFSGKPGKDPGDQDGAAMDSVPLISPLDISQLQPPLPDQVVIKTQTEYQLSSPDQQNFPDLEGQRLNCSHPEEGRRLPTARMIAFAMALLGCVLIMYKAIWYDQFTCPDGFLLRGPEF

SEQ ID NO: 25692 - protein, 158 aa, Homo sapiens
  REGION 1..158: note = ENSP00000357543
MVKLGCSFSGKPGKDPGDQDGAAMDSVPLISPLDISQLQPPLPDQVVIKTQTEYQLSSPDQQNFPDLEGQRLNCSHPEEGRRVTTPTPPTVGTQDRRRRWKAAGGAWVPSRPVWGPLALREERVAVSHPAQSWPHRLPCTHQAPSRGCRCRLTKQWRS

SEQ ID NO: 25693 - protein, 476 aa, Homo sapiens [sequence omitted]

SEQ ID NO: 25694 - protein, 245 aa, Homo sapiens
  REGION 1..245: note = ENSP00000392173
MGRKEEDDCSSWKKQTTNIRKTFIFMEVLGSGAFSEVFLVKQRLTGKLFALKCIKKSPAFRDSSLENEIAVLKKIKHENIVTLEDIYESTTHYYLVMQLVSGGELFDRILERGVYTEKDASLVIQQVLSAVKYLHENGIVHRDLKPENLLYLTPEENSKIMITDFGLSKMEQNGIMSTACGTPGYVGSVDTPHSMKKRSLSFSRRSRRATMSLSLHSGMTFLSQPRTLFATCLRRIRTSGTPVRR

SEQ ID NO: 25695 - protein, 476 aa, Homo sapiens [sequence omitted]

SEQ ID NO: 25696 - protein, 478 aa, Homo sapiens
  REGION 1..478: note = ENSP00000261793
MATITCTRFTEEYQLFEELGKGAFSVVRRCVKVLAGQEYAAKIINTKKLSARDHQKLEREARICRLLKHPNIVRLHDSISEEGHHYLIFDLVTGGELFEDIVAREYYSEADASHCIQQILEAVLHCHQMGVVHRDLKPENLLLASKLKGAAVKLADFGLAIEVEGEQQAWFGFAGTPGYLSPEVLRKDPYGKPVDLWACGVILYILLVGYPPFWDEDQHRLYQQIKAGAYDFPSPEWDTVTPEAKDLINKMLTINPSKRITAAEALKHPWISHRSTVASCMHRQETVDCLKKFNARRKLKGAILTTMLATRNFSGGKSGGNKKSDGVKESSESTNTTIEDEDTKVRKQEIIKVTEQLIEAISNGDFESYTKMCDPGMTAFEPEALGNLVEGLDFHRFYFENLWSRNSKPVHTTILNPHIHLMGDESACIAYIRITQYLDAGGIPRTAQSEETRVWHRRDGKWQIVHFHRSGAPSVLPH

SEQ ID NO: 25697 - protein, 489 aa, Homo sapiens
  REGION 1..489: note = ENSP00000381412
MATITCTRFTEEYQLFEELGKGAFSVVRRCVKVLAGQEYAAKIINTKKLSARDHQKLEREARICRLLKHPNIVRLHDSISEEGHHYLIFDLVTGGELFEDIVAREYYSEADASHCIQQILEAVLHCHQMGVVHRDLKPENLLLASKLKGAAVKLADFGLAIEVEGEQQAWFGFAGTPGYLSPEVLRKDPYGKPVDLWACGVILYILLVGYPPFWDEDQHRLYQQIKAGAYDFPSPEWDTVTPEAKDLINKMLTINPSKRITAAEALKHPWISHRSTVASCMHRQETVDCLKKFNARRKLKGAILTTMLATRNFSGGKSGGNKKSDGVKKRKSSSSVQLMESSESTNTTIEDEDTKVRKQEIIKVTEQLIEAISNGDFESYTKMCDPGMTAFEPEALGNLVEGLDFHRFYFENLWSRNSKPVHTTILNPHIHLMGDESACIAYIRITQYLDAGGIPRTAQSEETRVWHRRDGKWQIVHFHRSGAPSVLPH

SEQ ID NO: 25698 - protein, 24 aa, Homo sapiens
  REGION 1..24: note = ENSP00000427580
MGVVHRDLKPENLLLASKLKGAAV

SEQ ID NO: 25699 - protein, 90 aa, Homo sapiens
  REGION 1..90: note = ENSP00000426607
MATITCTRFTEEYQLFEELGKGAFSVVRRCVKVLAGQEYAAKIINTKKLSARDHQKLEREARICRLLKHPNIVRLHDSISEEGHHYLIFD

SEQ ID NO: 25700 - protein, 495 aa, Homo sapiens
  REGION 1..495: note = ENSP00000277853
MATTATCTRFTDDYQLFEELGKGAFSVVRRCVKKTSTQEYAAKIINTKKLSARDHQKLEREARICRLLKHPNIVRLHDSISEEGFHYLVFDLVTGGELFEDIVAREYYSEADASHCIHQILESVNHIHQHDIVHRDLKPENLLLASKCKGAAVKLADFGLAIEVQGEQQAWFGFAGTPGYLSPEVLRKDPYGKPVDIWACGVILYILLVGYPPFWDEDQHKLYQQIKAGAYDFPSPEWDTVTPEAKNLINQMLTINPAKRITADQALKHPWVCQRSTVASMMHRQETVECLRKFNARRKLKGAILTTMLVSRNFSAAKSLLNKKSDGGVKEPQTTVVHNATDGIKGSTESCNTTTEDEDLKVRKQEIIKITEQLIEAINNGDFEAYTKICDPGLTSFEPEALGNLVEGMDFHKFYFENLLSKNSKPIHTTILNPHVHVIGEDAACIAYIRLTQYIDGQGRPRTSQSEETRVWHRRDGKWLNVHYHCSGAPAAPLQ

SEQ ID NO: 25701 - protein, 527 aa, Homo sapiens
  REGION 1..527: note = ENSP00000315599
MATTATCTRFTDDYQLFEELGKGAFSVVRRCVKKTSTQEYAAKIINTKKLSARDHQKLEREARICRLLKHPNIVRLHDSISEEGFHYLVFDLVTGGELFEDIVAREYYSEADASHCIHQILESVNHIHQHDIVHRDLKPENLLLASKCKGAAVKLADFGLAIEVQGEQQAWFGFAGTPGYLSPEVLRKDPYGKPVDIWACGVILYILLVGYPPFWDEDQHKLYQQIKAGAYDFPSPEWDTVTPEAKNLINQMLTINPAKRITADQALKHPWVCQRSTVASMMHRQETVECLRKFNARRKLKGAILTTMLVSRNFSVGRQSSAPASPAASAAGLAGQAAKSLLNKKSDGGVKKRKSSSSVHLMEPQTTVVHNATDGIKGSTESCNTTTEDEDLKVRKQEIIKITEQLIEAINNGDFEAYTKICDPGLTSFEPEALGNLVEGMDFHKFYFENLLSKNSKPIHTTILNPHVHVIGEDAACIAYIRLTQYIDGQGRPRTSQSEETRVWHRRDGKWLNVHYHCSGAPAAPLQ

SEQ ID NO: 25702 - protein, 453 aa, Homo sapiens
  REGION 1..453: note = ENSP00000393784
RLLKHPNIVRLHDSISEEGFHYLVFDLVTGGELFEDIVAREYYSEADASHCIHQILESVNHIHQHDIVHRDLKPENLLLASKCKGAAVKLADFGLAIEVQGEQQAWFGFAGTPGYLSPEVLRKDPYGKPVDIWACGVILYILLVGYPPFWDEDQHKLYQQIKAGAYDFPSPEWDTVTPEAKNLINQMLTINPAKRITADQALKHPWVCQRSTVASMMHRQETVECLRKFNARRKLKGAILTTMLVSRNFSAAKSLLNKKSDGGVKPQSNNKNSLVSPAQEPAPLQTAMEPQTTVVHNATDGIKGSTESCNTTTEDEDLKVRKQEIIKITEQLIEAINNGDFEAYTKICDPGLTSFEPEALGNLVEGMDFHKFYFENLLSKNSKPIHTTILNPHVHVIGEDAACIAYIRLTQYIDGQGRPRTSQSEETRVWHRRDGKWLNVHYHCSGAPAAPLQ

SEQ ID NO: 25703 - protein, 529 aa, Homo sapiens
  REGION 1..529: note = ENSP00000307082
MATTATCTRFTDDYQLFEELGKGAFSVVRRCVKKTSTQEYAAKIINTKKLSARDHQKLEREARICRLLKHPNIVRLHDSISEEGFHYLVFDLVTGGELFEDIVAREYYSEADASHCIHQILESVNHIHQHDIVHRDLKPENLLLASKCKGAAVKLADFGLAIEVQGEQQAWFGFAGTPGYLSPEVLRKDPYGKPVDIWACGVILYILLVGYPPFWDEDQHKLYQQIKAGAYDFPSPEWDTVTPEAKNLINQMLTINPAKRITADQALKHPWVCQRSTVASMMHRQETVECLRKFNARRKLKGAILTTMLVSRNFSAAKSLLNKKSDGGVKKRKSSSSVHLMPQSNNKNSLVSPAQEPAPLQTAMEPQTTVVHNATDGIKGSTESCNTTTEDEDLKVRKQEIIKITEQLIEAINNGDFEAYTKICDPGLTSFEPEALGNLVEGMDFHKFYFENLLSKNSKPIHTTILNPHVHVIGEDAACIAYIRLTQYIDGQGRPRTSQSEETRVWHRRDGKWLNVHYHCSGAPAAPLQ

SEQ ID NO: 25704 - protein, 516 aa, Homo sapiens
  REGION 1..516: note = ENSP00000361851
MATTATCTRFTDDYQLFEELGKGAFSVVRRCVKKTSTQEYAAKIINTKKLSARDHQKLEREARICRLLKHPNIVRLHDSISEEGFHYLVFDLVTGGELFEDIVAREYYSEADASHCIHQILESVNHIHQHDIVHRDLKPENLLLASKCKGAAVKLADFGLAIEVQGEQQAWFGFAGTPGYLSPEVLRKDPYGKPVDIWACGVILYILLVGYPPFWDEDQHKLYQQIKAGAYDFPSPEWDTVTPEAKNLINQMLTINPAKRITADQALKHPWVCQRSTVASMMHRQETVECLRKFNARRKLKGAILTTMLVSRNFSVGRQSSAPASPAASAAGLAGQAAKSLLNKKSDGGVKEPQTTVVHNATDGIKGSTESCNTTTEDEDLKVRKQEIIKITEQLIEAINNGDFEAYTKICDPGLTSFEPEALGNLVEGMDFHKFYFENLLSKNSKPIHTTILNPHVHVIGEDAACIAYIRLTQYIDGQGRPRTSQSEETRVWHRRDGKWLNVHYHCSGAPAAPLQ

SEQ ID NO: 25705 - protein, 335 aa, Homo sapiens
  REGION 1..335: note = ENSP00000405561
  VARIANT 1: note = Any amino acid
XYQQIKAGAYDFPSPEWDTVTPEAKNLINQMLTINPAKRITADQALKHPWVCQRSTVASMMHRQETVECLRKFNARRKLKGAILTTMLVSRNFSAAKSLLNKKSDGGVKPQSNNKNSLVSPAQEPAPLQTAMEPQTTVVHNATDGIKGSTESCNTTTEDEDLKAAPLRTGNGSSVPEGRSSRDRTAPSAGMQPQPSLCSSAMRKQEIIKITEQLIEAINNGDFEAYTKICDPGLTSFEPEALGNLVEGMDFHKFYFENLLSKNSKPIHTTILNPHVHVIGEDAACIAYIRLTQYIDGQGRPRTSQSEETRVWHRRDGKWLNVHYHCSGAPAAPLQ

SEQ ID NO: 25706 - protein, 539 aa, Homo sapiens
  REGION 1..539: note = ENSP00000378243
MATTATCTRFTDDYQLFEELGKGAFSVVRRCVKKTSTQEYAAKIINTKKLSARDHQKLEREARICRLLKHPNIVRLHDSISEEGFHYLVFDLVTGGELFEDIVAREYYSEADASHCIHQILESVNHIHQHDIVHRDLKPENLLLASKCKGAAVKLADFGLAIEVQGEQQAWFGFAGTPGYLSPEVLRKDPYGKPVDIWACGVILYILLVGYPPFWDEDQHKLYQQIKAGAYDFPSPEWDTVTPEAKNLINQMLTINPAKRITADQALKHPWVCQRSTVASMMHRQETVECLRKFNARRKLKGAILTTMLVSRNFSVGRQSSAPASPAASAAGLAGQAAKSLLNKKSDGGVKPQSNNKNSLVSPAQEPAPLQTAMEPQTTVVHNATDGIKGSTESCNTTTEDEDLKVRKQEIIKITEQLIEAINNGDFEAYTKICDPGLTSFEPEALGNLVEGMDFHKFYFENLLSKNSKPIHTTILNPHVHVIGEDAACIAYIRLTQYIDGQGRPRTSQSEETRVWHRRDGKWLNVHYHCSGAPAAPLQ

SEQ ID NO: 25707 - protein, 556 aa, Homo sapiens
  REGION 1..556: note = ENSP00000319060
MATTATCTRFTDDYQLFEELGKGAFSVVRRCVKKTSTQEYAAKIINTKKLSARDHQKLEREARICRLLKHPNIVRLHDSISEEGFHYLVFDLVTGGELFEDIVAREYYSEADASHCIHQILESVNHIHQHDIVHRDLKPENLLLASKCKGAAVKLADFGLAIEVQGEQQAWFGFAGTPGYLSPEVLRKDPYGKPVDIWACGVILYILLVGYPPFWDEDQHKLYQQIKAGAYDFPSPEWDTVTPEAKNLINQMLTINPAKRITADQALKHPWVCQRSTVASMMHRQETVECLRKFNARRKLKGAILTTMLVSRNFSAAKSLLNKKSDGGVKPQSNNKNSLVSPAQEPAPLQTAMEPQTTVVHNATDGIKGSTESCNTTTEDEDLKAAPLRTGNGSSVPEGRSSRDRTAPSAGMQPQPSLCSSAMRKQEIIKITEQLIEAINNGDFEAYTKICDPGLTSFEPEALGNLVEGMDFHKFYFENLLSKNSKPIHTTILNPHVHVIGEDAACIAYIRLTQYIDGQGRPRTSQSEETRVWHRRDGKWLNVHYHCSGAPAAPLQ

SEQ ID NO: 25708 - protein, 558 aa, Homo sapiens
  REGION 1..558: note = ENSP00000410298
MATTATCTRFTDDYQLFEELGKGAFSVVRRCVKKTSTQEYAAKIINTKKLSARDHQKLEREARICRLLKHPNIVRLHDSISEEGFHYLVFDLVTGGELFEDIVAREYYSEADASHCIHQILESVNHIHQHDIVHRDLKPENLLLASKCKGAAVKLADFGLAIEVQGEQQAWFGFAGTPGYLSPEVLRKDPYGKPVDIWACGVILYILLVGYPPFWDEDQHKLYQQIKAGAYDFPSPEWDTVTPEAKNLINQMLTINPAKRITADQALKHPWVCQRSTVASMMHRQETVECLRKFNARRKLKGAILTTMLVSRNFSAAKSLLNKKSDGGVKKRKSSSSVHLMPQSNNKNSLVSPAQEPAPLQTAMEPQTTVVHNATDGIKGSTESCNTTTEDEDLKGRVPEGRSSRDRTAPSAGMQPQPSLCSSAMRKQEIIKITEQLIEAINNGDFEAYTKICDPGLTSFEPEALGNLVEGMDFHKFYFENLLSKNSKPIHTTILNPHVHVIGEDAACIAYIRLTQYIDGQGRPRTSQSEETRVWHRRDGKWLNVHYHCSGAPAAPLQ

SEQ ID NO: 25709 - protein, 142 aa, Homo sapiens
  REGION 1..142: note = ENSP00000426940
MLKVTVPSCSASSCSSVTASAAPGTASLVPDYWIDGSNRDALSDFFEVESELGRGATSIVYRCKQKGTQKPYALKVLKKTVDKKIVRTEIGVLLRLSHPNIIKLKEIFETPTEISLVLELVTGGELFDRIVEKGYYSERDAA

SEQ ID NO: 25710 - protein, 473 aa, Homo sapiens
  REGION 1..473: note = ENSP00000422634
MLKVTVPSCSASSCSSVTASAAPGTASLVPDYWIDGSNRDALSDFFEVESELGRGATSIVYRCKQKGTQKPYALKVLKKTVDKKIVRTEIGVLLRLSHPNIIKLKEIFETPTEISLVLELVTGGELFDRIVEKGYYSERDAADAVKQILEAVAYLHENGIVHRDLKPENLLYATPAPDAPLKIADFGLSKIVEHQVLMKTVCGTPGYCAPEILRGCAYGPEVDMWSVGIITYILLCGFEPFYDERGDQFMFRRILNCEYYFISPWWDEVSLNAKDLVRKLIVLDPKKRLTTFQALQHPWVTGKAANFVHMDTAQKKLQEFNARRKLKAAVKAVVASSRLGSASSSHGSIQESHKASRDPSPIQDGNEDMKAIPEGEKIQGDGAQAAVKGAQAELMKVQALEKVKGADINAEEAPKMVPKAVEDGIKVADLELEEGLAEEKLKTVEEAAAPREGQGSSAVGFEVPQQDVILPEY

SEQ ID NO: 25711 - protein, 473 aa, Homo sapiens; identical to SEQ ID NO: 25710
  REGION 1..473: note = ENSP00000282356

SEQ ID NO: 25712 - protein, 88 aa, Homo sapiens
  REGION 1..88: note = ENSP00000423761
MLKVTVPSCSASSCSSVTASAAPGTASLVPDYWIDGSNRDALSDFFEVESELGRGATSIVYRCKQKGTQKPYALKVLKKTDCGKGILQ

SEQ ID NO: 25713 - protein, 88 aa, Homo sapiens; identical to SEQ ID NO: 25712
  REGION 1..88: note = ENSP00000424912

SEQ ID NO: 25714 - protein, 109 aa, Homo sapiens
  REGION 1..109: note = ENSP00000421606
MLKVTVPSCSASSCSSVTASAAPGTASLVPDYWIDGSNRDALSDFFEVESELGRGATSIVYRCKQKGTQKPYALKVLKKTVDKKIVRTEIGVLLRLSHPNIDCGKGILQ

SEQ ID NO: 25715 - protein, 556 aa, Homo sapiens
  REGION 1..556: note = ENSP00000376266
MSSCVSSQPSSNRAAPQDELGGRGSSSSESQKPCEALRGLSSLSIHLGMESFIVVTECEPGCAVDLGLARDRPLEADGQEVPLDTSGSQARPHLSGRKLSLQERSQGGLAAGGSLDMNGRCICPSLPYSPVSSPQSSPRLPRRPTVESHHVSITGMQDCVQLNQYTLKDEIGKGSYGVVKLAYNENDNTYYAMKVLSKKKLIRQAGFPRRPPPRGTRPAPGGCIQPRGPIEQVYQEIAILKKLDHPNVVKLVEVLDDPNEDHLYMVFELVNQGPVMEVPTLKPLSEDQARFYFQDLIKGIEYLHYQKIIHRDIKPSNLLVGEDGHIKIADFGVSNEFKGSDALLSNTVGTPAFMAPESLSETRKIFSGKALDVWAMGVTLYCFVFGQCPFMDERIMCLHSKIKSQALEFPDQPDIAEDLKDLITRMLDKNPESRIVVPEIKLHPWVTRHGAEPLPSEDENCTLVEVTEEEVENSVKHIPSLATVILVKTMIRKRSFGNPFEGSRREERSLSAPGNLLTKKPTRECESLSELKGTKKKKGLDSMTSTVAAGWLDRRV

SEQ ID NO: 25716 - protein, 545 aa, Homo sapiens
  REGION 1..545: note = ENSP00000321230
MSSCVSSQPSSNRAAPQDELGGRGSSSSESQKPCEALRGLSSLSIHLGMESFIVVTECEPGCAVDLGLARDRPLEADGQEVPLDTSGSQARPHLSGRKLSLQERSQGGLAAGGSLDMNGRCICPSLPYSPVSSPQSSPRLPRRPTVESHHVSITGMQDCVQLNQYTLKDEIGKGSYGVVKLAYNENDNTYYAMKVLSKKKLIRQAGFPRRPPPRGTRPAPGGCIQPRGPIEQVYQEIAILKKLDHPNVVKLVEVLDDPNEDHLYMVFELVNQGPVMEVPTLKPLSEDQARFYFQDLIKGIEYLHYQKIIHRDIKPSNLLVGEDGHIKIADFGVSNEFKGSDALLSNTVGTPAFMAPESLSETRKIFSGKALDVWAMGVTLYCFVFGQCPFMDERIMCLHSKIKSQALEFPDQPDIAEDLKDLITRMLDKNPESRIVVPEIKILVKTMIRKRSFGNPFEGSRREERSLSAPGNLLTKKPTRECESLSELKEARQRRQPPGHRPAPRGGGGSALVRGSPCVESCWAPAPGSPARMHPLRPEEAMEPE

SEQ ID NO: 25717 - protein, 498 aa, Homo sapiens
  REGION 1..498: note = ENSP00000445944
MSSCVSSQPSSNRAAPQDELGGRGSSSSESQKPCEALRGLSSLSIHLGMESFIVVTECEPGCAVDLGLARDRPLEADGQEVPLDTSGSQARPHLSGRKLSLQERSQGGLAAGGSLDMNGRCICPSLPYSPVSSPQSSPRLPRRPTVESHHVSITGMQDCVQLNQYTLKDEIGKGSYGVVKLAYNENDNTYYAMKVLSKKKLIRQAGFPRRPPPRGTRPAPGGCIQPRGPIEQVYQEIAILKKLDHPNVVKLVEVLDDPNEDHLYMVFELVNQGPVMEVPTLKPLSEDQARFYFQDLIKGIEYLHYQKIIHRDIKPSNLLVGEDGHIKIADFGVSNEFKGSDALLSNTVGTPAFMAPESLSETRKIFSGKALDVWAMGVTLYCFVFGQCPFMDERIMCLHSKIKSQALEFPDQPDIAEDLKDLITRMLDKNPESRIVVPEIKILVKTMIRKRSFGNPFEGSRREERSLSAPGNLLTKQGSEDNLQGTDPPPVGEEEVLL

SEQ ID NO: 25718 - protein, 541 aa, Homo sapiens
  REGION 1..541: note = ENSP00000336634
MSSCVSSQPSSNRAAPQDELGGRGSSSSESQKPCEALRGLSSLSIHLGMESFIVVTECEPGCAVDLGLARDRPLEADGQEVPLDTSGSQARPHLSGRKLSLQERSQGGLAAGGSLDMNGRCICPSLPYSPVSSPQSSPRLPRRPTVESHHVSITGMQDCVQLNQYTLKDEIGKGSYGVVKLAYNENDNTYYAMKVLSKKKLIRQAGFPRRPPPRGTRPAPGGCIQPRGPIEQVYQEIAILKKLDHPNVVKLVEVLDDPNEDHLYMVFELVNQGPVMEVPTLKPLSEDQARFYFQDLIKGIEYLHYQKIIHRDIKPSNLLVGEDGHIKIADFGVSNEFKGSDALLSNTVGTPAFMAPESLSETRKIFSGKALDVWAMGVTLYCFVFGQCPFMDERIMCLHSKIKSQALEFPDQPDIAEDLKDLITRMLDKNPESRIVVPEIKLHPWVTRHGAEPLPSEDENCTLVEVTEEEVENSVKHIPSLATVILVKTMIRKRSFGNPFEGSRREERSLSAPGNLLTKQGSEDNLQGTDPPPVGEEEVLL

SEQ ID NO: 25719 - protein, 588 aa, Homo sapiens
  REGION 1..588: note = ENSP00000312741
MSSCVSSQPSSNRAAPQDELGGRGSSSSESQKPCEALRGLSSLSIHLGMESFIVVTECEPGCAVDLGLARDRPLEADGQEVPLDTSGSQARPHLSGRKLSLQERSQGGLAAGGSLDMNGRCICPSLPYSPVSSPQSSPRLPRRPTVESHHVSITGMQDCVQLNQYTLKDEIGKGSYGVVKLAYNENDNTYYAMKVLSKKKLIRQAGFPRRPPPRGTRPAPGGCIQPRGPIEQVYQEIAILKKLDHPNVVKLVEVLDDPNEDHLYMVFELVNQGPVMEVPTLKPLSEDQARFYFQDLIKGIEYLHYQKIIHRDIKPSNLLVGEDGHIKIADFGVSNEFKGSDALLSNTVGTPAFMAPESLSETRKIFSGKALDVWAMGVTLYCFVFGQCPFMDERIMCLHSKIKSQALEFPDQPDIAEDLKDLITRMLDKNPESRIVVPEIKLHPWVTRHGAEPLPSEDENCTLVEVTEEEVENSVKHIPSLATVILVKTMIRKRSFGNPFEGSRREERSLSAPGNLLTKKPTRECESLSELKEARQRRQPPGHRPAPRGGGGSALVRGSPCVESCWAPAPGSPARMHPLRPEEAMEPE

SEQ ID NO: 25720 - protein, 343 aa, Homo sapiens
  REGION 1..343: note = ENSP00000441352
MQPSCWQTQPRGCCLLPAHIYSLFFSPAIRLLPIPCGCAKVLDDPNEDHLYMVFELVNQGPVMEVPTLKPLSEDQARFYFQDLIKGIEYLHYQKIIHRDIKPSNLLVGEDGHIKIADFGVSNEFKGSDALLSNTVGTPAFMAPESLSETRKIFSGKALDVWAMGVTLYCFVFGQCPFMDERIMCLHSKIKSQALEFPDQPDIAEDLKDLITRMLDKNPESRIVVPEIKLHPWVTRHGAEPLPSEDENCTLVEVTEEEVENSVKHIPSLATVILVKTMIRKRSFGNPFEGSRREERSLSAPGNLLTKKPTRECESLSELKGTKKKKGLDSMTSTVAAGWLDRRV

SEQ ID NO: 25721 - protein, 541 aa, Homo sapiens; identical to SEQ ID NO: 25718
  REGION 1..541: note = ENSP00000388368

SEQ ID NO: 25722 - protein, 588 aa, Homo sapiens; identical to SEQ ID NO: 25719
  REGION 1..588: note = ENSP00000384600

SEQ ID NO: 25723 - protein, 588 aa, Homo sapiens; identical to SEQ ID NO: 25719
  REGION 1..588: note = ENSP00000384591

SEQ ID NO: 25724 - protein, 490 aa, Homo sapiens
  REGION 1..490: note = ENSP00000388273
MSSCVSSQPSSNRAAPQDELGGRGSSSSESQKPCEALRGLSSLSIHLGMESFIVVTECEPGCAVDLGLARDRPLEADGQEVPLDTSGSQARPHLSGRKLSLQERSQGGLAAGGSLDMNGRCICPSLPYSPVSSPQSSPRLPRRPTVESHHVSITGMQDCVQLNQYTLKDEIGKGSYGVVKLAYNENDNTYYAMKVLSKKKLIRQAGFPRRPPPRGTRPAPGGCIQPRGPIEQVYQEIAILKKLDHPNVVKLVEVLDDPNEDHLYMVFELVNQGPVMEVPTLKPLSEDQARFYFQDLIKGIEYLHYQKIIHRDIKPSNLLVGEDGHIKIADFGVSNEFKGSDALLSNTVGTPAFMAPESLSETRKIFSGKALDVWAMGVTLYCFVFGQCPFMDERIMCLHSKIKSQALEFPDQPDIAEDLKDLITRMLDKNPESRIVVPEIKILVKTMIRKRSFGNPFEGSRREERSLSAPGNLLTKKPTRECESLSELKT

SEQ ID NO: 25725 - protein, 533 aa, Homo sapiens
  REGION 1..533: note = ENSP00000376265
MSSCVSSQPSSNRAAPQDELGGRGSSSSESQKPCEALRGLSSLSIHLGMESFIVVTECEPGCAVDLGLARDRPLEADGQEVPLDTSGSQARPHLSGRKLSLQERSQGGLAAGGSLDMNGRCICPSLPYSPVSSPQSSPRLPRRPTVESHHVSITGMQDCVQLNQYTLKDEIGKGSYGVVKLAYNENDNTYYAMKVLSKKKLIRQAGFPRRPPPRGTRPAPGGCIQPRGPIEQVYQEIAILKKLDHPNVVKLVEVLDDPNEDHLYMVFELVNQGPVMEVPTLKPLSEDQARFYFQDLIKGIEYLHYQKIIHRDIKPSNLLVGEDGHIKIADFGVSNEFKGSDALLSNTVGTPAFMAPESLSETRKIFSGKALDVWAMGVTLYCFVFGQCPFMDERIMCLHSKIKSQALEFPDQPDIAEDLKDLITRMLDKNPESRIVVPEIKLHPWVTRHGAEPLPSEDENCTLVEVTEEEVENSVKHIPSLATVILVKTMIRKRSFGNPFEGSRREERSLSAPGNLLTKKPTRECESLSELKT

SEQ ID NO: 25726 - protein, 125 aa, Homo sapiens
  REGION 1..125: note = ENSP00000444894
MSSCVSSQPSSNRAAPQDELGGRGSSSSESQKPCEALRGLSSLSIHLGMESFIVVTECEPGCAVDLGLARDRPLEADGQEVPLDTSGSQARPHLSGRKLSLQERSQGGLAAGGSLDMNGRCICPS

SEQ ID NO: 25727 - protein, 87 aa, Homo sapiens
  REGION 1..87: note = ENSP00000445400
MSSCVSSQPSSNRAAPQDELGGRGSSSSESQKPCEALRGLSSLSIHLGMESFIVVTECEPGCAVDLGLARDRPLEADGQEVPLDTSG

SEQ ID NO: 25728 - protein, 473 aa, Homo sapiens
  REGION 1..473: note = ENSP00000296471
MPFGCVTLGDKKNYNQPSEVTDRYDLGQVIKTEEFCEIFRAKDKTTGKLHTCKKFQKRDGRKVRKAAKNEIGILKMVKHPNILQLVDVFVTRKEYFIFLELATGREVFDWILDQGYYSERDTSNVVRQVLEAVAYLHSLKIVHRNLKLENLVYYNRLKNSKIVISDFHLAKLENGLIKEPCGTPEYLGNPPFYEEVEEDDYENHDKNLFRKILAGDYEFDSPYWDDISQAAKDLVTRLMEVEQDQRITAEEAISHEWISGNAASDKNIKDGVCAQIEKNFARAKWKKAVRVTTLMKRLRAPEQSSTAAAQSASATDTATPGAAGGATAAAASGATSAPEGDAARAAKSDNVAPADRSATPATDGSATPATDGSVTPATDGSITPATDGSVTPATDRSATPATDGRATPATEESTVPTTQSSAMLATKAAATPEPAMAQPDSTAPEGATGQAPPSSKGEEAAGYAQESQREEAS

SEQ ID NO: 25729 - protein, 470 aa, Homo sapiens
  REGION 1..470: note = ENSP00000418809
MPFGCVTLGDKKNYNQPSEVTDRYDLGQVIKTEEFCEIFRAKDKTTGKLHTCKKFQKRDGRKVRKAAKNEIGILKMVKHPNILQLVDVFVTRKEYFIFLELATGREVFDWILDQGYYSERDTSNVVRQVLEAVAYLHSLKIVHRNLKLENLVYYNRLKNSKIVISDFHLAKLENGLIKEPCGTPEYLAPEVVGRQRYGRPVDCWAIGVIMYILLSGNPPFYEEVEEDDYENHDKNLFRKILAGDYEFDSPYWDDISQAAKDLVTRLMEVEQDQRITAEEAISHEWISGNAASDKNIKDGVCAQIEKNFARAKWKKAVRVTTLMKRLRAPEQSSTAAAQSASATDTATPGAADRSATPATDGSATPATDGSVTPATDGSITPATDGSVTPATDRSATPATDGRATPATEESTVPTTQSSAMLATKAAATPEPAMAQPDSTAPEGATGQAPPSSKGEEAAGYAQESQREEAS

SEQ ID NO: 25730 - protein, 434 aa, Homo sapiens
  REGION 1..434: note = ENSP00000417614
MPFGCVTLGDKKNYNQPSEVTDRYDLGQVIKTEEFCEIFRAKDKTTGKLHTCKKFQKRDGRKVRKAAKNEIGILKMVKHPNILQLVDVFVTRKEYFIFLELATGREVFDWILDQGYYSERDTSNVVRQVLEAVAYLHSLKIVHRNLKLENLVYYNRLKNSKIVISDFHLAKLENGLIKEPCGTPEYLAPEVVGRQRYGRPVDCWAIGVIMYILLSGNPPFYEEVEEDDYENHDKNLFRKILAGDYEFDSPYWDDISQAAKDLVTRLMEVEQDQRITAEEAISHEWISGNAASDKNIKDGVCAQIEKNFARAKWKTVVPPQPQMEVPPQPLMAVSPQPPMEASLQPLMGVSPQPLTGALLQPLMGEPHQPQKRALCPPPKAVPCWPPRQLPPLSRLWPSRTAQPQRAPQARLHPLVKGKRLLVMPRSLKGRRPAE

SEQ ID NO: 25731 - protein, 501 aa, Homo sapiens
  REGION 1..501: note = ENSP00000419195
MPFGCVTLGDKKNYNQPSEVTDRYDLGQVIKTEEFCEIFRAKDKTTGKLHTCKKFQKRDGRKVRKAAKNEIGILKMVKHPNILQLVDVFVTRKEYFIFLELATGREVFDWILDQGYYSERDTSNVVRQVLEAVAYLHSLKIVHRNLKLENLVYYNRLKNSKIVISDFHLAKLENGLIKEPCGTPEYLAPEVVGRQRYGRPVDCWAIGVIMYILLSGNPPFYEEVEEDDYENHDKNLFRKILAGDYEFDSPYWDDISQAAKDLVTRLMEVEQDQRITAEEAISHEWISGNAASDKNIKDGVCAQIEKNFARAKWKKAVRVTTLMKRLRAPEQSSTAAAQSASATDTATPGAAGGATAAAASGATSAPEGDAARAAKSDNVAPADRSATPATDGSATPATDGSVTPATDGSITPATDGSVTPATDRSATPATDGRATPATEESTVPTTQSSAMLATKAAATPEPAMAQPDSTAPEGATGQAPPSSKGEEAAGYAQESQREEAS

SEQ ID NO: 25732 - protein, 94 aa, Homo sapiens
  REGION 1..94: note = ENSP00000420139
MPFGCVTLGDKKNYNQPSEVTDRYDLGQVIKTEEFCEIFRAKDKTTGKLHTCKKFQKRDGRKGEASQHPTAGGCVCDPQGVLYLPGAGHGEGGV

SEQ ID NO: 25733 - protein, 426 aa, Homo sapiens
  REGION 1..426: note = ENSP00000420053
MVKHPNILQLVDVFVTRKEYFIFLELATGREVFDWILDQGYYSERDTSNVVRQVLEAVAYLHSLKIVHRNLKLENLVYYNRLKNSKIVISDFHLAKLENGLIKEPCGTPEYLAPEVVGRQRYGRPVDCWAIGVIMYILLSGNPPFYEEVEEDDYENHDKNLFRKILAGDYEFDSPYWDDISQAAKDLVTRLMEVEQDQRITAEEAISHEWISGNAASDKNIKDGVCAQIEKNFARAKWKKAVRVTTLMKRLRAPEQSSTAAAQSASATDTATPGAAGGATAAAASGATSAPEGDAARAAKSDNVAPADRSATPATDGSATPATDGSVTPATDGSITPATDGSVTPATDRSATPATDGRATPATEESTVPTTQSSAMLATKAAATPEPAMAQPDSTAPEGATGQAPPSSKGEEAAGYAQESQREEAS

SEQ ID NO: 25734 - protein, 427 aa, Homo sapiens
  REGION 1..427: note = ENSP00000420724
MPFGCVTLGDKKNYNQPSEVTDRYDLGQVIKTEEFCEIFRAKDKTTGKLHTCKKFQKRDGRKVRKAAKNEIGILKMVKHPNILQLVDVFVTRKEYFIFLELNLKLENLVYYNRLKNSKIVISDFHLAKLENGLIKEPCGTPEYLAPEVVGRQRYGRPVDCWAIGVIMYILLSGNPPFYEEVEEDDYENHDKNLFRKILAGDYEFDSPYWDDISQAAKDLVTRLMEVEQDQRITAEEAISHEWISGNAASDKNIKDGVCAQIEKNFARAKWKKAVRVTTLMKRLRAPEQSSTAAAQSASATDTATPGAADRSATPATDGSATPATDGSVTPATDGSITPATDGSVTPATDRSATPATDGRATPATEESTVPTTQSSAMLATKAAATPEPAMAQPDSTAPEGATGQAPPSSKGEEAAGYAQESQREEAS

SEQ ID NO: 25735 - protein, 143 aa, Homo sapiens
  REGION 1..143: note = ENSP00000420766
MPFGCVTLGDKKNYNQPSEVTDRYDLGQVIKTEEFCEIFRAKDKTTGKLHTCKKFQKRDGRKVRKAAKNEIGILKMVKHPNILQLVDVFVTRKEYFIFLELATTRSETQATWYGKSWRPWPICTHSRSCTGISSWRTWFTTTG

SEQ ID NO: 25736 - protein, 123 aa, Homo sapiens
  REGION 1..123: note = ENSP00000420000
MPFGCVTLGDKKNYNQPSEVFDWILDQGYYSERDTSNVVRQVLEAVAYLHSLKIVHRNLKLENLVYYNRLKNSKIVISDFHLAKLENGLIKEPCGTPDPRGGRPAAVWTPCGLLGHWSHHVHP

SEQ ID NO: 25737 - protein, 473 aa, Homo sapiens; identical to SEQ ID NO: 25728
  REGION 1..473: note = ENSP00000484045

SEQ ID NO: 25738 - protein, 477 aa, Homo sapiens
  REGION 1..477: note = ENSP00000229922
MANMQGLVERLERAVSRLESLSAESHRPPGNCGEVNGVIAGVAPSVEAFDKLMDSMVAEFLKNSRILAGDVETHAEMVHSAFQAQRAFLLMASQYQQPHENDVAALLKPISEKIQEIQTFRERNRGSNMFNHLSAVSESIPALGWIAVSPKPGPYVKEMNDAATFYTNRVLKDYKHSDLRHVDWVKSYLNIWSELQAYIKEHHTTGLTWSKTGPVASTVSAFSVLSSGPGLPPPPPPLPPPGPPPLFENEGKKEESSPSRSALFAQLNQGEAITKGLRHVTDDQKTYKNPSLRAQGGQTQSPTKSHTPSPTSPKSYPSQKHAPVLELEGKKWRVEYQEDRNDLVISETELKQVAYIFKCEKSTIQIKGKVNSIIIDNCKKLGLVFDNVVGIVEVINSQDIQIQVMGRVPTISINKTEGCHIYLSEDALDCEIVSAKSSEMNILIPQDGDYREFPIPEQFKTAWDGSKLITEPAEIMA

SEQ ID NO: 25739 - protein, 365 aa, Homo sapiens
  REGION 1..365: note = ENSP00000417705
MANMQGLVERLERAVSRLESLSAESHRPPGNCGEVNGVIAGVAPSVEAFDKLMDSMVAEFLKNSRILAGDVETHAEMVHSAFQAQRAFLLMASQYQQPHEGPVASTVSAFSVLSSGPGLPPPPPPLPPPGPPPLFENEGKKEESSPSRSALFAQLNQGEAITKGLRHVTDDQKTYKNPSLRAQGGQTQSPTKSHTPSPTSPKSYPSQKHAPVLELEGKKWRVEYQEDRNDLVISETELKQVAYIFKCEKSTIQIKGKVNSIIIDNCKKLGLVFDNVVGIVEVINSQDIQIQVMGRVPTISINKTEGCHIYLSEDALDCEIVSAKSSEMNILIPQDGDYREFPIPEQFKTAWDGSKLITEPAEIMA

SEQ ID NO: 25740 - protein, 451 aa, Homo sapiens
  REGION 1..451: note = ENSP00000368275
MANMQGLVERLERAVSRLESLSAESHRPPGNCGEVNGVIAGVAPSVEAFDKLMDSMVAEFLKNSRILAGDVETHNDVAALLKPISEKIQEIQTFRERNRGSNMFNHLSAVSESIPALGWIAVSPKPGPYVKEMNDAATFYTNRVLKDYKHSDLRHVDWVKSYLNIWSELQAYIKEHHTTGLTWSKTGPVASTVSAFSVLSSGPGLPPPPPPLPPPGPPPLFENEGKKEESSPSRSALFAQLNQGEAITKGLRHVTDDQKTYKNPSLRAQGGQTQSPTKSHTPSPTSPKSYPSQKHAPVLELEGKKWRVEYQEDRNDLVISETELKQVAYIFKCEKSTIQIKGKVNSIIIDNCKKLGLVFDNVVGIVEVINSQDIQIQVMGRVPTISINKTEGCHIYLSEDALDCEIVSAKSSEMNILIPQDGDYREFPIPEQFKTAWDGSKLITEPAEIMA

SEQ ID NO: 25741 - protein, 217 aa, Homo sapiens
  REGION 1..217: note = ENSP00000417208
MANMQGLVERLERAVSRLESLSAESHRPPGNCGEVNGVIAGVAPSVEAFDKLMDSMVAEFLKNSRILAGDVETHEYQEDRNDLVISETELKQVAYIFKCEKSTIQIKGKVNSIIIDNCKKLGLVFDNVVGIVEVINSQDIQIQVMGRVPTISINKTEGCHIYLSEDALDCEIVSAKSSEMNILIPQDGDYREFPIPEQFKTAWDGSKLITEPAEIMA

SEQ ID NO: 25742 - protein, 194 aa, Homo sapiens
  REGION 1..194: note = ENSP00000420615
MANMQGLVERLERAVSRLESLSAESHRPPGNCGEVNGVIAGVAPSVEAFDKLMDSMVAEFLKNSRILAGDVETHNDVAALLKPISEKIQEIQTFRERNRGSNMFNHLSAVSESIPALGWIAVSPKPGPYVKEMNDAATFYTNRVLKDYKHSDLRHVDWVKSYLNIWSELQAYIKEHHTTGLTWSKTNEKRRRQR

SEQ ID NO: 25743 - protein, 413 aa, Homo sapiens
  REGION 1..413: note = ENSP00000418604
MANMQGLVERLERAVSRLESLSAESHRPPGNCGEVNGVIAGVAPSVEAFDKLMDSMVAEFLKNSRILAGDVETHAEMVHSAFQAQRAFLLMASQYQQPHENDVAALLKPISEKIQEIQTFRERNRGSNMFNHLSAVSESIPALGWIAVGPVASTVSAFSVLSSGPGLPPPPPPLPPPGPPPLFENEGKKEESSPSRSALFAQLNQGEAITKGLRHVTDDQKTYKNPSLRAQGGQTQSPTKSHTPSPTSPKSYPSQKHAPVLELEGKKWRVEYQEDRNDLVISETELKQVAYIFKCEKSTIQIKGKVNSIIIDNCKKLGLVFDNVVGIVEVINSQDIQIQVMGRVPTISINKTEGCHIYLSEDALDCEIVSAKSSEMNILIPQDGDYREFPIPEQFKTAWDGSKLITEPAEIMA

SEQ ID NO: 25744 - protein, 104 aa, Homo sapiens
  REGION 1..104: note = ENSP00000419906
MANMQGLVERLERAVSRLESLSAESHRPPGNCGEVNGVIAGVAPSVEAFDKLMDSMVAEFLKNSRILAGDVETHAEMVHSAFQAQRAFLLMASQYQQPHEANKF

SEQ ID NO: 25745 - protein, 394 aa, Homo sapiens
  REGION 1..394: note = ENSP00000483435
MANMQGLVERLERAVSRLESLSAESHRPPGNCGEVNGVIAGVAPSVEAFDKLMDSMVAEFLKNSRILAGDVETHAEMVHSAFQAQRAFLLMASQYQQPHENDVAALLKPISEKIQEIQTFRERNRGSNMFNHLSAVSESIPALGWIAVPPPPPPLPPPGPPPLFENEGKKEESSPSRSALFAQLNQGEAITKGLRHVTDDQKTYKNPSLRAQGGQTQSPTKSHTPSPTSPKSYPSQKHAPVLELEGKKWRVEYQEDRNDLVISETELKQVAYIFKCEKSTIQIKGKVNSIIIDNCKKLGLVFDNVVGIVEVINSQDIQIQVMGRVPTISINKTEGCHIYLSEDALDCEIVSAKSSEMNILIPQDGDYREFPIPEQFKTAWDGSKLITEPAEIMA

SEQ ID NO: 25746 - protein, 394 aa, Homo sapiens
  REGION 1..394: note = ENSP00000482279
MANMQGLVERLERAVSRLESLSAESHRPPGNCGEVNGVIAGVAPSVEAFDKLMDSMVAEFLKNSRILAGDVETHAEMVHSAFQAQRAFLLMASQYQQPHENDVAALLKPISEKIQEIQTFRERNRGSNMFNHLSAVSESIPALGWIAVSPKPPPLPPPGPPPLFENEGKKEESSPSRSALFAQLNQGEAITKGLRHVTDDQKTYKNPSLRAQGGQTQSPTKSHTPSPTSPKSYPSQKHAPVLELEGKKWRVEYQEDRNDLVISETELKQVAYIFKCEKSTIQIKGKVNSIIIDNCKKLGLVFDNVVGIVEVINSQDIQIQVMGRVPTISINKTEGCHIYLSEDALDCEIVSAKSSEMNILIPQDGDYREFPIPEQFKTAWDGSKLITEPAEIMA

SEQ ID NO: 25747 - protein, 163 aa, Homo sapiens
  REGION 1..163: note = ENSP00000435847
MSEEIITPVYCTGVSAQVQKQRARELGLGRHENAIKYLGQDYEQLRVRCLQSGTLFRDEAFPPVPQSLGYKDLGPNSSKTYGIKWKRPTELLSNPQFIVDGATRTDICQGALGDCWLLAAIASLTLNDTLLHRVVPHGQSFQNGYAGIFHFQLWQFGEWVDVV

SEQ ID NO: 25748 - protein, 191 aa, Homo sapiens
  REGION 1..191: note = ENSP00000432512
MSEEIITPVYCTGVSAQVQKQRARELGLGRHENAIKYLGQDYEQLRVRCLQSGTLFRDEAFPPVPQSLGYKDLGPNSSKTYGIKWKRPTELLSNPQFIVDGATRTDICQGALGDCWLLAAIASLTLNDTLLHRVVPHGQSFQNGYAGIFHFQLWQFGEWVDVVVDDLLPIKDGKLVFVHSAEGNEFWSALL

SEQ ID NO: 25749 - protein, 714 aa, Homo sapiens
  REGION 1..714: note = ENSP00000435272
MSEEIITPVYCTGVSAQVQKQRARELGLGRHENAIKYLGQDYEQLRVRCLQSGTLFRDEAFPPVPQSLGYKDLGPNSSKTYGIKWKRPTELLSNPQFIVDGATRTDICQGALGDCWLLAAIASLTLNDTLLHRVVPHGQSFQNGYAGIFHFQLWQFGEWVDVVVDDLLPIKDGKLVFVHSAEGNEFWSALLEKAYAKVNGSYEALSGGSTSEGFEDFTGGVTEWYELRKAPSDLYQIILKALERGSLLGCSIDISSVLDMEAITFKKLVKGHAYSVTGAKQVNYRGQVVSLIRMRNPWGEVEWTGAWSDSSSEWNNVDPYERDQLRVKMEDGEFWMSFRDFMREFTRLEICNLTPDALKSRTIRKWNTTLYEGTWRRGSTAGGCRNYPATFWVNPQFKIRLDETDDPDDYGDRESGCSFVLALMQKHRRRERRFGRDMETIGFAVYEVPPELVGQPAVHLKRDFFLANASRARSEQFINLREVSTRFRLPPGEYVVVPSTFEPNKEGDFVLRFFSEKSAGTVELDDQIQANLPDEQVLSEEEIDENFKALFRQLAGEDMEISVKELRTILNRIISKHKDLRTKGFSLESCRSMVNLMDRDGNGKLGLVEFNILWNRIRNYLSIFRKFDLDKSGSMSAYEMRMAIESAGFKLNKKLYELIITRYSEPDLAVDFDNFVCCLVRLETMFRFFKTLDTDLDGVVTFDLFKWLQLTMFA

SEQ ID NO: 25750 - protein, 161 aa, Homo sapiens
  REGION 1..161: note = ENSP00000433823
MSEEIITPVYCTGVSAQVQKQRARELGLGRHENAIKYLGQDYEQLRVRCLQSGTLFRDEAFPPVPQSLGYKDLGPNSSKTYGIKWKRPTELLSNPQFIVDGATRTDICQGALGDCWLLAAIASLTLNDTLLHRVVPHGQSFQNGYAGIFHFQLWQFGEWVD

SEQ ID NO: 25751 - protein, 161 aa, Homo sapiens; identical to SEQ ID NO: 25750
  REGION 1..161: note = ENSP00000431528

SEQ ID NO: 25752 - protein, 714 aa, Homo sapiens; identical to SEQ ID NO: 25749
  REGION 1..714: note = ENSP00000431686

SEQ ID NO: 25753 - protein, 714 aa, Homo sapiens; identical to SEQ ID NO: 25749
  REGION 1..714: note = ENSP00000434176

SEQ ID NO: 25754 - protein, 714 aa, Homo sapiens; identical to SEQ ID NO: 25749
  REGION 1..714: note = ENSP00000279247

SEQ ID NO: 25755 - protein, 63 aa, Homo sapiens
  REGION 1..63: note = ENSP00000436693
MSEEIITPVYCTGVSAQVQKQRARELGLGRHENAIKYLGQDYEQLRVRCLQSGTLFRDEAFPP

SEQ ID NO: 25756 - protein, 135 aa, Homo sapiens
  REGION 1..135: note = ENSP00000431793
MSEEIITPVYCTGVSAQVQKQRARELGLGRHENAIKYLGQDYEQLRVRCLQSGTLFRDEAFPPVPQSLGYKDLGPNSSKTYGIKWKRPTELLSNPQFIVDGATRTDICQGALGDCWLLAAIASLTLNDTLLHRVV

SEQ ID NO: 25757 - protein, 201 aa, Homo sapiens
  REGION 1..201: note = ENSP00000436002
MSEEIITPVYCTGVSAQVQKQRARELGLGRHENAIKYLGQDYEQLRVRCLQSGTLFRDEAFPPVPQSLGYKDLGPNSSKTYGIKWKRPTELLSNPQFIVDGATRTDICQGALGDCWLLAAIASLTLNDTLLHRVVPHGQSFQNGYAGIFHFQLWQFGEWVDVVVDDLLPIKDGKLVFVHSAEGNEFWSALLEKAYAKSPAF

SEQ ID NO: 25758 - protein, 122 aa, Homo sapiens
  REGION 1..122: note = ENSP00000435092
MSEEIITPVYCTGVSAQVQKQRARELGLGRHENAIKYLGQDYEQLRVRCLQSGTLFRDEAFPPVPQSLGYKDLGPNSSKTYGIKWKRPTELLSNPQFIVDGATRTDICQGALGDCWLLAAIA

SEQ ID NO: 25759 - protein, 152 aa, Homo sapiens
  REGION 1..152: note = ENSP00000431172
MSEEIITPVYCTGVSAQVQKQRARELGLGRHENAIKYLGQDYEQLRVRCLQSGTLFRDEAFPPVPQSLGYKDLGPNSSKTYGIKWKRPTELLSNPQFIVDGATRTDICQGALGDCWLLAAIASLTLNDTLLHRVVPHGQSFQNGYAGIFHFQ

SEQ ID NO: 25760 - protein, 148 aa, Homo sapiens
  REGION 1..148: note = ENSP00000435198
MSEEIITPVYCTGVSAQVQKQRARELGLGRHENAIKYLGQDYEQLRVRCLQSGTLFRDEAFPPVPQSLGYKDLGPNSSKTYGIKWKRPTELLSNPQFIVDGATRTDICQGALGDCWLLAAIASLTLNDTLLHRVVPHGQSFQNGYAGI

SEQ ID NO: 25761 - protein, 714 aa, Homo sapiens; identical to SEQ ID NO: 25749
  REGION 1..714: note = ENSP00000431984

SEQ ID NO: 25762 - protein, 191 aa, Homo sapiens
  REGION 1..191: note = ENSP00000433366
MCIPPAPGDCWLLAAIASLTLNDTLLHRVVPHGQSFQNGYAGIFHFQLWQFGEWVDVVVDDLLPIKDGKLVFVHSAEGNEFWSALLEKAYAKVNGSYEALSGGSTSEGFEDFTGGVTEWYELRKAPSDLYQIILKALERGSLLGCSIDISSVLDMEAITFKKLVKGHAYSVTGAKQVNYRGQVVSLIRMRN

SEQ ID NO: 25763 - protein, 815 aa, Homo sapiens
  REGION 1..815: note = ENSP00000350181
MPTVISASVAPRTAAEPRSPGPVPHPAQSKATEAGGGNPSGIYSAIISRNFPIIGVKEKTFEQLHKKCLEKKVLYVDPEFPPDETSLFYSQKFPIQFVWKRPPEICENPRFIIDGANRTDICQGELGDCWFLAAIACLTLNQHLLFRVIPHDQSFIENYAGIFHFQFWRYGEWVDVVIDDCLPTYNNQLVFTKSNHRNEFWSALLEKAYAKLHGSYEALKGGNTTEAMEDFTGGVAEFFEIRDAPSDMYKIMKKAIERGSLMGCSIDDGTNMTYGTSPSGLNMGELIARMVRNMDNSLLQDSDLDPRGSDERPTRTIIPVQYETRMACGLVRGHAYSVTGLDEVPFKGEKVKLVRLRNPWGQVEWNGSWSDRWKDWSFVDKDEKARLQHQVTEDGEFWMSYEDFIYHFTKLEICNLTADALQSDKLQTWTVSVNEGRWVRGCSAGGCRNFPDTFWTNPQYRLKLLEEDDDPDDSEVICSFLVALMQKNRRKDRKLGASLFTIGFAIYEVPKEMHGNKQHLQKDFFLYNASKARSKTYINMREVSQRFRLPPSEYVIVPSTYEPHQEGEFILRVFSEKRNLSEEVENTISVDRPVPIIFVSDRANSNKELGVDQESEEGKGKTSPDKQKQSPQPQPGSSDQESEEQQQFRNIFKQIAGDDMEICADELKKVLNTVVNKHKDLKTHGFTLESCRSMIALMDTDGSGKLNLQEFHHLWNKIKAWQKIFKHYDTDQSGTINSYEMRNAVNDAGFHLNNQLYDIITMRYADKHMNIDFDSFICCFVRLEGMFRAFHAFDKDGDGIIKLNVLEWLQLTMYA

SEQ ID NO: 25764 - protein, 729 aa, Homo sapiens
  REGION 1..729: note = ENSP00000183936
MPTVISASVAPRTAAEPRSPGPVPHPAQSKATEAGGGNPSGIYSAIISRNFPIIGVKEKTFEQLHKKCLEKKVLYVDPEFPPDETSLFYSQKFPIQFVWKRPPEICENPRFIIDGANRTDICQGELGDCWFLAAIACLTLNQHLLFRVIPHDQSFIENYAGIFHFQFWRYGEWVDVVIDDCLPTYNNQLVFTKSNHRNEFWSALLEKAYAKLHGSYEALKGGNTTEAMEDFTGGVAEFFEIRDAPSDMYKIMKKAIERGSLMGCSIDTIIPVQYETRMACGLVRGHAYSVTGLDEVPFKGEKVKLVRLRNPWGQVEWNGSWSDRWKDWSFVDKDEKARLQHQVTEDGEFWMSYEDFIYHFTKLEICNLTADALQSDKLQTWTVSVNEGRWVRGCSAGGCRNFPDTFWTNPQYRLKLLEEDDDPDDSEVICSFLVALMQKNRRKDRKLGASLFTIGFAIYEVPKEMHGNKQHLQKDFFLYNASKARSKTYINMREVSQRFRLPPSEYVIVPSTYEPHQEGEFILRVFSEKRNLSEEVENTISVDRPVPQPGSSDQESEEQQQFRNIFKQIAGDDMEICADELKKVLNTVVNKHKDLKTHGFTLESCRSMIALMDTDGSGKLNLQEFHHLWNKIKAWQKIFKHYDTDQSGTINSYEMRNAVNDAGFHLNNQLYDIITMRYADKHMNIDFDSFICCFVRLEGMFRAFHAFDKDGDGIIKLNVLEWLQLTMYA

SEQ ID NO: 25765 - protein, 821 aa, Homo sapiens
  REGION 1..821: note = ENSP00000380349
MPTVISASVAPRTAAEPRSPGPVPHPAQSKATEAGGGNPSGIYSAIISRNFPIIGVKEKTFEQLHKKCLEKKVLYVDPEFPPDETSLFYSQKFPIQFVWKRPPEICENPRFIIDGANRTDICQGELGDCWFLAAIACLTLNQHLLFRVIPHDQSFIENYAGIFHFQFWRYGEWVDVVIDDCLPTYNNQLVFTKSNHRNEFWSALLEKAYAKLHGSYEALKGGNTTEAMEDFTGGVAEFFEIRDAPSDMYKIMKKAIERGSLMGCSIDDGTNMTYGTSPSGLNMGELIARMVRNMDNSLLQDSDLDPRGSDERPTRTIIPVQYETRMACGLVRGHAYSVTGLDEVPFKGEKVKLVRLRNPWGQVEWNGSWSDRWKDWSFVDKDEKARLQHQVTEDGEFWMSYEDFIYHFTKLEICNLTADALQSDKLQTWTVSVNEGRWVRGCSAGGCRNFPDTFWTNPQYRLKLLEEDDDPDDSEVICSFLVALMQKNRRKDRKLGASLFTIGFAIYEVPKEMHGNKQHLQKDFFLYNASKARSKTYINMREVSQRFRLPPSEYVIVPSTYEPHQEGEFILRVFSEKRNLSEEVENTISVDRPVKKKKTKPIIFVSDRANSNKELGVDQESEEGKGKTSPDKQKQSPQPQPGSSDQESEEQQQFRNIFKQIAGDDMEICADELKKVLNTVVNKHKDLKTHGFTLESCRSMIALMDTDGSGKLNLQEFHHLWNKIKAWQKIFKHYDTDQSGTINSYEMRNAVNDAGFHLNNQLYDIITMRYADKHMNIDFDSFICCFVRLEGMFRAFHAFDKDGDGIIKLNVLEWLQLTMYA

SEQ ID NO: 25766 - protein, 309 aa, Homo sapiens
  REGION 1..309: note = ENSP00000380384
MHGNKQHLQKDFFLYNASKARSKTYINMREVSQRFRLPPSEYVIVPSTYEPHQEGEFILRVFSEKRNLSEEVENTISVDRPVKKKKTKPIIFVSDRANSNKELGVDQESEEGKGKTSPDKQKQSPQPQPGSSDQESEEQQQFRNIFKQIAGDDMEICADELKKVLNTVVNKHKDLKTHGFTLESCRSMIALMDTDGSGKLNLQEFHHLWNKIKAWQKIFKHYDTDQSGTINSYEMRNAVNDAGFHLNNQLYDIITMRYADKHMNIDFDSFICCFVRLEGMFRAFHAFDKDGDGIIKLNVLEWLQLTMYA

SEQ ID NO: 25767 - protein, 255 aa, Homo sapiens
  REGION 1..255: note = ENSP00000454379
MHGNKQHLQKDFFLYNASKARSKTYINMREVSQRFRLPPSEYVIVPSTYEPHQEGEFILRVFSEKRNLSEEVENTISVDRPVPQPGSSDQESEEQQQFRNIFKQIAGDDMEICADELKKVLNTVVNKHKDLKTHGFTLESCRSMIALMDTDGSGKLNLQEFHHLWNKIKAWQKIFKHYDTDQSGTINSYEMRNAVNDAGFHLNNQLYDIITMRYADKHMNIDFDSFICCFVRLEGMFRAFHAFDKDGDGIIKLNV

SEQ ID NO: 25768 - protein, 188 aa, Homo sapiens
  REGION 1..188: note = ENSP00000456607
  VARIANT 1: note = Any amino acid
XGNKQHLQKDFFLYNASKARSKTYINMREVSQRFRLPPSEYVIVPSTYEPHQEGEFILRVFSEKRNLSEEVENTISVDRPVKKKKTKPIIFVSDRANSNKELGVDQESEEGKGKTSPDKQKQSPQFSFVPPQPQPGSSDQESEEQQQFRNIFKQIAGDDMEICADELKKVLNTVVNKHKDLKTHGFTL

SEQ ID NO: 25769 - protein, 156 aa, Homo sapiens
  REGION 1..156: note = ENSP00000336840
MEICADELKKVLNTVVNKHKDLKTHGFTLESCRSMIALMDTDGSGKLNLQEFHHLWNKIKAWQKIFKHYDTDQSGTINSYEMRNAVNDAGFHLNNQLYDIITMRYADKHMNIDFDSFICCFVRLEGMFRAFHAFDKDGDGIIKLNVLEWLQLTMYA

SEQ ID NO: 25770 - protein, 156 aa, Homo sapiens; identical to SEQ ID NO: 25769
  REGION 1..156: note = ENSP00000455254

SEQ ID NO: 25771 - protein, 191 aa, Homo sapiens
  REGION 1..191: note = ENSP00000456575
MEICADELKKVLNTVVNKHKDLKTHGFTLESCRSMIALMDTDGSGKLNLQEFHHLWNKIKAWQKIFKHYDTDQSGTINSYEMRNAVNDAGFHLNNQLYDIITMRYADKHMNIDFDSFICCFVRLEGMFRAFHAFDKDGDGIIKLNVLEAVCRSTCRWHSAPPCARALHHLHAVPPWARNQTSTGFYCCGVN

SEQ ID NO: 25772 - protein, 156 aa, Homo sapiens; identical to SEQ ID NO: 25769
  REGION 1..156: note = ENSP00000380387

SEQ ID NO: 25773 - protein, 157 aa, Homo sapiens
  REGION 1..157: note = ENSP00000457878
MGGVASTLQGLPMRLGYTGAGGFPGVCLEHLEPQPGSSDQESEEQQQFRNIFKQIAGDDMEICADELKKVLNTVVNKHKDLKTHGFTLESCRSMIALMDTDGSGKLNLQEFHHLWNKIKAWQKIFKHYDTDQSGTINSYEMRNAVNDAGFHLNNQLY

SEQ ID NO: 25774 - protein, 110 aa, Homo sapiens
  REGION 1..110: note = ENSP00000457759
KKTKPIIFVSDRANSNKELGVDQESEEGKGKTSPDKQKQSPQPQPGSSDQESEEQQQFRNIFKQIAGDDMEICADELKKVLNTVVNKHKDLKTHGFTLESCRSMIALMDP

SEQ ID NO: 25775 - protein, 169 aa, Homo sapiens
  REGION 1..169: note = ENSP00000457898
  VARIANT 1: note = Any amino acid
XSPQPQPGSSDQESEEQQQFRNIFKQIAGDDMEICADELKKVLNTVVNKHKDLKTHGFTLESCRSMIALMDTDGSGKLNLQEFHHLWNKIKAWQMRNAVNDAGFHLNNQLYDIITMRYADKHMNIDFDSFICCFVRLEGMFRAFHAFDKDGDGIIKLNVLEWLQLTMYA

SEQ ID NO: 25776 - protein, 93 aa, Homo sapiens
  REGION 1..93: note = ENSP00000456514
KIFKHYDTDQSGTINSYEMRNAVNDAGFHLNNQLYDIITMRYADKHMNIDFDSFICCFVRLEGMFRAFHAFDKDGDGIIKLNVLEWLQLTMYA

SEQ ID NO: 25777 - protein, 67 aa, Homo sapiens
  REGION 1..67: note = ENSP00000454937
  VARIANT 1: note = Any amino acid
XFHLNNQLYDIITMRYADKHMNIDFDSFICCFVRLEGMFRAFHAFDKDGDGIIKLNVLEWLQLTMYA

SEQ ID NO: 25778 - protein, 156 aa, Homo sapiens; identical to SEQ ID NO: 25769
  REGION 1..156: note = ENSP00000348667

SEQ ID NO: 25779 - protein, 773 aa, Homo sapiens
  REGION 1..773: note = ENSP00000326281
MPTVISASVAPRTAAEPRSPGPVPHPAQSKATEAGGGNPSGIYSAIISRNFPIIGVKEKTFEQLHKKCLEKKVLYVDPEFPPDETSLFYSQKFPIQFVWKRPPEICENPRFIIDGANRTDICQGELGDCWFLAAIACLTLNQHLLFRVIPHDQSFIENYAGIFHFQFWRYGEWVDVVIDDCLPTYNNQLVFTKSNHRNEFWSALLEKAYAKLHGSYEALKGGNTTEAMEDFTGGVAEFFEIRDAPSDMYKIMKKAIERGSLMGCSIDTIIPVQYETRMACGLVRGHAYSVTGLDEVPFKGEKVKLVRLRNPWGQVEWNGSWSDRWKDWSFVDKDEKARLQHQVTEDGEFWMSYEDFIYHFTKLEICNLTADALQSDKLQTWTVSVNEGRWVRGCSAGGCRNFPDTFWTNPQYRLKLLEEDDDPDDSEVICSFLVALMQKNRRKDRKLGASLFTIGFAIYEVPKEMHGNKQHLQKDFFLYNASKARSKTYINMREVSQRFRLPPSEYVIVPSTYEPHQEGEFILRVFSEKRNLSEEVENTISVDRPVKKKKTKPIIFVSDRANSNKELGVDQESEEGKGKTSPDKQKQSPQPQPGSSDQESEEQQQFRNIFKQIAGDDMEICADELKKVLNTVVNKHKDLKTHGFTLESCRSMIALMDTDGSGKLNLQEFHHLWNKIKAWQKIFKHYDTDQSGTINSYEMRNAVNDAGFHLNNQLYDIITMRYADKHMNIDFDSFICCFVRLEGMFRAFHAFDKDGDGIIKLNVLEWLQLTMYA

SEQ ID NO: 25780 - protein, 52 aa, Homo sapiens
  REGION 1..52: note = ENSP00000467244
MFSCVKPYEDQNYSALRRDCRRRKVLFEDPLFPATDDSLYYKGTPGPAVRCT

SEQ ID NO: 25781 - protein, 640 aa, Homo sapiens
  REGION 1..640: note = ENSP00000278559
MFSCVKPYEDQNYSALRRDCRRRKVLFEDPLFPATDDSLYYKGTPGPAVRWKRPKGICEDPRLFVDGISSHDLHQGQVGNCWFVAACSSLASRESLWQKVIPDWKEQEWDPEKPNAYAGIFHFHFWRFGEWVDVVIDDRLPTVNNQLIYCHSNSRNEFWCALVEKAYAKLAGCYQALDGGNTADALVDFTGGVSEPIDLTEGDFANDETKRNQLFERMLKVHSRGGLISASIKAVTAADMEARLACGLVKGHAYAVTDVRKVRLGHGLLAFFKSEKLDMIRLRNPWGEREWNGPWSDTSEEWQKVSKSEREKMGVTVQDDGEFWMTFEDVCRYFTDIIKCRVINTSHLSIHKTWEEARLHGAWTLHEDPRQNRGGGCINHKDTFFQNPQYIFEVKKPEDEVLICIQQRPKRSTRREGKGENLAIGFDIYKVEENRQYRMHSLQHKAASSIYINSRSVFLRTDQPEGRYVIIPTTFEPGHTGEFLLRVFTDVPSNCRELRLDEPPHTCWSSLCGYPQLVTQVHVLGAAGLKDSPTGANSYVIIKCEGDKVRSAVQKGTSTPEYNVKGIFYRKKLSQPITVQVWNHRVLKDEFLGQVHLKADPDNLQALHTLHLRDRNSRQPSNLPGTVAVHILSSTSLMAV

SEQ ID NO: 25782 - protein, 97 aa, Homo sapiens
  REGION 1..97: note = ENSP00000435894
MFSCVKPYEDQNYSALRRDCRRRKVLFEDPLFPATDDSLYYKGTPGPAVRWKRPKGICEDPRLFVDGISSHDLHQGQVGNCWFVAACSSLASRESLW

SEQ ID NO: 25783 - protein, 640 aa, Homo sapiens; identical to SEQ ID NO: 25781
  REGION 1..640: note = ENSP00000432332

SEQ ID NO: 25784 - protein, 680 aa, Homo sapiens
  REGION 1..680: note = ENSP00000409996
MFSCVKPYEDQNYSALRRDCRRRKVLFEDPLFPATDDSLYYKGTPGPAVRWKRPKYSGHSLAPHRPGWGDARRMENVPRPGSSGCPSSSLRARDLGICEDPRLFVDGISSHDLHQGQVGNCWFVAACSSLASRESLWQKVIPDWKEQEWDPEKPNAYAGIFHFHFWRFGEWVDVVIDDRLPTVNNQLIYCHSNSRNEFWCALVEKAYAKLAGCYQALDGGNTADALVDFTGGVSEPIDLTEGDFANDETKRNQLFERMLKVHSRGGLISASIKAVTAADMEARLACGLVKGHAYAVTDVRKVRLGHGLLAFFKSEKLDMIRLRNPWGEREWNGPWSDTSEEWQKVSKSEREKMGVTVQDDGEFWMTFEDVCRYFTDIIKCRVINTSHLSIHKTWEEARLHGAWTLHEDPRQNRGGGCINHKDTFFQNPQYIFEVKKPEDEVLICIQQRPKRSTRREGKGENLAIGFDIYKVEENRQYRMHSLQHKAASSIYINSRSVFLRTDQPEGRYVIIPTTFEPGHTGEFLLRVFTDVPSNCRELRLDEPPHTCWSSLCGYPQLVTQVHVLGAAGLKDSPTGANSYVIIKCEGDKVRSAVQKGTSTPEYNVKGIFYRKKLSQPITVQVWNHRVLKDEFLGQVHLKADPDNLQALHTLHLRDRNSRQPSNLPGTVAVHILSSTSLMAV

SEQ ID NO: 25785 - protein, 690 aa, Homo sapiens
  REGION 1..690: note = ENSP00000271971
MPYLYRAPGPQAHPVPKDARITHSSGQSFEQMRQECLQRGTLFEDADFPASNSSLFYSERPQIPFVWKRPGEIVKNPEFILGGATRTDICQGELGDCWLLAAIASLTLNQKALARVIPQDQSFGPGYAGIFHFQFWQHSEWLDVVIDDRLPTFRDRLVFLHSADHNEFWSALLEKAYAKLNGSYEALKGGSAIEAMEDFTGGVAETFQTKEAPENFYEILEKALKRGSLLGCFIDTRSAAESEARTPFGLIKGHAYSVTGIDQVSFRGQRIELIRIRNPWGQVEWNGSWSDSSPEWRSVGPAEQKRLCHTALDDGEFWMAFKDFKAHFDKVEICNLTPDALEEDAIHKWEVTVHQGSWVRGSTAGGCRNFLDTFWTNPQIKLSLTEKDEGQEECSFLVALMQKDRRKLKRFGANVLTIGYAIYECPDKDEHLNKDFFRYHASRARSKTFINLREVSDRFKLPPGEYILIPSTFEPHQEADFCLRIFSEKKAITRDMDGNVDIDLPEPPKPTPPDQETEEEQRFRALFEQVAGEDMEVTAEELEYVLNAVLQKKKDIKFKKLSLISCKNIISLMDTSGNGKLEFDEFKVFWDKLKQWINLFLRFDADKSGTMSTYELRTALKAAGFQLSSHLLQLIVLRYADEELQLDFDDFLNCLVRLENASRVFQALSTKNKEFIHLNINEFIHLTMNI

SEQ ID NO: 25786 - protein, 664 aa, Homo sapiens
  REGION 1..664: note = ENSP00000346538
MPYLYRAPGPQAHPVPKDARITHSSGQSFEQMRQECLQRGTLFEDADFPASNSSLFYSERPQIPFVWKRPGEIVKNPEFILGGATRTDICQGELGDCWLLAAIASLTLNQKALARVIPQDQSFGPGYAGIFHFQFWQHSEWLDVVIDDRLPTFRDRLVFLHSADHNEFWSALLEKAYAKLNGSYEALKGGSAIEAMEDFTGGVAETFQTKEAPENFYEILEKALKRGSLLGCFIDTRSAAESEARTPFGLIKGHAYSVTGIDQVSFRGQRIELIRIRNPWGQVEWNGSWSDRMAFKDFKAHFDKVEICNLTPDALEEDAIHKWEVTVHQGSWVRGSTAGGCRNFLDTFWTNPQIKLSLTEKDEGQEECSFLVALMQKDRRKLKRFGANVLTIGYAIYECPDKDEHLNKDFFRYHASRARSKTFINLREVSDRFKLPPGEYILIPSTFEPHQEADFCLRIFSEKKAITRDMDGNVDIDLPEPPKPTPPDQETEEEQRFRALFEQVAGEDMEVTAEELEYVLNAVLQKKKDIKFKKLSLISCKNIISLMDTSGNGKLEFDEFKVFWDKLKQWINLFLRFDADKSGTMSTYELRTALKAAGFQLSSHLLQLIVLRYADEELQLDFDDFLNCLVRLENASRVFQALSTKNKEFIHLNINEFIHLTMNI

SEQ ID NO: 25787 - protein, 627 aa, Homo sapiens
  REGION 1..627: note = ENSP00000355626
MPYLYRAPGPQAHPVPKDARITHSSGQSFEQMRQECLQRGTLFEDADFPASNSSLFYSERPQIPFVWKRPGFWQHSEWLDVVIDDRLPTFRDRLVFLHSADHNEFWSALLEKAYAKLNGSYEALKGGSAIEAMEDFTGGVAETFQTKEAPENFYEILEKALKRGSLLGCFIDTRSAAESEARTPFGLIKGHAYSVTGIDQVSFRGQRIELIRIRNPWGQVEWNGSWSDSSPEWRSVGPAEQKRLCHTALDDGEFWMAFKDFKAHFDKVEICNLTPDALEEDAIHKWEVTVHQGSWVRGSTAGGCRNFLDTFWTNPQIKLSLTEKDEGQEECSFLVALMQKDRRKLKRFGANVLTIGYAIYECPDKDEHLNKDFFRYHASRARSKTFINLREVSDRFKLPPGEYILIPSTFEPHQEADFCLRIFSEKKAITRDMDGNVDIDLPEPPKPTPPDQETEEEQRFRALFEQVAGEDMEVTAEELEYVLNAVLQKKKDIKFKKLSLISCKNIISLMDTSGNGKLEFDEFKVFWDKLKQWINLFLRFDADKSGTMSTYELRTALKAAGFQLSSHLLQLIVLRYADEELQLDFDDFLNCLVRLENASRVFQALSTKNKEFIHLNINEFIHLTMNI

SEQ ID NO: 25788 - protein, 260 aa, Homo sapiens
  REGION 1..260: note = ENSP00000264203
MPRQFQDTGFSRPGLGQPRRCDPEPRKSDQQLDCALDLMRRLPPQQIEKNLSDLIDLVPSLCEDLLSSVDQPLKIARDKVVGKDYLLCDYNRDGDSYRSPWSNKYDPPLEDGAMPSARLRKLEVEANNAFDQYRDLYFEGGVSSVYLWDLDHGFAGVILIKKAGDGSKKIKGCWDSIHVVEVQEKSSGRTAHYKLTSTVMLWLQTNKSGSGTMNLGGSLTRQMEKDETVSDCSPHIANIGRLVEVCADFCRQIKTRSSEE

SEQ ID NO: 25789 - protein, 260 aa, Homo sapiens
  REGION 1..260: note = ENSP00000364286
MRRLPPQQIEKNLSDLIDLVPSLCEDLLSSVDQPLKIARDKVVGKDYLLCDYNRDGDSYRSPWSNKYDPPLEDGAMPSARLRKLEVEANNAFDQYRDLYFEGGVSSVYLWDLDHGFAGVILIKKAGDGSKKIKGCWDSIHVVEVQEKSSGRTAHYKLTSTVMLWLQTNKSGSGTMNLGGSLTRQMEKDETVSDCSPHIANIGRLVEDMENKIRSTLNEIYFGKTKDIVNGLRSVQTFADKSKQEALKNDLVEALKRKQQC

SEQ ID NO: 25790 - protein, 277 aa, Homo sapiens
  REGION 1..277: note = ENSP00000364284
MSDQQLDCALDLMRRLPPQQIEKNLSDLIDLVPSLCEDLLSSVDQPLKIARDKVVGKDYLLCDYNRDGDSYRSPWSNKYDPPLEDGAMPSARLRKLEVEANNAFDQYRDLYFEGGVSSVYLWDLDHGFAGVILIKKAGDGSKKIKGCWDSIHVVEVQEKSSGRTAHYKLTSTVMLWLQTNKSGSGTMNLGGSLTRQMEKDETVSDCSPHIANIGRLVEDMENKIRSTLNEIYFGKTKDIVNGLRSIDAIPDNQKFKQLQRELSQVLTQRQIYIQPDN

SEQ ID NO: 25791 - protein, 301 aa, Homo sapiens
  REGION 1..301: note = ENSP00000401010
MHPSRRSLPFPLNCQLARVGTADYGSPSDQSDQQLDCALDLMRRLPPQQIEKNLSDLIDLVPSLCEDLLSSVDQPLKIARDKVVGKDYLLCDYNRDGDSYRSPWSNKYDPPLEDGAMPSARLRKLEVEANNAFDQYRDLYFEGGVSSVYLWDLDHGFAGVILIKKAGDGSKKIKGCWDSIHVVEVQEKSSGRTAHYKLTSTVMLWLQTNKSGSGTMNLGGSLTRQMEKDETVSDCSPHIANIGRLVEDMENKIRSTLNEIYFGKTKDIVNGLRSVQTFADKSKQEALKNDLVEALKRKQQC

SEQ ID NO: 25792 - protein, 272 aa, Homo sapiens
  REGION 1..272: note = ENSP00000264202
MSDQQLDCALDLMRRLPPQQIEKNLSDLIDLVPSLCEDLLSSVDQPLKIARDKVVGKDYLLCDYNRDGDSYRSPWSNKYDPPLEDGAMPSARLRKLEVEANNAFDQYRDLYFEGGVSSVYLWDLDHGFAGVILIKKAGDGSKKIKGCWDSIHVVEVQEKSSGRTAHYKLTSTVMLWLQTNKSGSGTMNLGGSLTRQMEKDETVSDCSPHIANIGRLVEDMENKIRSTLNEIYFGKTKDIVNGLRSVQTFADKSKQEALKNDLVEALKRKQQC

SEQ ID NO: 25793 - protein, 354 aa, Homo sapiens
  REGION 1..354: note = ENSP00000178638
MPRRSLHAAAVLLLVILKEQPSSPAPVNGSKWTYFGPDGENSWSKKYPSCGGLLQSPIDLHSDILQYDASLTPLEFQGYNLSANKQFLLTNNGHSVKLNLPSDMHIQGLQSRYSATQLHLHWGNPNDPHGSEHTVSGQHFAAELHIVHYNSDLYPDASTASNKSEGLAVLAVLIEMGSFNPSYDKIFSHLQHVKYKGQEAFVPGFNIEELLPERTAEYYRYRGSLTTPPCNPTVLWTVFRNPVQISQEQLLALETALYCTHMDDPSPREMINNFRQVQKFDERLVYTSFSQVQVCTAAGLSLGIILSLALAGILGICIVVVVSIWLFRRKSIKKGDNKGVIYKPATKMETEAHA

SEQ ID NO: 25794 - protein, 343 aa, Homo sapiens
  REGION 1..343: note = ENSP00000343088
MPRRSLHAAAVLLLVILKEQPSSPAPVNGSKWTYFGPDGENSWSKKYPSCGGLLQSPIDLHSDILQYDASLTPLEFQGYNLSANKQFLLTNNGHSVKLNLPSDMHIQGLQSRYSATQLHLHWGNPNDPHGSEHTVSGQHFAAELHIVHYNSDLYPDASTASNKSEGLAVLAVLIEMGSFNPSYDKIFSHLQHVKYKGQEAFVPGFNIEELLPERTAEYYRYRGSLTTPPCNPTVLWTVFRNPVQISQEQLLALETALYCTHMDDPSPREMINNFRQVQKFDERLVYTSFSQGIILSLALAGILGICIVVVVSIWLFRRKSIKKGDNKGVIYKPATKMETEAHA

SEQ ID NO: 25795 - protein, 283 aa, Homo sapiens
  REGION 1..283: note = ENSP00000403028
MPRRSLHAAAVLLLVILKEQPSSPAPVNGSKWTYFVKLNLPSDMHIQGLQSRYSATQLHLHWGNPNDPHGSEHTVSGQHFAAELHIVHYNSDLYPDASTASNKSEGLAVLAVLIEMGSFNPSYDKIFSHLQHVKYKGQEAFVPGFNIEELLPERTAEYYRYRGSLTTPPCNPTVLWTVFRNPVQISQEQLLALETALYCTHMDDPSPREMINNFRQVQKFDERLVYTSFSQGIILSLALAGILGICIVVVVSIWLFRRKSIKKGDNKGVIYKPATKMETEAHA

SEQ ID NO: 25796 - protein, 337 aa, Homo sapiens
  REGION 1..337: note = ENSP00000358107
MLFSALLLEVIWILAADGGQHWTYEGPHGQDHWPASYPECGNNAQSPIDIQTDSVTFDPDLPALQPHGYDQPGTEPLDLHNNGHTVQLSLPSTLYLGGLPRKYVAAQLHLHWGQKGSPGGSEHQINSEATFAELHIVHYDSDSYDSLSEAAERPQGLAVLGILIEVGETKNIAYEHILSHLHEVRHKDQKTSVPPFNLRELLPKQLGQYFRYNGSLTTPPCYQSVLWTVFYRRSQISMEQLEKLQGTLFSTEEEPSKLLVQNYRALQPLNQRMVFASFIQAGSSYTTGEMLSLGVGILVGCLCLLLAVYFIARKIRKKRLENRKSVVFTSAQATTEA

SEQ ID NO: 25797 - protein, 42 aa, Homo sapiens
  REGION 1..42: note = ENSP00000475869
MLFSALLLEVIWILAADGGQHWTYEAPPFWISSCLEFHIYGS

SEQ ID NO: 25798 - protein, 130 aa, Homo sapiens
  REGION 1..130: note = ENSP00000475238
QKTSVPPFNLRELLPKQLGQYFRYNGSLTTPPCYQSVLWTVFYRRSQISMEQLEKLQGTLFSTEEEPSKLLVQNYRALQPLNQRMVFASFIQGSSYTTGRRGWKTERVWSSPQHKPRLRHKFLLRYHGCG

SEQ ID NO: 25799 - protein, 260 aa, Homo sapiens
  REGION 1..260: note = ENSP00000285379
MSHHWGYGKHNGPEHWHKDFPIAKGERQSPVDIDTHTAKYDPSLKPLSVSYDQATSLRILNNGHAFNVEFDDSQDKAVLKGGPLDGTYRLIQFHFHWGSLDGQGSEHTVDKKKYAAELHLVHWNTKYGDFGKAVQQPDGLAVLGIFLKVGSAKPGLQKVVDVLDSIKTKGKSADFTNFDPRGLLPESLDYWTYPGSLTTPPLLECVTWIVLKEPISVSSEQVLKFRKLNFNGEGEPEELMVDNWRPAQPLKNRQIKASFK

SEQ ID NO: 25800 - protein, 97 aa, Homo sapiens
  REGION 1..97: note = ENSP00000428443
MSHHWGYGKHNGPEHWHKDFPIAKGERQSPVDIDTHTAKYDPSLKPLSVSYDQATSLRILNNGHAFNVEFDDSQDKAASLGSLEHQIWGFWESCAAT

SEQ ID NO: 25801 - protein, 101 aa, Homo sapiens
  REGION 1..101: note = ENSP00000428947
MSHHWGYGKHNGPEHWHKDFPIAKGERQSPVDIDTHTAKYDPSLKPLSVSYDQATSLRILNNGHAFNVEFDDSQDKAEKGISMLRKKDVKNIHSPDNACEE

SEQ ID NO: 25802 - protein, 312 aa, Homo sapiens
  REGION 1..312: note = ENSP00000300900
MRMLLALLALSAARPSASAESHWCYEVQAESSNYPCLVPVKWGGNCQKDRQSPINIVTTKAKVDKKLGRFFFSGYDKKQTWTVQNNGHSVMMLLENKASISGGGLPAPYQAKQLHLHWSDLPYKGSEHSLDGEHFAMEMHIVHEKEKGTSRNVKEAQDPEDEIAVLAFLVEAGTQVNEGFQPLVEALSNIPKPEMSTTMAESSLLDLLPKEEKLRHYFRYLGSLTTPTCDEKVVWTVFREPIQLHREQILAFSQKLYYDKEQTVSMKDNVRPLQQLGQRTVIKSGAPGRPLPWALPALLGPMLACLLAGFLR

SEQ ID NO: 25803 - protein, 38 aa, Homo sapiens
  REGION 1..38: note = ENSP00000466964
MMLLENKASISGGGLPAPYQAKQLHLHWSDLPYKGSEH

SEQ ID NO: 25804 - protein, 106 aa, Homo sapiens
  REGION 1..106: note = ENSP00000467465
MRMLLALLALSAARPSASAESHWCYEVQAESSNYPCLVPVKWGGNCQKDRQSPINIVTTKAKVDKKLGRFFFSGYDKKQTWTVQNNGHSGWNPGERGLPATGGGTV

SEQ ID NO: 25805 - protein, 184 aa, Homo sapiens
  REGION 1..184: note = ENSP00000465837
VKEAQDPEDEIAVLAFLVEIGRMNWPPPLAPCRLSQDPSLPFQAGTQVNEGFQPLVEALSNIPKPEMSTTMAESSLLDLLPKEEKLRHYFRYLGSLTTPTCDEKVVWTVFREPIQLHREQILAFSQKLYYDKEQTVSMKDNVRPLQQLGQRTVIKSGAPGRPLPWALPALLGPMLACLLAGFLR

SEQ ID NO: 25806 - protein, 99 aa, Homo sapiens
  REGION 1..99: note = ENSP00000464757
  VARIANT 1: note = Any amino acid
XSNIPKPEMSTTMAESSLLDLLPKEEKLRHYFRYLGSLTTPTCDEKVVWTVFREPIQLHREQVHRAWGRAWAPTAWLPRNYPSVCPQRSLRIQVGSPGN

SEQ ID NO: 25807 - protein, 290 aa, Homo sapiens
  REGION 1..290: note = ENSP00000314407
MADLSFIEDTVAFPEKEEDEEEEEEGVEWGYEEGVEWGLVFPDANGEYQSPINLNSREARYDPSLLDVRLSPNYVVCRDCEVTNDGHTIQVILKSKSVLSGGPLPQGHEFELYEVRFHWGRENQRGSEHTVNFKAFPMELHLIHWNSTLFGSIDEAVGKPHGIAIIALFVQIGKEHVGLKAVTEILQDIQYKGKSKTIPCFNPNTLLPDPLLRDYWVYEGSLTIPPCSEGVTWILFRYPLTISQLQIEEFRRLRTHVKGAELVEGCDGILGDNFRPTQPLSDRVIRAAFQ

SEQ ID NO: 25808 - protein, 196 aa, Homo sapiens
  REGION 1..196: note = ENSP00000489403
MIVETEKCSISMKMASPEDVSEVLAHIGTCLRKIFPGLSPVRIMKKVSMEPSERLASLQALWDSQTVAEQGPCGGFSQMYACVCDWLGFSYREEVQWDVDTIYLTQDTRELNLQDFSHLDHRKSRIAVWSLKSSSQLNRPGKKYTSWIYLLFAQPGTTEDGEAGSAVSVVVADGPKASSSQAIFFFSCLEQFSFFL

SEQ ID NO: 25809 - protein, 1371 aa, Homo sapiens
  REGION 1..1371: note = ENSP00000331983
MTEESSDVPRELIESIKDVIGRKIKISVKKKVKLEVKGDKVENKVLVLTSCRAFLVTARIPTKLELTFSYLEIHGVVCSKSAQMIVETEKCSISMKMASPEDVSEVLAHIGTCLRKIFPGLSPVRIMKKVSMEPSERLASLQALWDSQTVAEQGPCGGFSQMYACVCDWLGFSYREEVQWDVDTIYLTQDTRELNLQDFSHLDHRDLIPIIAALEYNQWFTKLSSKDLKLSTDVCEQILRVVSRSNRLEELVLENAGLRTDFAQKLASALAHNPNSGLHTINLAGNPLEDRGVSSLSIQFAKLPKGLKHLNLSKTSLSPKGVNSLSQSLSANPLTASTLVHLDLSGNVLRGDDLSHMYNFLAQPNAIVHLDLSNTECSLDMVCGALLRGCLQYLAVLNLSRTVFSHRKGKEVPPSFKQFFSSSLALMHINLSGTKLSPEPLKALLLGLACNHNLKGVSLDLSNCELRSGGAQVLEGCIAEIHNITSLDISDNGLESDLSTLIVWLSKNRSIQHLALGKNFNNMKSKNLTPVLDNLVQMIQDEESPLQSLSLADSKLKTEVTIIINALGSNTSLTKVDISGNGMGDMGAKMLAKALQINTKLRTVIWDKNNITAQGFQDIAVAMEKNYTLRFMPIPMYDASQALKTNPEKTEDALQKIENYLLRNHETRKYLQEQAYRLQQGIVTSTTQQMIDRICVKVQDHLNSLRNCGGDAIQEDLKSAERLMRDAKNSKTLLPNLYHVGGASWAGASGLLSSPIQETLESMAGEVTRVVDEQLKALLESMVDAAENLCPNVMKKAHIRQDLIHASTEKISIPRTFVKNVLLEQSGIDILNKISEVKLTVASFLSDRIVDEILDALSHCHHKLADHFSRRGKTLPQQESLEIELAEEKPVKRSIITVEELTEIERLEDLDTCMMTPKSKRKSIHSRMLRPVSRAFEMEFDLDKALEEVPIHIEDPPFPSLRQEKRSSGFISELPSEEGKKLEHFTKLRPKRNKKQQPTQAAVCAANIVSQDGEQNGLMGRVDEGVDEFFTKKVTKMDSKKWSTRGSESHELNEGGDEKKKRDSRKSSGFLNLIKSRSKSERPPTILMTEEPSSPKGAVRSPPVDCPRKDTKAAEHNGNSERIEEIKTPDSFEESQGEEIGKVERSDSKSSPQAGRRYGVQVMGSGLLAEMKAKQEKRAACAQKKLGNDAVSQDSSSPALSGVERSDGGGAVPKLHPGLPENRFGLGTPEKNTKAEPKAEAGSRSRSSSSTPTSPKPLLQSPKPSLAARPVIPQKPRTASRPDDIPDSPSSPKVALLPPVLKKVPSDKERDGQSSPQPSPRTFSQEVSRRSWGQQAQEYQEQKQRSSSKDGHQGSKSNDSGEEAEKEFIFV

SEQ ID NO: 25810 - protein, 932 aa, Homo sapiens
  REGION 1..932: note = ENSP00000489114
EVPPSFKQFFSSSLALMHINLSGTKLSPEPLKALLLGLACNHNLKGVSLDLSNCELGHCLRSGGAQVLEGCIAEIHNITSLDISDNGLESDLSTLIVWLSKNRSIQHLALGKNFNNMKSKNLTPVLDNLVQMIQDEESPLQSLSLADSKLKTEVTIIINALGSNTSLTKVDISGNGMGDMGAKMLAKALQINTKLRTVIWDKNNITAQGFQDIAVAMEKNYTLRFMPIPMYDASQALKTNPEKTEDALQKIENYLLRNHETRKYLQEQAYRLQQGIVTSTTQQMIDRICVKVQDHLNSLRNCGGDAIQEDLKSAERLMRDAKNSKTLLPNLYHVGGASWAGASGLLSSPIQETLESMAGEVTRVVDEQLKALLESMVDAAENLCPNVMKKAHIRQDLIHASTEKISIPRTFVKNVLLEQSGIDILNKISEVKLTVASFLSDRIVDEILDALSHCHHKLADHFSRRGKTLPQQESLEIELAEEKPVKRSIITVEELTEIERLEDLDTCMTLCCTSMTPKSKRKSIHSRMLRPVSRAFEMEFDLDKALEEVPIHIEDPPFPSLRQEKRSSGFISELPSEEGKKLEHFTKLRPKRNKKQQPTQAAVCAANIVSQDGEQNGLMGRVDEGVDEFFTKKVTKMDSKKWSTRGSESHELNEGGDEKKKRDSRKSSGFLNLIKSRSKSERPPTILMTEEPSSPKGAVRSPPVDCPRKDTKAAEHNGNSERIEEIKTPDSFEESQGEEIGKVERSDSKSSPQAGRRYGVQVMGSGLLAEMKAKQEKRAACAQKKLGNDAVSQDSSSPALSGVERSDGGGAVPKLHPGLPENRFGLGTPEKNTKAEPKAEAGSRSRSSSSTPTSPKPLLQSPKPSLAARPVIPQKPRTASRPDDIPDSPSSPKVALLPPVLKKVPSDKERDGQSSPQPSPRTFSQEACPTNF

SEQ ID NO: 25811 - protein, 924 aa, Homo sapiens
  REGION 1..924: note = ENSP00000431670
MLSLDPSGPEWDCPLGSKDLEEEGPWGGGSGLPPTGCFPGSWRQDVGLDCKGSPEGAEARAWTVYYYSLLQSCLQQAGLPETQDRGQVPRTGCPGAEVTLCVLGSPSTFLPVLLEGGVQSPGNMLLCLSPAWLMKVPAPGQPGEAALLVSKAVSFHPGGLTFLDDFVPPRRATYFLAGLGLGPGRGREAAELARDLTCPTGASAELARLLEDRLLTRQLLAQQGGVAVPATLAFTYKPPGLLRGGDASLGLRLVELSGKEGQETLVKEEVEAFLRSEALGDILQVAVKLSGWRWRGRQAWRLHPRAELGAVVDTVLALLEKLEEEESVLVEAVYPPAQLPCSDGPSPGPGLAVRICAVVCRTQGDRPLLSKVVCGVGRGDRPLRHHNSLPRTLEAALAAVLALEAGLSAEQRGGRRAHTDFLGVDFALTAAGGVLTPVALELNGGLCLEACGALEGLWAAPRLGPAADEAVAAPLVETMLRRSARCLMEGKQLLVVGAGGVSKKFVWEAARDYGLQLHLVESDPNHFASQLVQTFIHFDMTEHRRDEENARLLAELVRARGLKLDGCFSYWDDCLVLTALLCQELGLPCSSPAAMRLAKQKSLTQLHLLHHHGPPWPAPSLHAVPCCPLESEADVERAVHQVPLPGVMKLEFGAGAVGVRLVEDAPQCHEHFSRITRDLQGEADHPGIGLGWGNAMLLMEFVEGTEHDVDLVLFGGRLLAAFVSDNGPTRLPGFTETAACMPTGLAPEQEAQMVQAAFRCCLGCGLLDGVFNVELKLTGAGPRLIEINPRMGGFYLRDWILELYGVDLLLAAVMVACGLRPALPTRPRARGHLVGVMCLVSQHLQALSSTASRETLQALHDRGLLRLNLLEEALVPGEYEEPYCSVACAGPSPTEARLRLLGLCQGLGIDGPSYPVAHFLSHFK

SEQ ID NO: 25812 - protein, 827 aa, Homo sapiens
  REGION 1..827: note = ENSP00000308268
MLLCLSPAWLMKVPAPGQPGEAALLVSKAVSFHPGGLTFLDDFVPPRRATYFLAGLGLGPGRGREAAELARDLTCPTGASAELARLLEDRLLTRQLLAQQGGVAVPATLAFTYKPPGLLRGGDASLGLRLVELSGKEGQETLVKEEVEAFLRSEALGDILQVAVKLSGWRWRGRQAWRLHPRAELGAVVDTVLALLEKLEEEESVLVEAVYPPAQLPCSDGPSPGPGLAVRICAVVCRTQGDRPLLSKVVCGVGRGDRPLRHHNSLPRTLEVALAQCGLGEEAQVAAVRQRVKAAAEAALAAVLALEAGLSAEQRGGRRAHTDFLGVDFALTAAGGVLTPVALELNGGLCLEACGALEGLWAAPRLGPAADEAVAAPLVETMLRRSARCLMEGKQLLVVGAGGVSKKFVWEAARDYGLQLHLVESDPNHFASQLVQTFIHFDMTEHRRDEENARLLAELVRARGLKLDGCFSYWDDCLVLTALLCQELGLPCSSPAAMRLAKQKSLTQLHLLHHHGPPWPAPSLHAVPCCPLESEADVERAVHQVPLPGVMKLEFGAGAVGVRLVEDAPQCHEHFSRITRDLQGEADHPGIGLGWGNAMLLMEFVEGTEHDVDLVLFGGRLLAAFVSDNGPTRLPGFTETAACMPTGLAPEQEAQMVQAAFRCCLGCGLLDGVFNVELKLTGAGPRLIEINPRMGGFYLRDWILELYGVDLLLAAVMVACGLRPALPTRPRARGHLVGVMCLVSQHLQALSSTASRETLQALHDRGLLRLNLLEEALVPGEYEEPYCSVACAGPSPTEARLRLLGLCQGLGIDGPSYPVAHFLSHFK

SEQ ID NO: 25813 - protein, 950 aa, Homo sapiens
  REGION 1..950: note = ENSP00000389009
MLSLDPSGPEWDCPLGSKDLEEEGPWGGGSGLPPTGCFPGSWRQDVGLDCKGSPEGAEARAWTVYYYSLLQSCLQQAGLPETQDRGQVPRTGCPGAEVTLCVLGSPSTFLPVLLEGGVQSPGNMLLCLSPAWLMKVPAPGQPGEAALLVSKAVSFHPGGLTFLDDFVPPRRATYFLAGLGLGPGRGREAAELARDLTCPTGASAELARLLEDRLLTRQLLAQQGGVAVPATLAFTYKPPGLLRGGDASLGLRLVELSGKEGQETLVKEEVEAFLRSEALGDILQVAVKLSGWRWRGRQAWRLHPRAELGAVVDTVLALLEKLEEEESVLVEAVYPPAQLPCSDGPSPGPGLAVRICAVVCRTQGDRPLLSKVVCGVGRGDRPLRHHNSLPRTLEVALAQCGLGEEAQVAAVRQRVKAAAEAALAAVLALEAGLSAEQRGGRRAHTDFLGVDFALTAAGGVLTPVALELNGGLCLEACGALEGLWAAPRLGPAADEAVAAPLVETMLRRSARCLMEGKQLLVVGAGGVSKKFVWEAARDYGLQLHLVESDPNHFASQLVQTFIHFDMTEHRRDEENARLLAELVRARGLKLDGCFSYWDDCLVLTALLCQELGLPCSSPAAMRLAKQKSLTQLHLLHHHGPPWPAPSLHAVPCCPLESEADVERAVHQVPLPGVMKLEFGAGAVGVRLVEDAPQCHEHFSRITRDLQGEADHPGIGLGWGNAMLLMEFVEGTEHDVDLVLFGGRLLAAFVSDNGPTRLPGFTETAACMPTGLAPEQEAQMVQAAFRCCLGCGLLDGVFNVELKLTGAGPRLIEINPRMGGFYLRDWILELYGVDLLLAAVMVACGLRPALPTRPRARGHLVGVMCLVSQHLQALSSTASRETLQALHDRGLLRLNLLEEALVPGEYEEPYCSVACAGPSPTEARLRLLGLCQGLGIDGPSYPVAHFLSHFK

SEQ ID NO: 25814 - protein, 340 aa, Homo sapiens
  REGION 1..340: note = ENSP00000482745
MADEKPSNGVLVHMVKLLIKTFLDGIFDDLMENNVLNTDEIHLIGKCLKFVVSNAENLVDDITETAQIAGKIFREHLWNSKKQLSSDISSDGEREANMPGLNIRNKEFNYLHNRNGSELDLLGMDLLENLGYSVVIKENLTAQEMETALRQFAAHPEHQSSDSTFLVFMSHSILNGICGTKHWDQEPDVLHDDTIFEIFNNRNCQSLKDKPKVIIMQACRGNGAGIVWFTTDSGKASADTHGRLLQGNICNDAVTKAHVEKDFIAFKSSTPHNVSWRHETNGSVFISQIIYYFREYSWSHHLEEIFQKVQHSFETPNILTQLPTIERLSMTRYFYLFPGN

SEQ ID NO: 25815 - protein, 168 aa, Homo sapiens
  REGION 1..168: note = ENSP00000421408
MADEKPSNGVLVHMVKLLIKTFLDGIFDDLMENNVLNTDEIHLIGKCLKFVVSNAENLVDDITETAQIAGKIFREHLWNSKKQLSSAFLEIQGAQPSGKLKLCPHAHFHELKTKRADEIYPVMEKERRTCLASTSATKNSTIFIIEMVLNLTFWGCEIYLKTLDTQWL

SEQ ID NO: 25816 - protein, 340 aa, Homo sapiens; identical to SEQ ID NO: 25814
  REGION 1..340: note = ENSP00000424038

SEQ ID NO: 25817 - protein, 139 aa, Homo sapiens
  REGION 1..139: note = ENSP00000426427
MADISSDGEREANMPGLNIRNKEFNYLHNRNGSELDLLGMDLLENLGYSVVIKENLTAQMVLGLFGSPLTVEKPVQILMVGSCKVTSVMMLLQRLMWKRTSLLSNLPHHIMFLGDMKQMALSSFPKLSTTSESILGVII

SEQ ID NO: 25818 - protein, 276 aa, Homo sapiens
  REGION 1..276: note = ENSP00000425652
MADEKPSNGVLVHMVKLLIKTFLDGIFDDLMENNVLNTDEIHLIGKCLKFVVSNAENLVDDITETAQIAGKIFREHLWNSKKQLSSDISSDGEREANMPGLNIRNKEFNYLHNRNGSELDLLGMDLLENLGYSVVIKENLTAQEMETALRQFAAHPEHQSSDSTFLVFMSHSILNGICGTKHWDQEPDVLHDDTIFEIFNNRNCQSLKDKPKVIIMQACRGNGAGIVWFTTDSGKASADTHGRLLQGNICNDAVTKAHVEKDFIAFKSSTPRSTFI

SEQ ID NO: 25819 - protein, 294 aa, Homo sapiens
  REGION 1..294: note = ENSP00000423970
MADEKPSNGVLVHMVKLLIKTFLDGIFDDLMENNVLNTDEIHLIGKCLKFVVSNAENLVDDITETAQIAGKIFREHLWNSKKQLSSDISSDGEREANMPGLNIRNKEFNYLHNRNGSELDLLGMDLLENLGYSVVIKENLTAQEMETALRQFAAHPEHQSSDSTFLVFMSHSILNGICGTKHWDQEPDVLHDDTIFEIFNNRNCQSLKDKPKMVLGLFGSPLTVEKPVQILMVGSCKVTSVMMLLQRLMWKRTSLLSNLPHHVQHSFETPNILTQLPTIERLSMTRYFYLFPGN

SEQ ID NO: 25820 - protein, 141 aa, Homo sapiens
  REGION 1..141: note = ENSP00000427437
MADISSDGEREANMPGLNIRNKEFNYLHNRNGSELDLLGMDLLENLGYSVVIKENLTAQMVLGLFGSPLTVEKPVQILMVGSCKVTSVMMLLQRLMWKRTSLLSNLPHHVQHSFETPNILTQLPTIERLSMTRYFYLFPGN

SEQ ID NO: 25821 - protein, 223 aa, Homo sapiens
  REGION 1..223: note = ENSP00000423899
MADEKPSNGVLVHMVKLLIKTFLDGIFDDLMENNVLNTDEIHLIGKCLKFVVSNAENLVDDITETAQIAGKIFREHLWNSKKQLSSDISSDGEREANMPGLNIRNKEFNYLHNRNGSELDLLGMDLLENLGYSVVIKENLTAQMVLGLFGSPLTVEKPVQILMVGSCKVTSVMMLLQRLMWKRTSLLSNLPHHIMFLGDMKQMALSSFPKLSTTSESILGVII

SEQ ID NO: 25822 - protein, 168 aa, Homo sapiens; identical to SEQ ID NO: 25815
  REGION 1..168: note = ENSP00000424963

SEQ ID NO: 25823 - protein, 225 aa, Homo sapiens
  REGION 1..225: note = ENSP00000421815
MADEKPSNGVLVHMVKLLIKTFLDGIFDDLMENNVLNTDEIHLIGKCLKFVVSNAENLVDDITETAQIAGKIFREHLWNSKKQLSSDISSDGEREANMPGLNIRNKEFNYLHNRNGSELDLLGMDLLENLGYSVVIKENLTAQMVLGLFGSPLTVEKPVQILMVGSCKVTSVMMLLQRLMWKRTSLLSNLPHHVQHSFETPNILTQLPTIERLSMTRYFYLFPGN

SEQ ID NO: 25824 - protein, 256 aa, Homo sapiens
  REGION 1..256: note = ENSP00000426566
MADISSDGEREANMPGLNIRNKEFNYLHNRNGSELDLLGMDLLENLGYSVVIKENLTAQEMETALRQFAAHPEHQSSDSTFLVFMSHSILNGICGTKHWDQEPDVLHDDTIFEIFNNRNCQSLKDKPKVIIMQACRGNGAGIVWFTTDSGKASADTHGRLLQGNICNDAVTKAHVEKDFIAFKSSTPHNVSWRHETNGSVFISQIIYYFREYSWSHHLEEIFQKVQHSFETPNILTQLPTIERLSMTRYFYLFPGN

SEQ ID NO: 25825 - protein, 340 aa, Homo sapiens; identical to SEQ ID NO: 25814
  REGION 1..340: note = ENSP00000427128

SEQ ID NO: 25826 - protein, 182 aa, Homo sapiens
  REGION 1..182: note = ENSP00000377210
MENTENSVDSKSIKNLEPKIIHGSESMDSGISLDNSYKMDYPEMGLCIIINNKNFHKSTGMTSRSGTDVDAANLRETFRNLKYEVRNKNDLTREEIVELMRDVSKEDHSKRSSFVCVLLSHGEEGIIFGTNGPVDLKKITNFFRGDRCRSLTGKPKLFIIQVIILGEIQRMAPGSSSRFVPC

SEQ ID NO: 25827 - protein, 277 aa, Homo sapiens
  REGION 1..277: note = ENSP00000311032
MENTENSVDSKSIKNLEPKIIHGSESMDSGISLDNSYKMDYPEMGLCIIINNKNFHKSTGMTSRSGTDVDAANLRETFRNLKYEVRNKNDLTREEIVELMRDVSKEDHSKRSSFVCVLLSHGEEGIIFGTNGPVDLKKITNFFRGDRCRSLTGKPKLFIIQACRGTELDCGIETDSGVDDDMACHKIPVEADFLYAYSTAPGYYSWRNSKDGSWFIQSLCAMLKQYADKLEFMHILTRVNRKVATEFESFSFDATFHAKKQIPCIVSMLTKELYFYH

SEQ ID NO: 25828 - protein, 277 aa, Homo sapiens; identical to SEQ ID NO: 25827
  REGION 1..277: note = ENSP00000428929

SEQ ID NO: 25829 - protein, 182 aa, Homo sapiens; identical to SEQ ID NO: 25826
  REGION 1..182: note = ENSP00000428372

SEQ ID NO: 25830 - protein, 182 aa, Homo sapiens; identical to SEQ ID NO: 25826
  REGION 1..182: note = ENSP00000377213

SEQ ID NO: 25831 - protein, 117 aa, Homo sapiens
  REGION 1..117: note = ENSP00000407142
MENTENSVDSKSIKNLEPKIIHGSESMDSGISLDNSYKMDYPEMGLCIIINNKNFHKSTGMTSRSGTDVDAANLRETFRNLKYEVRNKNDLTREEIVELMRDVSKEDHSKRSSFVCV

SEQ ID NO: 25832 - protein, 377 aa, Homo sapiens
  REGION 1..377: note = ENSP00000388566
MAEGNHRKKPLKVLESLGKDFLTGVLDNLVEQNVLNWKEEEKKKYYDAKTEDKVRVMADSMQEKQRMAGQMLLQTFFNIDQISPNKKAHPNMEAGPPESGESTDALKLCPHEEFLRLCKERAEEIYPIKERNNRTRLALIICNTEFDHLPPRNGADFDITGMKELLEGLDYSVDVEENLTARDMESALRAFATRPEHKSSDSTFLVLMSHGILEGICGTVHDEKKPDVLLYDTIFQIFNNRNCLSLKDKPKVIIVQACRGANRGELWVRDSPASLEVASSQSSENLEEDAVYKTHVEKDFIAFCSSTPHNVSWRDSTMGSIFITQLITCFQKYSWCCHLEEVFRKVQQSFETPRAKAQMPTIERLSMTRYFYLFPGN

SEQ ID NO: 25833 - protein, 321 aa, Homo sapiens
  REGION 1..321: note = ENSP00000376857
MADSMQEKQRMAGQMLLQTFFNIDQISPNKKAHPNMEAGPPESGESTDALKLCPHEEFLRLCKERAEEIYPIKERNNRTRLALIICNTEFDHLPPRNGADFDITGMKELLEGLDYSVDVEENLTARDMESALRAFATRPEHKSSDSTFLVLMSHGILEGICGTVHDEKKPDVLLYDTIFQIFNNRNCLSLKDKPKVIIVQACRGANRGELWVRDSPASLEVASSQSSENLEEDAVYKTHVEKDFIAFCSSTPHNVSWRDSTMGSIFITQLITCFQKYSWCCHLEEVFRKVQQSFETPRAKAQMPTIERLSMTRYFYLFPGN

SEQ ID NO: 25834 - protein, 72 aa, Homo sapiens
  REGION 1..72: note = ENSP00000432879
  VARIANT 1: note = Any amino acid
XNVSWRDSTMGSIFITQLITCFQKYSWCCHLEEVFRKEATSSPALLNQLQGAPSLVQLAYLTFCISIKVKTN

SEQ ID NO: 25835 - protein, 147 aa, Homo sapiens
  REGION 1..147: note = ENSP00000401673
MAEGNHRKKPLKVLESLGKDFLTGVLDNLVEQNVLNWKEEEKKKYYDAKTEDKVRVMADSMQEKQRMAGQMLLQTFFNIDQISPNKKAHPNMEAGPPESGESTDALKLCPHEEFLRLCKERAEEIYPIKERNNRTRLALIICNTEFD

SEQ ID NO: 25836 - protein, 421 aa, Homo sapiens
  REGION 1..421: note = ENSP00000449584
MDEADRRLLRRCRLRLVEELQVDQLWDALLSRELFRPHMIEDIQRAGSGSRRDQARQLIIDLETRGSQALPLFISCLEDTGQDMLASFLRTNRQAAKLSKPTLENLTPVVLRPEIRKPEVLRPETPRPVDIGSGGFGDVGALESLRGNADLAYILSMEPCGHCLIINNVNFCRESGLRTRTGSNIDCEKLRRRFSSLHFMVEVKGDLTAKKMVLALLELAQQDHGALDCCVVVILSHGCQASHLQFPGAVYGTDGCPVSVEKIVNIFNGTSCPSLGGKPKLFFIQACGGEQKDHGFEVASTSPEDESPGSNPEPDATPFQEGLRTFDQLDAISSLPTPSDIFVSYSTFPGFVSWRDPKSGSWYVETLDDIFEQWAHSEDLQSLLLRVSAAFLCKGEGRLLRGSVSSWGWGFGVSRAGPNQG

SEQ ID NO: 25837 - protein, 416 aa, Homo sapiens
  REGION 1..416: note = ENSP00000330237
MDEADRRLLRRCRLRLVEELQVDQLWDALLSRELFRPHMIEDIQRAGSGSRRDQARQLIIDLETRGSQALPLFISCLEDTGQDMLASFLRTNRQAAKLSKPTLENLTPVVLRPEIRKPEVLRPETPRPVDIGSGGFGDVGALESLRGNADLAYILSMEPCGHCLIINNVNFCRESGLRTRTGSNIDCEKLRRRFSSLHFMVEVKGDLTAKKMVLALLELAQQDHGALDCCVVVILSHGCQASHLQFPGAVYGTDGCPVSVEKIVNIFNGTSCPSLGGKPKLFFIQACGGEQKDHGFEVASTSPEDESPGSNPEPDATPFQEGLRTFDQLDAISSLPTPSDIFVSYSTFPGFVSWRDPKSGSWYVETLDDIFEQWAHSEDLQSLLLRVANAVSVKGIYKQMPGCFNFLRKKLFFKTS

SEQ ID NO: 25838 - protein, 266 aa, Homo sapiens
  REGION 1..266: note = ENSP00000255256
MDEADRRLLRRCRLRLVEELQVDQLWDALLSRELFRPHMIEDIQRAGSGSRRDQARQLIIDLETRGSQALPLFISCLEDTGQDMLASFLRTNRQAAKLSKPTLENLTPVVLRPEIRKPEVLRPETPRPVDIGSGGFGDVEQKDHGFEVASTSPEDESPGSNPEPDATPFQEGLRTFDQLDAISSLPTPSDIFVSYSTFPGFVSWRDPKSGSWYVETLDDIFEQWAHSEDLQSLLLRVANAVSVKGIYKQMPGCFNFLRKKLFFKTS

SEQ ID NO: 25839 - protein, 152 aa, Homo sapiens
  REGION 1..152: note = ENSP00000383588
  VARIANT 1: note = Any amino acid
XADRRLLRRCRLRLVEELQVDQLWDALLSRELFRPHMIEDIQRAGSGSRRDQARQLIIDLETRGSQALPLFISCLEDTGQDMLASFLRTNRQAAKLSKPTLENLTPVVLRPEIRKPEVLRPETPRPVDIGSGGFGDVGALESLRGNADLTVL

SEQ ID NO: 25840 - protein, 198 aa, Homo sapiens
  REGION 1..198: note = ENSP00000408691
  VARIANT 1: note = Any amino acid
XCGHCLIINNVNFCRESGLRTRTGSNIDCEKLRRRFSSLHFMVEVKGDLTAKKMVLALLELAQQDHGALDCCVVVILSHGCQASHLQFPGAVYGTDGCPVSVEKIVNIFNGTSCPSLGGKPKLFFIQACGGGFVSWRDPKSGSWYVETLDDIFEQWAHSEDLQSLLLRVANAVSVKGIYKQMPGCFNFLRKKLFFKTS

SEQ ID NO: 25841 - protein, 333 aa, Homo sapiens
  REGION 1..333: note = ENSP00000365051
MLASFLRTNRQAAKLSKPTLENLTPVVLRPEIRKPEVLRPETPRPVDIGSGGFGDVGALESLRGNADLAYILSMEPCGHCLIINNVNFCRESGLRTRTGSNIDCEKLRRRFSSLHFMVEVKGDLTAKKMVLALLELAQQDHGALDCCVVVILSHGCQASHLQFPGAVYGTDGCPVSVEKIVNIFNGTSCPSLGGKPKLFFIQACGGEQKDHGFEVASTSPEDESPGSNPEPDATPFQEGLRTFDQLDAISSLPTPSDIFVSYSTFPGFVSWRDPKSGSWYVETLDDIFEQWAHSEDLQSLLLRVANAVSVKGIYKQMPGCFNFLRKKLFFKTS

SEQ ID NO: 25842 - protein, 95 aa, Homo sapiens
  REGION 1..95: note = ENSP00000449216
MDEADRRLLRRCRLRLVEELQVDQLWDALLSRELFRPHMIEDIQRAGSGSRRDQARQLIIDLETRGSQALPLFISCLEDTGQDMLASFLRTNRCS

SEQ ID NO: 25843 - protein, 266 aa, Homo sapiens
  REGION 1..266: note = ENSP00000396540
MLASFLRTNRQAAKLSKPTLENLTPVVLRPEIRKPEVLRPETPRPVDIGSGGFGDVGALESLRGNADLAYILSMEPCGHCLIINNVNFCRESGLRTRTGSNIDCEKLRRRFSSLHFMVEVKGDLTAKKMVLALLELAQQDHGALDCCVVVILSHGCQASHLQFPGAVYGTDGCPVSVEKIVNIFNGTSCPSLGGKPKLFFIQACGGEQKDHGFEVASTSPEDESPGSNPEPDATPFQEGLRTFDQLDAISSLPTPSDIFVSYSTFP

SEQ ID NO: 25844 - protein, 254 aa, Homo sapiens
  REGION 1..254: note = ENSP00000411304
MDEADRRLLRRCRLRLVEELQVDQLWDALLSRELFRPHMIEDIQRAGSGSRRDQARQLIIDLETRGSQALPLFISCLEDTGQDMLASFLRTNRQAAKLSKPTLENLTPVVLRPEIRKPEVLRPETPRPVDIGSGGFGDVGALESLRGNADLAYILSMEPCGHCLIINNVNFCRESGLRTRTGSNIDCEKLRRRFSSLHFMVEVKGDLTAKASHLQFPGAVYGTDGCPVSVEKIVNIFNGTSCPSLGGKPKLFFI

SEQ ID NO: 25845 - protein, 47 aa, Homo sapiens
  REGION 1..47: note = ENSP00000480785
MLASFLRTNRQAAKLSKPTLENLTPVVLRPEIRKPEVLRPETPRPVD

SEQ ID NO: 25846 - protein, 399 aa, Homo sapiens
  REGION 1..399: note = ENSP00000261448
MKRTHLFIVGIYFLSSCRAEEGLNFPTYDGKDRVVSLSEKNFKQVLKKYDLLCLYYHEPVSSDKVTQKQFQLKEIVLELVAQVLEHKAIGFVMVDAKKEAKLAKKLGFDEEGSLYILKGDRTIEFDGEFAADVLVEFLLDLIEDPVEIISSKLEVQAFERIEDYIKLIGFFKSEDSEYYKAFEEAAEHFQPYIKFFATFDKGVAKKLSLKMNEVDFYEPFMDEPIAIPNKPYTEEELVEFVKEHQRPTLRRLRPEEMFETWEDDLNGIHIVAFAEKSDPDGYEFLEILKQVARDNTDNPDLSILWIDPDDFPLLVAYWEKTFKIDLFRPQIGVVNVTDADSVWMEIPDDDDLPTAEELEDWIEDVLSGKINTEDDDEDDDDDDNSDEEDNDDSDDDDDE

SEQ ID NO: 25847 - protein, 1119 aa, Homo sapiens
  REGION 1..1119: note = ENSP00000387057
MCGPAMFPAGPPWPRVRVVQVLWALLAVLLASWRLWAIKDFQECTWQVVLNEFKRVGESGVSDSFFEQEPVDTVSSLFHMLVDSPIDPSEKYLGFPYYLKINYSCEEKPSEDLVRMGHLTGLKPLVLVTFQSPVNFYRWKIEQLQIQMEAAPFRSKEPCMAEEVCSMSWYTPMPIKKGSVVMRVDISSNGLGTFIPDKRFQMNINGFLKRDRDNNIQFTVGEELFNLMPQYFVGVSSRPLWHTVDQSPVLILGGIPNEKYVLMTDTSFKDFSLVELSIDSCWVGSFYCPHSGFTATIYDTIATESTLFIRQNQLVYYFTGTYTTLYERNRGSGSWIRVLASECIKKLCPVYFHSNGSEYIMALTTGKHEGYVHFGTIRDGQVSFEMLPRQWSVCEQIGASDDLELLYHIPEFIPEARGLEFLMILGTESYTSTAMAPKGIFCNPYNNLIFIWGNFLLQSSNKENFIYLADFPKELSIKYMARSFRGAVAIVTETEEIWYLLEGSYRVYQLFPSKGWQVHISLKLMQQSSLYASNETMLTLFYEDSKLYQLVYLMNNQKGQLVKRLVPVEQLLMYQQHTSHYDLERKGGYLMLSFIDFCPFSVMRLRSLPSPQRYTRQERYRARPPRVLERSGFHNENSLAIYQGLVYYLLWLHSVYDKPYADPVHDPTWRWWANNKQDQDYYFFLASNWRSAGGVSIEMDSYEKIYNLESAYELPERIFLDKGTEYSFAIFLSAQGHSFRTQSELGTAFQLHSQVDVGVVLADPGCIEASVKQEVLINRNSVLFSITLKDKKLCYDQGISGHHLMETSMTVNVVGSSGLCFQETHLGPHMQGNLMVPVFIGCPPGKRLAFDITYTLEYSRLKNKHYFDCVNVNPEMPCFLFRDIFYPFFLIQDLVTGDSGSFQGSYVLLVVGGGPTLDSLKDYSEDEIYRFNSPLDKTNSLIWTTRTTRTTKDSAFHIMSHESPGIEWLCLENAPCYDNVPQGIFAPEFFFKVLVSNRGVDTSTYCNYQLTFLLHIHGLPLSPKRALFIIMVSASVFVGLVIFYIAFCLLWPLVVKGCTMIRWKINNLIASESYYTYASISGISSMPSLRHSRMGSMFSSRMTEDRAEPKEAVERQLMT

SEQ ID NO: 25848 - protein, 1159 aa, Homo sapiens
  REGION 1..1159: note = ENSP00000386962
MCGPAMFPAGPPWPRVRVVQVLWALLAVLLASWRLWAIKDFQECTWQVVLNEFKRVGESGVSDSFFEQEPVDTVSSLFHMLVDSPIDPSEKYLGFPYYLKINYSCEEKPSEDLVRMGHLTGLKPLVLVTFQSPVNFYRWKIEQLQIQMEAAPFRSKEPCMAEEVCSMSWYTPMPIKKGSVVMRVDISSNGLGTFIPDKRFQMNINGFLKRDRDNNIQFTVGEELFNLMPQYFVGVSSRPLWHTVDQSPVLILGGIPNEKYVLMTDTSFKDFSLVELSIDSCWVGSFYCPHSGFTATIYDTIATESTLFIRQNQLVYYFTGTYTTLYERNRGSGSWIRVLASECIKKLCPVYFHSNGSEYIMALTTGKHEGYVHFGTIRDGQVSFEMLPRQWSVCEQIGVTTCSIIWSEYIAGEYTLLLLVESGYGNASKRFQVVSYNTASDDLELLYHIPEFIPEARGLEFLMILGTESYTSTAMAPKGIFCNPYNNLIFIWGNFLLQSSNKENFIYLADFPKELSIKYMARSFRGAVAIVTETEEIWYLLEGSYRVYQLFPSKGWQVHISLKLMQQSSLYASNETMLTLFYEDSKLYQLVYLMNNQKGQLVKRLVPVEQLLMYQQHTSHYDLERKGGYLMLSFIDFCPFSVMRLRSLPSPQRYTRQERYRARPPRVLERSGFHNENSLAIYQGLVYYLLWLHSVYDKPYADPVHDPTWRWWANNKQDQDYYFFLASNWRSAGGVSIEMDSYEKIYNLESAYELPERIFLDKGTEYSFAIFLSAQGHSFRTQSELGTAFQLHSQVDVGVVLADPGCIEASVKQEVLINRNSVLFSITLKDKKLCYDQGISGHHLMETSMTVNVVGSSGLCFQETHLGPHMQGNLMVPVFIGCPPGKRLAFDITYTLEYSRLKNKHYFDCVNVNPEMPCFLFRDIFYPFFLIQDLVTGDSGSFQGSYVLLVVGGGPTLDSLKDYSEDEIYRFNSPLDKTNSLIWTTRTTRTTKDSAFHIMSHESPGIEWLCLENAPCYDNVPQGIFAPEFFFKVLVSNRGVDTSTYCNYQLTFLLHIHGLPLSPKRALFIIMVSASVFVGLVIFYIAFCLLWPLVVKGCTMIRWKINNLIASESYYTYASISGISSMPSLRHSRMGSMFSSRMTEDRAEPKEAVERQLMT

SEQ ID NO: 25849 - protein, 292 aa, Homo sapiens
  REGION 1..292: note = ENSP00000311314
MCGPAMFPAGPPWPRVRVVQVLWALLAVLLASWRLWAIKDFQECTWQVVLNEFKRVGESGVSDSFFEQEPVDTVSSLFHMLVDSPIDPSEKYLGFPYYLKINYSCEEKSPVNFYRWKIEQLQIQMEAAPFRSKEPCMAEEVCSMSWYTPMPIKKGSVVMRVDISSNGLGTFIPDKRFQMNINGFLKRDRDNNIQFTVGEELFNLMPQYFVGVSSRPLWHTVDQSPVLILGGIPNEKYVLMTDTSFKDFSLVEAPIPHSMRETAAVAVGFVSWPASASRSCALCISIAMALST

SEQ ID NO: 25850 - protein, 159 aa, Homo sapiens
  REGION 1..159: note = ENSP00000468028
MCGPAMFPAGPPWPRVRVVQVLWALLAVLLASWRLWAIKDFQECTWQVVLNEFKRVGESGVSDSFFEQEPVDTVSSLFHMLVDSPIDPSEKYLGFPYYLKINYSCEEKTESCAVAQTGVQWRDLGSLQPPPPVFKRCSCLGLPSSWNYSPLRTWCAWAT

SEQ ID NO: 25851 - protein, 136 aa, Homo sapiens
  REGION 1..136: note = ENSP00000467947
MCGPAMFPAGPPWPRVRVVQVLWALLAVLLASWRLWAIKDFQECTWQVVLNEFKRVGESGVSDSFFEQEPVDTVSSLFHMLVDSPIDPSEKYLGFPYYLKINYSCEEKSPVNFYRWKIEQLQIQMEAAPFRSKGSR

SEQ ID NO: 25852 - protein, 660 aa, Homo sapiens
  REGION 1..660: note = ENSP00000386950
MCGPAMFPAGPPWPRVRVVQVLWALLAVLLASWRLWAIKDFQECTWQVVLNEFKRVGESGVSDSFFEQEPVDTVSSLFHMLVDSPIDPSEKYLGFPYYLKINYSCEEKPSEDLVRMGHLTGLKPLVLVTFQSPVNFYRWKIEQLQIQMEAAPFRSKEPCMAEEVCSMSWYTPMPIKKGSVVMRVDISSNGLGTFIPDKRFQMNINGFLKRDRDNNIQFTVGEELFNLMPQYFVGVSSRPLWHTVDQSPVLILGGIPNEKYVLMTDTSFKDFSLVELSIDSCWVGSFYCPHSGFTATIYDTIATESTLFIRQNQLVYYFTGTYTTLYERNRGSGSWIRVLASECIKKLCPVYFHSNGSEYIMALTTGKHEGYVHFGTIRDGQVSFEMLPRQWSVCEQIGVTTCSIIWSEYIAGEYTLLLLVESGYGNASKRFQVVSYNTASDDLELLYHIPEFIPEARGLEFLMILGTESYTSTAMAPKGIFCNPYNNLIFIWGNFLLQSSNKENFIYLADFPKELSIKYMARSFRGAVAIVTETEEIWYLLEGSYRVYQLFPSKGWQVHISLKLMQQSSLYASNETMLTLFYEDSKLYQLVYLMNNQKGQLVKRLVPVEQLLMYQQHTSHYDLERKGGYLMLSFIDFCPFSVMRLRSLPSPQRYTRQERY

SEQ ID NO: 25853 - protein, 165 aa, Homo sapiens
  REGION 1..165: note = ENSP00000395093
RWKIEQLQIQMEAAPFRSKEPCMAEEVCSMSWYTPMPIKKGSVVMRVDISSNGLGTFIPDKRFQMNINGFLKRDRDNNIQFTVGEELFNLMPQYFVGVSSRPLWHTVDQSPVLILGGIPNEKYVLMTDTSFKDFSLVEAVGFVSWPASASRSCALCISIAMALST

SEQ ID NO: 25854 - protein, 180 aa, Homo sapiens
  REGION 1..180: note = ENSP00000470225
  VARIANT 1: note = Any amino acid
XRNRGSGSWIRVLASECIKKLCPVYFHSNGSEYIMALTTGKHEGYVHFGTIRASDDLELLYHIPEFIPEARGLEFLMILGTESYTSTAMAPKGIFCNPYNNLIFIWGNFLLQSSNKENFIYLADFPKELSIKYMARSFRGAVAIVTETEEIWYLLEGSYRVYQLFPSKGWQVHISLKLMQ

SEQ ID NO: 25855 - protein, 178 aa, Homo sapiens
  REGION 1..178: note = ENSP00000339191
MSGGKYVDSEGHLYTVPIREQGNIYKPNNKAMADELSEKQVYDAHTKEIDLVNRDPKHLNDDVVKIDFEDVIAEPEGTHSFDGIWKASFTTFTVTKYWFYRLLSALFGIPMALIWGIYFAILSFLHIWAVVPCIKSFLIEIQCISRVYSIYVHTVCDPLFEAVGKIFSNVRINLQKEI

SEQ ID NO: 25856 - protein, 167 aa, Homo sapiens
  REGION 1..167: note = ENSP00000377113
MSGGKYVDSEGNIYKPNNKAMADELSEKQVYDAHTKEIDLVNRDPKHLNDDVVKIDFEDVIAEPEGTHSFDGIWKASFTTFTVTKYWFYRLLSALFGIPMALIWGIYFAILSFLHIWAVVPCIKSFLIEIQCISRVYSIYVHTVCDPLFEAVGKIFSNVRINLQKEI

SEQ ID NO: 25857 - protein, 86 aa, Homo sapiens
  REGION 1..86: note = ENSP00000409541
MSGGKYVDSEVGIRGGAPARACGECPLLLSASPNIPTAALAPALSPLRSTPLALAPLRNGPGRGGEEKPGMFYVFLMERGPREPLS

SEQ ID NO: 25858 - protein, 147 aa, Homo sapiens
  REGION 1..147: note = ENSP00000384348
MADELSEKQVYDAHTKEIDLVNRDPKHLNDDVVKIDFEDVIAEPEGTHSFDGIWKASFTTFTVTKYWFYRLLSALFGIPMALIWGIYFAILSFLHIWAVVPCIKSFLIEIQCISRVYSIYVHTVCDPLFEAVGKIFSNVRINLQKEI

SEQ ID NO: 25859 - protein, 138 aa, Homo sapiens
  REGION 1..138: note = ENSP00000389033
MADELSEKQVYDAHTKEIDLVNRDPKHLNDDVVKIDFEDVIAEPEGTHSFDGIWKASFTTFTVTKYWFYRLLSALFGIPMALIWGIYFAILSFLHIWAVVPCIKSFLIEIQCISRVYSIYVHTVCDPLFEAVGKIFSN

SEQ ID NO: 25860 - protein, 147 aa, Homo sapiens; identical to SEQ ID NO: 25858
  REGION 1..147: note = ENSP00000377111

SEQ ID NO: 25861 - protein, 147 aa, Homo sapiens; identical to SEQ ID NO: 25858
  REGION 1..147: note = ENSP00000377110

SEQ ID NO: 25862 - protein, 147 aa, Homo sapiens; identical to SEQ ID NO: 25858
  REGION 1..147: note = ENSP00000479447

SEQ ID NO: 25863 - protein, 162 aa, Homo sapiens
  REGION 1..162: note = ENSP00000222693
MGLETEKADVQLFMDDDSYSHHSGLEYADPEKFADSDQDRDPHRLNSHLKLGFEDVIAEPVTTHSFDKVWICSHALFEISKYVMYKFLTVFLAIPLAFIAGILFATLSCLHIWILMPFVKTCLMVLPSVQTIWKSVTDVIIAPLCTSVGRCFSSVSLQLSQD

SEQ ID NO: 25864 - protein, 112 aa, Homo sapiens
  REGION 1..112: note = ENSP00000345679
MGLETEKADVQLFMDDDSYSHHSGLEYADPEKFADSDQDRDPHRLNSHLKDFNAFCKDLPNGSAFSADNMEECDRCYHCSIVYERRTMLLFCQPATEPGLNTWTPGLEIGIL

SEQ ID NO: 25865 - protein, 113 aa, Homo sapiens
  REGION 1..113: note = ENSP00000377120
MGLETEKADVQLFMDDDSYSHHSGLEYADPEKFADSDQDRDPHRLNSHLKLGFEDVIAEPVTTHSFDKVWICSHALFEISKYVMYKFLTVFLAIPLAFIAGILFATLSCLHIW

SEQ ID NO: 25866 - protein, 567 aa, Homo sapiens
  REGION 1..567: note = ENSP00000332122
MPDSPAEVKTQPRSTPPSMPPPPPAASQGATRPPSFTPHTLMNGSSHSPTAINGAPCTPNGFSNGPATSSTASLSTQHLPPACGARQLSKLKRFLTTLQQFGSDISPEIGERVRTLVLGLVNSTLTIEEFHSKLQEATNFPLRPFVIPFLKANLPLLQRELLHCARLAKQTPAQYLAQHEQLLLDASASSPIDSSELLLEVNENGKRRTPDRTKENGSDRDPLHPEHLSKRPCTLNPAQRYSPSNGPPQPTPPPHYRLEDIAMAHHFRDAYRHPDPRELRERHRPLVVPGSRQEEVIDHKLTEREWAEEWKHLNNLLNCIMDMVEKTRRSLTVLRRCQEADREELNHWARRYSDAEDTKKGPAPAAARPRSSSAGPEGPQLDVPREFLPRTLTGYVPEDIWRKAEEAVNEVKRQAMSELQKAVSDAERKAHELITTERAKMERALAEAKRQASEDALTVINQQEDSSESCWNCGRKASETCSGCNAARYCGSFCQHRDWEKHHHVCGQSLQGPTAVVADPVPGPPEAAHSLGPSLPVGAASPSEAGSAGPSRPGSPSPPGPLDTVPR

SEQ ID NO: 25867 - protein, 653 aa, Homo sapiens
  REGION 1..653: note = ENSP00000268679
MPASRLRDRAASSASGSTCGSMSQTHPVLESGLLASAGCSAPRGPRKGGPAPVDRKAKASAMPDSPAEVKTQPRSTPPSMPPPPPAASQGATRPPSFTPHTHREDGPATLPHGRFHGCLKWSMVCLLMNGSSHSPTAINGAPCTPNGFSNGPATSSTASLSTQHLPPACGARQLSKLKRFLTTLQQFGSDISPEIGERVRTLVLGLVNSTLTIEEFHSKLQEATNFPLRPFVIPFLKANLPLLQRELLHCARLAKQTPAQYLAQHEQLLLDASASSPIDSSELLLEVNENGKRRTPDRTKENGSDRDPLHPEHLSKRPCTLNPAQRYSPSNGPPQPTPPPHYRLEDIAMAHHFRDAYRHPDPRELRERHRPLVVPGSRQEEVIDHKLTEREWAEEWKHLNNLLNCIMDMVEKTRRSLTVLRRCQEADREELNHWARRYSDAEDTKKGPAPAAARPRSSSAGPEGPQLDVPREFLPRTLTGYVPEDIWRKAEEAVNEVKRQAMSELQKAVSDAERKAHELITTERAKMERALAEAKRQASEDALTVINQQEDSSESCWNCGRKASETCSGCNAARYCGSFCQHRDWEKHHHVCGQSLQGPTAVVADPVPGPPEAAHSLGPSLPVGAASPSEAGSAGPSRPGSPSPPGPLDTVPR

SEQ ID NO: 25868 - protein, 34 aa, Homo sapiens
  REGION 1..34: note = ENSP00000464125
  VARIANT 1: note = Any amino acid
XGPEGPQLGKHGLVCQEAWSSERLVGQRLGAGRP

SEQ ID NO: 25869 - protein, 418 aa, Homo sapiens
  REGION 1..418: note = ENSP00000454851
MPDSPAEVKTQPRSTPPSMPPPPPAASQGATRPPSFTPHTHREDGPATLPHGRFHGCLKWSMVCLLMNGSSHSPTAINGAPCTPNGFSNGPATSSTASLSTQHLPPACGARQLSKLKRFLTTLQQFGSDISPEIGERVRTLVLGLVNSTLTIEEFHSKLQEATNFPLRPFVIPFLKANLPLLQRELLHCARLAKQTPAQYLAQHEQLLLDASASSPIDSSELLLEVNENGKRRTPDRTKENGSDRDPLHPEHLSKRPCTLNPAQRYSPSNGPPQPTPPPHYRLEDIAMAHHFRDAYRHPDPRELRERHRPLVVPGSRQEEVIDHKLTEREWAEEWKHLNNLLNCIMDMVEKTRRSLTVLRRCQEADREELNHWARRYSDAEDTKKGPAPAAARPRSSSAGPEGPQLGKHGLVCQEAWS

SEQ ID NO: 25870 - protein, 121 aa, Homo sapiens
  REGION 1..121: note = ENSP00000457410
MPDSPAEVKTQPRSTPPSMPPPPPAASQGATRPPSFTPHTLMNGSSHSPTAINGAPCTPNGFSNGPATSSTASLSTQHLPPACGARQLSKLKRFLTTLQQFGSDISPEIGERVRTLVLGLV

SEQ ID NO: 25871 - protein, 132 aa, Homo sapiens
  REGION 1..132: note = ENSP00000456717
MPDSPAEVKTQPRSTPPSMPPPPPAASQGATRPPSFTPHTHREDGPATLPHGRFHGCLKWSMVCLLMNGSSHSPTAINGAPCTPNGFSNGPATSSTASLSTQHLPPACGARQLSKLKRFLTTLQQFGSDISP

SEQ ID NO: 25872 - protein, 130 aa, Homo sapiens
  REGION 1..130: note = ENSP00000454872
MPASRLRDRAASSASGSTCGSMSQTHPVLESGLLASAGCSAPRGPRKGGPAPVDRKAKASAMPDSPAEVKTQPRSTPPSMPPPPPAASQGATRPPSFTPHTLMNGSSHSPTAINGAPCTPNGFSNGPATS

SEQ ID NO: 25873 - protein, 62 aa, Homo sapiens
  REGION 1..62: note = ENSP00000454609
MPDSPAEVKTQPRSTPPSMPPPPPAASQGATRPPSFTPHTHREDGPATLPHGRFHGCLKWSM

SEQ ID NO: 25874 - protein, 22 aa, Homo sapiens
  REGION 1..22: note = ENSP00000456102
MPDSPAEVKTQPRSTPPSMPPP

SEQ ID NO: 25875 - protein, 82 aa, Homo sapiens
  REGION 1..82: note = ENSP00000462273
MILNGVCVIWKGWIDLQRLDGMGCLEFDEERAQQEDALAQQAFEEARRRTREFEDRDRSHREEMEVRVSQLLAVTGKKTTRP

SEQ ID NO: 25876 - protein, 182 aa, Homo sapiens
  REGION 1..182: note = ENSP00000290858
MPRVVPDQRSKFENEEFFRKLSRECEIKYTGFRDRPHEERQARFQNACRDGRSEIAFVATGTNLSLQFFPASWQGEQRQTPSREYVDLEREAGKVYLKAPMILNGVCVIWKGWIDLQRLDGMGCLEFDEERAQQEDALAQQAFEEARRRTREFEDRDRSHREEMEVRVSQLLAVTGKKTTRP

SEQ ID NO: 25877 - protein, 93 aa, Homo sapiens
  REGION 1..93: note = ENSP00000456637
MPRVVPDQRSKFENEEFFRKLSRECEIKYTGFRDRPHEERQARFQNACRDGRSEIVYLKAPMILNGVCVIWKGWIDLQRLDGMGCLEFDEERA

SEQ ID NO: 25878 - protein, 187 aa, Homo sapiens
  REGION 1..187: note = ENSP00000415151
MPRVVPDQRSKFENEEFFRKLSRECEIKYTGFRDRPHEERQARFQNACRDGRSEIAFVATGTNLSLQFFPASWQGEQRQTPSREYVDLEREAGKVYLKAPMILNGVCVIWKGWIDLQRLDGMGCLEFDEERAQQEDALAQQAFEEARRRTREFEDRDRSHREEMEARRQQDPSPGSNLGGGDDLKLR

SEQ ID NO: 25879 - protein, 60 aa, Homo sapiens
  REGION 1..60: note = ENSP00000462932
  VARIANT 1: note = Any amino acid
XRKLSRECEIKYTGFRDRPHEERQARFQNACRDGRSEIARRQQDPSPGSNLGGGDDLKLR

SEQ ID NO: 25880 - protein, 61 aa, Homo sapiens
  REGION 1..61: note = ENSP00000462148
MILNGVCVIWKGWIDLQRLDGMGCLEFDEERAQQEDALAQQAFEEARRRTREFEDRDRSHR

SEQ ID NO: 25881 - protein, 321 aa, Homo sapiens
  REGION 1..321: note = ENSP00000377598
GITASSNVNGRHSRVGSDPVLMRKHRRHDLPLEGAKVFSNGHLGSEEYDVPPRLSPPPPVTTLLPSIKCTGPLANSLSEKTRDPVEEDDDEYKIPSSHPVSLNSQPSHCHNVKPPVRSCDNGHCMLNGTHGPSSEKKSNIPDLSIYLKGEDAFDALPPSLPPPPPPARHSLIEHSKPPGSSSRPSSGQDLFLLPSDPFVDLASGQVPLPPARRLPGENVKTNRTSQDYDQLPSCSDGSQAPARPPKPRPRRTAPEIHHRKPHGPEAALENVDAKIAKLMGEGYAFEEVKRALEIAQNNVEVARSILREFAFPPPVSPRLNL

SEQ ID NO: 25882 - protein, 982 aa, Homo sapiens [sequence omitted]

SEQ ID NO: 25883 - protein, 197 aa, Homo sapiens
  REGION 1..197: note = ENSP00000384170
MLNGTHGPSSEKKSNIPDLSIYLKGEDAFDALPPSLPPPPPPARHSLIEHSKPPGSSSRPSSGQDLFLLPSDPFVDLASGQVPLPPARRLPGENVKTNRTSQDYDQLPSCSDGSQAPARPPKPRPRRTAPEIHHRKPHGPEAALENVDAKIAKLMGEGYAFEEVKRALEIAQNNVEVARSILREFAFPPPVSPRLNL

SEQ ID NO: 25884 - protein, 770 aa, Homo sapiens
  REGION 1..770: note = ENSP00000384816
MANSMNGRNPGGRGGNPRKGRILGIIDAIQDAVGPPKQAAADRRTVEKTWKLMDKVVRLCQNPKLQLKNSPPYILDILPDTYQHLRLILSKYDDNQKLAQLSENEYFKIYIDSLMKKSKRAIRLFKEGKERMYEEQSQDRRNLTKLSLIFSHMLAEIKAIFPNGQFQGDNFRITKADAAEFWRKFFGDKTIVPWKVFRQCLHEVHQISSGLEAMALKSTIDLTCNDYISVFEFDIFTRLFQPWGSILRNWNFLAVTHPGYMAFLTYDEVKARLQKYSTKPGSYIFRLSCTRLGQWAIGYVTGDGNILQTIPHNKPLFQALIDGSREGFYLYPDGRSYNPDLTGLCEPTPHDHIKVTQEQYELYCEMGSTFQLCKICAENDKDVKIEPCGHLMCTSCLTAWQESDGQGCPFCRCEIKGTEPIIVDPFDPRDEGSRCCSIIDPFGMPMLDLDDDDDREESLMMNRLANVRKCTDRQNSPVTSPGSSPLAQRRKPQPDPLQIPHLSLPPVPPRLDLIQKGIVRSPCGSPTGSPKSSPCMVRKQDKPLPAPPPPLRDPPPPPPERPPPIPPDNRLSRHIHHVESVPSRDPPMPLEAWCPRDVFGTNQLVGCRLLGEGSPKPGITASSNVNGRHSRVGSDPVLMRKHRRHDLPLEGAKVFSNGHLGSEEYDVPPRLSPPPPVTTLLPSIKCTGPLANSLSEKTRDPVEEDDDEYKIPSSHPVSLNSQPSHCHNVKPPVRSCDNGHCMLNGTHGPSSEKKSNIPDLSIYLKGTYRI

SEQ ID NO: 25885 - protein, 810 aa, Homo sapiens
  REGION 1..810: note = ENSP00000384938
MANSMNGRNPGGRGGNPRKGRILGIIDAIQDAVGPPKQAAADRRTVEKTWKLMDKVVRLCQNPKLQLKNSPPYILDILPDTYQHLRLILSKYDDNQKLAQLSENEYFKIYIDSLMKKSKRAIRLFKEGKERMYEEQSQDRRNLTKLSLIFSHMLAEIKAIFPNGQFQGDNFRITKADAAEFWRKFFGDKTIVPWKVFRQCLHEVHQISSGLEAMALKSTIDLTCNDYISVFEFDIFTRLFQPWGSILRNWNFLAVTHPGYMAFLTYDEVKARLQKYSTKPGSYIFRLSCTRLGQWAIGYVTGDGNILQTIPHNKPLFQALIDGSREGFYLYPDGRSYNPDLTGLCEPTPHDHIKVTQEQYELYCEMGSTFQLCKICAENDKDVKIEPCGHLMCTSCLTAWQESDGQGCPFCRCEIKGTEPIIVDPFDPRDEGSRCCSIIDPFGMPMLDLDDDDDREESLMMNRLANVRKCTDRQNSPVTSPGSSPLAQRRKPQPDPLQIPHLSLPPVPPRLDLIQKGIVRSPCGSPTGSPKSSPCMVRKQDKPLPAPPPPLRDPPPPPPERPPPIPPDNRLSRHIHHVESVPSRDPPMPLEAWCPRDVFGTNQLVGCRLLGEGSPKPGITASSNVNGRHSRVGSDPVLMRKHRRHDLPLEGAKVFSNGHLGSEEYDVPPRLSPPPPVTTLLPSIKCTGPLANSLSEKTRDPVEEDDDEYKIPSSHPVSLNSQPSHCHNVKPPVRSCDNGHCMLNGTHGPSSEKKSNIPDLSIYLKGDVFDSASDPVPLPPARPPTRDNPKHGSSLNRTPSDYDLLIPPLG

SEQ ID NO: 25886 - protein, 161 aa, Homo sapiens
  REGION 1..161: note = ENSP00000409750
MALAPGPDAHAHLPPLIELKFQMANSMNGRNPGGRGGNPRKGRILGIIDAIQDAVGPPKQAAADRRTVEKTWKLMDKVVRLCQNPKLQLKNSPPYILDILPDTYQHLRLILSKYDDNQKLAQLSENEYFKIYIDSLMKKSKRAIRLFKEGKERMYEEQSQD

SEQ ID NO: 25887 - protein, 139 aa, Homo sapiens
  REGION 1..139: note = ENSP00000400949
MANSMNGRNPGGRGGNPRKGRILGIIDAIQDAVGPPKQAAADRRTVEKTWKLMDKVVRLCQNPKLQLKNSPPYILDILPDTYQHLRLILSKYDDNQKLAQLSENEYFKIYIDSLMKKSKRAIRLFKEGKERMYEEQSQD

SEQ ID NO: 25888 - protein, 139 aa, Homo sapiens; identical to SEQ ID NO: 25887
  REGION 1..139: note = ENSP00000393906

SEQ ID NO: 25889 - protein, 193 aa, Homo sapiens
  REGION 1..193: note = ENSP00000219197
MLGVLELLLLGAAWLAGPARGQNETEPIVLEGKCLVVCDSNPTSDPTGTALGISVRSGSAKVAFSAIRSTNHEPSEMSNRTMIIYFDQVLVNIGNNFDSERSTFIAPRKGIYSFNFHVVKVYNRQTIQVSLMLNGWPVISAFAGDQDVTREAASNGVLIQMEKGDRAYLKLERGNLMGGWKYSTFSGFLVFPL

SEQ ID NO: 25890 - protein, 140 aa, Homo sapiens
  REGION 1..140: note = ENSP00000455718
MLGVLELLLLGAAWLAGPARGQNETEPIVLEGKCLVVCDSNPTSDPTGTALGISVRSGSAKVAFSAIRSTNHEPSEMSNRTMIIYFDQVSVPSSRGVQIGLVKEGWMEDRCPVLSKGSAEARGRQSGTDSCPLPFVPVSL

SEQ ID NO: 25891 - protein, 193 aa, Homo sapiens; identical to SEQ ID NO: 25889
  REGION 1..193: note = ENSP00000444651

SEQ ID NO: 25892 - protein, 224 aa, Homo sapiens
  REGION 1..224: note = ENSP00000463771
MQAPGRGPLGLRLMMPGRRGALREPGGCGSCLGVALALLLLLLPACCPVRAQNDTEPIVLEGKCLVVCDSSPSADGAVTSSLGISVRSGSAKVAFSATRSTNHEPSEMSNRTMTIYFDQVLVNIGNHFDLASSIFVAPRKGIYSFSFHVVKVYNRQTIQVSLMQNGYPVISAFAGDQDVTREAASNGVLLLMEREDKVHLKLERGNLMGGWKYSTFSGFLVFPL

SEQ ID NO: 25893 - protein, 224 aa, Homo sapiens; identical to SEQ ID NO: 25892
  REGION 1..224: note = ENSP00000269503

SEQ ID NO: 25894 - protein, 108 aa, Homo sapiens
  REGION 1..108: note = ENSP00000464490
MFQVLVNIGNHFDLASSIFVAPRKGIYSFSFHVVKVYNRQTIQVSLMQNGYPVISAFAGDQDVTREAASNGVLLLMEREDKVHLKLERGNLMGGWKYSTFSGFLVFPL

SEQ ID NO: 25895 - protein, 110 aa, Homo sapiens
  REGION 1..110: note = ENSP00000462632
MDWDKVLVNIGNHFDLASSIFVAPRKGIYSFSFHVVKVYNRQTIQVSLMQNGYPVISAFAGDQDVTREAASNGVLLLMEREDKVHLKLERGNLMGGWKYSTFSGFLVFPL

SEQ ID NO: 25896 - protein, 205 aa, Homo sapiens
  REGION 1..205: note = ENSP00000267406
MLGAKPHWLPGPLHSPGLPLVLVLLALGAGWAQEGSEPVLLEGECLVVCEPGRAAAGGPGGAALGEAPPGRVAFAAVRSHHHEPAGETGNGTSGAIYFDQVLVNEGGGFDRASGSFVAPVRGVYSFRFHVVKVYNRQTVQVSLMLNTWPVISAFANDPDVTREAATSSVLLPLDPGDRVSLRLRRGNLLGGWKYSSFSGFLIFPL

SEQ ID NO: 25897 - protein, 154 aa, Homo sapiens
  REGION 1..154: note = ENSP00000450935
MWGLSGQSFGRTLTPTLKMRSTWGCCSRTLFSASADTAKRSGDAGRAPQVLVNEGGGFDRASGSFVAPVRGVYSFRFHVVKVYNRQTVQVSLMLNTWPVISAFANDPDVTREAATSSVLLPLDPGDRVSLRLRRGNLLGGWKYSSFSGFLIFPL

SEQ ID NO: 25898 - protein, 551 aa, Homo sapiens
  REGION 1..551: note = ENSP00000381225
MPSETPQAEVGPTGCPHRSGPHSAKGSLEKGSPEDKEAKEPLWIRPDAPSRCTWQLGRPASESPHHHTAPAKSPKILPDILKKIGDTPMVRINKIGKKFGLKCELLAKCEFFNAGGSVKDRISLRMIEDAERDGTLKPGDTIIEPTSGNTGIGLALAAAVRGYRCIIVMPEKMSSEKVDVLRALGAEIVRTPTNARFDSPESHVGVAWRLKNEIPNSHILDQYRNASNPLAHYDTTADEILQQCDGKLDMLVASVGTGGTITGIARKLKEKCPGCRIIGVDPEGSILAEPEELNQTEQTTYEVEGIGYDFIPTVLDRTVVDKWFKSNDEEAFTFARMLIAQEGLLCGGSAGSTVAVAVKAAQELQEGQRCVVILPDSVRNYMTKFLSDRWMLQKGFLKEEDLTEKKPWWWHLRVQELGLSAPLTVLPTITCGHTIEILREKGFDQAPVVDEAGVILGMVTLGNMLSSLLAGKVQPSDQVGKVIYKQFKQIRLTDTLGRLSHILEMDHFALVVHEQIQYHSTGKSSQRQMVFGVVTAIDLLNFVAAQERDQK

SEQ ID NO: 25899 - protein, 551 aa, Homo sapiens; identical to SEQ ID NO: 25898
  REGION 1..551: note = ENSP00000381231

SEQ ID NO: 25900 - protein, 551 aa, Homo sapiens; identical to SEQ ID NO: 25898
  REGION 1..551: note = ENSP00000352643

SEQ ID NO: 25901 - protein, 551 aa, Homo sapiens; identical to SEQ ID NO: 25898
  REGION 1..551: note = ENSP00000344460

SEQ ID NO: 25902 - protein, 149 aa, Homo sapiens
  REGION 1..149: note = ENSP00000402823
  VARIANT 1: note = Any amino acid
XGLSAPLTVLPTITCGHTIEILREKGFDQAPVVDEAGVILGMVTLGNMLSSLLAGKVQPSDQVGKVIYKQFKQIRLTDTLGRLSHILEMDHFALVVHEQIQSQDQAWAGVVGGPADHSTGKSSQRQMVFGVVTAIDLLNFVAAQERDQK

SEQ ID NO: 25903 - protein, 159 aa, Homo sapiens
  REGION 1..159: note = ENSP00000408014
  VARIANT 1: note = Any amino acid
XVQELGLSAPLTVLPTITCGHTIEILREKGFDQAPVVDEAGVILGMVTLGNMLSSLLAGKVQPSDQVGKVIYKQFKQIRLTDTLGRLSHILEMDHFALVVHEQIQSQDQAWAGVVGGPAEKKKDANSNVRVPKSSLPGACPRLSPPSVAAFKHVRAACS

SEQ ID NO: 25904 - protein, 224 aa, Homo sapiens
  REGION 1..224: note = ENSP00000405929
  VARIANT 1: note = Any amino acid
XGSAGSTVAVAVKAAQELQEGQRCVVILPDSVRNYMTKFLSDRWMLQKGFLKEEDLTEKKPWWWHLRVQELGLSAPLTVLPTITCGHTIEILREKGFDQAPVVDEAGVILGMVTLGNMLSSLLAGKVQPSDQVGKVIYKQFKQIRLTDTLGRLSHILEMDHFALVVHEQIQSQDQAWAGVVGGPAGSPNQVFLEHVHACHHRLWLLSSTSGLRAHNRDGTAPKT

SEQ ID NO: 25905 - protein, 177 aa, Homo sapiens
  REGION 1..177: note = ENSP00000388235
MPSETPQAEVGPTGCPHRSGPHSAKGSLEKGSPEDKEAKEPLWIRPDAPSRCTWQLGRPASESPHHHTAPAKSPKILPDILKKIGDTPMVRINKIGKKFGLKCELLAKCEFFNAGGSVKDRISLRMIEDAERDGTLKPGDTIIEPTSGNTGIGLALAAAVRGYRCIIVMPEKMSSEK

SEQ ID NO: 25906 - protein, 137 aa, Homo sapiens
  REGION 1..137: note = ENSP00000484049
  VARIANT 1: note = Any amino acid
XTIITGYLGAGKTTLLNYILTEQHSKRVAVILNESGEGSALEKSLAVSQGGELYEEWLELRNGCLCCSVKDNGLRAIENLMQKKGKFDDILLETTGLADPGAVASMFWVDAELGSDIYLDGIITIVDSKYGLKVKYH

SEQ ID NO: 25907 - protein, 160 aa, Homo sapiens
  REGION 1..160: note = ENSP00000484231
MLPAVGSVDEEEDPAEEDCPELVPIETTQSEEEEKSGLGAKIPVTIITGYLGAGKTTLLNYILTEQHSKRVAVILNESGEGSALEKSLAVSQGGELYEEWLELRNGCLCCSVKDNGLRAIENLMQKKGKFDDILLETTGLADPGIITIVDSKYGLKVKYH

SEQ ID NO: 25908 - protein, 180 aa, Homo sapiens
  REGION 1..180: note = ENSP00000480837
MLPAVGSVDEEEDPAEEDCPELVPIETTQSEEEEKSGLGAKIPVTIITGYLGAGKTTLLNYILTEQHSKRVAVILNESGEGSALEKSLAVSQGGELYEEWLELRNGCLCCSVKDNGLRAIENLMQKKGKFDDILLETTGLADPGAVASMFWVDAELGSDIYLDGIITIVDSKYGLKVKYH

SEQ ID NO: 25909 - protein, 46 aa, Homo sapiens
  REGION 1..46: note = ENSP00000480830
  VARIANT 1: note = Any amino acid
XTGLADPGAVASMFWVDAELGSDIYLDGIITIVDSKYGLKAKNWTT

SEQ ID NO: 25910 - protein, 73 aa, Homo sapiens
  REGION 1..73: note = ENSP00000478412
CSVKDNGLRAIENLMQKKGKFDDILLETTGLADPGAVASMFWVDAELGSDIYLDGIITIVDSKYGLKAKNWTT

SEQ ID NO: 25911 - protein, 359 aa, Homo sapiens
  REGION 1..359: note = ENSP00000482804
MYFKRAPRAFPVLLTGAGKTTLLNYILTEQHSKRVAVILNESGEGSALEKSLAVSQGGELYEEWLELRNGCLCCSVKDNGLRAIENLMQKKGKFDDILLETTGLADPGAVASMFWVDAELGSDIYLDGIITIVDSKYGLKHLTEEKPDGLINEATRQVALADIILINKTDLVPEEDVKKLRTTLRSINGLGQILETQRSRVDLSNVLDLHAFDSLSGISLQKKLQHVPGTQPHLDQSIVTITFDVPGNAKEEHLNMFIQNLLWEKNVRNKDNHCMEVIRLKGLVSIKDKSQQVIVQGVHELCDLEETPVSWKDDTERTNRLVLIGRNLDKDILKQLFIATVTETEKQWTTHFKEDQVCT

SEQ ID NO: 25912 - protein, 180 aa, Homo sapiens; identical to SEQ ID NO: 25908
  REGION 1..180: note = ENSP00000481300

SEQ ID NO: 25913 - protein, 395 aa, Homo sapiens
  REGION 1..395: note = ENSP00000366608
MLPAVGSVDEEEDPAEEDCPELVPIETTQSEEEEKSGLGAKIPVTIITGYLGAGKTTLLNYILTEQHSKRVAVILNESGEGSALEKSLAVSQGGELYEEWLELRNGCLCCSVKDNGLRAIENLMQKKGKFDDILLETTGLADPGAVASMFWVDAELGSDIYLDGIITIVDSKYGLKHLTEEKPDGLINEATRQVALADIILINKTDLVPEEDVKKLRTTLRSINGLGQILETQRSRVDLSNVLDLHAFDSLSGISLQKKLQHVPGTQPHLDQSIVTITFDVPGNAKEEHLNMFIQNLLWEKNVRNKDNHCMEVIRLKGLVSIKDKSQQVIVQGVHELCDLEETPVSWKDDTERTNRLVLIGRNLDKDILKQLFIATVTETEKQWTTHFKEDQVCT

SEQ ID NO: 25914 - protein, 376 aa, Homo sapiens
  REGION 1..376: note = ENSP00000401079
MLPAVGSVDEEEDPAEEDCPELVPIETTQSEEEEKSGLGAKIPVTIITGYLGAGKTTLLNYILTEQHSKRVAVILNESGEGSALEKSLAVSQGGELYEEWLELRNGCLCCSVKDNGLRAIENLMQKKGKFDDILLETTGLADPGAVASMFWVDAELGSDIYLDGIITIVDSKYGLKHLTEEKPDGLINEATRQVALADIILINKTDLVPEEDVKKLRTTLRSINGLGQILETQRSSLQKKLQHVPGTQPHLDQSIVTITFDVPGNAKEEHLNMFIQNLLWEKNVRNKDNHCMEVIRLKGLVSIKDKSQQVIVQGVHELCDLEETPVSWKDDTERTNRLVLIGRNLDKDILKQLFIATVTETEKQWTTHFKEDQVCT

SEQ ID NO: 25915 - protein, 406 aa, Homo sapiens
  REGION 1..406: note = ENSP00000404464
MVPPPPSRGGAARGQLGRSLGPLLLLLALGHTWTYREEPEDGDREICSESKIATTKYPCLKSSGELTTCYRKKCCKGYKFVLGQCIPEDYDVCAEAPCEQQCTDNFGRVLCTCYPGYRYDRERHRKREKPYCLDIDECASSNGTLCAHICINTLGSYRCECREGYIREDDGKTCTRGDKYPNDTGHEKSENMVKAGTCCATCKEFYQMKQTVLQLKQKIALLPNNAADLGKYITGDKVLASNTYLPGPPGLPGGQGPPGSPGPKGSPGFPGMPGPPGQPGPRGSMGPMGPSPDLSHIKQGRRGPVGPPGAPGRDGSKGERGAPGPRGSPGPPGSFDFLLLMLADIRNDITELQEKVFGHRTHSSAEEFPLPQEFPSYPEAMDLGSGDDHPRRTETRDLRAPRDFYP

SEQ ID NO: 25916 - protein, 46 aa, Homo sapiens
  REGION 1..46: note = ENSP00000467710
MVKAGTCCATCKEFYQMKQTVLQLKQKIALLPNNAADLGKYITGDK

SEQ ID NO: 25917 - protein, 336 aa, Homo sapiens
  REGION 1..336: note = ENSP00000381241
RKKCCKGYKFVLGQCIPEDYDVCAEAPCEQQCTDNFGRVLCTCYPGYRYDRERHRKREKPYCLDIDECASSNGTLCAHICINTLGSYRCECREGYIREDDGKTCTRGDKYPNDTGHEKSENMVKAGTCCATCKEFYQMKQTVLQLKQKIALLPNNAADLGKYITGDKVLASNTYLPGPPGLPGGQGPPGSPGPKGSPGFPGMPGPPGQPGPRGSMGPMGPSPDLSHIKQGRRGPVGPPGAPGRDGSKGERGAPGPRGSPGPPGSFDFLLLMLADIRNDITELQEKVFGHRTHSSAEEFPLPQEFPSYPEAMDLGSGDDHPRRTETRDLRAPRDFYP

SEQ ID NO: 25918 - protein, 715 aa, Homo sapiens
  REGION 1..715: note = ENSP00000309836
MAADESSQNTLRLQFKAMQEMQHKRLQKQMEKKREKELSLKSRADDQEEPLEVSDGLSLLHAGEPNSKNSFEKRVLEDEIEHLRNELRETVDENGRLYKLLKERDFEIKHLKKKIEEDRFAFTGTAGVAGDVVATKIVELSKKNRLLMAESEGAKTRVKQLTNRIQELERELQTALTRLSAKGATDAGAKPPRAQMGDRALLETPEVKALQDRLVATNLKMSDLRNQIQSVKQELRMAQKVLAREVGEDINVQQLLSSPGTWRGRAQQILVLQSKVQELEKQLGQARSQSAGTASDELSVYPDPRKLSAQEKNLLRIRSLEREKQEGLEKLASERDVLQRELEELKKKFEGMRSRNKLLSSEMKTLKSQMGTLVEKGRHDDELIDALMDQLKQLQEILGSLSLQEEKTRVSQHHLDQQLNSEAQRSNSLVAQLQAMVAEREAKVRQLEMEIGQLNVHYLRNKGVGEGSSGREVSPAYTQFLEDPGLTKSPASAGDHVGRLGSSRSVTSLGHTLVESALTRPSLPSPHRTSPRFSDSPEQKGWQAQVSEIKALWQAAEVERDRLTEFVTVLQKRVEESNSKLLESERKLQEERHRTVVLEQHLEKIRLEPGKASASQRAAPRTKTGLPTSNNRHNPTGSEKKDPSFAQLSDVPVESQMEELTTRLAIQVEENEMLKAALGSALRGKEEDFRMYHEILGQVKSVFLQALRQQKTGKQ

SEQ ID NO: 25919 - protein, 170 aa, Homo sapiens
  REGION 1..170: note = ENSP00000388649
MEDSSTDTEKEEEEEKDEKDQEPIYAIVPTINIQDERFVDLSETPAFIFLHELHAMGKLPGTRMAALKAKYTLLHDAVMSTQESEVQLLQNAKRFTEQIQQQQFHLQQADNFPEAFSTEVSKMREQLLKYQNEYNAVKEREFHNQYRLNSLKEEKIIIVKEFEKITKPGV

SEQ ID NO: 25920 - protein, 955 aa, Homo sapiens
  REGION 1..955: note = ENSP00000285871
MEDSSTDTEKEEEEEKDEKDQEPIYAIVPTINIQDERFVDLSETPAFIFLHELHAMGKLPGTRMAALKAKYTLLHDAVMSTQESEVQLLQNAKRFTEQIQQQQFHLQQADNFPEAFSTEVSKMREQLLKYQNEYNAVKEREFHNQYRLNSLKEEKIIIVKEFEKITKPGEMEKKMKILRESTEELRKEIMQKKLEIKNLREDLASKQKQLLKEQKELEELLGHQVVLKDEVAHHQTIPVQIGKEIEKITRKKVEMEKKKIVLEQEVKTLNDSLKKVENKVSAIVDEKENVIKEVEGKRALLEIKEREHNQLVKLLELARENEATSLTERGILDLNLRNSLIDKQNYHDELSRKQREKERDFRNLRKMELLLKVSWDALRQTQALHQRLLLEMEAIPKDDSTLSERRRELHKEVEVAKRNLAQQKIISEMESKLVEQQLAEENKLLKEQENMKELVVNLLRMTQIKIDEKEQKSKDFLKAQQKYTNIVKEMKAKDLEIRIHKKKKCEIYRRLREFAKLYDTIRNERNKFVNLLHKAHQKVNEIKERHKMSLNELEILRNSAVSQERKLQNSMLKHANNVTIRESMQNDVRKIVSKLQEMKEKKEAQLNNIDRLANTITMIEEEMVQLRKRYEKAVQHRNESGVQLIEREEEICIFYEKINIQEKMKLNGEIEIHLLEEKIQFLKMKIAEKQRQICVTQKLLPAKRSLDADLAVLQIQFSQCTDRIKDLEKQFVKPDGENRARFLPGKDLTEKEMIQKLDKLELQLAKKEEKLLEKDFIYEQVSRLTDRLCSKTQGCKQDTLLLAKKMNGYQRRIKNATEKMMALVAELSMKQALTIELQKEVREKEDFIFTCNSRIEKGLPLNKEIEKEWLKVLRDEEMHALAIAEKSQEFLEADNRQLPNGVYTTAEQRPNAYIPEADATLPLPKPYGALAPFKPSEPGANMRHIRKPVIKPVEI

SEQ ID NO: 25921 - protein, 254 aa, Homo sapiens
  REGION 1..254: note = ENSP00000354888
MDQSSEGCMKKISSVNLDKLINDFSQIEKKMVETNGKNNILDIQLEKSNCLLKVMQAKEVSIKEECATLHNIIKGLQQTIEYQQNLKGENEQLKISADLIKEKLKSHEQEYKNNIAKLVSEMKIKEEGYKKEISKLYQDMQRKVELNEEKHKELIEKKEMEISELNAKLRSQEKEKQNEIIKLQLEFDAKLARVQTKSKSYQDSTVLPQSIYRRKLQHFQEEKNKEIAILRNTIRDLEQRLSVGKDSHLKRRRF

SEQ ID NO: 25922 - protein, 198 aa, Homo sapiens
  REGION 1..198: note = ENSP00000373479
MDQSSEGCMKKISSVNLDKLINDFSQIEKKMVETNGKNNILDIQLEKSNCLLKVMQAKEVSIKEECATLHNIIKGLQQTIEYQQNLKVELNEEKHKELIEKKEMEISELNAKLRSQEKEKQNEIIKLQLEFDAKLARVQTKSKSYQDSTVLPQSIYRRKLQHFQEEKNKEIAILRNTIRDLEQRLSVGKDSHLKRRRF

SEQ ID NO: 25923 - protein, 562 aa, Homo sapiens
  REGION 1..562: note = ENSP00000404220
MDLPEGPVGGPTAEMYLRERPEEARLGMPVSLEEQILNSTFEACDPQRTGTVAVAQVLAYLEAVTGQGPQDARLQTLANSLDPNGEGPKATVDLDTFLVVMRDWIAACQLHGGLELEEETAFQGALTSRQLPSGCPEAEEPANLESFGGEDPRPELQATADLLSSLEDLELSNRRLVGENAKLQRSMETAEEGSARLGEEILALRKQLHSTQQALQFAKAMDEELEDLKTLARSLEEQNRSLLAQARQAEKEQQHLVAEMETLQEENGKLLAERDGVKKRSQELAMEKDTLKRQLFECEHLICQRDTILSERTRDVESLAQTLEEYRVTTQELRLEISRLEEQLSQTYEGPDELPEGAQLRRVGWTELLPPSLGLEIEAIRQKQEVATADLSNPLCGVWQWEEVIHETSEETEFPSEAPAGGQRNFQGEPAHPEEGRKEPSMWLTRREEEEDAESQVTADLPVPLGAPRPGDIPENPPERPARRELQQALVPVMKKLVPVRRRAWGQLCLPPQRLRVTRHPLIPAPVLGLLLLLLLSVLLLGPSPPPTWPHLQLCYLQPPPV

SEQ ID NO: 25924 - protein, 91 aa, Homo sapiens
  REGION 1..91: note = ENSP00000469367
MPVSLEEQILNSTFEACDPQRTGTVAVAQVLAYLEAVTGQGPQDARLQTLANSLDPNGEGPKATVDLDTFLVVMRDWIAACQLHGGLELEE

SEQ ID NO: 25925 - protein, 42 aa, Homo sapiens
  REGION 1..42: note = ENSP00000470765
MDLPEGPVGGPTAESAPEGETALLAGTPEQLLTHCGSSLTVE

SEQ ID NO: 25926 - protein, 75 aa, Homo sapiens
  REGION 1..75: note = ENSP00000468838
MPVSLEEQILNSTFEACDPQRTGTVAVAQVLAYLEAVTGQGPQDARLQTLANSLDPNGEGPKATVDLDTFLVVMR

SEQ ID NO: 25927 - protein, 188 aa, Homo sapiens
  REGION 1..188: note = ENSP00000471777
MYLRERPEEARLGMPVSLEEQILNSTFEACDPQRTGTVAVAQVLAYLEAVTGQGPQDARLQTLANSLDPNGEGPKATVDLDTFLVVMRDWIAACQLHGGLELEEETAFQGALTSRQLPSGCPEAEEPANLESFGGEDPRPELQATADLLSSLEDLELSNRRLVGENAKLQRSMETAEEGSARLGEEIL

SEQ ID NO: 25928 - protein, 193 aa, Homo sapiens
  REGION 1..193: note = ENSP00000469435
MDLPEGPVGGPTAEMYLRERPEEARLGMPVSLEEQILNSTFEACDPQRTGTVAVAQVLAYLEAVTGQGPQDARLQTLANSLDPNGEGPKATVDLDTFLVVMRDWIAACQLHGGLELEEETAFQGALTSRQLPSGCPEAEEPANLESFGGEDPRPELQATADLLSSLEDLELSNRRLVGENAKLQRSMETAEEG

SEQ ID NO: 25929 - protein, 524 aa, Homo sapiens
  REGION 1..524: note = ENSP00000470819
  VARIANT 1: note = Any amino acid
XNSTFEACDPQRTGTVAVAQVLAYLEAVTGQGPQDARLQTLANSLDPNGEGPKATVDLDTFLVVMRDWIAACQLHGGLELEEETAFQGALTSRQLPSGCPEAEEPANLESFGGEDPRPELQATADLLSSLEDLELSNRRLVGENAKLQRSMETAEEGSARLGEEILALRKQLHSTQQALQFAKAMDEELEDLKTLARSLEEQNRSLLAQARQAEKEQQHLVAEMETLQEENGKLLAERDGVKKRSQELAMEKDTLKRQLFECEHLICQRDTILSERTRDVESLAQTLEEYRVTTQELRLEISRLEEQLSQTYEGPDELPEGAQLRRVGWTELLPPSLGLEIEAIRQEVATADLSNPLCGVWQWEEVIHETSEETEFPSEAPAGGQRNFQGEPAHPEEGRKEPSMWLTRREEEEDAESQVTADLPVPLGAPRPGDIPENPPERPARRELQQALVPVMKKLVPVRRRAWGQLCLPPQRLRVTRHPLIPAPVLGLLLLLLLSVLLLGPSPPPTWPHLQLCYLQPPPV

SEQ ID NO: 25930 - protein, 793 aa, Homo sapiens
  REGION 1..793: note = ENSP00000453940
MALSPWTPGLGAGEKLVQAAAVSTGPSLELCTLPSTLGSSVAVEALEQLFVVEQSLQSDYFKCNEEAKIFLKDIAVAVKKLEEMRKATIDLLEIESMELNKLYYLLETLPNSIKRELEECVRDARRLNLFEINTIKMRITRTENEIELLKKKITDLTKYNEALGEKQEELARKHARFVLSLNQTMEKKATTTVYINETYTKINLKREDIALQKKCIQEAEELMEKERAEYLIRKQELTAQINEFENTREVKRMETYQKKKELDKLQTKMSKIKETVTVSAAVLSDHNLEIARLHESIRYWEQEVSELKKDLAILEAKLCFFTDNKEKLDDISNDEKNEFLNKIKQLVETLHAARMEYKDLREKMKTLARQYKIVLSEEEKAFLQKQKIHDENQKQLTFISQKEYFLSQKRVDIKNMEEGLITLQELQQATKTVYQQQIKILSANLERESQRCVITQWKMACLRKKHARWTAKIKAEIQAITEKIQNAEVRRIELLNETSFRQQEISGFVAQIEKLTTELKEEEKAFVNKEKMLMKELSKYEEIFVKETQINKEKEEELVEYLPQLQVAEQEYKEKRRKLEELSNIITAQRQEEDLLNNHIFLFTRDFSRYISNMEDVKQELQQLRDQESKKNKDHFETLKNLENGFYINDQKADLLLLENKKLKEYILYLKNNIEKYREGQEALMHTSSDLSRQLIAQEAQYKDLWAEFQTTVKILVDNGEETLQDINNLTDKLRERDEKMQHVSTWLRGSLEGLRLLVEQESPMDLLKKKKHIRTRVHFPVVKCTEKNTLTK

SEQ ID NO: 25931 - protein, 828 aa, Homo sapiens
  REGION 1..828: note = ENSP00000452964
MALSPWTPGLGAGEKLVQAAAVSTGPSLELCTLPSTLGSSVAVEALEQLFVVEQSLQSDYFKCNEEAKIFLKDIAVAVKKLEEMRKATIDLLEIESMELNKLYYLLETLPNSIKRELEECVRDARRLNLFEINTIKMRITRTENEIELLKKKITDLTKYNEALGEKQEELARKHARFVLSLNQTMEKKATTTVYINETYTKINLKREDIALQKKCIQEAEELMEKERAEYLIRKQELTAQINEFENTREVKRMETYQKKKELDKLQTKMSKIKETVTVSAAVLSDHNLEIARLHESIRYWEQEVSELKKDLAILEAKLCFFTDNKEKLDDISNDEKNEFLNKIKQLVETLHAARMEYKDLREKMKTLARQYKIVLSEEEKAFLQKQKIHDENQKQLTFISQKEYFLSQKRVDIKNMEEGLITLQELQQATKTVYQQQIKILSANLERESQRCVITQWKMACLRKKHARWTAKIKAEIQAITEKIQNAEVRRIELLNETSFRQQEISGFVAQIEKLTTELKEEEKAFVNKEKMLMKELSKYEEIFVKETQINKEKEEELVEYLPQLQVAEQEYKEKRRKLEELSNIITAQRQEEDLLNNHIFLFTRDFSRYISNMEDVKQELQQLRDQESKKNKDHFETLKNLENGFYINDQKADLLLLENKKLKEYILYLKNNIEKYREGQEALMHTSSDLSRQLIAQEAQYKDLWAEFQTTVKILVDNGEETLQDINNLTDKLRERDEKMQHVSTWLRGSLEGLRLLVEQESPMDLLSKQQLRALLVTSKEEKTCQLSDLVIPNYATNIQLNIDTYLGLNTLVVLSNSAFHLREFSR

SEQ ID NO: 25932 - protein, 1701 aa, Homo sapiens
  REGION 1..1701: note = ENSP00000434727
MRGGENRPPARVQSSSEELELRHQSLDAFPGRRLPGRGIQPAAKMSSVGKVTQVPNGKAYQQIFQAEVQLVHSLAATRKRAAERSVTLKSGRIPMMKKVETPEGEVMSPRQQKWMHSLPNDWIMENPVLHREKERAKREKARESENTIAAREVRGLMDTIVPEKISTSTFQRQAEHKRKSYESALASFQEEIAQVGKEMEPLIVDTGGLFLKKLTESDEEMNRLFLKVENDTNLEDYTIQALLELWDKVAGRLLLRKQEIKELDEALHSLEFSRTDKLKSVLKKYAEVIEKTSYLMRPEVYRLINEEAMVMNYALLGNRKALAQLFVNLMESTLQQELDSRHRWQGLVDTWKALKKEALLQSFSEFMASESIHTPPAVTKELEVMLKTQNVLQQRRLKHLCTICDLLPPSYSKTQLTEWHSSLNSLNKELDTYHVDCMMRIRLLYEKTWQECLMHVQNCKKQLLDWKAFTEEEAETLVNQFFFQMVGALQGKVEEDLELLDKSFETLADQTEWQSSHLFKYFQEVVQLWEAHQSELLVQELELEKRMEQHRQKHSLESQVQEAHLDRLLDQLRQQSDKETLAFHLEKVKDYLKNMKSRYECFHTLLTKEVMEYPAIMLKELNSYSSALSQYFFVREIFEQNLAGEVIFKFRQPEAHEKPSQKRVKKLRKKQGSKEDMTRSEESISSGTSTARSVEEVEEENDQEMESFITEEVLGQQKKSPLHAKMDESKEGSIQGLEEMQVEREGSLNPSLNEENVKGQGEKKEESEEEDEKEEEEEEEKLEEEKEEKEAQEEQESLSVGEEEDKEEGLEEIYYEDMESFTISSGNTYFVFVPLEEEHCRKSHSTFSAMFINDTSSAKFIEQVTIPSRLILEIKKQLRAGFFEHLEKWFDQCSLNTRVTVATKINELDSELELHLHLHQPRAQQIEKDIHNVRAAELLLHQEQLDSHCAGVTETLKKKRLMFCQFQEEQNVRSKNFRLKIYDMEHIFLNATRSQKLVTLSNTLHQELLSYVDVTQVSLRSFRQYLEESLGKLRYSNIEFIKHCRLFSEGGNFSPKEINSLCSRLEKEAARIELVESVIMLNMEKLENEYLDQANDVINKFESKFHNLSVDLIFIEKIQRLLTNLQVKIKCQVAKSNSQTNGLNFSLQQLQNKIKTCQESRGEKTTVTTEELLSFVQTWKEKLSQRIQYLNCSLDRVSMTELVFTNTILKDQEEDSDILTSSEALEEEAKLDVVTPESFTQLSRVGKPLIEDPAVDVIRKLLQLPNTKWPTHHCDKDPSQTGRGAWACGSRGSSEAGAGGAVCSPPVLCSCPGPSSPKGFKRHRCQPENSGKKAVPSASATSAGSFTPHPKPNKMERKYRVLGDKPPPAAEDFKGIILTLLWESSENLLTVAEEFYRKEKRPVTRPDCMCDTFDQCAENISKKILEYQSQANKYHNSCLIELRIQIRRFEELLPQVCWLVMENFKEHHWKKFFTSVKEIRGQFEEQQKRLEKRKDKNAQKLHLNLGHPVHFQEMESLHLSEEERQEELDSMIRMNKEKLEECTRRNGQVFITNLATFTEKFLLQLDEVVTIDDVQVARMEPPKQKLSMLIRRKLAGLSLKEESEKPLIERGSRKWPGIKPTEVTIQNKILLQPTSSISTTKTTLGHLAAVEARDAVYLKYLASFEEELKRIQDDCTSQIKEAQRWKDSWKQSLHTIQGLYV

SEQ ID NO: 25933 - protein, 512 aa, Homo sapiens
  REGION 1..512: note = ENSP00000471454
MDQPAGLQVDYVFRGVEHAVRVMVSGQVLELEVEDRMTADQWRGEFDAGFIEDLTHKTGNFKQFNIFCHMLESALTQSSESVTLDLLTYTDLESLRNRKMGGRPGSLAPRSAQLNSKRYLILIYSVEFDRIHYPLPLPYQGKPDPVVLQGIIRSLKEELGRLQGLDGQNTRDTRENEIWHLREQVSRLASEKRELEAQLGRSREEALAGRAARQEAEALRGLVRGLELELRQERGLGHRVAGRRGQDCRRLAKELEEAKASERSLRARLKTLTSELALYKRGRRTPPVQPPPTREDRASSSRERSASRGRGAARSSSRESGRGSRGRGRPARPSPSPTGGRALRFDPTAFVKAKERKQREIQMKQQQRNRLGSGGSGDGPSVSWSRQTQPPAALTGRGDAPNRSRNRSSSVDSFRSRCSSASSCSDLEDFSESLSRGGHRRRGKPPSPTPWSGSNMKSPPVERSHHQKSLANSGGWVPIKEYSSEHQAADMAEIDARLKALQEYMNRLDMRS

SEQ ID NO: 25934 - protein, 77 aa, Homo sapiens
  REGION 1..77: note = ENSP00000469909
MDQPAGLQVDYVFRGVEHAVRVMVSGQVLELEVEDRMTADQWRGEFDAGFIEDLTHKTGNFKQFNIFCHMLESALTQ

SEQ ID NO: 25935 - protein, 49 aa, Homo sapiens
  REGION 1..49: note = ENSP00000469524
MDQPAGLQVDYVFRGVEHAVRVMVSGQVLELEVEDRMTADQWRGEFDAG

SEQ ID NO: 25936 - protein, 332 aa, Homo sapiens
  REGION 1..332: note = ENSP00000469466
MDQPAGLQVDYVFRGVEHAVRVMVSGQVLELEVEDRMTADQWRGEFDAGFIEDLTHKTGNFKQFNIFCHMLESALTQSSESVTLDLLTYTDLESLRNRKMGGRPGSLAPRSAQLNSKRYLILIYSVEFDRIHYPLPLPYQGKPDPVVLQGIIRSLKEELGRLQGLDGQNTRDTRENEIWHLREQQQQRNRLGSGGSGDGPSVSWSRQTQPPAALTGRGDAPNRSRNRSSSVDSFRSRCSSASSCSDLEDFSESLSRGGHRRRGKPPSPTPWSGSNMKSPPVERSHHQKSLANSGGWVPIKEYSSEHQAADMAEIDARLKALQEYMNRLDMRS

SEQ ID NO: 25937 - protein, 332 aa, Homo sapiens; identical to SEQ ID NO: 25936
  REGION 1..332: note = ENSP00000444279

SEQ ID NO: 25938 - protein, 950 aa, Homo sapiens
  REGION 1..950: note = ENSP00000206423
MTWRMGPRFTMLLAMWLVCGSEPHPHATIRGSHGGRKVPLVSPDSSRPARFLRHTGRSRGIERSTLEEPNLQPLQRRRSVPVLRLARPTEPPARSDINGAAVRPEQRPAARGSPREMIRDEGSSARSRMLRFPSGSSSPNILASFAGKNRVWVISAPHASEGYYRLMMSLLKDDVYCELAERHIQQIVLFHQAGEEGGKVRRITSEGQILEQPLDPSLIPKLMSFLKLEKGKFGMVLLKKTLQVEERYPYPVRLEAMYEVIDQGPIRRIEKIRQKGFVQKCKASGVEGQVVAEGNDGGGGAGRPSLGSEKKKEDPRRAQVPPTRESRVKVLRKLAATAPALPQPPSTPRATTLPPAPATTVTRSTSRAVTVAARPMTTTAFPTTQRPWTPSPSHRPPTTTEVITARRPSVSENLYPPSRKDQHRERPQTTRRPSKATSLESFTNAPPTTISEPSTRAAGPGRFRDNRMDRREHGHRDPNVVPGPPKPAKEKPPKKKAQDKILSNEYEEKYDLSRPTASQLEDELQVGNVPLKKAKESKKHEKLEKPEKEKKKKMKNENADKLLKSEKQMKKSEKKSKQEKEKSKKKKGGKTEQDGYQKPTNKHFTQSPKKSVADLLGSFEGKRRLLLITAPKAENNMYVQQRDEYLESFCKMATRKISVITIFGPVNNSTMKIDHFQLDNEKPMRVVDDEDLVDQRLISELRKEYGMTYNDFFMVLTDVDLRVKQYYEVPITMKSVFDLIDTFQSRIKDMEKQKKEGIVCKEDKKQSLENFLSRFRWRRRLLVISAPNDEDWAYSQQLSALSGQACNFGLRHITILKLLGVGEEVGGVLELFPINGSSVVEREDVPAHLVKDIRNYFQVSPEYFSMLLVGKDGNVKSWYPSPMWSMVIVYDLIDSMQLRRQEMAIQQSLGMRCPEDEYAGYGYHSYHQGYQDGYQDDYRHHESYHHGYPY

SEQ ID NO: 25939 - protein, 950 aa, Homo sapiens; identical to SEQ ID NO: 25938
  REGION 1..950: note = ENSP00000411814

SEQ ID NO: 25940 - protein, 212 aa, Homo sapiens
  REGION 1..212: note = ENSP00000418188
MALRSMGQFSVFFFFFFWAQKKIASLSHSGFLHWFLLFEAVSSNGVLLFFSRFRWRRRLLVISAPNDEDWAYSQQLSALSGQACNFGLRHITILKLLGVGEEVGGVLELFPINGSSVVEREDVPAHLVKDIRNYFQVSPEYFSMLLVGKDGNVKSWYPSPMWSMVIVYDLIDSMQLRRQEMAIQQSLGMRCPEDEYAGYGYHSYHQGYQDGY

SEQ ID NO: 25941 - protein, 261 aa, Homo sapiens
  REGION 1..261: note = ENSP00000420123
  VARIANT 1: note = Any amino acid
XFTQSPKKSVADLLGSFEGKRRLLLITAPKAENNMYVQQRDEYLESFCKMATRKISVITIFGPVNNSTMKIDHFQLDNEKPMRVVDDEDLVDQRLISELRKEYGMTYNDFFMVLTDVDLRVKQYYEVPITMKSVFDLIDTFQSRIKDMEKQKKEGIVCKEDKKQSLENFLSRFRWRRRLLVISAPNDEDWAYSQQLSALSGQACNFGSSVVEREDVPAHLVKDIRNYFQVSPEYFSMLLVGKDGNVKSWYPSPMWSMVIVY

SEQ ID NO: 25942 - protein, 553 aa, Homo sapiens
  REGION 1..553: note = ENSP00000384040
MSKAAGGAAAAAAAAESCSPAPAGSSAAPPAPVEDLSKVSDEELLQWSKEELIRSLRRAEAEKVSAMLDHSNLIREVNRRLQLHLGEIRGLKDINQKLQEDNQELRDLCCFLDDDRQKGKRVSREWQRLGRYTAGVMHKEVALYLQKLKDLEVKQEEVVKENMELKELCVLLDEEKGAGCAGSRCSIDSQASLCQLTASTAPYVRDVGDGSSTSSTGSTDSPDHHKHHASSGSPEHLQKPRSEGSPEHSKHRSASPEHPQKPRACGTPDRPKALKGPSPEHHKPLCKGSPEQQRHPHPGSSPETLPKHVLSGSPEHFQKHRSGSSPEHARHSGGSPEHLQKHALGGSLEHLPRARGTSPEHLKQHYGGSPDHKHGGGSGGSGGSGGGSREGTLRRQAQEDGSPHHRNVYSGMNESTLSYVRQLEARVRQLEEENRMLPQASQNRRQPPTRNSSNMEKGWGSRARRVLQWWQGCRGIGRCLPTLPGSFRLSSGADGSNSSPNSAASFSGHATPSQQPEPVVHSLKVVWRKLGDAAGSCPGIRQHLSGNQYKGPM

SEQ ID NO: 25943 - protein, 1870 aa, Homo sapiens
  REGION 1..1870: note = ENSP00000338728
MENEIFTPLLEQFMTSPLVTWVKTFGPLAAGNGTNLDEYVALVDGVFLNQVMLQINPKLESQRVNKKVNNDASLRMHNLSILVRQIKFYYQETLQQLIMMSLPNVLIIGKNPFSEQGTEEVKKLLLLLLGCAVQCQKKEEFIERIQGLDFDTKAAVAAHIQEVTHNQENVFDLQWMEVTDMSQEDIEPLLKNMALHLKRLIDERDEHSETIIELSEERDGLHFLPHASSSAQSPCGSPGMKRTESRQHLSVELADAKAKIRRLRQELEEKTEQLLDCKQELEQMEIELKRLQQENMNLLSDARSARMYRDELDALREKAVRVDKLESEVSRYKERLHDIEFYKARVEELKEDNQVLLETKTMLEDQLEGTRARSDKLHELEKENLQLKAKLHDMEMERDMDRKKIEELMEENMTLEMAQKQSMDESLHLGWELEQISRTSELSEAPQKSLGHEVNELTSSRLLKLEMENQSLTKTVEELRTTVDSVEGNASKILKMEKENQRLSKKVEILENEIVQEKQSLQNCQNLSKDLMKEKAQLEKTIETLRENSERQIKILEQENEHLNQTVSSLRQRSQISAEARVKDIEKENKILHESIKETSSKLSKIEFEKRQIKKELEHYKEKGERAEELENELHHLEKENELLQKKITNLKITCEKIEALEQENSELERENRKLKKTLDSFKNLTFQLESLEKENSQLDEENLELRRNVESLKCASMKMAQLQLENKELESEKEQLKKGLELLKASFKKTERLEVSYQGLDIENQRLQKTLENSNKKIQQLESELQDLEMENQTLQKNLEELKISSKRLEQLEKENKSLEQETSQLEKDKKQLEKENKRLRQQAEIKDTTLEENNVKIGNLEKENKTLSKEIGIYKESCVRLKELEKENKELVKRATIDIKTLVTLREDLVSEKLKTQQMNNDLEKLTHELEKIGLNKERLLHDEQSTDDRYKLLESKLESTLKKSLEIKEEKIAALEARLEESTNYNQQLRQELKTVKKNYEALKQRQDEERMVQSSPPISGEDNKWERESQETTRELLKVKDRLIEVERNNATLQAEKQALKTQLKQLETQNNNLQAQILALQRQTVSLQEQNTTLQTQNAKLQVENSTLNSQSTSLMNQNAQLLIQQSSLENENESVIKEREDLKSLYDSLIKDHEKLELLHERQASEYESLISKHGTLKSAHKNLEVEHRDLEDRYNQLLKQKGQLEDLEKMLKVEQEKMLLENKNHETVAAEYKKLCGENDRLNHTYSQLLKETEVLQTDHKNLKSLLNNSKLEQTRLEAEFSKLKEQYQQLDITSTKLNNQCELLSQLKGNLEEENRHLLDQIQTLMLQNRTLLEQNMESKDLFHVEQRQYIDKLNELRRQKEKLEEKIMDQYKFYDPSPPRRRGNWITLKMRKLIKSKKDINRERQKSLTLTPTRSDSSEGFLQLPHQDSQDSSSVGSNSLEDGQTLGTKKSSMVALKRLPFLRNRPKDKDKMKACYRRSMSMNDLVQSMVLAGQWTGSTENLEVPDDISTGKRRKELGAMAFSTTAINFSTVNSSAGFRSKQLVNNKDTTSFEDISPQGVSDDSSTGSRVHASRPASLDSGRTSTSNSNNNASLHEVKAGAVNNQSRPQSHSSGEFSLLHDHEAWSSSGSSPIQYLKRQTRSSPVLQHKISETLESRHHKIKTGSPGSEVVTLQQFLEESNKLTSVQIKSSSQENLLDEVMKSLSVSSDFLGKDKPVSCGLARSVSGKTPGDFYDRRTTKPEFLRPGPRKTEDTYFISSAGKPTPGTQGKIKLVKESSLSRQSKDSNPYATLPRASSVISTAEGTTRRTSIHDFLTKDSRLPISVDSPPAAADSNTTAASNVDKVQESRNSKSRSREQQSS

SEQ ID NO: 25944 - protein, 1843 aa, Homo sapiens
  REGION 1..1843: note = ENSP00000263630
MENEIFTPLLEQFMTSPLVTWVKTFGPLAAGNGTNLDEYVALVDGVFLNQVMLQINPKLESQRVNKKVNNDASLRMHNLSILVRQIKFYYQETLQQLIMMSLPNVLIIGKNPFSEQGTEEVKKLLLLLLGCAVQCQKKEEFIERIQGLDFDTKAAVAAHIQEVTHNQENVFDLQWMEVTDMSQEDIEPLLKNMALHLKRLIDERDEHSETIIELSEERDGLHFLPHASSSAQSPCGSPGMKRTESRQHLSVELADAKAKIRRLRQELEEKTEQLLDCKQELEQMEIELKRLQQENMNLLSDARSARMYRDELDALREKAVRVDKLESEVSRYKERLHDIEFYKARVEELKEDNQVLLETKTMLEDQLEGTRARSDKLHELEKENLQLKAKLHDMEMERDMDRKKIEELMEENMTLEMAQKQSMDESLHLGWELEQISRTSELSEAPQKSLGHEVNELTSSRLLKLEMENQSLTKTVEELRTTVDSVEGNASKILKMEKENQRLSKKVEILENEIVQEKQSLQNCQNLSKDLMKEKAQLEKTIETLRENSERQIKILEQENEHLNQTVSSLRQRSQISAEARVKDIEKENKILHESIKETSSKLSKIEFEKRQIKKELEHYKEKGERAEELENELHHLEKENELLQKKITNLKITCEKIEALEQENSELERENRKLKKTLDSFKNLTFQLESLEKENSQLDEENLELRRNVESLKCASMKMAQLQLENKELESEKEQLKKGLELLKASFKKTERLEVSYQGLDIENQRLQKTLENSNKKIQQLESELQDLEMENQTLQKNLEELKISSKRLEQLEKENKSLEQETSQLEKDKKQLEKENKRLRQQAEIKDTTLEENNVKIGNLEKENKTLSKEIGIYKESCVRLKELEKENKELVKRATIDIKTLVTLREDLVSEKLKTQQMNNDLEKLTHELEKIGLNKERLLHDEQSTDDSRYKLLESKLESTLKKSLEIKEEKIAALEARLEESTNYNQQLRQELKTVKKNYEALKQRQDEERMVQSSPPISGEDNKWERESQETTRELLKVKDRLIEVERNNATLQAEKQALKTQLKQLETQNNNLQAQILALQRQTVSLQEQNTTLQTQNAKLQVENSTLNSQSTSLMNQNAQLLIQQSSLENENESVIKEREDLKSLYDSLIKDHEKLELLHERQASEYESLISKHGTLKSAHKNLEVEHRDLEDRYNQLLKQKGQLEDLEKMLKVEQEKMLLENKNHETVAAEYKKLCGENDRLNHTYSQLLKETEVLQTDHKNLKSLLNNSKLEQTRLEAEFSKLKEQYQQLDITSTKLNNQCELLSQLKGNLEEENRHLLDQIQTLMLQNRTLLEQNMESKDLFHVEQRQYIDKLNELRRQKEKLEEKIMDQYKFYDPSPPRRRGNWITLKMRKLIKSKKDINRERQKSLTLTPTRSDSSEGFLQLPHQDSQDSSSVGSNSLEDGQTLGTKKSSTMNDLVQSMVLAGQWTGSTENLEVPDDISTGKRRKELGAMAFSTTAINFSTVNSSAGFRSKQLVNNKDTTSFEDISPQGVSDDSSTGSRVHASRPASLDSGRTSTSNSNNNASLHEVKAGAVNNQSRPQSHSSGEFSLLHDHEAWSSSGSSPIQYLKRQTRSSPVLQHKISETLESRHHKIKTGSPGSEVVTLQQFLEESNKLTSVQIKSSSQENLLDEVMKSLSVSSDFLGKDKPVSCGLARSVSGKTPGDFYDRRTTKPEFLRPGPRKTEDTYFISSAGKPTPGTQGKIKLVKESSLSRQSKDSNPYATLPRASSVISTAEGTTRRTSIHDFLTKDSRLPISVDSPPAAADSNTTAASNVDKVQESRNSKSRSREQQSS

SEQ ID NO: 25945 - protein, 374 aa, Homo sapiens
  REGION 1..374: note = ENSP00000413401
  VARIANT 1: note = Any amino acid
XIMDQYKFYDPSPPRRRGNWITLKMRKLIKSKKDINRERQKSLTLTPTRSDSSEGFLQLPHQDSQDSSSVGSNSLEDGQTLGTKKSSNTTSFEDISPQGVSDDSSTGSRVHAGAVNNQSRPQSHSSGEFSLLHDHEAWSSSGSSPIQYLKRQTRSSPVLQHKISETLESRHHKIKTGSPGSEVVTLQQFLEESNKLTSVQIKSSSQENLLDEVMKSLSVSSDFLGKDKPVSCGLARSVSGKTPGDFYDRRTTKPEFLRPGPRKTEDTYFISSAGKPTPGTQGKIKLVKESSLSRQSKDSNPYATLPRASSVISTAEGTTRRTSIHDFLTKDSRLPISVDSPPAAADSNTTAASNVDKVQESRNSKSRSREQQSS

SEQ ID NO: 25946 - protein, 888 aa, Homo sapiens
  REGION 1..888: note = ENSP00000390012
LLESKLESTLKKSLEIKEEKIAALEARLEESTNYNQQLRQELKTVKKNYEALKQRQDEERMVQSSPPISGEDNKWERESQETTRELLKVKDRLIEVERNNATLQAEKQALKTQLKQLETQNNNLQAQILALQRQTVSLQEQNTTLQTQNAKLQVENSTLNSQSTSLMNQNAQLLIQQSSLENENESVIKEREDLKSLYDSLIKDHEKLELLHERQASEYESLISKHGTLKSAHKNLEVEHRDLEDRYNQLLKQKGQLEDLEKMLKVEQEKMLLENKNHETVAAEYKKLCGENDRLNHTYSQLLKETEVLQTDHKNLKSLLNNSKLEQTRLEAEFSKLKEQYQQLDITSTKLNNQCELLSQLKGNLEEENRHLLDQIQTLMLQNRTLLEQNMESKDLFHVEQRQYIDKLNELRRQKEKLEEKIMDQYKFYDPSPPRRRGNWITLKMRKLIKSKKDINRERQKSLTLTPTRSDSSEGFLQLPHQDSQDSSSVGSNSLEDGQTLGTKKSSTMNDLVQSMVLAGQWTGSTENLEVPDDISTGKRRKELGAMAFSTTAINFSTVNSSAGFRSKQLVNNKDTTSFEDISPQGVSDDSSTGSRVHASRPASLDSGRTSTSNSNNNASLHEVKAGAVNNQSRPQSHSSGEFSLLHDHEAWSSSGSSPIQYLKRQTRSSPVLQHKISETLESRHHKIKTGSPGSEVVTLQQFLEESNKLTSVQIKSSSQENLLDEVMKSLSVSSDFLGKDKPVSCGLARSVSGKTPGDFYDRRTTKPEFLRPGPRKTEDTYFISSAGKPTPGTQGKIKLVKESSLSRQSKDSNPYATLPRASSVISTAEGTTRRTSIHDFLTKDSRLPISVDSPPAAADSNTTAASNVDKVQESRNSKSRSREQQSS

SEQ ID NO: 25947 - protein, 1202 aa, Homo sapiens
  REGION 1..1202: note = ENSP00000405080
QLEKDKKQLEKENKRLRQQAEIKDTTLEENNVKIGNLEKENKTLSKEIGIYKESCVRLKELEKENKELVKRATIDIKTLVTLREDLVSEKLKTQQMNNDLEKLTHELEKIGLNKERLLHDEQSTDDSRYKLLESKLESTLKKSLEIKEEKIAALEARLEESTNYNQQLRQELKTVKKNYEALKQRQDEERMVQSSPPISGEDNKWERESQETTRELLKVKDRLIEVERNNATLQAEKQALKTQLKQLETQNNNLQAQILALQRQTVSLQEQNTTLQTQNAKLQVENSTLNSQSTSLMNQNAQLLIQQSSLENENESVIKEREDLKSLYDSLIKDHEKLELLHERQASEYESLISKHGTLKSAHKNLEVEHRDLEDRYNQLLKQKGQLEDLEKMLKVEQEKMLLENKNHETVAAEYKKLCGENDRLNHTYSQLLKETEVLQTDHKNLKSLLNNSKLEQTRLEAEFSKLKEQYQQLDITSTKLNNQCELLSQLKGNLEEENRHLLDQIQTLMLQNRTLLEQNMESKDLFHVEQRQYIDKLNELRRQKEKLEEKIMDQYKFYDPSPPRRRGNWITLKMRKLIKSKKDINRERQKSLTLTPTRSDSSEGFLQLPHQDSQDSSSVGSNSLEDGQTLGTKKSSMVALKRLPFLRNRPKDKDKMKACYRRSMSMNDLVQSMVLAGQWTGSTENLEVPDDISTGKRRKELGAMAFSTTAINFSTVNSSAGFRSKQLVNNKDTTSFEDISPQGVSDDSSTGSRVHASRPASLDSGRTSTSNSNNNASLHEVKAGAVNNQSRPQSHSSGEFSLLHDHEAWSSSGSSPIQYLKRQTRSSPVLQHKISETLESRHHKIKTGSPGSEVVTLQQFLEESNKLTSVQIKSSSQENLLDEVMKSLSVSSDFLGKDKPVSCGLARSVSGKTPGDFYDRRTTKPEFLRPGPRKTEDTYFISSAGKPTPGTQGKIKLVKESSLSRQSKDSNPYATLPRASSVISTAEGTTRRTSIHDFLTKDSRLPISVDSPPAAADSNTTAASSEYHLHQWSSHILDIPTHTIGSCAQNDLAIDMPEPLYAQARNSRTGRSHFLNQTFATIRMPSDAFGMLAKDSIGPFTVAHSSQPFLSLNTELVSNISGLPPRPVIRITDQASASLDKPAQKENEQFSDHQNPSNSNLQFSINSNNLVTSACLYPDDTEAALLVSEDNQTVWYEYGCI

SEQ ID NO: 25948 - protein, 736 aa, Homo sapiens
  REGION 1..736: note = ENSP00000415267
  VARIANT 1: note = Any amino acid
XKKSLEIKEEKIAALEARLEESTNYNQQLRQELKTNATLQAEKQALKTQLKQLETQNNNLQAQILALQRQTVSLQEQNTTLQTQNAKLQVENSTLNSQSTSLMNQNAQLLIQQSSLENENESVIKEREDLKSLYDSLIKDHEKLELLHERQASEYESLISKHGTLKSAHKNLEVEHRDLEDRYNQLLKQKGQLEDLEKMLKVEQEKMLLENKNHETVAAEYKKLCGENDRLNHTYSQLLKETEVLQTDHKNLKSLLNNSKLEQTRLEAEFSKLKEQYQQLDITSTKLNNQCELLSQLKGNLEEENRHLLDQIQTLMLQNRTLLEQNMESKDLFHVEQRQYIDKLNELRRQKEKLEEKIMDQYKFYDPSPPRRRGNWITLKMRKLIKSKKDINRERQKSLTLTPTRSDSSEGFLQLPHQDSQDSSSVGSNSLEDGQTLGTKKSSTMNDLVQSMVLAGQWTGSTENLEVPDDISTGKRRKELGAMAFSTTAINFSTVNSSAGFRSKQLVNNKDTTSFEDISPQGVSDDSSTGSRVHASRPASLDSGRTSTSNSNNNASLHEVKAGAVNNQSRPQSHSSGEFSLLHDHEAWSSSGSSPIQYLKRQTRSSPVLQHKISETLESRHHKIKTGSPGSEVVTLQQFLEESNKLTSVQIKSSSQENLLDEVMKSLSVSSDFLGKDKPVSCGLARSVSGKTPGDFYDRRTTKPEFLRPGPRKTEDTYFISSAGKPTPGTQGKIKL

SEQ ID NO: 25949 - protein, 147 aa, Homo sapiens
  REGION 1..147: note = ENSP00000399237
MHNLSILVRQIKFYYQETLQQLIMMSLPNVLIIGKNPFSEQGTEEVKKLLLLLLGCAVQCQKKEEFIERIQGLDFDTKAAVAAHIQEVTHNQENVFDLQWMEVTDMSQEDIEPLLKNMALHLKRLIDERDEHSETIIELSEERDGLH

SEQ ID NO: 25950 - protein, 1796 aa, Homo sapiens
  REGION 1..1796: note = ENSP00000404431
MENEIFTPLLEQFMTSPLVTWVKTFGPLAAGNGTNLDEYVALVDGVFLNQVMLQINPKLESQRVNKKVNNDASLRMHNLSILVRQIKFYYQETLQQLIMMSLPNVLIIGKNPFSEQGTEEVKKLLLLLLGCAVQCQKKEEFIERIQGLDFDTKAAVAAHIQEVTHNQENVFDLQWMEVTDMSQEDIEPLLKNMALHLKRLIDERDEHSETIIELSEERDGLHFLPHASSSAQSPCGSPGMKRTESRQHLSVELADAKAKIRRLRQELEEKTEQLLDCKQELEQMEIELKRLQQENMNLLSDARSARMYRDELDALREKAVRVDKLESEVSRYKERLHDIEFYKARVEELKEDNQVLLETKTMLEDQLEGTRARSDKLHELEKENLQLKAKLHDMEMERDMDRKKIEELMEENMTLEMAQKQSMDESLHLGWELEQISRTSELSEAPQKSLGHEVNELTSSRLLKLEMENQSLTKTVEELRTTVDSVEGNASKILKMEKENQRLSKKVEILENEIVQEKQSLQNCQNLSKDLMKEKAQLEKTIETLRENSERQIKILEQENEHLNQTVSSLRQRSQISAEARVKDIEKENKILHESIKETSSKLSKIEFEKRQIKKELEHYKEKGERAEELENELHHLEKENELLQKKITNLKITCEKIEALEQENSELERENRKLKKTLDSFKNLTFQLESLEKENSQLDEENLELRRNVESLKCASMKMAQLQLENKELESEKEQLKKGLELLKASFKKTERLEVSYQGLDIENQRLQKTLENSNKKIQQLESELQDLEMENQTLQKNLEELKISSKRLEQLEKENKSLEQETSQLEKDKKQLEKENKRLRQQAEIKDTTLEENNVKIGNLEKENKTLSKEIGIYKESCVRLKELEKENKELVKRATIDIKTLVTLREDLVSEKLKTQQMNNDLEKLTHELEKIGLNKERLLHDEQSTDDRYKLLESKLESTLKKSLEIKEEKIAALEARLEESTNYNQQLRQELKTVKKNYEALKQRQDEERMVQSSPPISGEDNKWERESQETTRELLKVKDRLIEVERNNATLQAEKQALKTQLKQLETQNNNLQAQILALQRQTVSLQEQNTTLQTQNAKLQVENSTLNSQSTSLMNQNAQLLIQQSSLENENESVIKEREDLKSLYDSLIKDHEKLELLHERQASEYESLISKHGTLKSAHKNLEVEHRDLEDRYNQLLKQKGQLEDLEKMLKVEQEKMLLENKNHETVAAEYKKLCGENDRLNHTYSQLLKETEVLQTDHKNLKSLLNNSKLEQTRLEAEFSKLKEQYQQLDITSTKLNNQCELLSQLKGNLEEENRHLLDQIQTLMLQNRTLLEQNMESKDLFHVEQRQYIDKLNELRRQKEKLEEKIMDQYKFYDPSPPRRRGNWITLKMRKLIKSKKDINRERQKSLTLTPTRSDSSEGFLQLPHQDSQDSSSVGSNSLEDGQTLGTKKSSMVALKRLPFLRNRPKDKDKMKACYRRSMSMNDLVQSMVLAGQWTGSTENLEVPDDISTGKRRKELGAMAFSTTAINFSTVNSSAGFRSKQLVNNKDTTSFEDISPQGVSDDSSTGSRVHASRPASLDSGRTSTSNSNNNASLHEVKAGAVNNQSRPQSHSSGEFSLLHDHEAWSSSGSSPIQYLKRQTRSSPVLQHKISETLESRHHKIKTGSPGSEVVTLQQFLEESNKLTSVQIKSSSQENLLDEVMKSLSVSSDFLGKDKPVSCGLASVISTAEGTTRRTSIHDFLTKDSRLPISVDSPPAAADSNTTAASNVDKVQESRNSKSRSREQQSS

SEQ ID NO: 25951 - protein, 741 aa, Homo sapiens [sequence omitted]

SEQ ID NO: 25952 - protein, 1871 aa, Homo sapiens
  REGION 1..1871: note = ENSP00000410608
MENEIFTPLLEQFMTSPLVTWVKTFGPLAAGNGTNLDEYVALVDGVFLNQVMLQINPKLESQRVNKKVNNDASLRMHNLSILVRQIKFYYQETLQQLIMMSLPNVLIIGKNPFSEQGTEEVKKLLLLLLGCAVQCQKKEEFIERIQGLDFDTKAAVAAHIQEVTHNQENVFDLQWMEVTDMSQEDIEPLLKNMALHLKRLIDERDEHSETIIELSEERDGLHFLPHASSSAQSPCGSPGMKRTESRQHLSVELADAKAKIRRLRQELEEKTEQLLDCKQELEQMEIELKRLQQENMNLLSDARSARMYRDELDALREKAVRVDKLESEVSRYKERLHDIEFYKARVEELKEDNQVLLETKTMLEDQLEGTRARSDKLHELEKENLQLKAKLHDMEMERDMDRKKIEELMEENMTLEMAQKQSMDESLHLGWELEQISRTSELSEAPQKSLGHEVNELTSSRLLKLEMENQSLTKTVEELRTTVDSVEGNASKILKMEKENQRLSKKVEILENEIVQEKQSLQNCQNLSKDLMKEKAQLEKTIETLRENSERQIKILEQENEHLNQTVSSLRQRSQISAEARVKDIEKENKILHESIKETSSKLSKIEFEKRQIKKELEHYKEKGERAEELENELHHLEKENELLQKKITNLKITCEKIEALEQENSELERENRKLKKTLDSFKNLTFQLESLEKENSQLDEENLELRRNVESLKCASMKMAQLQLENKELESEKEQLKKGLELLKASFKKTERLEVSYQGLDIENQRLQKTLENSNKKIQQLESELQDLEMENQTLQKNLEELKISSKRLEQLEKENKSLEQETSQLEKDKKQLEKENKRLRQQAEIKDTTLEENNVKIGNLEKENKTLSKEIGIYKESCVRLKELEKENKELVKRATIDIKTLVTLREDLVSEKLKTQQMNNDLEKLTHELEKIGLNKERLLHDEQSTDDSRYKLLESKLESTLKKSLEIKEEKIAALEARLEESTNYNQQLRQELKTVKKNYEALKQRQDEERMVQSSPPISGEDNKWERESQETTRELLKVKDRLIEVERNNATLQAEKQALKTQLKQLETQNNNLQAQILALQRQTVSLQEQNTTLQTQNAKLQVENSTLNSQSTSLMNQNAQLLIQQSSLENENESVIKEREDLKSLYDSLIKDHEKLELLHERQASEYESLISKHGTLKSAHKNLEVEHRDLEDRYNQLLKQKGQLEDLEKMLKVEQEKMLLENKNHETVAAEYKKLCGENDRLNHTYSQLLKETEVLQTDHKNLKSLLNNSKLEQTRLEAEFSKLKEQYQQLDITSTKLNNQCELLSQLKGNLEEENRHLLDQIQTLMLQNRTLLEQNMESKDLFHVEQRQYIDKLNELRRQKEKLEEKIMDQYKFYDPSPPRRRGNWITLKMRKLIKSKKDINRERQKSLTLTPTRSDSSEGFLQLPHQDSQDSSSVGSNSLEDGQTLGTKKSSMVALKRLPFLRNRPKDKDKMKACYRRSMSMNDLVQSMVLAGQWTGSTENLEVPDDISTGKRRKELGAMAFSTTAINFSTVNSSAGFRSKQLVNNKDTTSFEDISPQGVSDDSSTGSRVHASRPASLDSGRTSTSNSNNNASLHEVKAGAVNNQSRPQSHSSGEFSLLHDHEAWSSSGSSPIQYLKRQTRSSPVLQHKISETLESRHHKIKTGSPGSEVVTLQQFLEESNKLTSVQIKSSSQENLLDEVMKSLSVSSDFLGKDKPVSCGLARSVSGKTPGDFYDRRTTKPEFLRPGPRKTEDTYFISSAGKPTPGTQGKIKLVKESSLSRQSKDSNPYATLPRASSVISTAEGTTRRTSIHDFLTKDSRLPISVDSPPAAADSNTTAASNVDKVQESRNSKSRSREQQSS

SEQ ID NO: 25953 - protein, 115 aa, Homo sapiens
  REGION 1..115: note = ENSP00000335657
MNSGVCLCVLMAVLAAGALTQPVPPADPAGSGLQRAEEAPRRQLRVSQRTDGESRAHLGALLARYIQQARKAPSGRMSIVKNLQNLDPSHRISDRDYMGWMDFGRRSAEEYEYPS

SEQ ID NO: 25954 - protein, 115 aa, Homo sapiens; identical to SEQ ID NO: 25953
  REGION 1..115: note = ENSP00000379472

SEQ ID NO: 25955 - protein, 115 aa, Homo sapiens; identical to SEQ ID NO: 25953
  REGION 1..115: note = ENSP00000409124

SEQ ID NO: 25956 - protein, 447 aa, Homo sapiens
  REGION 1..447: note = ENSP00000335544
MELLKLNRSVQGTGPGPGASLCRPGAPLLNSSSVGNLSCEPPRIRGAGTRELELAIRITLYAVIFLMSVGGNMLIIVVLGLSRRLRTVTNAFLLSLAVSDLLLAVACMPFTLLPNLMGTFIFGTVICKAVSYLMGVSVSVSTLSLVAIALERYSAICRPLQARVWQTRSHAARVIVATWLLSGLLMVPYPVYTVVQPVGPRVLQCVHRWPSARVRQTWSVLLLLLLFFIPGVVMAVAYGLISRELYLGLRFDGDSDSDSQSRVRNQGGLPGAVHQNGRCRPETGAVGEDSDGCYVQLPRSRPALELTALTAPGPGSGSRPTQAKLLAKKRVVRMLLVIVVLFFLCWLPVYSANTWRAFDGPGAHRALSGAPISFIHLLSYASACVNPLVYCFMHRRFRQACLETCARCCPRPPRARPRALPDEDPPTPSIASLSRLSYTTISTLGPG

SEQ ID NO: 25957 - protein, 363 aa, Homo sapiens
  REGION 1..363: note = ENSP00000432079
MELLKLNRSVQGTGPGPGASLCRPGAPLLNSSSVGNLSCEPPRIRGAGTRGVSVSVSTLSLVAIALERYSAICRPLQARVWQTRSHAARVIVATWLLSGLLMVPYPVYTVVQPVGPRVLQCVHRWPSARVRQTWSVLLLLLLFFIPGVVMAVAYGLISRELYLGLRFDGDSDSDSQSRVRNQGGLPGAVHQNGRCRPETGAVGEDSDGCYVQLPRSRPALELTALTAPGPGSGSRPTQAKLLAKKRVVRMLLVIVVLFFLCWLPVYSANTWRAFDGPGAHRALSGAPISFIHLLSYASACVNPLVYCFMHRRFRQACLETCARCCPRPPRARPRALPDEDPPTPSIASLSRLSYTTISTLGPG

SEQ ID NO: 25958 - protein, 136 aa, Homo sapiens
  REGION 1..136: note = ENSP00000437001
MELLKLNRSVQGTGPGPGASLCRPGAPLLNSSSVGNLSCEPPRIRGAGTRELELAIRITLYAVIFLMSVGGNMLIIVVLGLSRRLRTVTNAFLLSLAVSDLLLAVACMPFTLLPNLMGTFIFGTVICKAVSYLMGG

SEQ ID NO: 25959 - protein, 87 aa, Homo sapiens
  REGION 1..87: note = ENSP00000435675
MELLKLNRSVQGTGPGPGASLCRPGAPLLNSSSVGNLSCEPPRIRGAGTRDRTNTDLLNTRRRTELSQSSESPGLMPVFLIPRKMMR

SEQ ID NO: 25960 - protein, 516 aa, Homo sapiens
  REGION 1..516: note = ENSP00000435534
MELLKLNRSVQGTGPGPGASLCRPGAPLLNSSSVGNLSCEPPRIRGAGTRELELAIRITLYAVIFLMSVGGNMLIIVVLGLSRRLRTVTNAFLLSLAVSDLLLAVACMPFTLLPNLMGTFIFGTVICKAVSYLMGVSVSVSTLSLVAIALERYSAICRPLQARVWQTRSHAARVIVATWLLSGLLMVPYPVYTVVQPVGPRVLQCVHRWPSARVRQTWSVLLLLLLFFIPGVVMAVAYGLISRELYLGLRFDGDSDSDSQSRVRNQGGLPGGAGPREQNLGEAELWRATGPAGVGGTEMKVRVRRKLEMELSWERRSGGDWAGDWGDSPFSLTAHPLCSGAVHQNGRCRPETGAVGEDSDGCYVQLPRSRPALELTALTAPGPGSGSRPTQAKLLAKKRVVRMLLVIVVLFFLCWLPVYSANTWRAFDGPGAHRALSGAPISFIHLLSYASACVNPLVYCFMHRRFRQACLETCARCCPRPPRARPRALPDEDPPTPSIASLSRLSYTTISTLGPG

SEQ ID NO: 25961 - protein, 433 aa, Homo sapiens
  REGION 1..433: note = ENSP00000262659
MEYEVKKGKKGFVSPIRRLVFPKAGRRAACRSSVSRRPLHSMPLYPPDYLIDPQILLCDYLEKEVKFLGHLTWVTSSLNPSSRDELLQLLDTARQLKELPLKTTAEQDSILSLSARCLLLTWRDNEELILRIPTHEIAAASYLQDDALHLLVLKTGLGVDPVPAGVDASPGGAGRDPGPPGGAPEKRRVGTAERRHTICSLDWRMGWGGGAAEARAGGGGGGSLERQRAGARASGSWERRQTFSGSWERRHGGGGGGGGAGKPGGSWERRQAGSGGGGSWERRHPGPNPLDPQDPSPDAYCNLVILAVANRDAAEESCALICQVFQIIYGDQSIECVDRAGYHYTSTPERPWLCSRIMAPRTPLKHVTAARPHLLSMAPTAAAATTAVWAWSSYRITWSRCGVSWGPSRSSSLRCCCGSTGWGCPSRTIAQAC

SEQ ID NO: 25962 - protein, 324 aa, Homo sapiens
  REGION 1..324: note = ENSP00000392448
ERRHGGGGGGGGAGKPGGSWERRQAGSGGGGSWERRHPGPNPLDPQDPSPDAYCNLVILAVANRDAAEESCALICQVFQIIYGDQSIECVDRAGYHYTSTPERPWLCSRSESCHTDGTYAYDADFSCCSSFNGSQDTFEACYSGTSTPSFHGSHCSGSDHSSLGLEQLQDYMVTLRSKLGPLEIQQFAMLLREYRLGLPIQDYCTGLLKLYGDRRKFLLLGMRPFIPDQDIGYFEGFLEGVGIREGGILTDSFGRIKRSMSSTSASAVRSYDGAAQRPEAQAFHRLLADITHDIEALAPDDDDDDEDEPRGSRGGSDAAEDNYL

SEQ ID NO: 25963 - protein, 295 aa, Homo sapiens
  REGION 1..295: note = ENSP00000227507
MEHQLLCCEVETIRRAYPDANLLNDRVLRAMLKAEETCAPSVSYFKCVQKEVLPSMRKIVATWMLEVCEEQKCEEEVFPLAMNYLDRFLSLEPVKKSRLQLLGATCMFVASKMKETIPLTAEKLCIYTDNSIRPEELLQMELLLVNKLKWNLAAMTPHDFIEHFLSKMPEAEENKQIIRKHAQTFVALCATDVKFISNPPSMVAAGSVVAAVQGLNLRSPNNFLSYYRLTRFLSRVIKCDPDCLRACQEQIEALLESSLRQAQQNMDPKAAEEEEEEEEEVDLACTPTDVRDVDI

SEQ ID NO: 25964 - protein, 67 aa, Homo sapiens
  REGION 1..67: note = ENSP00000438482
MEHQLLCCEVETIRRAYPDANLLNDRVLRAMLKAEETCAPSVSYFKCVQKEVLPSMRKIVATWMLEM

SEQ ID NO: 25965 - protein, 289 aa, Homo sapiens
  REGION 1..289: note = ENSP00000261254
MELLCHEVDPVRRAVRDRNLLRDDRVLQNLLTIEERYLPQCSYFKCVQKDIQPYMRRMVATWMLEVCEEQKCEEEVFPLAMNYLDRFLAGVPTPKSHLQLLGAVCMFLASKLKETSPLTAEKLCIYTDNSIKPQELLEWELVVLGKLKWNLAAVTPHDFIEHILRKLPQQREKLSLIRKHAQTFIALCATDFKFAMYPPSMIATGSVGAAICGLQQDEEVSSLTCDALTELLAKITNTDVDCLKACQEQIEAVLLNSLQQYRQDQRDGSKSEDELDQASTPTDVRDIDL

SEQ ID NO: 25966 - protein, 170 aa, Homo sapiens
  REGION 1..170: note = ENSP00000442807
  VARIANT 1: note = Any amino acid
XRFLAGVPTPKSHLQLLGAVCMFLASKLKETSPLTAEKLCIYTDNSIKPQELLEWELVVLGKLKWNLAAVTPHDFIEHILRKLPQQREKLSLIRKHAQTFIALCATAQQVGQGKGKGCNQEMPQERLRGVSKSQRPAPDSISASFRVARRLLLLRHVCHVQHSSQTHSLD

SEQ ID NO: 25967 - protein, 255 aa, Homo sapiens
  REGION 1..255: note = ENSP00000426454
MPRSVVGTACMYFKRFYLNNSVMEYHPRIIMLTCAFLACKVDEFNVSSPQFVGNLRESPLGQEKALEQILEYELLLIQQLNFHLIVHNPYRPFEGFLIDLKTRYPILENPEILRKTADDFLNRIALTDAYLLYTPSQIALTAILSSASRAGITMESYLSESLMLKENRTCLSQLLDIMKSMRNLVKKYEPPRSEEVAVLKQKLERCHSAELALNVITKKRKGYEDDDYVSKKSKHEEVCFTPKMNSKLFLLYILV

SEQ ID NO: 25968 - protein, 323 aa, Homo sapiens
  REGION 1..323: note = ENSP00000256897
MYHNSSQKRHWTFSSEEQLARLRADANRKFRCKAVANGKVLPNDPVFLEPHEEMTLCKYYEKRLLEFCSVFKPAMPRSVVGTACMYFKRFYLNNSVMEYHPRIIMLTCAFLACKVDEFNVSSPQFVGNLRESPLGQEKALEQILEYELLLIQQLNFHLIVHNPYRPFEGFLIDLKTRYPILENPEILRKTADDFLNRIALTDAYLLYTPSQIALTAILSSASRAGITMESYLSESLMLKENRTCLSQLLDIMKSMRNLVKKYEPPRSEEVAVLKQKLERCHSAELALNVITKKRKGYEDDDYVSKKSKHEEEEWTDDDLVESL

SEQ ID NO: 25969 - protein, 249 aa, Homo sapiens
  REGION 1..249: note = ENSP00000426075
MPRSVVGTACMYFKRFYLNNSVMEYHPRIIMLTCAFLACKVDEFNVSSPQFVGNLRESPLGQEKALEQILEYELLLIQQLNFHLIVHNPYRPFEGFLIDLKTRYPILENPEILRKTADDFLNRIALTDAYLLYTPSQIALTAILSSASRAGITMESYLSESLMLKENRTCLSQLLDIMKSMRNLVKKYEPPRSEEVAVLKQKLERCHSAELALNVITKKRKGYEDDDYVSKKSKHEEEEWTDDDLVESL

SEQ ID NO: 25970 - protein, 1021 aa, Homo sapiens
  REGION 1..1021: note = ENSP00000358482
MAGISYVASFFLLLTKLSIGQREVTVQKGPLFRAEGYPVSIGCNVTGHQGPSEQHFQWSVYLPTNPTQEVQIISTKDAAFSYAVYTQRVRSGDVYVERVQGNSVLLHISKLQMKDAGEYECHTPNTDEKYYGSYSAKTNLIVIPDTLSATMSSQTLGKEEGEPLALTCEASKATAQHTHLSVTWYLTQDGGGSQATEIISLSKDFILVPGPLYTERFAASDVQLNKLGPTTFRLSIERLQSSDQGQLFCEATEWIQDPDETWMFITKKQTDQTTLRIQPAVKDFQVNITADSLFAEGKPLELVCLVVSSGRDPQLQGIWFFNGTEIAHIDAGGVLGLKNDYKERASQGELQVSKLGPKAFSLKIFSLGPEDEGAYRCVVAEVMKTRTGSWQVLQRKQSPDSHVHLRKPAARSVVMSTKNKQQVVWEGETLAFLCKAGGAESPLSVSWWHIPRDQTQPEFVAGMGQDGIVQLGASYGVPSYHGNTRLEKMDWATFQLEITFTAITDSGTYECRVSEKSRNQARDLSWTQKISVTVKSLESSLQVSLMSRQPQVMLTNTFDLSCVVRAGYSDLKVPLTVTWQFQPASSHIFHQLIRITHNGTIEWGNFLSRFQKKTKVSQSLFRSQLLVHDATEEETGVYQCEVEVYDRNSLYNNRPPRASAISHPLRIAVTLPESKLKVNSRSQVQELSINSNTDIECSILSRSNGNLQLAIIWYFSPVSTNASWLKILEMDQTNVIKTGDEFHTPQRKQKFHTEKVSQDLFQLHILNVEDSDRGKYHCAVEEWLLSTNGTWHKLGEKKSGLTELKLKPTGSKVRVSKVYWTENVTEHREVAIRCSLESVGSSATLYSVMWYWNRENSGSKLLVHLQHDGLLEYGEEGLRRHLHCYRSSSTDFVLKLHQVEMEDAGMYWCRVAEWQLHGHPSKWINQASDESQRMVLTVLPSEPTLPSRICSSAPLLYFLFICPFVLLLLLLISLLCLYWKARKLSTLRSNTRKEKALWVDLKEAGGVTTNRREDEEEDEGN

SEQ ID NO: 25971 - protein, 1021 aa, Homo sapiens; identical to SEQ ID NO: 25970
  REGION 1..1021: note = ENSP00000256652

SEQ ID NO: 25972 - protein, 260 aa, Homo sapiens
  REGION 1..260: note = ENSP00000266557
MARPHPWWLCVLGTLVGLSATPAPKSCPERHYWAQGKLCCQMCEPGTFLVKDCDQHRKAAQCDPCIPGVSFSPDHHTRPHCESCRHCNSGLLVRNCTITANAECACRNGWQCRDKECTECDPLPNPSLTARSSQALSPHPQPTHLPYVSEMLEARTAGHMQTLADFRQLPARTLSTHWPPQRSLCSSDFIRILVIFSGMFLVFTLAGALFLHQRRKYRSNKGESPVEPAEPCHYSCPREEEGSTIPIQEDYRKPEPACSP

SEQ ID NO: 25973 - protein, 212 aa, Homo sapiens
  REGION 1..212: note = ENSP00000403331
MPLLLLLPLLWADLTHRPKILIPGTLEPGHSKNLTCSVSWACEQGTPPIFSWLSAAPTSLGPRTTHSSVLIITPRPQDHGTNLTCQVKFAGAGVTTERTIQLNVTYVPQNPTTGIFPGDGSGKQETRAGVVHGAIGGAGVTALLALCLCLIFFIVKTHRRKAARTAVGRNDTHPTTGSASPVSDGASWHPVCPADTSSQCGPPSCPIQHFQN

SEQ ID NO: 25974 - protein, 237 aa, Homo sapiens
  REGION 1..237: note = ENSP00000410126
MPLLLLLPLLWADLTHRPKILIPGTLEPGHSKNLTCSVSWACEQGTPPIFSWLSAAPTSLGPRTTHSSVLIITPRPQDHGTNLTCQVKFAGAGVTTERTIQLNVTYVPQNPTTGIFPGDGSGKQETRAGVVHGAIGGAGVTALLALCLCLIFFIVKTHRRKAARTAVGRNDTHPTTGSASPKHQKKSKLHGPTETSSCSGAAPTVEMDEELHYASLNFHGMNPSKDTSTEYSEVRTQ

SEQ ID NO: 25975 - protein, 310 aa, Homo sapiens
  REGION 1..310: note = ENSP00000375673
MPLLLLLPLLWAGALAMDPNFWLQVQESVTVQEGLCVLVPCTFFHPIPYYDKNSPVHGYWFREGAIISRDSPVATNKLDQEVQEETQGRFRLLGDPSRNNCSLSIVDARRRDNGSYFFRMERGSTKYSYKSPQLSVHVTDLTHRPKILIPGTLEPGHSKNLTCSVSWACEQGTPPIFSWLSAAPTSLGPRTTHSSVLIITPRPQDHGTNLTCQVKFAGAGVTTERTIQLNVTYVPQNPTTGIFPGDGSGKQETRAGVVHGAIGGAGVTALLALCLCLIFFIVKTHRRKAARTAVGRNDTHPTTGSASPVR

SEQ ID NO: 25976 - protein, 364 aa, Homo sapiens
  REGION 1..364: note = ENSP00000262262
MPLLLLLPLLWAGALAMDPNFWLQVQESVTVQEGLCVLVPCTFFHPIPYYDKNSPVHGYWFREGAIISRDSPVATNKLDQEVQEETQGRFRLLGDPSRNNCSLSIVDARRRDNGSYFFRMERGSTKYSYKSPQLSVHVTDLTHRPKILIPGTLEPGHSKNLTCSVSWACEQGTPPIFSWLSAAPTSLGPRTTHSSVLIITPRPQDHGTNLTCQVKFAGAGVTTERTIQLNVTYVPQNPTTGIFPGDGSGKQETRAGVVHGAIGGAGVTALLALCLCLIFFIVKTHRRKAARTAVGRNDTHPTTGSASPKHQKKSKLHGPTETSSCSGAAPTVEMDEELHYASLNFHGMNPSKDTSTEYSEVRTQ

SEQ ID NO: 25977 - protein, 208 aa, Homo sapiens
  REGION 1..208: note = ENSP00000395294
MPEEGSGCSVRRRPYGCVLRAALVPLVAGLVICLVVCIQRFAQAQQQLPLESLGWDVAELQLNHTGPQQDPRLYWQGGPALGRSFLHGPELDKGQLRIHRDGIYMVHIQVTLAICSSTTASRHHPTTLAVGICSPASRSISLLRLSFHQGLFGFWNWGLKVKCFLRHLIWTAHCFIPLTQLVFMQALQSWRNHHCSHFTDEENRGVNR

SEQ ID NO: 25978 - protein, 193 aa, Homo sapiens
  REGION 1..193: note = ENSP00000245903
MPEEGSGCSVRRRPYGCVLRAALVPLVAGLVICLVVCIQRFAQAQQQLPLESLGWDVAELQLNHTGPQQDPRLYWQGGPALGRSFLHGPELDKGQLRIHRDGIYMVHIQVTLAICSSTTASRHHPTTLAVGICSPASRSISLLRLSFHQGCTIASQRLTPLARGDTLCTNLTGTLLPSRNTDETFFGVQWVRP

SEQ ID NO: 25979 - protein, 65 aa, Homo sapiens
  REGION 1..65: note = ENSP00000470805
MPEEGSGCSVRRRPYGCVLRAALVPLVAGLVICLVVCIQRFAQAQQQLPLESLGWDVAELQLNHT

SEQ ID NO: 25980 - protein, 160 aa, Homo sapiens
  REGION 1..160: note = ENSP00000367026
MHRRRSRSCREDQKPVMDDQRDLISNNEQLPMLGRRPGAPESKCSRGALYTGFSILVTLLLAGQATTAYFLYQQQGRLDKLTVTSQNLQLENLRMKLPKPPKPVSKMRMATPLLMQALPMGALPQGPMQNATKYGNMTEDHVMHLLQSHWNWRTRLLGWV

SEQ ID NO: 25981 - protein, 232 aa, Homo sapiens
  REGION 1..232: note = ENSP00000230685
MHRRRSRSCREDQKPVMDDQRDLISNNEQLPMLGRRPGAPESKCSRGALYTGFSILVTLLLAGQATTAYFLYQQQGRLDKLTVTSQNLQLENLRMKLPKPPKPVSKMRMATPLLMQALPMGALPQGPMQNATKYGNMTEDHVMHLLQNADPLKVYPPLKGSFPENLRHLKNTMETIDWKVFESWMHHWLLFEMSRHSLEQKPTDAPPKESLELEDPSSGLGVTKQDLGPVPM

SEQ ID NO: 25982 - protein, 316 aa, Homo sapiens
  REGION 1..316: note = ENSP00000430614
  VARIANT 1: note = Any amino acid
XRSCREDQKPVMDDQRDLISNNEQLPMLGRRPGAPESKCSRGALYTGFSILVTLLLAGQATTAYFLYQQQGRLDKLTVTSQNLQLENLRMKLPKPPKPVSKMRMATPLLMQALPMGALPQGPMQNATKYGNMTEDHVMHLLQNADPLKVYPPLKGSFPENLRHLKNTMETIDWKVFESWMHHWLLFEMSRHSLEQKPTDAPPKVLTKCQEEVSHIPAVHPGSFRPKCDENGNYLPLQCYGSIGYCWCVFPNGTEVPNTRSRGHHNCSESLELEDPSSGLGVTKQDLGPGKGLAEGHLVTSSSSPAGPAPLWAGEGV

SEQ ID NO: 25983 - protein, 152 aa, Homo sapiens [sequence omitted]

SEQ ID NO: 25984 - protein, 296 aa, Homo sapiens
  REGION 1..296: note = ENSP00000009530
MHRRRSRSCREDQKPVMDDQRDLISNNEQLPMLGRRPGAPESKCSRGALYTGFSILVTLLLAGQATTAYFLYQQQGRLDKLTVTSQNLQLENLRMKLPKPPKPVSKMRMATPLLMQALPMGALPQGPMQNATKYGNMTEDHVMHLLQNADPLKVYPPLKGSFPENLRHLKNTMETIDWKVFESWMHHWLLFEMSRHSLEQKPTDAPPKVLTKCQEEVSHIPAVHPGSFRPKCDENGNYLPLQCYGSIGYCWCVFPNGTEVPNTRSRGHHNCSESLELEDPSSGLGVTKQDLGPVPM

SEQ ID NO: 25985 - protein, 145 aa, Homo sapiens
  REGION 1..145: note = ENSP00000430654
  VARIANT 1: note = Any amino acid
XRSRSCREDQKPVMDDQRDLISNNEQLPMLGRRPGAPESKCSRGALYTGFSILVTLLLAGQATTAYFLYQQQGRLDKLTVTSQNLQLENLRMKLPKPPKPVSKMRMATPLLMQALPMGALPQGPMQNATKYGNMTEDHVMHLLQY

SEQ ID NO: 25986 - protein, 122 aa, Homo sapiens
  REGION 1..122: note = ENSP00000429641
MHRRRSRSCREDQKPVMDDQRDLISNNEQLPMLGRRPGAPESKCSRGALYTGFSILVTLLLAGQATTAYFLYQQQGRLDKLTVTSQNLQLENLRMKLPKPHAECHQVWQHDRGPCDAPAPEC

SEQ ID NO: 25987 - protein, 52 aa, Homo sapiens
  REGION 1..52: note = ENSP00000429478
MHRRRSRSCREDQKPVMDDQRDLISNNEQLPMLGRRPGAPESPCRMPPSMAT

SEQ ID NO: 25988 - protein, 161 aa, Homo sapiens
  REGION 1..161: note = ENSP00000435682
MPLVINQSPPCCCVDDTWAQAEVGPVTSCTGFVEGSSRTGGMGSACIKVTKYFLFLFNLIFFILGAVILGFGVWILADKSSFISVLQTSSSSLRMGAYVFIGVGAVTMLMGFLGCIGAVNEVRCLLGLYFAFLLLILIAQVTAGALFYFNMGKLKQEMGGI

SEQ ID NO: 25989 - protein, 267 aa, Homo sapiens
  REGION 1..267: note = ENSP00000227155
MGSACIKVTKYFLFLFNLIFFILGAVILGFGVWILADKSSFISVLQTSSSSLRMGAYVFIGVGAVTMLMGFLGCIGAVNEVRCLLGLYFAFLLLILIAQVTAGALFYFNMGKLKQEMGGIVTELIRDYNSSREDSLQDAWDYVQAQVKCCGWVSFYNWTDNAELMNRPEVTYPCSCEVKGEEDNSLSVRKGFCEAPGNRTQSGNHPEDWPVYQEGCMEKVQAWLQENLGIILGVGVGVAIIELLGMVLSICLCRHVHSEDYSKVPKY

SEQ ID NO: 25990 - protein, 242 aa, Homo sapiens
  REGION 1..242: note = ENSP00000339686
MGSACIKVTKYFLFLFNLIFFILGAVILGFGVWILADKSSFISVLQTSSSSLRMGAYVFIGVGAVTMLMGFLGCIGAVNEVRCLLGLLKQEMGGIVTELIRDYNSSREDSLQDAWDYVQAQVKCCGWVSFYNWTDNAELMNRPEVTYPCSCEVKGEEDNSLSVRKGFCEAPGNRTQSGNHPEDWPVYQEGCMEKVQAWLQENLGIILGVGVGVAIIELLGMVLSICLCRHVHSEDYSKVPKY

SEQ ID NO: 25991 - protein, 108 aa, Homo sapiens
  REGION 1..108: note = ENSP00000431767
MGSACIKVTKYFLFLFNLIFFILGAVILGFGVWILADKSSFISVLQTSSSSLRMGAYVFIGVGAVTMLMGFLGCIGAVNEVRCLLGLYFAFLLLILIAQVTAGALFYF

SEQ ID NO: 25992 - protein, 38 aa, Homo sapiens
  REGION 1..38: note = ENSP00000435661
MGSACIKVTKYFLFLFNLIFFILGAVILGFGVWILADK

SEQ ID NO: 25993 - protein, 179 aa, Homo sapiens
  REGION 1..179: note = ENSP00000433151
MARDWIRPQRASDCWSGKQQLFQIIIIIIISPPCCCVDDTWAQAEVGPVTSCTGFVEGSSRTGGMGSACIKVTKYFLFLFNLIFFILGAVILGFGVWILADKSSFISVLQTSSSSLRMGAYVFIGVGAVTMLMGFLGCIGAVNEVRCLLGLYFAFLLLILIAQVTAGALFYFNMGKVSP

SEQ ID NO: 25994 - protein, 68 aa, Homo sapiens
  REGION 1..68: note = ENSP00000436403
MGSACIKVTKYFLFLFNLIFFILGAVILGFGVWILADKSSFISVLQTSSSSLRMGAYVFIGVGAVTML

SEQ ID NO: 25995 - protein, 104 aa, Homo sapiens
  REGION 1..104: note = ENSP00000433804
MGSACIKVTKYFLFLFNLIFFILGAVILGFGVWILADKSSFISVLQTSSSSLRMGAYVFIGVGAVTMLMGFLGCIGAVNEVRCLLGLYFAFLLLILIAQVTAGA

SEQ ID NO: 25996 - protein, 157 aa, Homo sapiens
  REGION 1..157: note = ENSP00000433788
MEILGAVILGFGVWILADKSSFISVLQTSSSSLRMGAYVFIGVGAVTMLMGFLGCIGAVNEVRCLLGLYFAFLLLILIAQVTAGALFYFNMGKLKQEMGGIVTELIRDYNSSREDSLQDAWDYVQAQVKCCGWVSFYNWTDNAELMNRPEVTYPCSC

SEQ ID NO: 25997 - protein, 57 aa, Homo sapiens
  REGION 1..57: note = ENSP00000433036
DNSLSVRKGFCEAPGNRTQSGNHPEDWPVYQELLGMVLSICLCRHVHSEDYSKVPKY

SEQ ID NO: 25998 - protein, 205 aa, Homo sapiens
  REGION 1..205: note = ENSP00000368450
MSRGLQLLLLSCAYSLAPATPEVKVACSEDVDLPCTAPWDPQVPYTVSWVKLLEGGEERMETPQEDHLRGQHYHQKGQNGSFDAPNERPYSLKIRNTTSCNSGTYRCTLQDPDGQRNLSGKVILRVTGCPAQRKEETFKKYRAEIVLLLALVIFYLTLIIFTCKFARLQSIFPDFSKAGMERAFLPVTSPNKHLGLVTPHKTELV

SEQ ID NO: 25999 - protein, 146 aa, Homo sapiens
  REGION 1..146: note = ENSP00000480760
METPQEDHLRGQHYHQKGQNGSFDAPNERPYSLKIRNTTSCNSGTYRCTLQDPDGQRNLSGKVILRVTGCPAQRKEETFKKYRAEIVLLLALVIFYLTLIIFTCKFARLQSIFPDFSKAGMERAFLPVTSPNKHLGLVTPHKTELV

SEQ ID NO: 26000 - protein, 228 aa, Homo sapiens
  REGION 1..228: note = ENSP00000371958
MPVKGGTKCIKYLLFGFNFIFWLAGIAVLAIGLWLRFDSQTKSIFEQETNNNNSSFYTGVYILIGAGALMMLVGFLGCCGAVQESQCMLGLFFGFLLVIFAIEIAAAIWGYSHKDEVIKEVQEFYKDTYNKLKTKDEPQRETLKAIHYALNCCGLAGGVEQFISDICPKKDVLETFTVKSCPDAIKEVFDNKFHIIGAVGIGIAVVMIFGMIFSMILCCAIRRNREMV

SEQ ID NO: 26001 - protein, 141 aa, Homo sapiens
  REGION 1..141: note = ENSP00000440985
MPVKGGTKCIKYLLFGFNFIFWLAGIAVLAIGLWLRFDSQTKSIFEQETNNNNSSFYTGVYILIGAGALMMLVGFLGCCGAVQESQCMLGLFFGFLLVIFAIEIAAAIWGYSHKDEVIKEVQEFYKDTYNKLKTKDEPQRE

SEQ ID NO: 26002 - protein, 228 aa, Homo sapiens
  REGION 1..228: note = ENSP00000371959
MPVKGGTKCIKYLLFGFNFIFWLAGIAVLAIGLWLRFDSQTKSIFEQETNNNNSSFYTGVYILIGAGALMMLVGFLGCCGAVQESQCMLGLATKRTMFPPFLEDHVCFFSLNPQFFGFLLVIFAIEIAAAIWGYSHKDEVIKEVQEFYKDTYNKLKTKDEPQRETLKAIHYALNCCGLAGGVEQFISDICPKKDVLETFTVKSCPDAIKEVFDNKFHIIGAVGIGIAV

SEQ ID NO: 26003 - protein, 228 aa, Homo sapiens; identical to SEQ ID NO: 26000
  REGION 1..228: note = ENSP00000009180

SEQ ID NO: 26004 - protein, 159 aa, Homo sapiens
  REGION 1..159: note = ENSP00000371955
MMLVGFLGCCGAVQESQCMLGLFFGFLLVIFAIEIAAAIWGYSHKDEVIKEVQEFYKDTYNKLKTKDEPQRETLKAIHYALNCCGLAGGVEQFISDICPKKDVLETFTVKSCPDAIKEVFDNKFHIIGAVGIGIAVVMIFGMIFSMILCCAIRRNREMV

SEQ ID NO: 26005 - protein, 182 aa, Homo sapiens
  REGION 1..182: note = ENSP00000478288
MPVKGGTKCIKYLLFGFNFIFWLAGIAVLAIGLWLRFDSQTKSIFEQETNNNNSSFYTGVYILIGAGALMMLVGFLGCCGAVQESQCMLGLFFGFLLVIFAIEIAAAIWGYSHKDEVIKEVQEFYKDTYNKLKTKDEPQRETLKAIHYAVELLWFGWGRGTVYLRHLPQEGRTRNLHREVLS

SEQ ID NO: 26006 - protein, 514 aa, Homo sapiens
  REGION 1..514: note = ENSP00000251108
MKEAGQMQNLESARAGRSVSTQTGSMTGQIPRLSKVNLFTLLSLWMELFPAEAQRQKSQKNEEGKHGPLGDNEERTRVSTDKRQVKRTGLVVVKNMKIVGLHCSSEDLHAGQIALIKHGSRLKNCDLYFSRKPCSACLKMIVNAGVNRISYWPADPEISLLTEASSSEDAKLDAKAVERLKSNSRAHVCVLLQPLVCYMVQFVEETSYKCDFIQKITKTLPDANTDFYYECKQERIKEYEMLFLVSNEEMHKQILMTIGLENLCENPYFSNLRQNMKDLILLLATVASSVPNFKHFGFYRSNPEQINEIHNQSLPQEIARHCMVQARLLAYRTEDHKTGVGAVIWAEGKSRSCDGTGAMYFVGCGYNAFPVGSEYADFPHMDDKQKDREIRKFRYIIHAEQNALTFRCQEIKPEERSMIFVTKCPCDECVPLIKGAGIKQIYAGDVDVGKKKADISYMRFGELEGVSKFTWQLNPSGAYGLEQNEPERRENGVLRPVPQKEEQHQDKKLRLGIH

SEQ ID NO: 26007 - protein, 153 aa, Homo sapiens
  REGION 1..153: note = ENSP00000434135
MKEAGQMQNLESARAGRSVSTQTGSMTGQIPRLSKVNLFTLLSLWMELFPAEAQRQKSQKNEEGKHGPLGDNEERTRVSTDKRQVKRTGLVVVKNMKIVGLHCSSEDLHAGQIALIKHGSRLKNCDLYFSRKPCSACLKMIVNGLLEAAKMPR

SEQ ID NO: 26008 - protein, 102 aa, Homo sapiens
  REGION 1..102: note = ENSP00000434986
MKEAGQMQNLESARAGRSVSTQTGSMTGQIPRLSKVNLFTLLSLWMELFPAEAQRQKSQKNEEGKHGPLGDNEERTRVSTDKRQKTMFCLFENDCKWITGSS

SEQ ID NO: 26009 - protein, 97 aa, Homo sapiens
  REGION 1..97: note = ENSP00000389571
  VARIANT 1: note = Any amino acid
XGQMQNLESARAGRSVSTQTGSMTGQIPRLSKVNLFTLLSLWMELFPAEAQRQKSQKNEEGKHGPLGDNEERTRVSTDKRQDYWKQLRCLDERFTIT

SEQ ID NO: 26010 - protein, 471 aa, Homo sapiens
  REGION 1..471: note = ENSP00000417897
MKRKSERRSSWAAAPPCSRRCSSTSPGVKKIRSSTQQDPRRRDPQDDVYLDITDRLCFAILYSRPKSASNVHYFSIDNELEYENFYADFGPLNLAMVYRYCCKINKKLKSITMLRKKIVHFTGSDQRKQANAAFLVGCYMVIYLGRTPEEAYRILIFGETSYIPFRDAAYGSCNFYITLLDCFHAVKKAMQYGFLNFNSFNLDEYEHYEKAENGDLNWIIPDRFIAFCGPHSRARLESGYHQHSPETYIQYFKNHNVTTIIRLNKRMYDAKRFTDAGFDHHDLFFADGSTPTDAIVKEFLDICENAEGAIAVHCKAGLGRTGTLIACYIMKHYRMTAAETIAWVRICRPGSVIGPQQQFLVMKQTNLWLEGDYFRQKLKGQENGQHRAAFSKLLSGVDDISINGVENQDQQEPEPYSDDDEINGVTQGDRLRALKSRRQSKTNAIPLTDGWLSQAVTFLDRLLIWLGIHKD

SEQ ID NO: 26011 - protein, 480 aa, Homo sapiens
  REGION 1..480: note = ENSP00000413940
ERRSSWAAAPPCSRRCSSTSPGVKKIRSSTQQDPRRRDPQDDVYLDITDRLCFAILYSRPKSASNVHYFSIDNELEYENFYADFGPLNLAMVYRYCCKINKKLKSITMLRKKIVHFTGSDQRKQANAAFLVGCYMVIYLGRTPEEAYRILIFGETSYIPFRDAAYGSCNFYITLLDCFHAVKKAMQYGFLNFNSFNLDEYEHYEKAENGDLNWIIPDRFIAFCGPHSRARLESGYHQHSPETYIQYFKNHNVTTIIRLNKRMYDAKRFTDAGFDHHDLFFADGSTPTDAIVKEFLDICENAEGAIAVHCKAGLGRTGTLIACYIMKHYRMTAAETIAWVRICRPGSVIGPQQQFLVMKQTNLWLEGDYFRQKLKGQENGQHRAAFSKLLSGVDDISINGVENQDQQEPEPYSDDDEINGVTQGDRLRALKSRRQSKTNAIPLTCPLAVLTSALCSVVIWWIVCDYILPILLFCLDGFRTQ

SEQ ID NO: 26012 - protein, 498 aa, Homo sapiens
  REGION 1..498: note = ENSP00000364389
MKRKSERRSSWAAAPPCSRRCSSTSPGVKKIRSSTQQDPRRRDPQDDVYLDITDRLCFAILYSRPKSASNVHYFSIDNELEYENFYADFGPLNLAMVYRYCCKINKKLKSITMLRKKIVHFTGSDQRKQANAAFLVGCYMVIYLGRTPEEAYRILIFGETSYIPFRDAAYGSCNFYITLLDCFHAVKKAMQYGFLNFNSFNLDEYEHYEKAENGDLNWIIPDRFIAFCGPHSRARLESGYHQHSPETYIQYFKNHNVTTIIRLNKRMYDAKRFTDAGFDHHDLFFADGSTPTDAIVKEFLDICENAEGAIAVHCKAGLGRTGTLIACYIMKHYRMTAAETIAWVRICRPGSVIGPQQQFLVMKQTNLWLEGDYFRQKLKGQENGQHRAAFSKLLSGVDDISINGVENQDQQEPEPYSDDDEINGVTQGDRLRALKSRRQSKTNAIPLTVILQSSVQSCKTSEPNISGSAGITKRTTRSASRKSSVKSLSISRTKTVLR

SEQ ID NO: 26013 - protein, 459 aa, Homo sapiens
  REGION 1..459: note = ENSP00000364388
MKRKSERRSSWAAAPPCSRRCSSTSPGVKKIRSSTQQDPRRRDPQDDVYLDITDRLCFAILYSRPKSASNVHYFSIDNELEYENFYADFGPLNLAMVYRYCCKINKKLKSITMLRKKIVHFTGSDQRKQANAAFLVGCYMVIYLGRTPEEAYRILIFGETSYIPFRDAAYGSCNFYITLLDCFHAVKKAMQYGFLNFNSFNLDEYEHYEKAENGDLNWIIPDRFIAFCGPHSRARLESGYHQHSPETYIQYFKNHNVTTIIRLNKRMYDAKRFTDAGFDHHDLFFADGSTPTDAIVKEFLDICENAEGAIAVHCKAGLGRTGTLIACYIMKHYRMTAAETIAWVRICRPGSVIGPQQQFLVMKQTNLWLEGDYFRQKLKGQENGQHRAAFSKLLSGVDDISINGVENQDQQEPEPYSDDDEINGVTQGDRLRALKSRRQSKTNAIPLTLSISRTKTVLR

SEQ ID NO: 26014 - protein, 461 aa, Homo sapiens
  REGION 1..461: note = ENSP00000364390
MSREGAGAALVAEVIKDRLCFAILYSRPKSASNVHYFSIDNELEYENFYADFGPLNLAMVYRYCCKINKKLKSITMLRKKIVHFTGSDQRKQANAAFLVGCYMVIYLGRTPEEAYRILIFGETSYIPFRDAAYGSCNFYITLLDCFHAVKKAMQYGFLNFNSFNLDEYEHYEKAENGDLNWIIPDRFIAFCGPHSRARLESGYHQHSPETYIQYFKNHNVTTIIRLNKRMYDAKRFTDAGFDHHDLFFADGSTPTDAIVKEFLDICENAEGAIAVHCKAGLGRTGTLIACYIMKHYRMTAAETIAWVRICRPGSVIGPQQQFLVMKQTNLWLEGDYFRQKLKGQENGQHRAAFSKLLSGVDDISINGVENQDQQEPEPYSDDDEINGVTQGDRLRALKSRRQSKTNAIPLTVILQSSVQSCKTSEPNISGSAGITKRTTRSASRKSSVKSLSISRTKTVLR

SEQ ID NO: 26015 - protein, 485 aa, Homo sapiens
  REGION 1..485: note = ENSP00000420572
MKRKSERRSSWAAAPPCSRRCSSTSPGVKKIRSSTQQDPRRRDPQDDVYLDITDRLCFAILYSRPKSASNVHYFSIDNELEYENFYADFGPLNLAMVYRYCCKINKKLKSITMLRKKIVHFTGSDQRKQANAAFLVGCYMVIYLGRTPEEAYRILIFGETSYIPFRDAAYGSCNFYITLLDCFHAVKKAMQYGFLNFNSFNLDEYEHYEKAENGDLNWIIPDRFIAFCGPHSRARLESGYHQHSPETYIQYFKNHNVTTIIRLNKRMYDAKRFTDAGFDHHDLFFADGSTPTDAIVKEFLDICENAEGAIAVHCKAGLGRTGTLIACYIMKHYRMTAAETIAWVRICRPGSVIGPQQQFLVMKQTNLWLEGDYFRQKLKGQENGQHRAAFSKLLSGVDDISINGVENQDQQEPEPYSDDDEINGVTQGDRLRALKSRRQSKTNAIPLTCPLAVLTSALCSVVIWWIVCDYILPILLFCLDGFRTQ

SEQ ID NO: 26016 - protein, 268 aa, Homo sapiens
  REGION 1..268: note = ENSP00000396951
  VARIANT 1: note = Any amino acid
XMLWSHEPGGRGGSFGSRGDQRKEHCNFSISDRLCFAILYSRPKSASNVHYFSIDNELEYENFYADFGPLNLAMVYRYCCKINKKLKSITMLRKKIVHFTGSDQRKQANAAFLVGCYMVIYLGRTPEEAYRILIFGETSYIPFRDAAYGSCNFYITLLDCFHAVKKAMQYGFLNFNSFNLDEYEHYEKAENGDLNWIIPDRFIAFCGPHSRARLESGYHQHSPETYIQYFKNHNVTTIIRLNKRMYDAKRFTDAGFDHHDLFFADGST

SEQ ID NO: 26017 - protein, 228 aa, Homo sapiens
  REGION 1..228: note = ENSP00000400480
APRRGLEKEGVTLVAFEPAGKTNVRVVTFEKSQPARADRLCFAILYSRPKSASNVHYFSIDNELEYENFYADFGPLNLAMVYRYCCKINKKLKSITMLRKKIVHFTGSDQRKQANAAFLVGCYMVIYLGRTPEEAYRILIFGETSYIPFRDAAYGSCNFYITLLDCFHAVKKAMQYGFLNFNSFNLDEYEHYEKAENGDLNWIIPDRFIAFCGPHSRARLESGYHQHS

SEQ ID NO: 26018 - protein, 391 aa, Homo sapiens
  REGION 1..391: note = ENSP00000249014
MPGPQGGRGAATMSLGKLSPVGWVSSSQGKRRLTADMISHPLGDFRHTMHVGRGGDVFGDTSFLSNHGGSSGSTHRSPRSFLAKKLQLVRRVGAPPRRMASPPAPSPAPPAISPIIKNAISLPQLNQAAYDSLVVGKLSFDSSPTSSTDGHSSYGLDSGFCTISRLPRSEKPHDRDRDGSFPSEPGLRRSDSLLSFRLDLDLGPSLLSELLGVMSLPEAPAAETPAPAANPPAPTANPTGPAANPPATTANPPAPAANPSAPAATPTGPAANPPAPAASSTPHGHCPNGVTAGLGPVAEVKSSPVGGGPRGPAGPALGRHWGAGWDGGHHYPEMDARQERVEVLPQARASWESLDEEWRAPQAGSRTPVPSTVQANTFEFADAEEDDEVKV

SEQ ID NO: 26019 - protein, 70 aa, Homo sapiens
  REGION 1..70: note = ENSP00000411682
MPGPQGGRGAATMSLGKLSPVGWVSSSQGKRRLTADMISHPLGDFRHTMHVGRGGDVFGDTSFLSNHGGS

SEQ ID NO: 26020 - protein, 60 aa, Homo sapiens
  REGION 1..60: note = ENSP00000405006
MPGPQGGRGAATMSLGKLSPVGWVSSSQGKRRLTADMISHPLGDFRHTMHVGRGGDVFGD

SEQ ID NO: 26021 - protein, 48 aa, Homo sapiens
  REGION 1..48: note = ENSP00000403710
MPGPQGGRGAATMSLGKLSPVGWVSSSQGKRRLTADMISHPLGDFRHT

SEQ ID NO: 26022 - protein, 254 aa, Homo sapiens
  REGION 1..254: note = ENSP00000295324
MPAKTPIYLKAANNKKGKKFKLRDILSPDMISPPLGDFRHTIHIGKEGQHDVFGDISFLQGNYELLPGNQEKAHLGQFPGHNEFFRANSTSDSVFTETPSPVLKNAISLPTIGGSQALMLPLLSPVTFNSKQESFGPAKLPRLSCEPVMEEKAQEKSSLLENGTVHQGDTSWGSSGSASQSSQGRDSHSSSLSEQYPDWPAEDMFDHPTPCELIKGKTKSEESLSDLTGSLLSLQLDLGPSLLDEVLNVMDKNK

SEQ ID NO: 26023 - protein, 215 aa, Homo sapiens
  REGION 1..215: note = ENSP00000403298
MPAKTPIYLKAANNKKGKKFKLRDILSPDMISPPLGDFRHTIHIGKEGQHDVFGDISFLQGNYELLPGNQEKAHLGQFPGHNEFFRANSTSDSVFTETPSPVLKNAISLPTIGGSQALMLPLLSPVTFNSKQESFGPAKLPRLSCEPVMEEKAQEKSSLLENGTVHQGDTSWGSSGSASQSSQGRDSHSSSLSEQYPDWPAEDMFDHPTPCELIK

SEQ ID NO: 26024 - protein, 34 aa, Homo sapiens
  REGION 1..34: note = ENSP00000398062
MPAKTPIYLKAANNKKGKKFKLRDILSPDMISPP

SEQ ID NO: 26025 - protein, 14 aa, Homo sapiens
  REGION 1..14: note = ENSP00000409147
MPAKTPIYLKAANN

SEQ ID NO: 26026 - protein, 254 aa, Homo sapiens; identical to SEQ ID NO: 26022
  REGION 1..254: note = ENSP00000480549

SEQ ID NO: 26027 - protein, 356 aa, Homo sapiens
  REGION 1..356: note = ENSP00000338258
MPILKQLVSSSVHSKRRSRADLTAEMISAPLGDFRHTMHVGRAGDAFGDTSFLNSKAGEPDGESLDEQPSSSSSKRSLLSRKFRGSKRSQSVTRGEREQRDMLGSLRDSALFVKNAMSLPQLNEKEAAEKGTSKLPKSLSSSPVKKANDGEGGDEEAGTEEAVPRRNGAAGPHSPDPLLDEQAFGDLTDLPVVPKATYGLKHAESIMSFHIDLGPSMLGDVLSIMDKEEWDPEEGEGGYHGDEGAAGTITQAPPYAVAAPPLARQEGKAGPDLPSLPSHALEDEGWAAAAPSPGSARSMGSHTTRDSSSLSSCTSGILEERSPAFRGPDRARAAVSRQPDKEFSFMDEEEEDEIRV

SEQ ID NO: 26028 - protein, 286 aa, Homo sapiens
  REGION 1..286: note = ENSP00000404270
MPILKQLVSSSVHSKRRSRADLTAEMISAPLGDFRHTMHVGRAGDAFGDTSFLNSKAAEKGTSKLPKSLSSSPVKKANDGEGGDEEAGTEEAVPRRNGAAGPHSPDPLLDEQAFGDLTDLPVVPKATYGLKHAESIMSFHIDLGPSMLGDVLSIMDKEEWDPEEGEGGYHGDEGAAGTITQAPPYAVAAPPLARQEGKAGPDLPSLPSHALEDEGWAAAAPSPGSARSMGSHTTRDSSSLSSCTSGILEERSPAFRGPDRARAAVSRQPDKEFSFMDEEEEDEIRV

SEQ ID NO: 26029 - protein, 79 aa, Homo sapiens
  REGION 1..79: note = ENSP00000464104
MPILKQLVSSSVHSKRRSRADLTAEMISAPLGDFRHTMHQLPLQLHLRHPGGAQPCLPGAGQGPGCCLKTARQGVLLHG

SEQ ID NO: 26030 - protein, 127 aa, Homo sapiens
  REGION 1..127: note = ENSP00000462231
MPILKQLVSSSVHSKRRSRADLTAEMISAPLGDFRHTMHVGRAGDAFGDTSFLNSKAGEPDGESLDEQPSSSSSKRSLLSRKFRGSKRSQSVTRGEREQRDMLGSLRDSALFVKNAMSLPQLNEKEA

SEQ ID NO: 26031 - protein, 73 aa, Homo sapiens
  REGION 1..73: note = ENSP00000463877
MPILKQLVSSSVHSKRRSRADLTAEMISAPLGDFRHTMHVGRAGDAFGDTSFLNSKAGEPDGESLDEQPSSSS

SEQ ID NO: 26032 - protein, 79 aa, Homo sapiens; identical to SEQ ID NO: 26029
  REGION 1..79: note = ENSP00000485861

SEQ ID NO: 26033 - protein, 882 aa, Homo sapiens
  REGION 1..882: note = ENSP00000261769
MGPWSRSLSALLLLLQVSSWLCQEPEPCHPGFDAESYTFTVPRRHLERGRVLGRVNFEDCTGRQRTAYFSLDTRFKVGTDGVITVKRPLRFHNPQIHFLVYAWDSTYRKFSTKVTLNTVGHHHRPPPHQASVSGIQAELLTFPNSSPGLRRQKRDWVIPPISCPENEKGPFPKNLVQIKSNKDKEGKVFYSITGQGADTPPVGVFIIERETGWLKVTEPLDRERIATYTLFSHAVSSNGNAVEDPMEILITVTDQNDNKPEFTQEVFKGSVMEGALPGTSVMEVTATDADDDVNTYNAAIAYTILSQDPELPDKNMFTINRNTGVISVVTTGLDRESFPTYTLVVQAADLQGEGLSTTATAVITVTDTNDNPPIFNPTTYKGQVPENEANVVITTLKVTDADAPNTPAWEAVYTILNDDGGQFVVTTNPVNNDGILKTAKGLDFEAKQQYILHVAVTNVVPFEVSLTTSTATVTVDVLDVNEAPIFVPPEKRVEVSEDFGVGQEITSYTAQEPDTFMEQKITYRIWRDTANWLEINPDTGAISTRAELDREDFEHVKNSTYTALIIATDNGSPVATGTGTLLLILSDVNDNAPIPEPRTIFFCERNPKPQVINIIDADLPPNTSPFTAELTHGASANWTIQYNDPTQESIILKPKMALEVGDYKINLKLMDNQNKDQVTTLEVSVCDCEGAAGVCRKAQPVEAGLQIPAILGILGGILALLILILLLLLFLRRRAVVKEPLLPPEDDTRDNVYYYDEEGGGEEDQDFDLSQLHRGLDARPEVTRNDVAPTLMSVPRYLPRPANPDEIGNFIDENLKAADTDPTAPPYDSLLVFDYEGSGSEAASLSSLNSSESDKDQDYDYLNEWGNRFKKLADMYGGGEDD

SEQ ID NO: 26034 - protein, 537 aa, Homo sapiens
  REGION 1..537: note = ENSP00000454782
MGPWSRSLSALLLLLQVSSWLCQEPEPCHPGFDAESYTFTVPRRHLERGRVLGRVNFEDCTGRQRTAYFSLDTRFKVGTDGVITVKRPLRFHNPQIHFLVYAWDSTYRKFSTKVTLNTVGHHHRPPPHQASVSGIQAELLTFPNSSPGLRRQKRDWVIPPISCPENEKGPFPKNLVQIKSNKDKEGKVFYSITGQGADTPPVGVFIIERETGWLKVTEPLDRERIATYTLFSHAVSSNGNAVEDPMEILITVTDQNDNKPEFTQEVFKGSVMEGALPGTSVMEVTATDADDDVNTYNAAIAYTILSQDPELPDKNMFTINRNTGVISVVTTGLDRESFPTYTLVVQAADLQGEGLSTTATAVITVTDTNDNPPIFNPTTYKGQVPENEANVVITTLKVTDADAPNTPAWEAVYTILNDDGGQFVVTTNPVNNDGILKTAKGLDFEAKQQYILHVAVTNVVPFEVSLTTSTATVTVDVLDVNEAPIFVPPEKRVEVSEDFGVGQEITSYTAQEPDTFMEQKITFSSCYWNRDTSADPV

SEQ ID NO: 26035 - protein, 821 aa, Homo sapiens
  REGION 1..821: note = ENSP00000414946
MGPWSRSLSALLLLLQVSSWLCQEPEPCHPGFDAESYTFTVPRRHLERGRVLGRVNFEDCTGRQRTAYFSLDTRFKVGTDGVITVKRPLRFHNPQIHFLVYAWDSTYRKFSTKVTLNTVGHHHRPPPHQASVSGIQAELLTFPNSSPGLRRQKRDWVIPPISCPENEKGPFPKNLVQIKSNKDKEGKVFYSITGQGADTPPVGVFIIERETGWLKVTEPLDRERIATYTLFSHAVSSNGNAVEDPMEILITVTDQNDNKPEFTQEVFKGSVMEGALPGTSVMEVTATDADDDVNTYNAAIAYTILSQDPELPDKNMFTINRNTGVISVVTTGLDRESFPTYTLVVQAADLQGEGLSTTATAVITVTDTNDNPPIFNPTTGLDFEAKQQYILHVAVTNVVPFEVSLTTSTATVTVDVLDVNEAPIFVPPEKRVEVSEDFGVGQEITSYTAQEPDTFMEQKITYRIWRDTANWLEINPDTGAISTRAELDREDFEHVKNSTYTALIIATDNGSPVATGTGTLLLILSDVNDNAPIPEPRTIFFCERNPKPQVINIIDADLPPNTSPFTAELTHGASANWTIQYNDPTQESIILKPKMALEVGDYKINLKLMDNQNKDQVTTLEVSVCDCEGAAGVCRKAQPVEAGLQIPAILGILGGILALLILILLLLLFLRRRAVVKEPLLPPEDDTRDNVYYYDEEGGGEEDQDFDLSQLHRGLDARPEVTRNDVAPTLMSVPRYLPRPANPDEIGNFIDENLKAADTDPTAPPYDSLLVFDYEGSGSEAASLSSLNSSESDKDQDYDYLNEWGNRFKKLADMYGGGEDD

SEQ ID NO: 26036 - protein, 414 aa, Homo sapiens
  REGION 1..414: note = ENSP00000458139
MGPWSRSLSALLLLLQVSSWLCQEPEPCHPGFDAESYTFTVPRRHLERGRVLGRVNFEDCTGRQRTAYFSLDTRFKVGTDGVITVKRPLRFHNPQIHFLVYAWDSTYRKFSTKVTLNTVGHHHRPPPHQASVSGIQAELLTFPNSSPGLRRQKRDWVIPPISCPENEKGPFPKNLVQLFSHAVSSNGNAVEDPMEILITVTDQNDNKPEFTQEVFKGSVMEGALPGTSVMEVTATDADDDVNTYNAAIAYTILSQDPELPDKNMFTINRNTGVISVVTTGLDRESFPTYTLVVQAADLQGEGLSTTATAVITVTDTNDNPPIFNPTTYKGQVPENEANVVITTLKVTDADAPNTPAWEAVYTILNDDGGQFVVTTNPVNNDGILKTAKVCMVPGKMQKLASSQLFIPLSPGLGF

SEQ ID NO: 26037 - protein, 155 aa, Homo sapiens
  REGION 1..155: note = ENSP00000463170
  VARIANT 1: note = Any amino acid
XTDGVITVKRPLRFHNPQIHFLVYAWDSTYRKFSTKVTLNTVGHHHRPPPHQASVSGIQAELLTFPNSSPGLRRQKRDWVIPPISCPENEKGPFPKNLVQIKSNKDKEGKVFYSITGQGADTPPVGVFIIERETGWLKVTEPLDRERIATYTEPL

SEQ ID NO: 26038 - protein, 647 aa, Homo sapiens [sequence omitted]

SEQ ID NO: 26039 - protein, 647 aa, Homo sapiens
  REGION 1..647: note = ENSP00000480664
MGPWSRSLSALLLLLQVSSWLCQEPEPCHPGFDAESYTFTVPRRHLERGRVLGRVNFEDCTGRQRTAYFSLDTRFKVGTDGVITVKRPLRFHNPQIHFLVYAWDSTYRKFSTKVTLNTVGHHHRPPPHQASVSGIQAELLTFPNSSPGLRRQKRDWVIPPISCPENEKGPFPKNLVQIKSNKDKEGKVFYSITGQGADTPPVGVFIIERETGWLKVTEPLDRERIATYTLFSHAVSSNGNAVEDPMEILITVTDQNDNKPEFTQEVFKGSVMEGALPGTSVMEVTATDADDDVNTYNAAIAYTILSQDPELPDKNMFTINRNTGVISVVTTGLDRESFPTYTLVVQAADLQGEGLSTTATAVITVTDTNDNPPIFNPTTYKGQVPENEANVVITTLKVTDADAPNTPAWEAVYTILNDDGGQFVVTTNPVNNDGILKTAKGLDFEAKQQYILHVAVTNVVPFEVSLTTSTATVTVDVLDVNEAPIFVPPEKRVEVSEDFGVGQEITSYTAQEPDTFMEQKITYRIWRDTANWLEINPDTGAISTRAELDREDFEHVKNSTYTALIIATDNGSPVATGTGTLLLILSDVNDNAPIPEPRTIFFCERNPKPQVINIIDADLPPNLASQSIGITDMSHCTCPAPQLPAIF

SEQ ID NO: 26040 - protein, 903 aa, Homo sapiens
  REGION 1..903: note = ENSP00000481063
MGPWSRSLSALLLLLQVSSWLCQEPEPCHPGFDAESYTFTVPRRHLERGRVLGRVNFEDCTGRQRTAYFSLDTRFKVGTDGVITVKRPLRFHNPQIHFLVYAWDSTYRKFSTKVTLNTVGHHHRPPPHQASVSGIQAELLTFPNSSPGLRRQKRDWVIPPISCPENEKGPFPKNLVQIKSNKDKEGKVFYSITGQGADTPPVGVFIIERETGWLKVTEPLDRERIATYTLFSHAVSSNGNAVEDPMEILITVTDQNDNKPEFTQEVFKGSVMEGALPGTSVMEVTATDADDDVNTYNAAIAYTILSQDPELPDKNMFTINRNTGVISVVTTGLDRESFPTYTLVVQAADLQGEGLSTTATAVITVTDTNDNPPIFNPTTYKGQVPENEANVVITTLKVTDADAPNTPAWEAVYTILNDDGGQFVVTTNPVNNDGILKTAKVWYLARCRNWHPHSCSYPCPLGLDFEAKQQYILHVAVTNVVPFEVSLTTSTATVTVDVLDVNEAPIFVPPEKRVEVSEDFGVGQEITSYTAQEPDTFMEQKITYRIWRDTANWLEINPDTGAISTRAELDREDFEHVKNSTYTALIIATDNGSPVATGTGTLLLILSDVNDNAPIPEPRTIFFCERNPKPQVINIIDADLPPNTSPFTAELTHGASANWTIQYNDPTQESIILKPKMALEVGDYKINLKLMDNQNKDQVTTLEVSVCDCEGAAGVCRKAQPVEAGLQIPAILGILGGILALLILILLLLLFLRRRAVVKEPLLPPEDDTRDNVYYYDEEGGGEEDQDFDLSQLHRGLDARPEVTRNDVAPTLMSVPRYLPRPANPDEIGNFIDENLKAADTDPTAPPYDSLLVFDYEGSGSEAASLSSLNSSESDKDQDYDYLNEWGNRFKKLADMYGGGEDD

SEQ ID NO: 26041 - protein, 788 aa, Homo sapiens
  REGION 1..788: note = ENSP00000264463
MTIHQFLLLFLFWVCLPHFCSPEIMFRRTPVPQQRILSSRVPRSDGKILHRQKRGWMWNQFFLLEEYTGSDYQYVGKLHSDQDKGDGSLKYILSGDGAGTLFIIDEKTGDIHATRRIDREEKAFYTLRAQAINRRTLRPVEPESEFVIKIHDINDNEPTFPEEIYTASVPEMSVVGTSVVQVTATDADDPSYGNSARVIYSILQGQPYFSVEPETGIIRTALPNMNRENREQYQVVIQAKDMGGQMGGLSGTTTVNITLTDVNDNPPRFPQNTIHLRVLESSPVGTAIGSVKATDADTGKNAEVEYRIIDGDGTDMFDIVTEKDTQEGIITVKKPLDYESRRLYTLKVEAENTHVDPRFYYLGPFKDTTIVKISIEDVDEPPVFSRSSYLFEVHEDIEVGTIIGTVMARDPDSISSPIRFSLDRHTDLDRIFNIHSGNGSLYTSKPLDRELSQWHNLTVIAAEINNPKETTRVAVFVRILDVNDNAPQFAVFYDTFVCENARPGQLIQTISAVDKDDPLGGQKFFFSLAAVNPNFTVQDNEDNTARILTRKNGFNRHEISTYLLPVVISDNDYPIQSSTGTLTIRVCACDSQGNMQSCSAEALLLPAGLSTGALIAILLCIIILLVIVVLFAALKRQRKKEPLILSKEDIRDNIVSYNDEGGGEEDTQAFDIGTLRNPAAIEEKKLRRDIIPETLFIPRRTPTAPDNTDVRDFINERLKEHDLDPTAPPYDSLATYAYEGNDSIAESLSSLESGTTEGDQNYDYLREWGPRFNKLAEMYGGGESDKDS

SEQ ID NO: 26042 - protein, 436 aa, Homo sapiens
  REGION 1..436: note = ENSP00000425653
MTIHQFLLLFLFWVCLPHFCSPEIMFRRTPVPQQRILSSRVPRSDGKILHRQKRGWMWNQFFLLEEYTGSDYQYVGKLHSDQDKGDGSLKYILSGDGAGTLFIIDEKTGDIHATRRIDREEKAFYTLRAQAINRRTLRPVEPESEFVIKIHDINDNEPTFPEEIYTASVPEMSVVGTSVVQVTATDADDPSYGNSARVIYSILQGQPYFSVEPETGIIRTALPNMNRENREQYQVVIQAKDMGGQMGGLSGTTTVNITLTDVNDNPPRFPQNTIHLRVLESSPVGTAIGSVKATDADTGKNAEVEYRIIDGDGTDMFDIVTEKDTQEGIITVKKPLDYESRRLYTLKVEAENTHVDPRFYYLGPFKDTTIVKISIEDVDEPPVFSRSSYLFEVHEDIEVGTIIGTVMARDPDSISSPIRQSQRDNTRGCFCENFGC

SEQ ID NO: 26043 - protein, 693 aa, Homo sapiens
  REGION 1..693: note = ENSP00000377711
MKENYCLQAALVCLGMLCHSHAFAPERRGHLRPSFHGHHEKGKEGQVLQRSKRGWVWNQFFVIEEYTGPDPVLVGRLHSDIDSGDGNIKYILSGEGAGTIFVIDDKSGNIHATKTLDREERAQYTLMAQAVDRDTNRPLEPPSEFIVKVQDINDNPPEFLHETYHANVPERSNVGTSVIQVTASDADDPTYGNSAKLVYSILEGQPYFSVEAQTGIIRTALPNMDREAKEEYHVVIQAKDMGGHMGGLSGTTKVTITLTDVNDNPPKFPQSVYQMSVSEAAVPGEEVGRVKAKDPDIGENGLVTYNIVDGDGMESFEITTDYETQEGVIKLKKPVDFETKRAYSLKVEAANVHIDPKFISNGPFKDTVTVKISVEDADEPPMFLAPSYIHEVQENAAAGTVVGRVHAKDPDAANSPIRYSIDRHTDLDRFFTINPEDGFIKTTKPLDREETAWLNITVFAAEIHNRHQEAKVPVAIRVLDVNDNAPKFAAPYEGFICESDQTKPLSNQPIVTISADDKDDTANGPRFIFSLPPEIIHNPNFTVRDNRDNTAGVYARRGGFSRQKQDLYLLPIVISDGGIPPMSSTNTLTIKVCGCDVNGALLSCNAEAYILNAGLSTGALIAILACIVILLGCPSLMEPPSPREDMRLLYLGFQLMLFSYVKVNRRFCLLGVFIKLPFLYVVATESPTTLTSL

SEQ ID NO: 26044 - protein, 796 aa, Homo sapiens
  REGION 1..796: note = ENSP00000268603
MKENYCLQAALVCLGMLCHSHAFAPERRGHLRPSFHGHHEKGKEGQVLQRSKRGWVWNQFFVIEEYTGPDPVLVGRLHSDIDSGDGNIKYILSGEGAGTIFVIDDKSGNIHATKTLDREERAQYTLMAQAVDRDTNRPLEPPSEFIVKVQDINDNPPEFLHETYHANVPERSNVGTSVIQVTASDADDPTYGNSAKLVYSILEGQPYFSVEAQTGIIRTALPNMDREAKEEYHVVIQAKDMGGHMGGLSGTTKVTITLTDVNDNPPKFPQSVYQMSVSEAAVPGEEVGRVKAKDPDIGENGLVTYNIVDGDGMESFEITTDYETQEGVIKLKKPVDFETKRAYSLKVEAANVHIDPKFISNGPFKDTVTVKISVEDADEPPMFLAPSYIHEVQENAAAGTVVGRVHAKDPDAANSPIRYSIDRHTDLDRFFTINPEDGFIKTTKPLDREETAWLNITVFAAEIHNRHQEAKVPVAIRVLDVNDNAPKFAAPYEGFICESDQTKPLSNQPIVTISADDKDDTANGPRFIFSLPPEIIHNPNFTVRDNRDNTAGVYARRGGFSRQKQDLYLLPIVISDGGIPPMSSTNTLTIKVCGCDVNGALLSCNAEAYILNAGLSTGALIAILACIVILLVIVVLFVTLRRQKKEPLIVFEEEDVRENIITYDDEGGGEEDTEAFDIATLQNPDGINGFIPRKDIKPEYQYMPRPGLRPAPNSVDVDDFINTRIQEADNDPTAPPYDSIQIYGYEGRGSVAGSLSSLESATTDSDLDYDYLQNWGPRFKKLADLYGSKDTFDDDS

SEQ ID NO: 26045 - protein, 670 aa, Homo sapiens
  REGION 1..670: note = ENSP00000457812
MAQAVDRDTNRPLEPPSEFIVKVQDINDNPPEFLHETYHANVPERSNVGTSVIQVTASDADDPTYGNSAKLVYSILEGQPYFSVEAQTGIIRTALPNMDREAKEEYHVVIQAKDMGGHMGGLSGTTKVTITLTDVNDNPPKFPQSVYQMSVSEAAVPGEEVGRVKAKDPDIGENGLVTYNIVDGDGMESFEITTDYETQEGVIKLKKPVDFETKRAYSLKVEAANVHIDPKFISNGPFKDTVTVKISVEDADEPPMFLAPSYIHEVQENAAAGTVVGRVHAKDPDAANSPIRYSIDRHTDLDRFFTINPEDGFIKTTKPLDREETAWLNITVFAAEIHNRHQEAKVPVAIRVLDVNDNAPKFAAPYEGFICESDQTKPLSNQPIVTISADDKDDTANGPRFIFSLPPEIIHNPNFTVRDNRDNTAGVYARRGGFSRQKQDLYLLPIVISDGGIPPMSSTNTLTIKVCGCDVNGALLSCNAEAYILNAGLSTGALIAILACIVILLVIVVLFVTLRRQKKEPLIVFEEEDVRENIITYDDEGGGEEDTEAFDIATLQNPDGINGFIPRKDIKPEYQYMPRPGLRPAPNSVDVDDFINTRIQEADNDPTAPPYDSIQIYGYEGRGSVAGSLSSLESATTDSDLDYDYLQNWGPRFKKLADLYGSKDTFDDDS

SEQ ID NO: 26046 - protein, 62 aa, Homo sapiens
  REGION 1..62: note = ENSP00000484650
  VARIANT 1: note = Any amino acid
XMSVSEAAVPGEEVGRVKAKDPDIGENGLVTYNIVDGDGMESFEITTDYETQEGVIKLKKVS

SEQ ID NO: 26047 - protein, 222 aa, Homo sapiens
  REGION 1..222: note = ENSP00000455779
MKENYCLQAALVCLGMLCHSHAFAPERRGHLRPSFHGHHEKGKEGQVLQRSKRGWVWNQFFVIEEYTGPDPVLVGRLHSDIDSGDGNIKYILSGEGAGTIFVIDDKSGNIHATKTLDREERAQYTLMAQAVDRDTNRPLEPPSEFIVKVQDINDNPPEFLHETYHANVPERSNVGTSVIQVTASDADDPTYGNSAKLVYSILEGQPYFSVEAQTGIIRTALP

SEQ ID NO: 26048 - protein, 70 aa, Homo sapiens
  REGION 1..70: note = ENSP00000455420
MKENYCLQAALVCLGMLCHSHAFAPERRGHLRPSFHGHHEKGKEGQVLQRSKRGWVWNQFFVIEEYTGPD

SEQ ID NO: 26049 - protein, 65 aa, Homo sapiens
  REGION 1..65: note = ENSP00000456772
MKENYCLQAALVCLGMLCHSHAFAPERRGHLRPSFHGHHEKGKEGQVLQRSKRGWVWNQFFVIEE

SEQ ID NO: 26050 - protein, 53 aa, Homo sapiens
  REGION 1..53: note = ENSP00000455120
MKENYCLQAALVCLGMLCHSHAFAPERRGHLRPSFHGHHEKGKEGQVLQRSKR

SEQ ID NO: 26051 - protein, 34 aa, Homo sapiens
  REGION 1..34: note = ENSP00000455697
MKENYCLQAALVCLGMLCHSHAFAPERRGHLRPS

SEQ ID NO: 26052 - protein, 22 aa, Homo sapiens
  REGION 1..22: note = ENSP00000456110
MKENYCLQAALVCLGMLCHSHA

SEQ ID NO: 26053 - protein, 52 aa, Homo sapiens
  REGION 1..52: note = ENSP00000442225
MQPRTPLVLCVLLSQVLLLTSAEDLDCTPGFQQKVFHINQPAEFIEDQSILN

SEQ ID NO: 26054 - protein, 67 aa, Homo sapiens
  REGION 1..67: note = ENSP00000456297
MQPRTPLVLCVLLSQVLLLTSAEDLDCTPGFQQKVFHINQPAEFIEDQSILNCKQCHSKMLLDSSHI

SEQ ID NO: 26055 - protein, 713 aa, Homo sapiens
  REGION 1..713: note = ENSP00000479395
MQPRTPLVLCVLLSQVLLLTSAEDLDCTPGFQQKVFHINQPAEFIEDQSILNLTFSDCKGNDKLRYEVSSPYFKVNSDGGLVALRNITAVGKTLFVHARTPHAEDMAELVIVGGKDIQGSLQDIFKFARTSPVPRQKRSIVVSPILIPENQRQPFPRDVGKVVDSDRPERSKFRLTGKGVDQEPKGIFRINENTGSVSVTRTLDREVIAVYQLFVETTDVNGKTLEGPVPLEVIVIDQNDNRPIFREGPYIGHVMEGSPTGTTVMRMTAFDADDPATDNALLRYNIRQQTPDKPSPNMFYIDPEKGDIVTVVSPALLDRETLENPKYELIIEAQDMAGLDVGLTGTATATIMIDDKNDHSPKFTKKEFQATVEEGAVGVIVNLTVEDKDDPTTGAWRAAYTIINGNPGQSFEIHTNPQTNEGMLSVVKPLDYEISAFHTLLIKVENEDPLVPDVSYGPSSTATVHITVLDVNEGPVFYPDPMMVTRQEDLSVGSVLLTVNATDPDSLQHQTIRYSVYKDPAGWLNINPINGTVDTTAVLDRESPFVDNSVYTALFLAIDSGNPPATGTGTLLITLEDVNDNAPFIYPTVAEVCDDAKNLSVVILGASDKDLHPNTDPFKFEIHKQAVPDKVWKISKINNTHALVSLLQNLNKANYNLPIMVTDSGKPPMTNITDLRVQVCSCRNSKVDCNAAGALRFSLPSVLLLSLFSLACL

SEQ ID NO: 26056 - protein, 760 aa, Homo sapiens
  REGION 1..760: note = ENSP00000268613
MKTPPGASSRTKCSRELRSFCAFSCPRAKQPTCTAWFPQQEHPSENGPQMPGRDPPAASTMQVLLLTSAEDLDCTPGFQQKVFHINQPAEFIEDQSILNLTFSDCKGNDKLRYEVSSPYFKVNSDGGLVALRNITAVGKTLFVHARTPHAEDMAELVIVGGKDIQGSLQDIFKFARTSPVPRQKRSIVVSPILIPENQRQPFPRDVGKVVDSDRPERSKFRLTGKGVDQEPKGIFRINENTGSVSVTRTLDREVIAVYQLFVETTDVNGKTLEGPVPLEVIVIDQNDNRPIFREGPYIGHVMEGSPTGTTVMRMTAFDADDPATDNALLRYNIRQQTPDKPSPNMFYIDPEKGDIVTVVSPALLDRETLENPKYELIIEAQDMAGLDVGLTGTATATIMIDDKNDHSPKFTKKEFQATVEEGAVGVIVNLTVEDKDDPTTGAWRAAYTIINGNPGQSFEIHTNPQTNEGMLSVVKPLDYEISAFHTLLIKVENEDPLVPDVSYGPSSTATVHITVLDVNEGPVFYPDPMMVTRQEDLSVGSVLLTVNATDPDSLQHQTIRYSVYKDPAGWLNINPINGTVDTTAVLDRESPFVDNSVYTALFLAIDSGNPPATGTGTLLITLEDVNDNAPFIYPTVAEVCDDAKNLSVVILGASDKDLHPNTDPFKFEIHKQAVPDKVWKISKINNTHALVSLLQNLNKANYNLPIMVTDSGKPPMTNITDLRVQVCSCRNSKVDCNAAGALRFSLPSVLLLSLFSLACL

SEQ ID NO: 26057 - protein, 56 aa, Homo sapiens
  REGION 1..56: note = ENSP00000457914
MQPRTPLVLCVLLSQVLLLTSAEDLDCTPGFQQKVFHINQPAEFIEDQSILNYVFY

SEQ ID NO: 26058 - protein, 67 aa, Homo sapiens
  REGION 1..67: note = ENSP00000455781
MQPRTPLVLCVLLSQTPVRPTIYLCQNLQFIKNKARDSNSLADHKGKRIQVNRLLPGLLFHDELSGI

SEQ ID NO: 26059 - protein, 37 aa, Homo sapiens
  REGION 1..37: note = ENSP00000457149
MQPRTPLVLCVLLSQSGGPVCKSQFQALPLAVQWLGV

SEQ ID NO: 26060 - protein, 175 aa, Homo sapiens
  REGION 1..175: note = ENSP00000456491
MQPRTPLVLCVLLSQVLLLTSAEDLDCTPGFQQKVFHINQPAEFIEDQSILNLTFSDCKGNDKLRYEVSSPYFKVNSDGGLVALRNITAVGKTLFVHARTPHAEDMAELVIVGGKDIQGSLQDIFKFARTSPVPRQKRSIVVSPILIPENQRQPFPRDVGKMKIWQVLCLARWLT

SEQ ID NO: 26061 - protein, 190 aa, Homo sapiens
  REGION 1..190: note = ENSP00000408632
MQPRTPLVLCVLLSQVLLLTSAEDLDCTPGFQQKVFHINQPAEFIEDQSILNLTFSDCKGNDKLRYEVSSPYFKVNSDGGLVALRNITAVGKTLFVHARTPHAEDMAELVIVGGKDIQGSLQDIFKFARTSPVPRQKRSIVVSPILIPENQRQPFPRDVGKRTHNPINSELLLNEGITADLNPCITILAI

SEQ ID NO: 26062 - protein, 674 aa, Homo sapiens
  REGION 1..674: note = ENSP00000394557
MQPRTPLVLCVLLSQVLLLTSAEDLDCTPGFQQKVFHINQPAEFIEDQSILNLTFSDCKGNDKLRYEVSSPYFKVNSDGGLVALRNITAVGKTLFVHARTPHAEDMAELVIVGGKDIQGSLQVVDSDRPERSKFRLTGKGVDQEPKGIFRINENTGSVSVTRTLDREVIAVYQLFVETTDVNGKTLEGPVPLEVIVIDQNDNRPIFREGPYIGHVMEGSPTGTTVMRMTAFDADDPATDNALLRYNIRQQTPDKPSPNMFYIDPEKGDIVTVVSPALLDRETLENPKYELIIEAQDMAGLDVGLTGTATATIMIDDKNDHSPKFTKKEFQATVEEGAVGVIVNLTVEDKDDPTTGAWRAAYTIINGNPGQSFEIHTNPQTNEGMLSVVKPLDYEISAFHTLLIKVENEDPLVPDVSYGPSSTATVHITVLDVNEGPVFYPDPMMVTRQEDLSVGSVLLTVNATDPDSLQHQTIRYSVYKDPAGWLNINPINGTVDTTAVLDRESPFVDNSVYTALFLAIDSGNPPATGTGTLLITLEDVNDNAPFIYPTVAEVCDDAKNLSVVILGASDKDLHPNTDPFKFEIHKQAVPDKVWKISKINNTHALVSLLQNLNKANYNLPIMVTDSGKPPMTNITDLRVQVCSCRNSKVDCNAAGALRFSLPSVLLLSLFSLACL

SEQ ID NO: 26063 - protein, 814 aa, Homo sapiens
  REGION 1..814: note = ENSP00000289746
MDAAFLLVLGLLAQSLCLSLGVPGWRRPTTLYPWRRAPALSRVRRAWVIPPISVSENHKRLPYPLVQIKSDKQQLGSVIYSIQGPGVDEEPRGVFSIDKFTGKVFLNAMLDREKTDRFRLRAFALDLGGSTLEDPTDLEIVVVDQNDNRPAFLQEAFTGRVLEGAVPGTYVTRAEATDADDPETDNAALRFSILQQGSPELFSIDELTGEIRTVQVGLDREVVAVYNLTLQVADMSGDGLTATASAIITLDDINDNAPEFTRDEFFMEAIEAVSGVDVGRLEVEDRDLPGSPNWVARFTILEGDPDGQFTIRTDPKTNEGVLSIVKALDYESCEHYELKVSVQNEAPLQAAALRAERGQAKVRVHVQDTNEPPVFQENPLRTSLAEGAPPGTLVATFSARDPDTEQLQRLSYSKDYDPEDWLQVDAATGRIQTQHVLSPASPFLKGGWYRAIVLAQDDASQPRTATGTLSIEILEVNDHAPVLAPPPPGSLCSEPHQGPGLLLGATDEDLPPHGAPFHFQLSPRLPELGRNWSLSQVNVSHARLRPRHQVPEGLHRLSLLLRDSGQPPQQREQPLNVTVCRCGKDGVCLPGAAALLAGGTGLSLGALVIVLASALLLLVLVLLVALRARFWKQSRGKGLLHGPQDDLRDNVLNYDEQGGGEEDQDAYDISQLRHPTALSLPLGPPPLRRDAPQGRLHPQPPRVLPTSPLDIADFINDGLEAADSDPSVPPYDTALIYDYEGDGSVAGTLSSILSSQGDEDQDYDYLRDWGPRFARLADMYGHPCGLEYGARWDHQAREGLSPGALLPRHRGRTA

SEQ ID NO: 26064 - protein, 772 aa, Homo sapiens
  REGION 1..772: note = ENSP00000262150
MNCYLLLRFMLGIPLLWPCLGATENSQTKKVKQPVRSHLRVKRGWVWNQFFVPEEMNTTSHHIGQLRSDLDNGNNSFQYKLLGAGAGSTFIIDERTGDIYAIQKLDREERSLYILRAQVIDIATGRAVEPESEFVIKVSDINDNEPKFLDEPYEAIVPEMSPEGTLVIQVTASDADDPSSGNNARLLYSLLQGQPYFSVEPTTGVIRISSKMDRELQDEYWVIIQAKDMIGQPGALSGTTSVLIKLSDVNDNKPIFKESLYRLTVSESAPTGTSIGTIMAYDNDIGENAEMDYSIEEDDSQTFDIITNHETQEGIVILKKKVDFEHQNHYGIRAKVKNHHVPEQLMKYHTEASTTFIKIQVEDVDEPPLFLLPYYVFEVFEETPQGSFVGVVSATDPDNRKSPIRYSITRSKVFNINDNGTITTSNSLDREISAWYNLSITATEKYNIEQISSIPLYVQVLNINDHAPEFSQYYETYVCENAGSGQVIQTISAVDRDESIEEHHFYFNLSVEDTNNSSFTIIDNQDNTAVILTNRTGFNLQEEPVFYISILIADNGIPSLTSTNTLTIHVCDCGDSGSTQTCQYQELVLSMGFKTEVIIAILICIMIIFGFIFLTLGLKQRRKQILFPEKSEDFRENIFQYDDEGGGEEDTEAFDIAELRSSTIMRERKTRKTTSAEIRSLYRQSLQVGPDSAIFRKFILEKLEEANTDPCAPPFDSLQTYAFEGTGSLAGSLSSLESAVSDQDESYDYLNELGPRFKRLACMFGSAVQSNN

SEQ ID NO: 26065 - protein, 541 aa, Homo sapiens
  REGION 1..541: note = ENSP00000463085
MNCYLLLRFMLGIPLLWPCLGATENSQTKKVKQPVRSHLRVKRGWVWNQFFVPEEMNTTSHHIGQLRSDLDNGNNSFQYKLLGAGAGSTFIIDERTGDIYAIQKLDREERSLYILRAQVIDIATGRAVEPESEFVIKVSDINDNEPKFLDEPYEAIVPEMSPEGTLVIQVTASDADDPSSGNNARLLYSLLQGQPYFSVEPTTGVIRISSKMDRELQDEYWVIIQAKDMIGQPGALSGTTSVLIKLSDVNDNKPIFKESLYRLTVSESAPTGTSIGTIMAYDNDIGENAEMDYSIEEDDSQTFDIITNHETQEGIVILKKKVDFEHQNHYGIRAKVKNHHVPEQLMKYHTEASTTFIKIQVEDVDEPPLFLLPYYVFEVFEETPQGSFVGVVSATDPDNRKSPIRYSITRSKVFNINDNGTITTSNSLDREISAWYNLSITATEKYNIEQISSIPLYVQVLNINDHAPEFSQYYETYVCENAGSGQVIQTISAVDRDESIEEHHFYFNLSVEDTNNSSFTIIDNQELVLTFKKNLSSTSPS

SEQ ID NO: 26066 - protein, 490 aa, Homo sapiens
  REGION 1..490: note = ENSP00000439593
MNCYLLLRFMLGIPLLWPCLGATENSQTKKVKQPVRSHLRVKRGWVWNQFFVPEEMNTTSHHIGQLRSDLDNGNNSFQYKLLGAGAGSTFIIDERTGDIYAIQKLDREERSLYILRAQVIDIATGRAVEPESEFVIKVSDINDNEPKFLDEPYEAIVPEMSPEGTLVIQVTASDADDPSSGNNARLLYSLLQGQPYFSVEPTTGVIRISSKMDRELQDEYWVIIQAKDMIGQPGALSGTTSVLIKLSDVNDNKPIFKESLYRLTVSESAPTGTSIGTIMAYDNDIGENAEMDYSIEEDDSQTFDIITNHETQEGIVILKKKVDFEHQNHYGIRAKVKNHHVPEQLMKYHTEASTTFIKIQVEDVDEPPLFLLPYYVFEVFEETPQGSFVGVVSATDPDNRKSPIRYSITRSKVFNINDNGTITTSNSLDREISAWYNLSITATEKYNIEQISSIPLYVQVLNINDHAPEFSQYYETYVCENAGSGQGLFF

SEQ ID NO: 26067 - protein, 434 aa, Homo sapiens
  REGION 1..434: note = ENSP00000401998
GIPLLWPCLGATENSQTKKVKQPVRSHLRVKRGWVWNQFFVPEEMNTTSHHIGQLRSDLDNGNNSFQYKLLGAGAGSTFIIDERTGDIYAIQKLDREERSLYILRAQVIDIATGRAVEPESEFVIKVSDINDNEPKFLDEPYEAIVPEMSPEGTLVIQVTASDADDPSSGNNARLLYSLLQGQPYFSVEPTTGVIRISSKMDRELQDEYWVIIQAKDMIGQPGALSGTTSVLIKLSDVNDNKPIFKESLYRLTVSESAPTGTSIGTIMAYDNDIGENAEMDYSIEEDDSQTFDIITNHETQEGIVILKKKVDFEHQNHYGIRAKVKNHHVPEQLMKYHTEASTTFIKIQVEDVDEPPLFLLPYYVFEVFEETPQGSFVGVVSATDPDNRKSPIRYSITRSKVFNINDNGTITTSNSLDREISAWYNLSITATEK

SEQ ID NO: 26068 - protein, 65 aa, Homo sapiens
  REGION 1..65: note = ENSP00000464477
MNCYLLLRFMLGIPLLWPCLGATENSQTKKVKQPVRSHLRVKRGWVWNQFFVPEEMNTTSHHIGQ

SEQ ID NO: 26069 - protein, 906 aa, Homo sapiens
  REGION 1..906: note = ENSP00000269141
MCRIAGALRTLLPLLAALLQASVEASGEIALCKTGFPEDVYSAVLSKDVHEGQPLLNVKFSNCNGKRKVQYESSEPADFKVDEDGMVYAVRSFPLSSEHAKFLIYAQDKETQEKWQVAVKLSLKPTLTEESVKESAEVEEIVFPRQFSKHSGHLQRQKRDWVIPPINLPENSRGPFPQELVRIRSDRDKNLSLRYSVTGPGADQPPTGIFIINPISGQLSVTKPLDREQIARFHLRAHAVDINGNQVENPIDIVINVIDMNDNRPEFLHQVWNGTVPEGSKPGTYVMTVTAIDADDPNALNGMLRYRIVSQAPSTPSPNMFTINNETGDIITVAAGLDREKVQQYTLIIQATDMEGNPTYGLSNTATAVITVTDVNDNPPEFTAMTFYGEVPENRVDIIVANLTVTDKDQPHTPAWNAVYRISGGDPTGRFAIQTDPNSNDGLVTVVKPIDFETNRMFVLTVAAENQVPLAKGIQHPPQSTATVSVTVIDVNENPYFAPNPKIIRQEEGLHAGTMLTTFTAQDPDRYMQQNIRYTKLSDPANWLKIDPVNGQITTIAVLDRESPNVKNNIYNATFLASDNGIPPMSGTGTLQIYLLDINDNAPQVLPQEAETCETPDPNSINITALDYDIDPNAGPFAFDLPLSPVTIKRNWTITRLNGDFAQLNLKIKFLEAGIYEVPIIITDSGNPPKSNISILRVKVCQCDSNGDCTDVDRIVGAGLGTGAIIAILLCIIILLILVLMFVVWMKRRDKERQAKQLLIDPEDDVRDNILKYDEEGGGEEDQDYDLSQLQQPDTVEPDAIKPVGIRRMDERPIHAEPQYPVRSAAPHPGDIGDFINEGLKAADNDPTAPPYDSLLVFDYEGSGSTAGSLSSLNSSSSGGEQDYDYLNDWGPRFKKLADMYGGGDD

SEQ ID NO: 26070 - protein, 875 aa, Homo sapiens
  REGION 1..875: note = ENSP00000382312
MFLLRRYVCIFTEKLKNQAELYVFLSVKFSNCNGKRKVQYESSEPADFKVDEDGMVYAVRSFPLSSEHAKFLIYAQDKETQEKWQVAVKLSLKPTLTEESVKESAEVEEIVFPRQFSKHSGHLQRQKRDWVIPPINLPENSRGPFPQELVRIRSDRDKNLSLRYSVTGPGADQPPTGIFIINPISGQLSVTKPLDREQIARFHLRAHAVDINGNQVENPIDIVINVIDMNDNRPEFLHQVWNGTVPEGSKPGTYVMTVTAIDADDPNALNGMLRYRIVSQAPSTPSPNMFTINNETGDIITVAAGLDREKVQQYTLIIQATDMEGNPTYGLSNTATAVITVTDVNDNPPEFTAMTFYGEVPENRVDIIVANLTVTDKDQPHTPAWNAVYRISGGDPTGRFAIQTDPNSNDGLVTVVKPIDFETNRMFVLTVAAENQVPLAKGIQHPPQSTATVSVTVIDVNENPYFAPNPKIIRQEEGLHAGTMLTTFTAQDPDRYMQQNIRYTKLSDPANWLKIDPVNGQITTIAVLDRESPNVKNNIYNATFLASDNGIPPMSGTGTLQIYLLDINDNAPQVLPQEAETCETPDPNSINITALDYDIDPNAGPFAFDLPLSPVTIKRNWTITRLNGDFAQLNLKIKFLEAGIYEVPIIITDSGNPPKSNISILRVKVCQCDSNGDCTDVDRIVGAGLGTGAIIAILLCIIILLILVLMFVVWMKRRDKERQAKQLLIDPEDDVRDNILKYDEEGGGEEDQDYDLSQLQQPDTVEPDAIKPVGIRRMDERPIHAEPQYPVRSAAPHPGDIGDFINEGLKAADNDPTAPPYDSLLVFDYEGSGSTAGSLSSLNSSSSGGEQDYDYLNDWGPRFKKLADMYGGGDD

SEQ ID NO: 26071 - protein, 191 aa, Homo sapiens
  REGION 1..191: note = ENSP00000411360
MCNTQRMKFSNCNGKRKVQYESSEPADFKVDEDGMVYAVRSFPLSSEHAKFLIYAQDKETQEKWQVAVKLSLKPTLTEESVKESAEVEEIVFPRQFSKHSGHLQRQKRDWVIPPINLPENSRGPFPQELVRIRSDRDKNLSLRYSVTGPGADQPPTGIFIINPISGQLSVTKPLDREQIARFHLRAHAVDI

SEQ ID NO: 26072 - protein, 120 aa, Homo sapiens
  REGION 1..120: note = ENSP00000412120
MVYAVRSFPLSSEHAKFLIYAQDKETQEKWQVAVKLSLKPTLTEESVKESAEVEEIVFPRQFSKHSGHLQRQKRDWVIPPINLPENSRGPFPQELVRIRSDRDKNLSLRYSVTGPGADQP

SEQ ID NO: 26073 - protein, 73 aa, Homo sapiens
  REGION 1..73: note = ENSP00000414269
MVYAVRSFPLSSEHAKFLIYAQDKETQEKWQVAVKLSLKPTLTEESVKESAEVEEIVFPRQFSKHSGHLQRQK

SEQ ID NO: 26074 - protein, 3359 aa, Homo sapiens
  REGION 1..3359: note = ENSP00000224721
MGRHVATSCHVAWLLVLISGCWGQVNRLPFFTNHFFDTYLLISEDTPVGSSVTQLLAQDMDNDPLVFGVSGEEASRFFAVEPDTGVVWLRQPLDRETKSEFTVEFSVSDHQGVITRKVNIQVGDVNDNAPTFHNQPYSVRIPEVGATGNTPVGTPIFIVNATDPDLGAGGSVLYSFQPPSQFFAIDSARGIVTVIRELDYETTQAYQLTVNATDQDKTRPLSTLANLAIIITDVQDMDPIFINLPYSTNIYEHSPPGTTVRIITAIDQDKGRPRGIGYTIVSGNTNSIFALDYISGVLTLNGLLDRENPLYSHGFILTVKGTELNDDRTPSDATVTTTFNILVIDINDNAPEFNSSEYSVAITELAQVGFALPLFIQVVDKDENLGLNSMFEVYLVGNNSHHFIISPTSVQGKADIRIRVAIPLDYETVDRYDFDLFANESVPDHVGYAKVKITLINENDNRPIFSQPLYNISLYENVTVGTSVLTVLATDNDAGTFGEVSYFFSDDPDRFSLDKDTGLIMLIARLDYELIQRFTLTIIARDGGGEETTGRVRINVLDVNDNVPTFQKDAYVGALRENEPSVTQLVRLRATDEDSPPNNQITYSIVSASAFGSYFDISLYEGYGVISVSRPLDYEQISNGLIYLTVMAMDAGNPPLNSTVPVTIEVFDENDNPPTFSKPAYFVSVVENIMAGATVLFLNATDLDRSREYGQESIIYSLEGSTQFRINARSGEITTTSLLDRETKSEYILIVRAVDGGVGHNQKTGIATVNITLLDINDNHPTWKDAPYYINLVEMTPPDSDVTTVVAVDPDLGENGTLVYSIQPPNKFYSLNSTTGKIRTTHAMLDRENPDPHEAELMRKIVVSVTDCGRPPLKATSSATVFVNLLDLNDNDPTFQNLPFVAEVLEGIPAGVSIYQVVAIDLDEGLNGLVSYRMPVGMPRMDFLINSSSGVVVTTTELDRERIAEYQLRVVASDAGTPTKSSTSTLTIHVLDVNDETPTFFPAVYNVSVSEDVPREFRVVWLNCTDNDVGLNAELSYFITGGNVDGKFSVGYRDAVVRTVVGLDRETTAAYMLILEAIDNGPVGKRHTGTATVFVTVLDVNDNRPIFLQSSYEASVPEDIPEGHSILQLKATDADEGEFGRVWYRILHGNHGNNFRIHVSNGLLMRGPRPLDRERNSSHVLIVEAYNHDLGPMRSSVRVIVYVEDINDEAPVFTQQQYSRLGLRETAGIGTSVIVVQATDRDSGDGGLVNYRILSGAEGKFEIDESTGLIITVNYLDYETKTSYMMNVSATDQAPPFNQGFCSVYITLLNELDEAVQFSNASYEAAILENLALGTEIVRVQAYSIDNLNQITYRFNAYTSTQAKALFKIDAITGVITVQGLVDREKGDFYTLTVVADDGGPKVDSTVKVYITVLDENDNSPRFDFTSDSAVSIPEDCPVGQRVATVKAWDPDAGSNGQVVFSLASGNIAGAFEIVTTNDSIGEVFVARPLDREELDHYILQVVASDRGTPPRKKDHILQVTILDINDNPPVIESPFGYNVSVNENVGGGTAVVQVRATDRDIGINSVLSYYITEGNKDMAFRMDRISGEIATRPAPPDRERQSFYHLVATVEDEGTPTLSATTHVYVTIVDENDNAPMFQQPHYEVLLDEGPDTLNTSLITIQALDLDEGPNGTVTYAIVAGNIVNTFRIDRHMGVITAAKELDYEISHGRYTLIVTATDQCPILSHRLTSTTTVLVNVNDINDNVPTFPRDYEGPFEVTEGQPGPRVWTFLAHDRDSGPNGQVEYSIMDGDPLGEFVISPVEGVLRVRKDVELDRETIAFYNLTICARDRGMPPLSSTMLVGIRVLDINDNDPVLLNLPMNITISENSPVSSFVAHVLASDADSGCNARLTFNITAGNRERAFFINATTGIVTVNRPLDRERIPEYKLTISVKDNPENPRIARRDYDLLLIFLSDENDNHPLFTKSTYQAEVMENSPAGTPLTVLNGPILALDADQDIYAVVTYQLLGAQSGLFDINSSTGVVTVRSGVIIDREAFSPPILELLLLAEDIGLLNSTAHLLITILDDNDNRPTFSPATLTVHLLENCPPGFSVLQVTATDEDSGLNGELVYRIEAGAQDRFLIHLVTGVIRVGNATIDREEQESYRLTVVATDRGTVPLSGTAIVTILIDDINDSRPEFLNPIQTVSVLESAEPGTVIANITAIDHDLNPKLEYHIVGIVAKDDTDRLVPNQEDAFAVNINTGSVMVKSPMNRELVATYEVTLSVIDNASDLPERSVSVPNAKLTVNVLDVNDNTPQFKPFGITYYMERILEGATPGTTLIAVAAVDPDKGLNGLVTYTLLDLVPPGYVQLEDSSAGKVIANRTVDYEEVHWLNFTVRASDNGSPPRAAEIPVYLEIVDINDNNPIFDQPSYQEAVFEDVPVGTIILTVTATDADSGNFALIEYSLGDGESKFAINPTTGDIYVLSSLDREKKDHYILTALAKDNPGDVASNRRENSVQVVIQVLDVNDCRPQFSKPQFSTSVYENEPAGTSVITMMATDQDEGPNGELTYSLEGPGVEAFHVDMDSGLVTTQRPLQSYEKFSLTVVATDGGEPPLWGTTMLLVEVIDVNDNRPVFVRPPNGTILHIREEIPLRSNVYEVYATDKDEGLNGAVRYSFLKTAGNRDWEFFIIDPISGLIQTAQRLDRESQAVYSLILVASDLGQPVPYETMQPLQVALEDIDDNEPLFVRPPKGSPQYQLLTVPEHSPRGTLVGNVTGAVDADEGPNAIVYYFIAAGNEEKNFHLQPDGCLLVLRDLDREREAIFSFIVKASSNRSWTPPRGPSPTLDLVADLTLQEVRVVLEDINDQPPRFTKAEYTAGVATDAKVGSELIQVLALDADIGNNSLVFYSILAIHYFRALANDSEDVGQVFTMGSMDGILRTFDLFMAYSPGYFVVDIVARDLAGHNDTAIIGIYILRDDQRVKIVINEIPDRVRGFEEEFIHLLSNITGAIVNTDNVQFHVDKKGRVNFAQTELLIHVVNRDTNRILDVDRVIQMIDENKEQLRNLFRNYNVLDVQPAISVRLPDDMSALQMAIIVLAILLFLAAMLFVLMNWYYRTVHKRKLKAIVAGSAGNRGFIDIMDMPNTNKYSFDGANPVWLDPFCRNLELAAQAEHEDDLPENLSEIADLWNSPTRTHGTFGREPAAVKPDDDRYLRAAIQEYDNIAKLGQIIREGPIKGSLLKVVLEDYLRLKKLFAQRMVQKASSCHSSISELIQTELDEEPGDHSPGQGSLRFRHKPPVELKGPDGIHVVHGSTGTLLATDLNSLPEEDQKGLGRSLETLTAAEATAFERNARTESAKSTPLHKLRDVIMETPLEITEL

SEQ ID NO: 26075 - protein, 530 aa, Homo sapiens
  REGION 1..530: note = ENSP00000473454
MGRHVATSCHVAWLLVLISGCWGQVNRLPFFTNHFFDTYLLISEDTPVGSSVTQLLAQDMDNDPLVFGVSGEEASRFFAVEPDTGVVWLRQPLDRETKSEFTVEFSVSDHQGVITRKVNIQVGDVNDNAPTFHNQPYSVRIPENTPVGTPIFIVNATDPDLGAGGSVLYSFQPPSQFFAIDSARGIVTVIRELDYETTQAYQLTVNATDQDKTRPLSTLANLAIIITDVQDMDPIFINLPYSTNIYEHSPPGTTVRIITAIDQDKGRPRGIGYTIVSGNTNSIFALDYISGVLTLNGLLDRENPLYSHGFILTVKGTELNDDRTPSDATVTTTFNILVIDINDNAPEFNSSEYSVAITELAQVGFALPLFIQVVDKDENLGLNSMFEVYLVGNNSHHFIISPTSVQGKADIRIRVAIPLDYETVDRYDFDLFANESVPDHVGYAKVKITLINENDNRPIFSQPLYNISLYENVTVGTSVLTVLVSPRFTAGPLSSPGPTVVRHPEGFCPRDLSNQGRRHPQIPELCLLVY

SEQ ID NO: 26076 - protein, 1061 aa, Homo sapiens
  REGION 1..1061: note = ENSP00000299366
MGRHVATSCHVAWLLVLISGCWGQVNRLPFFTNHFFDTYLLISEDTPVGSSVTQLLAQDMDNDPLVFGVSGEEASRFFAVEPDTGVVWLRQPLDRETKSEFTVEFSVSDHQGVITRKVNIQVGDVNDNAPTFHNQPYSVRIPENTPVGTPIFIVNATDPDLGAGGSVLYSFQPPSQFFAIDSARGIVTVIRELDYETTQAYQLTVNATDQDKTRPLSTLANLAIIITDVQDMDPIFINLPYSTNIYEHSPPGTTVRIITAIDQDKGRPRGIGYTIVSGNTNSIFALDYISGVLTLNGLLDRENPLYSHGFILTVKGTELNDDRTPSDATVTTTFNILVIDINDNAPEFNSSEYSVAITELAQVGFALPLFIQVVDKDENLGLNSMFEVYLVGNNSHHFIISPTSVQGKADIRIRVAIPLDYETVDRYDFDLFANESVPDHVGYAKVKITLINENDNRPIFSQPLYNISLYENVTVGTSVLTVLATDNDAGTFGEVSYFFSDDPDRFSLDKDTGLIMLIARLDYELIQRFTLTIIARDGGGEETTGRVRINVLDVNDNVPTFQKDAYVGALRENEPSVTQLVRLRATDEDSPPNNQITYSIVSASAFGSYFDISLYEGYGVISVSRPLDYEQISNGLIYLTVMAMDAGNPPLNSTVPVTIEVFDENDNPPTFSKPAYFVSVVENIMAGATVLFLNATDLDRSREYGQESIIYSLEGSTQFRINARSGEITTTSLLDRETKSEYILIVRAVDGGVGHNQKTGIATVNITLLDINDNHPTWKDAPYYINLVEMTPPDSDVTTVVAVDPDLGENGTLVYSIQPPNKFYSLNSTTGKIRTTHAMLDRENPDPHEAELMRKIVVSVTDCGRPPLKATSSATVFVNLLDLNDNDPTFQNLPFVAEVLEGIPAGVSIYQVVAIDLDEGLNGLVSYRMPVGMPRMDFLINSSSGVVVTTTELDRERIAEYQLRVVASDAGTPTKSSTSTLTIHVLDVNDETPTFFPAVYNVSVSEDVPREFRVVWLNCTDNDVGLNAELSYFITGAAPASAHLCRPPGALPPPLPDGQPD

SEQ ID NO: 26077 - protein, 1381 aa, Homo sapiens
  REGION 1..1381: note = ENSP00000482036
MGRHVATSCHVAWLLVLISGCWGQVNRLPFFTNHFFDTYLLISEDTPVGSSVTQLLAQDMDNDPLVFGVSGEEASRFFAVEPDTGVVWLRQPLDRETKSEFTVEFSVSDHQGVITRKVNIQVGDVNDNAPTFHNQPYSVRIPENTPVGTPIFIVNATDPDLGAGGSVLYSFQPPSQFFAIDSARGIVTVIRELDYETTQAYQLTVNATDQDKTRPLSTLANLAIIITDVQDMDPIFINLPYSTNIYEHSPPGTTVRIITAIDQDKGRPRGIGYTIVSGNTNSIFALDYISGVLTLNGLLDRENPLYSHGFILTVKGTELNDDRTPSDATVTTTFNILVIDINDNAPEFNSSEYSVAITELAQVGFALPLFIQVVDKDENLGLNSMFEVYLVGNNSHHFIISPTSVQGKADIRIRVAIPLDYETVDRYDFDLFANESVPDHVGYAKVKITLINENDNRPIFSQPLYNISLYENVTVGTSVLTVLATDNDAGTFGEVSYFFSDDPDRFSLDKDTGLIMLIARLDYELIQRFTLTIIARDGGGEETTGRVRINVLDVNDNVPTFQKDAYVGALRENEPSVTQLVRLRATDEDSPPNNQITYSIVSASAFGSYFDISLYEGYGVISVSRPLDYEQISNGLIYLTVMAMDAGNPPLNSTVPVTIEVFDENDNPPTFSKPAYFVSVVENIMAGATVLFLNATDLDRSREYGQESIIYSLEGSTQFRINARSGEITTTSLLDRETKSEYILIVRAVDGGVGHNQKTGIATVNITLLDINDNHPTWKDAPYYINLVEMTPPDSDVTTVVAVDPDLGENGTLVYSIQPPNKFYSLNSTTGKIRTTHAMLDRENPDPHEAELMRKIVVSVTDCGRPPLKATSSATVFVNLLDLNDNDPTFQNLPFVAEVLEGIPAGVSIYQVVAIDLDEGLNGLVSYRMPVGMPRMDFLINSSSGVVVTTTELDRERIAEYQLRVVASDAGTPTKSSTSTLTIHVLDVNDETPTFFPAVYNVSVSEDVPREFRVVWLNCTDNDVGLNAELSYFITGGNVDGKFSVGYRDAVVRTVVGLDRETTAAYMLILEAIDNGPVGKRHTGTATVFVTVLDVNDNRPIFLQSSYEASVPEDIPEGHSILQLKATDADEGEFGRVWYRILHGNHGNNFRIHVSNGLLMRGPRPLDRERNSSHVLIVEAYNHDLGPMRSSVRVIVYVEDINDEAPVFTQQQYSRLGLRETAGIGTSVIVVQATDRDSGDGGLVNYRILSGAEGKFEIDESTGLIITVNYLDYETKTSYMMNVSATDQAPPFNQGFCSVYITLLNELDEAVQFSNASYEAAILENLALGTEIVRVQAYSIDNLNQITYRFNAYTSTQAKALFKIDAITVRGWGQGAPFLPI

SEQ ID NO: 26078 - protein, 954 aa, Homo sapiens
  REGION 1..954: note = ENSP00000473539
  VARIANT 1: note = Any amino acid
XDKTRPLSTLANLAIIITDVQDMDPIFINLPYSTNIYEHSPPGTTVRIITAIDQDKGRPRGIGYTIVSGNTNSIFALDYISGVLTLNGLLDRENPLYSHGFILTVKGTELNDDRTPSDATVTTTFNILVIDINDNAPEFNSSEYSVAITELAQVGFALPLFIQVVDKDEENGGWLQGRPEGVGEGLHVQNLGLNSMFEVYLVGNNSHHFIISPTSVQGKADIRIRVAIPLDYETVDRYDFDLFANESVPDHVGYAKVKITLINENDNRPIFSQPLYNISLYENVTVGTSVLTVLATDNDAGTFGEVSYFFSDDPDRFSLDKDTGLIMLIARLDYELIQRFTLTIIARDGGGEETTGRVRINVLDVNDNVPTFQKDAYVGALRENEPSVTQLVRLRATDEDSPPNNQITYSIVSASAFGSYFDISLYEGYGVISVSRPLDYEQISNGLIYLTVMAMDAGNPPLNSTVPVTIEVFDENDNPPTFSKPAYFVSVVENIMAGATVLFLNATDLDRSREYGQESIIYSLEGSTQFRINARSGEITTTSLLDRETKSEYILIVRAVDGGVGHNQKTGIATVNITLLDINDNHPTWKDAPYYINLVEMTPPDSDVTTVVAVDPDLGENGTLVYSIQPPNKFYSLNSTTGKIRTTHAMLDRENPDPHEAELMRKIVVSVTDCGRPPLKATSSATVFVNLLDLNDNDPTFQNLPFVAEVLEGIPAGVSIYQVVAIDLDEGLNGLVSYRMPVGMPRMDFLINSSSGVVVTTTELDRERIAEYQLRVVASDAGTPTKSSTSTLTIHVLDVNDETPTFFPAVYNVSVSEDVPREFRVVWLNCTDNDVGLNAELSYFITGGNVDGKFSVGYRDAVVRTVVGLDRETTAAYMLILEAIDNGPVGKRHTGTATVFVTVLDVNDNRPIFLQSSYEASVPEDIPEGHSILQAAPALASEGSLLDHLQSLPD

SEQ ID NO: 26079 - protein, 165 aa, Homo sapiens
  REGION 1..165: note = ENSP00000480146
  VARIANT 1: note = Any amino acid
XDNAPEFNSSEYSVAITELAQVGFALPLFIQVVDKDEGLNSMFEVYLVGNNSHHFIISPTSVQGKADIRIRVAIPLDYETVDRYDFDLFANESVPDHVGYAKVKITLINENDNRPIFSQPLYNISLYENVTVGTSVLTVLWEKFFCSNSSRFSSAQLVVSSWNQL

SEQ ID NO: 26080 - protein, 803 aa, Homo sapiens
  REGION 1..803: note = ENSP00000388894
  VARIANT 1: note = Any amino acid
XDIRIRVAIPLDYETVDRYDFDLFANESVPDHVGYAKVKITLINENDNRPIFSQPLYNISLYENVTVGTSVLTVLATDNDAGTFGEVSYFFSDDPDRFSLDKDTGLIMLIARLDYELIQRFTLTIIARDGGGEETTGRVRINVLDVNDNVPTFQKDAYVGALRENEPSVTQLVRLRATDEDSPPNNQITYSIVSASAFGSYFDISLYEGYGVISVSRPLDYEQISNGLIYLTVMAMDAGNPPLNSTVPVTIEVFDENDNPPTFSKPAYFVSVVENIMAGATVLFLNATDLDRSREYGQESIIYSLEGSTQFRINARSGEITTTSLLDRETKSEYILIVRAVDGGVGHNQKTGIATVNITLLDINDNHPTWKDAPYYINLVEMTPPDSDVTTVVAVDPDLGENGTLVYSIQPPNKFYSLNSTTGKIRTTHAMLDRENPDPHEAELMRKIVVSVTDCGRPPLKATSSATVFVNLLDLNDNDPTFQNLPFVAEVLEGIPAGVSIYQVVAIDLDEGLNGLVSYRMPVGMPRMDFLINSSSGVVVTTTELDRERIAEYQLRVVASDAGTPTKSSTSTLTIHVLDVNDETPTFFPAVYNVSVSEDVPREFRVVWLNCTDNDVGLNAELSYFITGGNVDGKFSVGYRDAVVRTVVGLDRETTAAYMLILEAIDNGPVGKRHTGTATVFVTVLDVNDNRPIFLQSSYEASVPEDIPEGHSILQEDLASPCISPAPPRRAFQSSGEKETSQFPGKELRREPGPSKAQNRAAFTEPLAEAPLLGSKQAQEERAPLPREQAQQLQGSEGEKGGP

SEQ ID NO: 26081 - protein, 1079 aa, Homo sapiens
  REGION 1..1079: note = ENSP00000478374
MVKSPMNRELVATYEVTLSVIDNASDLPERSVSVPNAKLTVNVLDVNDNTPQFKPFGITYYMERILEGATPGTTLIAVAAVDPDKGLNGLVTYTLLDLVPPGYVQLEDSSAGKVIANRTVDYEEVHWLNFTVRASDNGSPPRAAEIPVYLEIVDINDNNPIFDQPSYQEAVFEDVPVGTIILTVTATDADSGNFALIEYSLGDGESKFAINPTTGDIYVLSSLDREKKDHYILTALAKDNPGDVASNRRENSVQVVIQVLDVNDCRPQFSKPQFSTSVYENEPAGTSVITMMATDQDEGPNGELTYSLEGPGVEAFHVDMDSGLVTTQRPLQSYEKFSLTVVATDGGEPPLWGTTMLLVEVIDVNDNRPVFVRPPNGTILHIREEIPLRSNVYEVYATDKDEGLNGAVRYSFLKTAGNRDWEFFIIDPISGLIQTAQRLDRESQAVYSLILVASDLGQPVPYETMQPLQVALEDIDDNEPLFVRPPKGSPQYQLLTVPEHSPRGTLVGNVTGAVDADEGPNAIVYYFIAAGNEEKNFHLQPDGCLLVLRDLDREREAIFSFIVKASSNRSWTPPRGPSPTLDLVADLTLQEVRVVLEDINDQPPRFTKAEYTAGVATDAKVGSELIQVLALDADIGNNSLVFYSILAIHYFRALANDSEDVGQVFTMGSMDGILRTFDLFMAYSPGYFVVDIVARDLAGHNDTAIIGIYILRDDQRVKIVINEIPDRVRGFEEEFIHLLSNITGAIVNTDNVQFHVDKKGRVNFAQTELLIHVVNRDTNRILDVDRVIQMIDENKEQLRNLFRNYNVLDVQPAISVRLPDDMSALQMAIIVLAILLFLAAMLFVLMNWYYRTVHKRKLKAIVAGSAGNRGFIDIMDMPNTNKYSFDGANPVWLDPFCRNLELAAQAEHEDDLPENLSEIADLWNSPTRTHGTFGREPAAVKPDDDRYLRAAIQEYDNIAKLGQIIREGPIKLIQTELDEEPGDHSPGQGSLRFRHKPPVELKGPDGIHVVHGSTGTLLATDLNSLPEEDQKGLGRSLETLTAAEATAFERNARTESAKSTPLHKLRDVIMETPLEITEL

SEQ ID NO: 26082 - protein, 1114 aa, Homo sapiens
  REGION 1..1114: note = ENSP00000381768
MVKSPMNRELVATYEVTLSVIDNASDLPERSVSVPNAKLTVNVLDVNDNTPQFKPFGITYYMERILEGATPGTTLIAVAAVDPDKGLNGLVTYTLLDLVPPGYVQLEDSSAGKVIANRTVDYEEVHWLNFTVRASDNGSPPRAAEIPVYLEIVDINDNNPIFDQPSYQEAVFEDVPVGTIILTVTATDADSGNFALIEYSLGDGESKFAINPTTGDIYVLSSLDREKKDHYILTALAKDNPGDVASNRRENSVQVVIQVLDVNDCRPQFSKPQFSTSVYENEPAGTSVITMMATDQDEGPNGELTYSLEGPGVEAFHVDMDSGLVTTQRPLQSYEKFSLTVVATDGGEPPLWGTTMLLVEVIDVNDNRPVFVRPPNGTILHIREEIPLRSNVYEVYATDKDEGLNGAVRYSFLKTAGNRDWEFFIIDPISGLIQTAQRLDRESQAVYSLILVASDLGQPVPYETMQPLQVALEDIDDNEPLFVRPPKGSPQYQLLTVPEHSPRGTLVGNVTGAVDADEGPNAIVYYFIAAGNEEKNFHLQPDGCLLVLRDLDREREAIFSFIVKASSNRSWTPPRGPSPTLDLVADLTLQEVRVVLEDINDQPPRFTKAEYTAGVATDAKVGSELIQVLALDADIGNNSLVFYSILAIHYFRALANDSEDVGQVFTMGSMDGILRTFDLFMAYSPGYFVVDIVARDLAGHNDTAIIGIYILRDDQRVKIVINEIPDRVRGFEEEFIHLLSNITGAIVNTDNVQFHVDKKGRVNFAQTELLIHVVNRDTNRILDVDRVIQMIDENKEQLRNLFRNYNVLDVQPAISVRLPDDMSALQMAIIVLAILLFLAAMLFVLMNWYYRTVHKRKLKAIVAGSAGNRGFIDIMDMPNTNKYSFDGANPVWLDPFCRNLELAAQAEHEDDLPENLSEIADLWNSPTRTHGTFGREPAAVKPDDDRYLRAAIQEYDNIAKLGQIIREGPIKGSLLKVVLEDYLRLKKLFAQRMVQKASSCHSSISELIQTELDEEPGDHSPGQGSLRFRHKPPVELKGPDGIHVVHGSTGTLLATDLNSLPEEDQKGLGRSLETLTAAEATAFERNARTESAKSTPLHKLRDVIMETPLEITEL

SEQ ID NO: 26083 - protein, 3354 aa, Homo sapiens
  REGION 1..3354: note = ENSP00000483211
MGRHVATSCHVAWLLVLISGCWGQVNRLPFFTNHFFDTYLLISEDTPVGSSVTQLLAQDMDNDPLVFGVSGEEASRFFAVEPDTGVVWLRQPLDRETKSEFTVEFSVSDHQGVITRKVNIQVGDVNDNAPTFHNQPYSVRIPENTPVGTPIFIVNATDPDLGAGGSVLYSFQPPSQFFAIDSARGIVTVIRELDYETTQAYQLTVNATDQDKTRPLSTLANLAIIITDVQDMDPIFINLPYSTNIYEHSPPGTTVRIITAIDQDKGRPRGIGYTIVSGNTNSIFALDYISGVLTLNGLLDRENPLYSHGFILTVKGTELNDDRTPSDATVTTTFNILVIDINDNAPEFNSSEYSVAITELAQVGFALPLFIQVVDKDETQGLNSMFEVYLVGNNSHHFIISPTSVQGKADIRIRVAIPLDYETVDRYDFDLFANESVPDHVGYAKVKITLINENDNRPIFSQPLYNISLYENVTVGTSVLTVLATDNDAGTFGEVSYFFSDDPDRFSLDKDTGLIMLIARLDYELIQRFTLTIIARDGGGEETTGRVRINVLDVNDNVPTFQKDAYVGALRENEPSVTQLVRLRATDEDSPPNNQITYSIVSASAFGSYFDISLYEGYGVISVSRPLDYEQISNGLIYLTVMAMDAGNPPLNSTVPVTIEVFDENDNPPTFSKPAYFVSVVENIMAGATVLFLNATDLDRSREYGQESIIYSLEGSTQFRINARSGEITTTSLLDRETKSEYILIVRAVDGGVGHNQKTGIATVNITLLDINDNHPTWKDAPYYINLVEMTPPDSDVTTVVAVDPDLGENGTLVYSIQPPNKFYSLNSTTGKIRTTHAMLDRENPDPHEAELMRKIVVSVTDCGRPPLKATSSATVFVNLLDLNDNDPTFQNLPFVAEVLEGIPAGVSIYQVVAIDLDEGLNGLVSYRMPVGMPRMDFLINSSSGVVVTTTELDRERIAEYQLRVVASDAGTPTKSSTSTLTIHVLDVNDETPTFFPAVYNVSVSEDVPREFRVVWLNCTDNDVGLNAELSYFITGGNVDGKFSVGYRDAVVRTVVGLDRETTAAYMLILEAIDNGPVGKRHTGTATVFVTVLDVNDNRPIFLQSSYEASVPEDIPEGHSILQLKATDADEGEFGRVWYRILHGNHGNNFRIHVSNGLLMRGPRPLDRERNSSHVLIVEAYNHDLGPMRSSVRVIVYVEDINDEAPVFTQQQYSRLGLRETAGIGTSVIVVQATDRDSGDGGLVNYRILSGAEGKFEIDESTGLIITVNYLDYETKTSYMMNVSATDQAPPFNQGFCSVYITLLNELDEAVQFSNASYEAAILENLALGTEIVRVQAYSIDNLNQITYRFNAYTSTQAKALFKIDAITGVITVQGLVDREKGDFYTLTVVADDGGPKVDSTVQVYITVLDENDNSPRFDFTSDSAVSIPEDCPVGQRVATVKAWDPDAGSNGQVVFSLASGNIAGAFEIVTTNDSIGEVFVARPLDREELDHYILQVVASDRGTPPRKKDHILQVTILDINDNPPVIESPFGYNVSVNENVGGGTAVVQVRATDRDIGINSVLSYYITEGNKDMAFRMDRISGEIATRPAPPDRERQSFYHLVATVEDEGTPTLSATTHVYVTIVDENDNAPMFQQPHYEVLLDEGPDTLNTSLITIQALDLDEGPNGTVTYAIVAGNIVNTFRIDRHMGVITAAKELDYEISHGRYTLIVTATDQCPILSHRLTSTTTVLVNVNDINDNVPTFPRDYEGPFEVTEGQPGPRVWTFLAHDRDSGPNGQVEYSIMDGDPLGEFVISPVEGVLRVRKDVELDRETIAFYNLTICARDRGMPPLSSTMLVGIRVLDINDNDPVLLNLPMNITISENSPVSSFVAHVLASDADSGCNARLTFNITAGNRERAFFINATTGIVTVNRPLDRERIPEYKLTISVKDNPENPRIARRDYDLLLIFLSDENDNHPLFTKSTYQAEVMENSPAGTPLTVLNGPILALDADQDIYAVVTYQLLGAQSGLFDINSSTGVVTVRSGVIIDREAFSPPILELLLLAEDIGLLNSTAHLLITILDDNDNRPTFSPATLTVHLLENCPPGFSVLQVTATDEDSGLNGELVYRIEAGAQDRFLIHLVTGVIRVGNATIDREEQESYRLTVVATDRGTVPLSGTAIVTILIDDINDSRPEFLNPIQTVSVLESAEPGTVIANITAIDHDLNPKLEYHIVGIVAKDDTDRLVPNQEDAFAVNINTGSVMVKSPMNRELVATYEVTLSVIDNASDLPERSVSVPNAKLTVNVLDVNDNTPQFKPFGITYYMERILEGATPGTTLIAVAAVDPDKGLNGLVTYTLLDLVPPGYVQLEDSSAGKVIANRTVDYEEVHWLNFTVRASDNGSPPRAAEIPVYLEIVDINDNNPIFDQPSYQEAVFEDVPVGTIILTVTATDADSGNFALIEYSLGDGESKFAINPTTGDIYVLSSLDREKKDHYILTALAKDNPGDVASNRRENSVQVVIQVLDVNDCRPQFSKPQFSTSVYENEPAGTSVITMMATDQDEGPNGELTYSLEGPGVEAFHVDMDSGLVTTQRPLQSYEKFSLTVVATDGGEPPLWGTTMLLVEVIDVNDNRPVFVRPPNGTILHIREEIPLRSNVYEVYATDKDEGLNGAVRYSFLKTAGNRDWEFFIIDPISGLIQTAQRLDRESQAVYSLILVASDLGQPVPYETMQPLQVALEDIDDNEPLFVRPPKGSPQYQLLTVPEHSPRGTLVGNVTGAVDADEGPNAIVYYFIAAGNEEKNFHLQPDGCLLVLRDLDREREAIFSFIVKASSNRSWTPPRGPSPTLDLVADLTLQEVRVVLEDINDQPPRFTKAEYTAGVATDAKVGSELIQVLALDADIGNNSLVFYSILAIHYFRALANDSEDVGQVFTMGSMDGILRTFDLFMAYSPGYFVVDIVARDLAGHNDTAIIGIYILRDDQRVKIVINEIPDRVRGFEEEFIHLLSNITGAIVNTDNVQFHVDKKGRVNFAQTELLIHVVNRDTNRILDVDRVIQMIDENKEQLRNLFRNYNVLDVQPAISVRLPDDMSALQMAIIVLAILLFLAAMLFVLMNWYYRTVHKRKLKAIVAGSAGNRGFIDIMDMPNTNKYSFDGANPVWLDPFCRNLELAAQAEHEDDLPENLSEIADLWNSPTRTHGTFGREPAAVKPDDDRYLRAAIQEYDNIAKLGQIIREGPIKGSLLKVVLEDYLRLKKLFAQRMVQKASSCHSSISELIQTELDEEPGDHSPGQGSLRFRHKPPVELKGPDGIHVVHGSTGTLLATDLNSLPEEDQKGLGRSLETLTAAEATAFERNARTESAKSTPLHKLRDVIMETPLEITEL

SEQ ID NO: 26084 - protein, 445 aa, Homo sapiens
  REGION 1..445: note = ENSP00000381822
MDNDPLVFGVSGEEASRFFAVEPDTGVVWLRQPLDRETKSEFTVEFSVSDHQGVITRKVNIQVGDVNDNAPTFHNQPYSVRIPENTPVGTPIFIVNATDPDLGAGGSVLYSFQPPSQFFAIDSARGIVTVIRELDYETTQAYQLTVNALAIIITNLPYSTNIYEHSPPGTTVRIITAIDQDKGRPRGIGYTIVSGNTNSIFALDYISGVLTLNGLLDRENPLYSHGFILTVKGTELNDDRTPSDATVTTTFNILVIDINDNAPEFNSSEYSVAITELAQVGFALPLFIQVVDKDEGLNSMFEVYLVGNNSHHFIISPTSVQGKADIRIRVAIPLDYETVDRYDFDLFANESVPDHVGYAKVKITLINENDNRPIFSQPLYNISLYENVTVGTSVLTVLVSPRFTAGPLSSPGPTVVRHPEGFCPRDLSNQGRRHPQIPELCLLVY

SEQ ID NO: 26085 - protein, 1380 aa, Homo sapiens
  REGION 1..1380: note = ENSP00000381789
MGRHVATSCHVAWLLVLISGCWGQVNRLPFFTNHFFDTYLLISEDTPVGSSVTQLLAQDMDNDPLVFGVSGEEASRFFAVEPDTGVVWLRQPLDRETKSEFTVEFSVSDHQGVITRKVNIQVGDVNDNAPTFHNQPYSVRIPENTPVGTPIFIVNATDPDLGAGGSVLYSFQPPSQFFAIDSARGIVTVIRELDYETTQAYQLTVNATDQDKTRPLSTLANLAIIITDVQDMDPIFINLPYSTNIYEHSPPGTTVRIITAIDQDKGRPRGIGYTIVSGNTNSIFALDYISGVLTLNGLLDRENPLYSHGFILTVKGTELNDDRTPSDATVTTTFNILVIDINDNAPEFNSSEYSVAITELAQVGFALPLFIQVVDKDENLGLNSMFEVYLVGNNSHHFIISPTSVQGKADIRIRVAIPLDYETVDRYDFDLFANESVPDHVGYAKVKITLINENDNRPIFSQPLYNISLYENVTVGTSVLTVLATDNDAGTFGEVSYFFSDDPDRFSLDKDTGLIMLIARLDYELIQRFTLTIIARDGGGEETTGRVRINVLDVNDNVPTFQKDAYVGALRENEPSVTQLVRLRATDEDSPPNNQITYSIVSASAFGSYFDISLYEGYGVISVSRPLDYEQISNGLIYLTVMAMDAGNPPLNSTVPVTIEVFDENDNPPTFSKPAYFVSVVENIMAGATVLFLNATDLDRSREYGQESIIYSLEGSTQFRINARSGEITTTSLLDRETKSEYILIVRAVDGGVGHNQKTGIATVNITLLDINDNHPTWKDAPYYINLVEMTPPDSDVTTVVAVDPDLGENGTLVYSIQPPNKFYSLNSTTGKIRTTHAMLDRENPDPHEAELMRKIVVSVTDCGRPPLKATSSATVFVNLLDLNDNDPTFQNLPFVAEVLEGIPAGVSIYQVVAIDLDEGLNGLVSYRMPVGMPRMDFLINSSSGVVVTTTELDRERIAEYQLRVVASDAGTPTKSSTSTLTIHVLDVNDETPTFFPAVYNVSVSEDVPREFRVVWLNCTDNDVGLNAELSYFITGGNVDGKFSVGYRDAVVRTVVGLDRETTAAYMLILEAIDNGPVGKRHTGTATVFVTVLDVNDNRPIFLQSSYEASVPEDIPEGHSILQAATDADEGEFGRVWYRILHGNHGNNFRIHVSNGLLMRGPRPLDRERNSSHVLIVEAYNHDLGPMRSSVRVIVYVEDINDEAPVFTQQQYSRLGLRETAGIGTSVIVVQATDRDSGDGGLVNYRILSGAEGKFEIDESTGLIITVNYLDYETKTSYMMNVSATDQAPPFNQGFCSVYITLLNELDEAVQFSNASYEAAILENLALGTEIVRVQAYSIDNLNQITYRFNAYTSTQAKALFKIDAITVRGWGQGAPFLPI

SEQ ID NO: 26086 - protein, 832 aa, Homo sapiens
  REGION 1..832: note = ENSP00000339390
MAMRSGRHPSLLLLLVLLLWLLQVSIIDSVQQETDDLTKQTKEKIYQPLRRSKRRWVITTLELEEEDPGPFPKLIGELFNNMSYNMSLMYLISGPGVDEYPEIGLFSLEDHENGRIYVHRPVDREMTPSFTVYFDVVERSTGKIVDTSLIFNIRISDVNDHAPQFPEKEFNITVQENQSAGQPIFQMLAVDLDEENTPNSQVLYFLISQTPLLKESGFRVDRLSGEIRLSGCLDYETAPQFTLLIRARDCGEPSLSSTTTVHVDVQEGNNHRPAFTQENYKVQIPEGRASQGVLRLLVQDRDSPFTSAWRAKFNILHGNEEGHFDISTDPETNEGILNVIKPLDYETRPAQSLIIVVENEERLVFCERGKLQPPRKAAASATVSVQVTDANDPPAFHPQSFIVNKEEGARPGTLLGTFNAMDPDSQIRYELVHDPANWVSVDKNSGVVITVEPIDRESPHVNNSFYVIIIHAVDDGFPPQTATGTLMLFLSDINDNVPTLRPRSRYMEVCESAVHEPLHIEAEDPDLEPFSDPFTFELDNTWGNAEDTWKLGRNWGQSVELLTLRSLPRGNYLVPLFIGDKQGLSQKQTVHVRICPCASGLTCVELADAEVGLHVGALFPVCAAFVALAVALLFLLRCYFVLEPKRHGCSVSNDEGHQTLVMYNAESKGTSAQTWSDVEGQRPALLICTAAAGPTQGVKDLEEVPPSAASQSAQARCALGSWGYGKPFEPRSVKNIHSTPAYPDATMHRQLLAPVEGRMAETLNQKLHVANVLEDDPGYLPHVYSEEGECGGAPSLSSLASLEQELQPDLLDSLGSKATPFEEIYSESGVPS

SEQ ID NO: 26087 - protein, 444 aa, Homo sapiens
  REGION 1..444: note = ENSP00000360030
  VARIANT 1: note = Any amino acid
XRPGTLLGTFNAMDPDSQIRYELVHDPANWVSVDKNSGVVITVEPIDRESPHVNNSFYVIIIHAVDDGFPPQTATGTLMLFLSDINDNVPTLRPRSRYMEVCESAVHEPLHIEAEDPDLEPFSDPFTFELDNTWGNAEDTWKLGRNWGQSVELLTLRSLPRGNYLVPLFIGDKQGLSQKQTVHVRICPCASGLTCVELADAEVGLHVGALFPVCAAFVALAVALLFLLRCYFVLEPKRHGCSVSNDEGHQTLVMYNAESKGTSAQTWSDVEGQRPALLICTAAAGPTQGVKAYPDATMHRQLLAPVEGRMAETLNQSKERNRFSLSRGCIIPQGRATAGRGLPQDIYKEMMPRRLTQTGKRKHGALARTPSFKKVVYDHKEDEENKAGRKQRSHLFKVMQLRNEQGGVRVQSAHSPSPLNKKACFPGDYRGESAGGHNCRAVSG

SEQ ID NO: 26088 - protein, 124 aa, Homo sapiens
  REGION 1..124: note = ENSP00000244049
MKPLIWTWSDVEGQRPALLICTAAAGPTQGVKAYPDATMHRQLLAPVEGRMAETLNQKLHVANVLEDDPGYLPHVYSEEGECGGAPSLSSLASLEQELQPDLLDSLGSKATPFEEIYSESGVPS

SEQ ID NO: 26089 - protein, 165 aa, Homo sapiens
  REGION 1..165: note = ENSP00000310845
MKPLIWTWSDVEGQRPALLICTAAAGPTQGVKDLEEVPPSAASQSAQARCALGSWGYGKPFEPRSVKNIHSTPAYPDATMHRQLLAPVEGRMAETLNQKLHVANVLEDDPGYLPHVYSEEGECGGAPSLSSLASLEQELQPDLLDSLGSKATPFEEIYSESGVPS

SEQ ID NO: 26090 - protein, 80 aa, Homo sapiens
  REGION 1..80: note = ENSP00000407939
MKPLIWTWSDVEGQRPALLICTAAAGPTQGVKGYGKPFEPRSVKNIHSTPAYPDATMHRQLLAPVEGRMAETLNQKLHVA

SEQ ID NO: 26091 - protein, 566 aa, Homo sapiens
  REGION 1..566: note = ENSP00000486680
KVQQYTVIVQATDMEGNLNYGLSNTATAIITVTDVNDNPPEFTASTFAGEVPENRVETVVANLTVMDRDQPHSPNWNAVYRIISGDPSGHFSVRTDPVTNEGMVTVVKAVDYELNRAFMLTVMVSNQAPLASGIQMSFQSTAGVTISIMDINEAPYFPSNHKLIRLEEGVPPGTVLTTFSAVDPDRFMQQAVRYSKLSDPASWLHINATNGQITTAAVLDRESLYTKNNVYEATFLAADNGIPPASGTGTLQIYLIDINDNAPELLPKEAQICERPNLNAINITAADADVDPNIGPYVFELPFVPAAVRKNWTITRLNGDYAQLSLRILYLEAGMYDVPIIVTDSGNPPLSNTSIIKVKVCPCDDNGDCTTIGAVAAAGLGTGAIVAILICILILLTMVLLFVMWMKRREKERHTKQLLIDPEDDVRDNILKYDEEGGGEEDQDYDLSQLQQPEAMGHVPSKAPGVRRVDERPVGAEPQYPIRPMVPHPGDIGDFINEGLRAADNDPTAPPYDSLLVFDYEGSGSTAGSVSSLNSSSSGDQDYDYLNDWGPRFKKLADMYGGGEED

SEQ ID NO: 26092 - protein, 566 aa, Homo sapiens; identical to SEQ ID NO: 26091
  REGION 1..566: note = ENSP00000487355

SEQ ID NO: 26093 - protein, 566 aa, Homo sapiens; identical to SEQ ID NO: 26091
  REGION 1..566: note = ENSP00000486568

SEQ ID NO: 26094 - protein, 916 aa, Homo sapiens
  REGION 1..916: note = ENSP00000484928
MTAGAGVLLLLLSLSGALRAHNEDLTTRETCKAGFSEDDYTALISQNILEGEKLLQVKFSSCVGTKGTQYETNSMDFKVGADGTVFATRELQVPSEQVAFTVTAWDSQTAEKWDAVVRLLVAQTSSPHSGHKPQKGKKVVALDPSPPPKDTLLPWPQHQNANGLRRRKRDWVIPPINVPENSRGPFPQQLVRIRSDKDNDIPIRYSITGVGADQPPMEVFSIDSMSGRMYVTRPMDREEHASYHLRAHAVDMNGNKVENPIDLYIYVIDMNDNRPEFINQVYNGSVDEGSKPGTYVMTVTANDADDSTTANGMVRYRIVTQTPQSPSQNMFTINSETGDIVTVAAGLDREKVQQYTVIVQATDMEGNLNYGLSNTATAIITVTDVNDNPPEFTASTFAGEVPENRVETVVANLTVMDRDQPHSPNWNAVYRIISGDPSGHFSVRTDPVTNEGMVTVVKAVDYELNRAFMLTVMVSNQAPLASGIQMSFQSTAGVTISIMDINEAPYFPSNHKLIRLEEGVPPGTVLTTFSAVDPDRFMQQAVRYSKLSDPASWLHINATNGQITTAAVLDRESLYTKNNVYEATFLAADNGIPPASGTGTLQIYLIDINDNAPELLPKEAQICEKPNLNAINITAADADVDPNIGPYVFELPFVPAAVRKNWTITRLNGDYAQLSLRILYLEAGMYDVPIIVTDSGNPPLSNTSIIKVKVCPCDDNGDCTTIGAVAAAGLGTGAIVAILICILILLTMVLLFVMWMKRREKERHTKQLLIDPEDDVRDNILKYDEEGGGEEDQDYDLSQLQQPEAMGHVPSKAPGVRRVDERPVGAEPQYPIRPMVPHPGDIGDFINEGLRAADNDPTAPPYDSLLVFDYEGSGSTAGSVSSLNSSSSGDQDYDYLNDWGPRFKKLADMYGGGEED

SEQ ID NO: 26095 - protein, 822 aa, Homo sapiens
  REGION 1..822: note = ENSP00000480844
MPKSTGMLHGGRENAGVKFSSCVGTKGTQYETNSMDFKPQKGKKVVALDPSPPPKDTLLPWPQHQNANGLRRRKRDWVIPPINVPENSRGPFPQQLVRIRSDKDNDIPIRYSITGVGADQPPMEVFSIDSMSGRMYVTRPMDREEHASYHLRAHAVDMNGNKVENPIDLYIYVIDMNDNRPEFINQVYNGSVDEGSKPGTYVMTVTANDADDSTTANGMVRYRIVTQTPQSPSQNMFTINSETGDIVTVAAGLDREKVQQYTVIVQATDMEGNLNYGLSNTATAIITVTDVNDNPPEFTASTFAGEVPENRVETVVANLTVMDRDQPHSPNWNAVYRIISGDPSGHFSVRTDPVTNEGMVTVVKAVDYELNRAFMLTVMVSNQAPLASGIQMSFQSTAGVTISIMDINEAPYFPSNHKLIRLEEGVPPGTVLTTFSAVDPDRFMQQAVRYSKLSDPASWLHINATNGQITTAAVLDRESLYTKNNVYEATFLAADNGIPPASGTGTLQIYLIDINDNAPELLPKEAQICEKPNLNAINITAADADVDPNIGPYVFELPFVPAAVRKNWTITRLNGDYAQLSLRILYLEAGMYDVPIIVTDSGNPPLSNTSIIKVKVCPCDDNGDCTTIGAVAAAGLGTGAIVAILICILILLTMVLLFVMWMKRREKERHTKQLLIDPEDDVRDNILKYDEEGGGEEDQDYDLSQLQQPEAMGHVPSKAPGVRRVDERPVGAEPQYPIRPMVPHPGDIGDFINEGLRAADNDPTAPPYDSLLVFDYEGSGSTAGSVSSLNSSSSGDQDYDYLNDWGPRFKKLADMYGGGEED

SEQ ID NO: 26096 - protein, 842 aa, Homo sapiens
  REGION 1..842: note = ENSP00000443301
MDFKVGADGTVFATRELQVPSEQVAFTVTAWDSQTAEKWDAVVRLLVAQTSSPHSGHKPQKGKKVVALDPSPPPKDTLLPWPQHQNANGLRRRKRDWVIPPINVPENSRGPFPQQLVRIRSDKDNDIPIRYSITGVGADQPPMEVFSIDSMSGRMYVTRPMDREEHASYHLRAHAVDMNGNKVENPIDLYIYVIDMNDNRPEFINQVYNGSVDEGSKPGTYVMTVTANDADDSTTANGMVRYRIVTQTPQSPSQNMFTINSETGDIVTVAAGLDREKVQQYTVIVQATDMEGNLNYGLSNTATAIITVTDVNDNPPEFTASTFAGEVPENRVETVVANLTVMDRDQPHSPNWNAVYRIISGDPSGHFSVRTDPVTNEGMVTVVKAVDYELNRAFMLTVMVSNQAPLASGIQMSFQSTAGVTISIMDINEAPYFPSNHKLIRLEEGVPPGTVLTTFSAVDPDRFMQQAVRYSKLSDPASWLHINATNGQITTAAVLDRESLYTKNNVYEATFLAADNGIPPASGTGTLQIYLIDINDNAPELLPKEAQICEKPNLNAINITAADADVDPNIGPYVFELPFVPAAVRKNWTITRLNGDYAQLSLRILYLEAGMYDVPIIVTDSGNPPLSNTSIIKVKVCPCDDNGDCTTIGAVAAAGLGTGAIVAILICILILLTMVLLFVMWMKRREKERHTKQLLIDPEDDVRDNILKYDEEGGGEEDQDYDLSQLQQPEAMGHVPSKAPGVRRVDERPVGAEPQYPIRPMVPHPGDIGDFINEGLRAADNDPTAPPYDSLLVFDYEGSGSTAGSVSSLNSSSSGDQDYDYLNDWGPRFKKLADMYGGGEED

SEQ ID NO: 26097 - protein, 785 aa, Homo sapiens
  REGION 1..785: note = ENSP00000319166
MKLGKVEFCHFLQLIALFLCFSGMSQAELSRSRSKPYFQSGRSRTKRSWVWNQFFVLEEYMGSDPLYVGKLHSDVDKGDGSIKYILSGEGASSIFIIDENTGDIHATKRLDREEQAYYTLRAQALDRLTNKPVEPESEFVIKIQDINDNEPKFLDGPYTAGVPEMSPVGTSVVQVTATDADDPTYGNSARVVYSILQGQPYFSVEPKTGVIKTALPNMDREAKDQYLLVIQAKDMVGQNGGLSGTTSVTVTLTDVNDNPPRFPRRSYQYNVPESLPVASVVARIKAADADIGANAEMEYKIVDGDGLGIFKISVDKETQEGIITIQKELDFEAKTSYTLRIEAANKDADPRFLSLGPFSDTTTVKIIVEDVDEPPVFSSPLYPMEVSEATQVGNIIGTVAAHDPDSSNSPVRYSIDRNTDLERYFNIDANSGVITTAKSLDRETNAIHNITVLAMESQNPSQVGRGYVAITILDINDNAPEFAMDYETTVCENAQPGQVIQKISAVDKDEPSNGHQFYFSLTTDATNNHNFSLKDNKDNTASILTRRNGFRRQEQSVYYLPIFIVDSGSPSLSSTNTLTIRVCDCDADGVAQTCNAEAYVLPAGLSTGALIAILACVLTLLVLILLIVTMRRRKKEPLIFDEERDIRENIVRYDDEGGGEEDTEAFDMAALRNLNVIRDTKTRRDVTPEIQFLSRPAFKSIPDNVIFREFIWERLKEADVDPGAPPYDSLQTYAFEGNGSVAESLSSLDSISSNSDQNYDYLSDWGPRFKRLADMYGTGQESLYS

SEQ ID NO: 26098 - protein, 630 aa, Homo sapiens
  REGION 1..630: note = ENSP00000443030
MKLGKVEFCHFLQLIALFLCFSGMSQAELSRSRSKPYFQSGRSRTKRSWVWNQFFVLEEYMGSDPLYVGKLHSDVDKGDGSIKYILSGEGASSIFIIDENTGDIHATKRLDREEQAYYTLRAQALDRLTNKPVEPESEFVIKIQDINDNEPKFLDGPYTAGVPEMSPVGTSVVQVTATDADDPTYGNSARVVYSILQGQPYFSVEPKTGVIKTALPNMDREAKDQYLLVIQAKDMVGQNGGLSGTTSVTVTLTDVNDNPPRFPRRSYQYNVPESLPVASVVARIKAADADIGANAEMEYKIVDGDGLGIFKISVDKETQEGIITIQKELDFEAKTSYTLRIEAANKDADPRFLSLGPFSDTTTVKIIVEDVDEPPVFSSPLYPMEVSEATQVGNIIGTVAAHDPDSSNSPVRYSIDRNTDLERYFNIDANSGVITTAKSLDRETNAIHNITVLAMESQNPSQVGRGYVAITILDINDNAPEFAMDYETTVCENAQPGQVIQKISAVDKDEPSNGHQFYFSLTTDATNNHNFSLKDNKDNTASILTRRNGFRRQEQSVYYLPIFIVDSGSPSLSSTNTLTIRVCDCDADGVAQTCNAEAYVLPAGLSTGALIAILACVLTLLGRYCFQGLL

SEQ ID NO: 26099 - protein, 785 aa, Homo sapiens; identical to SEQ ID NO: 26097
  REGION 1..785: note = ENSP00000381058

SEQ ID NO: 26100 - protein, 744 aa, Homo sapiens
  REGION 1..744: note = ENSP00000462018
MPERLAEMLLDLWTPLIILWITLPPCIYMAPMNQSQVLMSGSPLELNSLGEEQRILNRSKRGWVWNQMFVLEEFSGPEPILVGRLHTDLDPGSKKIKYILSGDGAGTIFQINDVTGDIHAIKRLDREEKAEYTLTAQAVDWETSKPLEPPSEFIIKVQDINDNAPEFLNGPYHATVPEMSILGTSVTNVTATDADDPVYGNSAKLVYSILEGQPYFSIEPETAIIKTALPNMDREAKEEYLVVIQAKDMGGHSGGLSGTTTLTVTLTDVNDNPPKFAQSLYHFSVPEDVVLGTAIGRVKANDQDIGENAQSSYDIIDGDGTALFEITSDAQAQDGIIRLRKPLDFETKKSYTLKVEAANVHIDPRFSGRGPFKDTATVKIVVEDADEPPVFSSPTYLLEVHENAALNSVIGQVTARDPDITSSPIRFSIDRHTDLERQFNINADDGKITLATPLDRELSVWHNITIIATEIRNHSQISRVPVAIKVLDVNDNAPEFASEYEAFLCENGKPGQVIQTVSAMDKDDPKNGHYFLYSLLPEMVNNPNFTIKKNEDNSLSILAKHNGFNRQKQEVYLLPIIISDSGNPPLSSTSTLTIRVCGCSNDGVVQSCNVEAYVLPIGLSMGALIAILACIILLLVIVVLFVTLRRHKNEPLIIKDDEDVRENIIRYDDEGGGEEDTEAFDIATLQNPDGINGFLPRWGLPIQWWEERNPIQTCLFSRSRIPRSLLFIFFHKDTKINCITQWTT

SEQ ID NO: 26101 - protein, 476 aa, Homo sapiens
  REGION 1..476: note = ENSP00000463266
MPERLAEMLLDLWTPLIILWITLPPCIYMAPMNQSQVLMSGSPLELNSLGEEQRILNRSKRGWVWNQMFVLEEFSGPEPILVGRLHTDLDPGSKKIKYILSGDGAGTIFQINDVTGDIHAIKRLDREEKAEYTLTAQAVDWETSKPLEPPSEFIIKVQDINDNAPEFLNGPYHATVPEMSILGTSVTNVTATDADDPVYGNSAKLVYSILEGQPYFSIEPETAIIKTALPNMDREAKEEYLVVIQAKDMGGHSGGLSGTTTLTVTLTDVNDNPPKFAQSLYHFSVPEDVVLGTAIGRVKANDQDIGENAQSSYDIIDGDGTALFEITSDAQAQDGIIRLRKPLDFETKKSYTLKVEAANVHIDPRFSGRGPFKDTATVKIVVEDADEPPVFSSPTYLLEVHENAALNSVIGQVTARDPDITSSPIRFSIDRHTDLERQFNINADDGKITLATPLDRELSVWHNITIIATEISHSNC

SEQ ID NO: 26102 - protein, 799 aa, Homo sapiens
  REGION 1..799: note = ENSP00000462701
MPERLAEMLLDLWTPLIILWITLPPCIYMAPMNQSQVLMSGSPLELNSLGEEQRILNRSKRGWVWNQMFVLEEFSGPEPILVGRLHTDLDPGSKKIKYILSGDGAGTIFQINDVTGDIHAIKRLDREEKAEYTLTAQAVDWETSKPLEPPSEFIIKVQDINDNAPEFLNGPYHATVPEMSILGTSVTNVTATDADDPVYGNSAKLVYSILEGQPYFSIEPETAIIKTALPNMDREAKEEYLVVIQAKDMGGHSGGLSGTTTLTVTLTDVNDNPPKFAQSLYHFSVPEDVVLGTAIGRVKANDQDIGENAQSSYDIIDGDGTALFEITSDAQAQDGIIRLRKPLDFETKKSYTLKVEAANVHIDPRFSGRGPFKDTATVKIVVEDADEPPVFSSPTYLLEVHENAALNSVIGQVTARDPDITSSPIRFSIDRHTDLERQFNINADDGKITLATPLDRELSVWHNITIIATEIRNHSQISRVPVAIKVLDVNDNAPEFASEYEAFLCENGKPGQVIQTVSAMDKDDPKNGHYFLYSLLPEMVNNPNFTIKKNEDNSLSILAKHNGFNRQKQEVYLLPIIISDSGNPPLSSTSTLTIRVCGCSNDGVVQSCNVEAYVLPIGLSMGALIAILACIILLLVIVVLFVTLRRHKNEPLIIKDDEDVRENIIRYDDEGGGEEDTEAFDIATLQNPDGINGFLPRKDIKPDLQFMPRQGLAPVPNGVDVDEFINVRLHEADNDPTAPPYDSIQIYGYEGRGSVAGSLSSLESTTSDSDQNFDYLSDWGPRFKRLGELYSVGESDKET

SEQ ID NO: 26103 - protein, 745 aa, Homo sapiens
  REGION 1..745: note = ENSP00000299345
MPERLAEMLLDLWTPLIILWITLPPCIYMAPMNQSQVLMSGSPLELNSLGEEQRILNRSKRGWVWNQMFVLEEFSGPEPILVGRLHTDLDPGSKKIKYILSGDGAGTIFQINDVTGDIHAIKRLDREEKAEYTLTAQAVDWETSKPLEPPSEFIIKVQDINDNAPEFLNGPYHATVPEMSILGTSVTNVTATDADDPVYGNSAKLVYSILEGQPYFSIEPETAIIKTALPNMDREAKEEYLVVIQAKDMGGHSGGLSGTTTLTVTLTDVNDNPPKFAQSLYHFSVPEDVVLGTAIGRVKANDQDIGENAQSSYDIIDGDGTALFEITSDAQAQDGIIRLRKPLDFETKKSYTLKVEAANVHIDPRFSGRGPFKDTATVKIVVEDADEPPVFSSPTYLLEVHENAALNSVIGQVTARDPDITSSPIRFSIDRHTDLERQFNINADDGKITLATPLDRELSVWHNITIIATEIRNHSQISRVPVAIKVLDVNDNAPEFASEYEAFLCENGKPGQVIQTVSAMDKDDPKNGHYFLYSLLPEMVNNPNFTIKKNEDNSLSILAKHNGFNRQKQEVYLLPIIISDSGNPPLSSTSTLTIRVCGCSNDGVVQSCNVEAYVLPIGLSMGALIAILACIILLLVIVVLFVTLRRHKNEPLIIKDDEDVRENIIRYDDEGGGEEDTEAFDIATLQNPDGINGFLPRKDIKPDLQFMPRLQKRVARRNITRCCLKRKTVENHGFNELRGQDQKRK

SEQ ID NO: 26104 - protein, 532 aa, Homo sapiens
  REGION 1..532: note = ENSP00000463511
MPERLAEMLLDLWTPLIILWITLPPCIYMAPMNQSQVLMSGSPLELNSLGEEQRILNRSKRGWVWNQMFVLEEFSGPEPILVGRLHTDLDPGSKKIKYILSGDGAGTIFQINDVTGDIHAIKRLDREEKAEYTLTAQAVDWETSKPLEPPSEFIIKVQDINDNAPEFLNGPYHATVPEMSILGTSVTNVTATDADDPVYGNSAKLVYSILEGQPYFSIEPETAIIKTALPNMDREAKEEYLVVIQAKDMGGHSGGLSGTTTLTVTLTDVNDNPPKFAQSLYHFSVPEDVVLGTAIGRVKANDQDIGENAQSSYDIIDGDGTALFEITSDAQAQDGIIRLRKPLDFETKKSYTLKVEAANVHIDPRFSGRGPFKDTATVKIVVEDADEPPVFSSPTYLLEVHENAALNSVIGQVTARDPDITSSPIRFSIDRHTDLERQFNINADDGKITLATPLDRELSVWHNITIIATEIRNHSQISRVPVAIKVLDVNDNAPEFASEYEAFLCENGKPGQVNISMLLMLNMFVYNCLIFD

SEQ ID NO: 26105 - protein, 425 aa, Homo sapiens
  REGION 1..425: note = ENSP00000462976
MPERLAEMLLDLWTPLIILWITLPPCIYMAPMNQSQVLMSGSPLELNSLGEEQRILNRSKRGWVWNQMFVLEEFSGPEPILVGRLHTDLDPGSKKIKYILSGDGAGTIFQINDVTGDIHAIKRLDREEKAEYTLTAQAVDWETSKPLEPPSEFIIKVQDINDNAPEFLNGPYHATVPEMSILGTSVTNVTATDADDPVYGNSAKLVYSILEGQPYFSIEPETAIIKTALPNMDREAKEEYLVVIQAKDMGGHSGGLSGTTTLTVTLTDVNDNPPKFAQSLYHFSVPEDVVLGTAIGRVKANDQDIGENAQSSYDIIDGDGTALFEITSDAQAQDGIIRLRKPLDFETKKSYTLKVEAANVHIDPRFSGRGPFKDTATVKIVVEDADEPPVFSSPTYLLEVHENAALNSVIGQVTARDPDITSSPI

SEQ ID NO: 26106 - protein, 81 aa, Homo sapiens
  REGION 1..81: note = ENSP00000462847
MPERLAEMLLDLWTPLIILWITLPPCIYMAPMNQSQVLMSGSPLELNSLGEEQRILNRSKRGWVWNQMFVLEEFSGPEPIL

SEQ ID NO: 26107 - protein, 859 aa, Homo sapiens
  REGION 1..859: note = ENSP00000485478
MRRCRWAALALGLLRLCLAQANFAPHFFDNGVGSTNGNMALFSLPEDTPVGSHVYTLNGTDPEGDPISYHISFDPSTRSVFSVDPTFGNITLVEELDREREDEIEAIISISDGLNLVAEKVVILVTDANDEAPRFIQEPYVALVPEDIPAGSIIFKVHAVDRDTGSGGSVTYFLQNLHSPFAVDRHSGVLRLQAGATLDYERSRTHYITVVAKDGGGRLHGADVVFSATTTVTVNVEDVQDMAPVFVGTPYYGYVYEDTLPGSEVLKVVAMDGDRGKPNRILYSLVNGNDGAFEINETSGAISITQSPAQLQREVYELHVQVTEMSPAGSPAAQATVPVTIRIVDLNNHPPTFYGESGPQNRFELSMNEHPPQGEILRGLKITVNDSDQGANAKFNLQLVGPRGIFRVVPQTVLNEAQVTIIVENSAAIDFEKSKVLTFKLLAVEVNTPEKFSSTADVVIQLLDTNDNVPKFDSLYYVARIPENAPGGSSVVAVTAVDPDTGPWGEVKYSTYGTGADLFLIHPSTGLIYTQPWASLDAEATARYNFYVKAEDMEGKYSVAEVFITLLDVNDHPPQFGKSVQKKTMVLGTPVKIEAIDEDAEEPNNLVDYSITHAEPANVFDINSHTGEIWLKNSIRSLDALHNITPGRDCLWSLEVQAKDRGSPSFSTTALLKIDITDAETLSRSPMAAFLIQTKDNPMKAVGVLAGTMATVVAITVLISTATFWRNKKSNKVLPMRRVLRKRPSPAPRTIRIEWLKSKSTKAATKFMLKEKPPNENCNNNSPESSLLPRAPALPPPPSVAPSTGAAQWTVPTVSGSLTPQPTQPPPKPKTMGSPVQSTLISELKQKFEKKSVHNKAYF

SEQ ID NO: 26108 - protein, 745 aa, Homo sapiens
  REGION 1..745: note = ENSP00000331063
MRRCRWAALALGLLRLCLAQANFAPHFFDNGVGSTNGNMALFSLPEDTPVGSHVYTLNGTDPEGDPISYHISFDPSTRSVFSVDPTFGNITLVEELDREREDEIEAIISISDGLNLVAEKVVILVTDANDEAPRFIQEPYVALVPEDIPAGSIIFKVHAVDRDTGSGGSVTYFLQNLHSPFAVDRHSGVLRLQAGATLDYERSRTHYITVVAKDGGGRLHGADVVFSATTTVTVNVEDVQDMAPVFVGTPYYGYVYEDTLPGSEVLKVVAMDGDRGKPNRILYSLVNGNDGAFEINETSGAISITQSPAQLQREVYELHVQVTEMSPAGSPAAQATVPVTIRIVDLNNHPPTFYGESGPQNRFELSMNEHPPQGEILRGLKITVNDSDQGANAKFNLQLVGPRGIFRVVPQTVLNEAQVTIIVENSAAIDFEKSKVLTFKLLAVEVNTPEKFSSTADVVIQLLDTNDNVPKFDSLYYVARIPENAPGGSSVVAVTAVDPDTGPWGEVKYSTYGTGADLFLIHPSTGLIYTQPWASLDAEATARYNFYVKAEDMEGKYSVAEVFITLLDVNDHPPQFGKSVQKKTMVLGTPVKIEAIDEDAEEPNNLVDYSITHAEPANVFDINSHTGEIWLKNSIRSLDALHNITPGRDCLWSLEVQAKDRGSPSFSTTALLKIDITDAEVRRLRYMKNSNFPGTTKSVRKPKFKPKKPHSSQGLFLHPHCEIALFNLSNVNLYSRVFQGAAQAS

SEQ ID NO: 26109 - protein, 598 aa, Homo sapiens
  REGION 1..598: note = ENSP00000361189
  VARIANT 1: note = Any amino acid
XITVVAKDGGGRLHGADVVFSATTTVTVNVEDVQDMAPVFVGTPYYGYVYEDTLPGSEVLKVVAMDGDRGKPNRILYSLVNGNDGAFEINETSGAISITQSPAQLQREVYELHVQVTEMSPAGSPAAQATVPVTIRIVDLNNHPPTFYGESGPQNRFELSMNEHPPQGEILRGLKITVNDSDQGANAKFNLQLVGPRGIFRVVPQTVLNEAQVTIIVENSAAIDFEKSKVLTFKAVDPDTGPWGEVKYSTYGTGADLFLIHPSTGLIYTQPWASLDAEATARYNFYVKAEDMEGKYSVAEVFITLLDVNDHPPQFGKSVQKKTMVLGTPVKIEAIDEDAEEPNNLVDYSITHAEPANVFDINSHTGEIWLKNSIRSLDALHNITPGRDCLWSLEVQAKDRGSPSFSTTALLKIDITDAETLSRSPMAAFLIQTKDNPMKAVGVLAGTMATVVAITVLISTATFWRNKKSNKVLPMRRVLRKRPSPAPRTIRIEWLKSKSTKAATKFMLKEKPPNENCNNNSPESSLLPRAPALPPPPSVAPSTGAAQWTVPTVSGSLTPQPTQPPPKPKTMGSPVQSTLISELKQKFEKKSVHNKAYF

SEQ ID NO: 26110 - protein, 48 aa, Homo sapiens
  REGION 1..48: note = ENSP00000485460
  VARIANT 1: note = Any amino acid
XMDGDRGKPNRILYSLVNDFPRQCRTILWHDSPAPPCGPVQNFRVHLP

SEQ ID NO: 26111 - protein, 135 aa, Homo sapiens
  REGION 1..135: note = ENSP00000485151
  VARIANT 1: note = Any amino acid
XENSAAIDFEKSKVLTFKLLAVEVNTPEKFSSTADVVIQLLDTNDNVPKFDSLYYVARIPENAPGGSSVVAVTAVDPDTGPWGEVKYSTYGTGADLFLIHPSTGLIYTQPWASLDAEATARYNFYVKAEDMEGKP

SEQ ID NO: 26112 - protein, 78 aa, Homo sapiens
  REGION 1..78: note = ENSP00000485245
  VARIANT 1: note = Any amino acid
XITHAEPANVFDINSHTGEIWLKNSIRSLDALHNITPGRDCLWSLEVQAKDRGSPSFSTTALLKIDITDAEVRRLRSN

SEQ ID NO: 26113 - protein, 127 aa, Homo sapiens
  REGION 1..127: note = ENSP00000393616
MSTRNCQGMDSVIKPLDTIPEDKKVRVQRTQSTFDPFEKPANQVKRVHSENNACINFKTSSTGKESPKVRRHSSPSSPTSPKFGKADSYEKLEKLGEGSYATVYKGKSKVNGKLVALKVIRLQEEEG

SEQ ID NO: 26114 - protein, 127 aa, Homo sapiens; identical to SEQ ID NO: 26113
  REGION 1..127: note = ENSP00000410770

SEQ ID NO: 26115 - protein, 127 aa, Homo sapiens; identical to SEQ ID NO: 26113
  REGION 1..127: note = ENSP00000394570

SEQ ID NO: 26116 - protein, 127 aa, Homo sapiens; identical to SEQ ID NO: 26113
  REGION 1..127: note = ENSP00000406848

SEQ ID NO: 26117 - protein, 469 aa, Homo sapiens
  REGION 1..469: note = ENSP00000369390
MCDLIEPQPAEKIGKMKKLRRTLSESFSRIALKKDDTTFDEICVTKMSTRNCQGMDSVIKPLDTIPEDKKVRVQRTQSTFDPFEKPANQVKRVHSENNACINFKTSSTGKESPKVRRHSSPSSPTSPKFGKADSYEKLEKLGEGSYATVYKGKSKVNGKLVALKVIRLQEEEGTPFTAIREASLLKGLKHANIVLLHDIIHTKETLTLVFEYVHTDLCQYMDKHPGGLHPDNVKLFLFQLLRGLSYIHQRYILHRDLKPQNLLISDTGELKLADFGLARAKSVPSHTYSNEVVTLWYRPPDVLLGSTEYSTCLDMWGVGCIFVEMIQGVAAFPGMKDIQDQLERIFLVLGTPNEDTWPGVHSLPHFKPERFTLYSSKNLRQAWNKLSYVNHAEDLASKLLQCSPKNRLSAQAALSHEYFSDLPPRLWELTDMSSIFTVPNVRLQPEAGESMRAFGKNNSYGKSLSNSKH

SEQ ID NO: 26118 - protein, 92 aa, Homo sapiens
  REGION 1..92: note = ENSP00000401603
MSTRNCQGMDSVIKPLDTIPEDKKVRVQRTQSTFDPFEKPANQVKRVHSENNACINFKTSSTGKESPKVRRHSSPSSPTSPKFGKADSYEKL

SEQ ID NO: 26119 - protein, 451 aa, Homo sapiens
  REGION 1..451: note = ENSP00000265741
MHGYFGCNAAAEPGYSAFVGTPQICVTKMSTRNCQGMDSVIKPLDTIPEDKKVRVQRTQSTFDPFEKPANQVKRVHSENNACINFKTSSTGKESPKVRRHSSPSSPTSPKFGKADSYEKLEKLGEGSYATVYKGKSKVNGKLVALKVIRLQEEEGTPFTAIREASLLKGLKHANIVLLHDIIHTKETLTLVFEYVHTDLCQYMDKHPGGLHPDNVKLFLFQLLRGLSYIHQRYILHRDLKPQNLLISDTGELKLADFGLARAKSVPSHTYSNEVVTLWYRPPDVLLGSTEYSTCLDMWGVGCIFVEMIQGVAAFPGMKDIQDQLERIFLVLGTPNEDTWPGVHSLPHFKPERFTLYSSKNLRQAWNKLSYVNHAEDLASKLLQCSPKNRLSAQAALSHEYFSDLPPRLWELTDMSSIFTVPNVRLQPEAGESMRAFGKNNSYGKSLSNSKH

SEQ ID NO: 26120 - protein, 423 aa, Homo sapiens
  REGION 1..423: note = ENSP00000385034
MSTRNCQGMDSVIKPLDTIPEDKKVRVQRTQSTFDPFEKPANQVKRVHSENNACINFKTSSTGKESPKVRRHSSPSSPTSPKFGKADSYEKLEKLGEGSYATVYKGKSKVNGKLVALKVIRLQEEEGTPFTAIREASLLKGLKHANIVLLHDIIHTKETLTLVFEYVHTDLCQYMDKHPGGLHPDNVKLFLFQLLRGLSYIHQRYILHRDLKPQNLLISDTGELKLADFGLARAKSVPSHTYSNEVVTLWYRPPDVLLGSTEYSTCLDMWGVGCIFVEMIQGVAAFPGMKDIQDQLERIFLVLGTPNEDTWPGVHSLPHFKPERFTLYSSKNLRQAWNKLSYVNHAEDLASKLLQCSPKNRLSAQAALSHEYFSDLPPRLWELTDMSSIFTVPNVRLQPEAGESMRAFGKNNSYGKSLSNSKH

SEQ ID NO: 26121 - protein, 113 aa, Homo sapiens
  REGION 1..113: note = ENSP00000387794
MSTRNCQGMDSVIKPLDTIPEDKKVRVQRTQSTFDPFEKPANQVKRVHSENNACINFKTSSTGKESPKVRRHSSPSSGKWEVGSSEGDQAAGRRRDTFHSYQGSFSFKRTKTC

SEQ ID NO: 26122 - protein, 340 aa, Homo sapiens
  REGION 1..340: note = ENSP00000398936
MLALTLRPPPLAKSHLKLGGTPAPARVNGKLVALKVIRLQEEEGTPFTAIREASLLKGLKHANIVLLHDIIHTKETLTLVFEYVHTDLCQYMDKHPGGLHPDNVKLFLFQLLRGLSYIHQRYILHRDLKPQNLLISDTGELKLADFGLARAKSVPSHTYSNEVVTLWYRPPDVLLGSTEYSTCLDMWGVGCIFVEMIQGVAAFPGMKDIQDQLERIFLVLGTPNEDTWPGVHSLPHFKPERFTLYSSKNLRQAWNKLSYVNHAEDLASKLLQCSPKNRLSAQAALSHEYFSDLPPRLWELTDMSSIFTVPNVRLQPEAGESMRAFGKNNSYGKSLSNSKH

SEQ ID NO: 26123 - protein, 54 aa, Homo sapiens
  REGION 1..54: note = ENSP00000389831
MTSFHPRGLQAARAQKFKSKRPRSNSDCFQEEDLRQGFQWSRGRASLLGQPHLT

SEQ ID NO: 26124 - protein, 384 aa, Homo sapiens
  REGION 1..384: note = ENSP00000386901
MTSFHPRGLQAARAQKFKSKRPRSNSDCFQEEDLRQGFQWRKSLPFGAASSYLNLEKLGEGSYATVYKGISRINGQLVALKVISMNAEEGVPFTAIREASLLKGLKHANIVLLHDIIHTKETLTFVFEYMHTDLAQYMSQHPGGLHPHNVRLFMFQLLRGLAYIHHQHVLHRDLKPQNLLISHLGELKLADFGLARAKSIPSQTYSSEVVTLWYRPPDALLGATEYSSELDIWGAGCIFIEMFQGQPLFPGVSNILEQLEKIWEVLGVPTEDTWPGVSKLPNYNPEWFPLPTPRSLHVVWNRLGRVPEAEDLASQMLKGFPRDRVSAQEALVHDYFSALPSQLYQLPDEESLFTVSGVRLKPEMCDLLASYQKGHHPAQFSKCW

SEQ ID NO: 26125 - protein, 384 aa, Homo sapiens; identical to SEQ ID NO: 26124
  REGION 1..384: note = ENSP00000260967

SEQ ID NO: 26126 - protein, 429 aa, Homo sapiens
  REGION 1..429: note = ENSP00000406472
MGQELCAKTVQPGCSCYHCSEGGEAHSCRRSQPETTEAAFKLTDLKEASCSMTSFHPRGLQAARAQKFKSKRPRSNSDCFQEEDLRQGFQWRKSLPFGAASSYLNLEKLGEGSYATVYKGISRINGQLVALKVISMNAEEGVPFTAIREASLLKGLKHANIVLLHDIIHTKETLTFVFEYMHTDLAQYMSQHPGGLHPHNVRLFMFQLLRGLAYIHHQHVLHRDLKPQNLLISHLGELKLADFGLARAKSIPSQTYSSEVVTLWYRPPDALLGATEYSSELDIWGAGCIFIEMFQGQPLFPGVSNILEQLEKIWEVLGVPTEDTWPGVSKLPNYNPEWFPLPTPRSLHVVWNRLGRVPEAEDLASQMLKGFPRDRVSAQEALVHDYFSALPSQLYQLPDVSGVRLKPEMCDLLASYQKGHHPAQFSKCW

SEQ ID NO: 26127 - protein, 400 aa, Homo sapiens
  REGION 1..400: note = ENSP00000412775
MGQELCAKTVQPGCSCYHCSEGGEAHSCRRSQPETTEAAFKLTDLKEASCSMTSFHPRGLQAARAQKFKSKRPRSNSDCFQEEDLRQGFQWRKSLPFGAASSYLNLEKLGEGSYATVYKGISRINGQLVALKVISMNAEEGVPFTAIREASLLKGLKHANIVLLHDIIHTKETLTFVFEYMHTDLAQYMSQHPGGLHPHNVRLFMFQLLRGLAYIHHQHVLHRDLKPQNLLISHLGELKLADFGLARAKSIPSQTYSSEVVTLWYRPPDALLGATEYSSELDIWGAGCIFIEMFQGQPLFPGVSNILEQLEKIWEVLGVPTEDTWPGVSKLPNYNPEWFPLPTPRSLHVVWNRLGRVPEAEDLASQMLKGFPRDRVSAQEALVHDYFSALPSQLYQLPDE

SEQ ID NO: 26128 - protein, 502 aa, Homo sapiens
  REGION 1..502: note = ENSP00000405798
MQSEIAMDRMKKIKRQLSMTLRGGRGIDKTNGAPEQIGLDESGGGGGSDPGEAPTRAAPGELRSARGPLSSAPEIVHEDLKMGSDGESDQASATSSDEVQSPVRVRMRNHPPRKISTEDINKRLSLPADIRLPEGYLEKLTLNSPIFDKPLSRRLRRVSLSEIGFGKLETYIKLDKLGEGTYATVYKGKSKLTDNLVALKEIRLEHEEGAPCTAIREVSLLKDLKHANIVTLHDIIHTEKSLTLVFEYLDKDLKQYLDDCGNIINMHNVKLFLFQLLRGLAYCHRQKVLHRDLKPQNLLINERGELKLADFGLARAKSIPTKTYSNEVVTLWYRPPDILLGSTDYSTQIDMWGVGCIFYEMATGRPLFPGSTVEEQLHFIFRILGTPTEETWPGILSNEEFKTYNYPKYRAEALLSHAPRLDSDGADLLTKLLQFEGRNRISAEDAMKHPFFLSLGERIHKLPDTTSIFALKEIQLQKEASLRSSSMPDSGRPAFRVVDTEF

SEQ ID NO: 26129 - protein, 57 aa, Homo sapiens
  REGION 1..57: note = ENSP00000431085
MDRMKKIKRQLSMTLRGGRGIDKTNGAPEQIGLDESGGGGGSDPGEAPTRAAPGELR

SEQ ID NO: 26130 - protein, 83 aa, Homo sapiens
  REGION 1..83: note = ENSP00000430966
MQSEIAMDRMKKIKRQLSMTLRGGRGIDKTNGAPEQIGLDESGGGGGSDPGEAPTRAAPGELRSARGPLSSAPDCARGLEDGV

SEQ ID NO: 26131 - protein, 496 aa, Homo sapiens [sequence omitted]

SEQ ID NO: 26132 - protein, 150 aa, Homo sapiens
  REGION 1..150: note = ENSP00000429259
MDRMKKIKRQLSMTLRGGRGIDKTNGAPEQIGLDESGGGGGSDPGEAPTRAAPGELRSARGPLSSAPEIVHEDLKMGSDGESDQASATSSDEVQSPVRVRMRNHPPRKISTEDINKRLSLPADIRLPEGYLEKLTLNSPIFDKPLSRRLR

SEQ ID NO: 26133 - protein, 153 aa, Homo sapiens
  REGION 1..153: note = ENSP00000428351
MDRMKKIKRQLSMTLRGGRGIDKTNGAPEQIGLDESGGGGGSDPGEAPTRAAPGELRSARGPLSSAPEIVHEDLKMGSDGESDQASATSSDEVQSPVRVRMRNHPPRKISTEDINKRLSLPADIRLPEGYLEKLTLNSPIFDKPLSRRLRRVS

SEQ ID NO: 26134 - protein, 393 aa, Homo sapiens
  REGION 1..393: note = ENSP00000429985
MDRMKKIKRQLSMTLRGGRGIDKTNGAPEQIGLDESGGGGGSDPGEAPTRAAPGELRSARGPLSSAPEIVHEDLKMGSDGESDQASATSSDEVQSPVRVRMRNHPPRKISTEDINKRLSLPADIRLPEGYLEKLTLNSPIFDKPLSRRLRRVSLSEIGFGKLETYIKLDKLGEGTYATVYKGKSKLTDNLVALKEIRLEHEEGAPCTAIREVSLLKDLKHANIVTLHDIIHTEKSLTLVFEYLDKDLKQYLDDCGNIINMHNVKLFLFQLLRGLAYCHRQKVLHRDLKPQNLLINERGELKLADFGLARAKSIPTKTYSNEVVTLWYRPPDILLGSTDYSTQIDMWGVGCIFYEMATGRPLFPGSTVEEQLHFIFRILVFCAMKPCSQPFRDR

SEQ ID NO: 26135 - protein, 189 aa, Homo sapiens
  REGION 1..189: note = ENSP00000429044
MDRMKKIKRQLSMTLRGGRGIDKTNGAPEQIGLDESGGGGGSDPGEAPTRAAPGELRSARGPLSSAPEIVHEDLKMGSDGESDQASATSSDEVQSPVRVRMRNHPPRKISTEDINKRLSLPADIRLPEGYLEKLTLNSPIFDKPLSRRLRRVSLSEIGFGKLETYIKLDKLGEGTYATVYKGKSKLTDN

SEQ ID NO: 26136 - protein, 496 aa, Homo sapiens [sequence omitted]

SEQ ID NO: 26137 - protein, 152 aa, Homo sapiens
  REGION 1..152: note = ENSP00000430486
  VARIANT 1: note = Any amino acid
XPEQIGLDESGGGGGSDPGEAPTRAAPGELRSARGPLSSAPEIVHEDLKMGSDGESDQASATSSDEVQSPVRDINKRLSLPADIRLPEGYLEKLTLNSPIFDKPLSRRLRRVSLSEIGFGKLETYIKLDKLGEGTYATVYKGKSKLTDNLVA

SEQ ID NO: 26138 - protein, 260 aa, Homo sapiens
  REGION 1..260: note = ENSP00000428349
DKDLKQYLDDCGNIINMHNVKLFLFQLLRGLAYCHRQKVLHRDLKPQNLLINERGELKLADFGLARAKSIPTKTYSNEVVTLWYRPPDILLGSTDYSTQIDMWGVGCIFYEMATGRPLFPGSTVEEQLHFIFRILGTPTEETWPGILSNEEFKTYNYPKYRAEALLSHAPRSLCPCGRLDSDGADLLTKLLQFEGRNRISAEDAMKHPFFLSLGERIHKLPDTTSIFALKEIQLQKEASLRSSSMPDSGRPAFRVVDTEF

SEQ ID NO: 26139 - protein, 166 aa, Homo sapiens
  REGION 1..166: note = ENSP00000430988
  VARIANT 1: note = Any amino acid
XLDSDGADLLTKLLQFEGRNRISAEDAMKHPFFLSLGERIHKLPDTTSIFALKEIQLQKEASLRSSSMPDSAICSAFPHRQASFPRGGHRVLSHRPRPQQAAAGGMPHPSQGSPQLHLPCLLSAYLPEPCSPAHLSPAACPNTPPLACQPTHWPVCWVLTKLSSLL

SEQ ID NO: 26140 - protein, 84 aa, Homo sapiens
  REGION 1..84: note = ENSP00000430824
  VARIANT 1: note = Any amino acid
XLDSDGADLLTKLLQFEGRNRISAEDAMKHPFFLSLGERIHKLPDTTSIFALKEIQLQKEASLRSSSMPDSVAGGQHGRASLPH

SEQ ID NO: 26141 - protein, 570 aa, Homo sapiens
  REGION 1..570: note = ENSP00000276052
MPLYGRARDHVTHPSILGTRPGRPMAGPITAAVPEKICNGAFCSCSGAFPLDPNNPSLGPLPSISHLNLRTQIAMDRMKKIKRQLSMTLRGGRGIDKTNGAPEQIGLDESGGGGGSDPGEAPTRAAPGELRSARGPLSSAPEIVHEDLKMGSDGESDQASATSSDEVQSPVRVRMRNHPPRKISTEDINKRLSLPADIRLPEGYLEKLTLNSPIFDKPLSRRLRRVSLSEIGFGKLETYIKLDKLGEGTYATVYKGKSKLTDNLVALKEIRLEHEEGAPCTAIREVSLLKDLKHANIVTLHDIIHTEKSLTLVFEYLDKDLKQYLDDCGNIINMHNVKLFLFQLLRGLAYCHRQKVLHRDLKPQNLLINERGELKLADFGLARAKSIPTKTYSNEVVTLWYRPPDILLGSTDYSTQIDMWGVGCIFYEMATGRPLFPGSTVEEQLHFIFRILGTPTEETWPGILSNEEFKTYNYPKYRAEALLSHAPRLDSDGADLLTKLLQFEGRNRISAEDAMKHPFFLSLGERIHKLPDTTSIFALKEIQLQKEASLRSSSMPDSGRPAFRVVDTEF

SEQ ID NO: 26142 - protein, 448 aa, Homo sapiens
  REGION 1..448: note = ENSP00000482886
MDRMKKIKRQLSMTLRSAPEIVHEDLKMGSDGESDQASATSSDEVQSPVRVRMRNHPPRKISTEDINKRLSLPADIRLPEGYLEKLTLNSPIFDKPLSRRLRRVSLSEIGFGKLETYIKLDKLGEGTYATVYKGKSKLTDNLVALKEIRLEHEEGAPCTAIREVSLLKDLKHANIVTLHDIIHTEKSLTLVFEYLDKDLKQYLDDCGNIINMHNVKLFLFQLLRGLAYCHRQKVLHRDLKPQNLLINERGELKLADFGLARAKSIPTKTYSNEVVTLWYRPPDILLGSTDYSTQIDMWGVGCIFYEMATGRPLFPGSTVEEQLHFIFRILGTPTEETWPGILSNEEFKTYNYPKYRAEALLSHAPRLDSDGADLLTKLLQFEGRNRISAEDAMKHPFFLSLGERIHKLPDTTSIFALKEIQLQKEASLRSSSMPDSGRPAFRVVDTEF

SEQ ID NO: 26143 - protein, 474 aa, Homo sapiens
  REGION 1..474: note = ENSP00000399082
MIMNKMKNFKRRFSLSVPRTETIEESLAEFTEQFNQLHNRRNENLQLGPLGRDPPQECSTFSPTDSGEEPGQLSPGVQFQRRQNQRRFSMEDVSKRLSLPMDIRLPQEFLQKLQMESPDLPKPLSRMSRRASLSDIGFGKLETYVKLDKLGEGTYATVFKGRSKLTENLVALKEIRLEHEEGAPCTAIREVSLLKNLKHANIVTLHDLIHTDRSLTLVFEYLDSDLKQYLDHCGNLMSMHNVKIFMFQLLRGLAYCHHRKILHRDLKPQNLLINERGELKLADFGLARAKSVPTKTYSNEVVTLWYRPPDVLLGSTEYSTPIDMWGVGCIHYEMATGRPLFPGSTVKEELHLIFRLLGTPTEETWPGVTAFSEFRTYSFPCYLPQPLINHAPRLDTDGIHLLSSLLLYESKSRMSAEAALSHSYFRSLGERVHQLEDTASIFSLKEIQLQKDPGYRGLAFQQPGRGKNRRQSIF

SEQ ID NO: 26144 - protein, 72 aa, Homo sapiens [sequence omitted]

SEQ ID NO: 26145 - protein, 72 aa, Homo sapiens [sequence omitted]

SEQ ID NO: 26146 - protein, 504 aa, Homo sapiens
  REGION 1..504: note = ENSP00000423665
MIMNKMKNFKRRFSLSVPRTETIEESLAEFTEQFNQLHNRRNENLQLGPLGRDPPQECSTFSPTDSGEEPGQLSPGVQFQRRQNQRRFSMEVRASGALPRQVAGCTHKGVHRRAAALQPDFDVSKRLSLPMDIRLPQEFLQKLQMESPDLPKPLSRMSRRASLSDIGFGKLETYVKLDKLGEGTYATVFKGRSKLTENLVALKEIRLEHEEGAPCTAIREVSLLKNLKHANIVTLHDLIHTDRSLTLVFEYLDSDLKQYLDHCGNLMSMHNVKIFMFQLLRGLAYCHHRKILHRDLKPQNLLINERGELKLADFGLARAKSVPTKTYSNEVVTLWYRPPDVLLGSTEYSTPIDMWGVGCIHYEMATGRPLFPGSTVKEELHLIFRLLGTPTEETWPGVTAFSEFRTYSFPCYLPQPLINHAPRLDTDGIHLLSSLLLYESKSRMSAEAALSHSYFRSLGERVHQLEDTASIFSLKEIQLQKDPGYRGLAFQQPGRGKNRRQSIF

SEQ ID NO: 26147 - protein, 474 aa, Homo sapiens; identical to SEQ ID NO: 26143
  REGION 1..474: note = ENSP00000353176

SEQ ID NO: 26148 - protein, 72 aa, Homo sapiens [sequence omitted]

SEQ ID NO: 26149 - protein, 180 aa, Homo sapiens
  REGION 1..180: note = ENSP00000423408
MEDVSKRLSLPMDIRLPQEFLQKLQMESPDLPKPLSRMSRRASLSDIGFGKLETYVKLDKLGEGTYATVFKGRSKLTENLVALKEIRLEHEEGAPCTAIREVSLLKNLKHANIVTLHDLIHTDRSLTLVFEYLDSDLKQYLDHCGNLMSMHNVKIFMFQLLRGLAYCHHRKILHRDLKPQ

SEQ ID NO: 26150 - protein, 159 aa, Homo sapiens
  REGION 1..159: note = ENSP00000397831
MIMNKMKNFKRRFSLSVPRTETIEESLAEFTEQFNQLHNRRNENSGEEPGQLSPGVQFQRRQNQRRFSMEVRASGALPRQVAGCTHKGVHRRAAALQPDFDVSKRLSLPMDIRLPQEFLQKLQMESPDLPKPLSRMSRRASLSDIGFGKLETYVKLDKL

SEQ ID NO: 26151 - protein, 64 aa, Homo sapiens
  REGION 1..64: note = ENSP00000426368
MEVRASGALPRQVAGCTHKGVHRRAAALQPDFDVSKRLSLPMDIRLPQEFLQKLQMESPDLPKP

SEQ ID NO: 26152 - protein, 283 aa, Homo sapiens
  REGION 1..283: note = ENSP00000391324
MIMNKMKNFKRRFSLSVPRTETIEESLAEFTEQFNQLHNRRNENLQLGPLGRDPPQECSTFSPTDSGEEPGQLSPGVQFQRRQNQRRFSMEVRASGALPRQVAGCTHKGVHRRAAALQPDFDVSKRLSLPMDIRLPQEFLQKLQMESPDLPKPLSRMSRRASLSDIGFGKLETYVKLDKLGEGTYATVFKGRSKLTENLVALKEIRLEHEEGAPCTAIREVSLLKNLKHANIVTLHDLIHTDRSLTLVFEYLDSDLKQYLDHCGNLMSMHNVKIFMFQLLRGL

SEQ ID NO: 26153 - protein, 72 aa, Homo sapiens [sequence omitted]

SEQ ID NO: 26154 - protein, 298 aa, Homo sapiens
  REGION 1..298: note = ENSP00000266970
MENFQKVEKIGEGTYGVVYKARNKLTGEVVALKKIRLDTETEGVPSTAIREISLLKELNHPNIVKLLDVIHTENKLYLVFEFLHQDLKKFMDASALTGIPLPLIKSYLFQLLQGLAFCHSHRVLHRDLKPQNLLINTEGAIKLADFGLARAFGVPVRTYTHEVVTLWYRAPEILLGCKYYSTAVDIWSLGCIFAEMVTRRALFPGDSEIDQLFRIFRTLGTPDEVVWPGVTSMPDYKPSFPKWARQDFSKVVPPLDEDGRSLLSQMLHYDPNKRISAKAALAHPFFQDVTKPVPHLRL

SEQ ID NO: 26155 - protein, 39 aa, Homo sapiens
  REGION 1..39: note = ENSP00000450983
MENFQKVEKIGEGTYGVVYKARNKLTGEVVALKKIRLDT

SEQ ID NO: 26156 - protein, 346 aa, Homo sapiens
  REGION 1..346: note = ENSP00000452514
MENFQKVEKIGEGTYGVVYKARNKLTGEVVALKKIRLDTETEGVPSTAIREISLLKELNHPNIVKLLDVIHTENKLYLVFEFLHQDLKKFMDASALTGIPLPLIKSYLFQLLQGLAFCHSHRVLHRDLKPQNLLINTEGAIKLADFGLARAFGVPVRTYTHEVVTLWYRAPEILLGCKYYSTAVDIWSLGCIFAEMHLVGTQHHARCCGEHRRNGRQSLCPLCSYLEVAASQGWGMTAVSTPYPVTRRALFPGDSEIDQLFRIFRTLGTPDEVVWPGVTSMPDYKPSFPKWARQDFSKVVPPLDEDGRSLLSQMLHYDPNKRISAKAALAHPFFQDVTKPVPHLRL

SEQ ID NO: 26157 - protein, 238 aa, Homo sapiens
  REGION 1..238: note = ENSP00000393605
MENFQKVEKIGEGTYGVVYKARNKLTGEVVALKKIRLDTLLDVIHTENKLYLVFEFLHQDLKKFMDASALTGIPLPLIKSYLFQLLQGLAFCHSHRVLHRDLKPQNLLINTEGAIKLADFGLARAFGVPVRTYTHEVTRRALFPGDSEIDQLFRIFRTLGTPDEVVWPGVTSMPDYKPSFPKWARQDFSKVVPPLDEDGRSLLSQMLHYDPNKRISAKAALAHPFFQDVTKPVPHLRL

SEQ ID NO: 26158 - protein, 39 aa, Homo sapiens; identical to SEQ ID NO: 26155
  REGION 1..39: note = ENSP00000452138

SEQ ID NO: 26159 - protein, 264 aa, Homo sapiens
  REGION 1..264: note = ENSP00000243067
MENFQKVEKIGEGTYGVVYKARNKLTGEVVALKKIRLDTETEGVPSTAIREISLLKELNHPNIVKLLDVIHTENKLYLVFEFLHQDLKKFMDASALTGIPLPLIKSYLFQLLQGLAFCHSHRVLHRDLKPQNLLINTEGAIKLADFGLARAFGVPVRTYTHEVTRRALFPGDSEIDQLFRIFRTLGTPDEVVWPGVTSMPDYKPSFPKWARQDFSKVVPPLDEDGRSLLSQMLHYDPNKRISAKAALAHPFFQDVTKPVPHLRL

SEQ ID NO: 26160 - protein, 367 aa, Homo sapiens
  REGION 1..367: note = ENSP00000304250
MGTVLSLSPASSAKGRRPGGLPEEKKKAPPAGDEALGGYGAPPVGKGGKGESRLKRPSVLISALTWKRLVAASAKKKKGSKKVTPKPASTGPDPLVQQRNRENLLRKGRDPPDGGGTAKPLAVPVPTVPAAAATCEPPSGGSAAAQPPGSGGGKPPPPPPPAPQVAPPVPGGSPRRVIVQASTGELLRCLGDFVCRRCYRLKELSPGELVGWFRGVDRSLLLQGWQDQAFITPANLVFVYLLCRESLRGDELASAAELQAAFLTCLYLAYSYMGNEISYPLKPFLVEPDKERFWQRCLRLIQRLSPQMLRLNADPHFFTQVFQDLKNEGEAAASGGGPPSGGAPAASSAARDSCAAGTKHWTMNLDR

SEQ ID NO: 26161 - protein, 1893 aa, Homo sapiens
  REGION 1..1893: note = ENSP00000343818
MMDLVLEEDVTVPGTLSGCSGLVPSVPDDLDGINPNAGLGNGLLPNVSEETVSPTRARNMKDFENQITELKKENFNLKLRIYFLEERMQQEFHGPTEHIYKTNIELKVEVESLKRELQEREQLLIKASKAVESLAEAGGSEIQRVKEDARKKVQQVEDLLTKRILLLEKDVTAAQAELEKAFAGTETEKALRLRLESKLSEMKKMHEGDLAMALVLDEKDRLIEELKLSLKSKEALIQCLKEEKSQMACPDENVSSGELRGLCAAPREEKERETEAAQMEHQKERNSFEERIQALEEDLREKEREIATEKKNSLKRDKAIQGLTMALKSKEKKVEELNSEIEKLSAAFAKAREALQKAQTQEFQGSEDYETALSGKEALSAALRSQNLTKSTENHRLRRSIKKITQELSDLQQERERLEKDLEEAHREKSKGDCTIRDLRNEVEKLRNEVNEREKAMENRYKSLLSESNKKLHNQEQVIKHLTESTNQKDVLLQKFNEKDLEVIQQNCYLMAAEDLELRSEGLITEKCSSQQPPGSKTIFSKEKKQSSDYEELIQVLKKEQDIYTHLVKSLQESDSINNLQAELNKIFALRKQLEQDVLSYQNLRKTLEEQISEIRRREEESFSLYSDQTSYLSICLEENNRFQVEHFSQEELKKKVSDLIQLVKELYTDNQHLKKTIFDLSCMGFQGNGFPDRLASTEQTELLASKEDEDTIKIGEDDEINFLSDQHLQQSNEIMKDLSKGGCKNGYLRHTESKISDCDGAHAPGCLEEGAFINLLAPLFNEKATLLLESRPDLLKVVRELLLGQLFLTEQEVSGEHLDGKTEKTPKQKGELVHFVQTNSFSKPHDELKLSCEAQLVKAGEVPKVGLKDASVQTVATEGDLLRFKHEATREAWEEKPINTALSAEHRPENLHGVPGWQAALLSLPGITNREAKKSRLPILIKPSRSLGNMYRLPATQEVVTQLQSQILELQGELKEFKTCNKQLHQKLILAEAVMEGRPTPDKTLLNAQPPVGAAYQDSPGEQKGIKTTSSVWRDKEMDSDQQRSYEIDSEICPPDDLASLPSCKENPEDVLSPTSVATYLSSKSQPSAKVSVMGTDQSESINTSNETEYLKQKIHDLETELEGYQNFIFQLQKHSQCSEAIITVLCGTEGAQDGLSKPKNGSDGEEMTFSSLHQVRYVKHVKILGPLAPEMIDSRVLENLKQQLEEQEYKLQKEQNLNMQLFSEIHNLQNKFRDLSPPRYDSLVQSQARELSLQRQQIKDGHGICVISRQHMNTMIKAFEELLQASDVDYCVAEGFQEQLNQCAELLEKLEKLFLNGKSVGVEMNTQNELMERIEEDNLTYQHLLPESPEPSASHALSDYETSEKSFFSRDQKQDNETEKTSVMVNSFSQDLLMEHIQEIRTLRKRLEESIKTNEKLRKQLERQGSEFVQGSTSIFASGSELHSSLTSEIHFLRKQNQALNAMLIKGSRDKQKENDKLRESLSRKTVSLEHLQREYASVKEENERLQKEGSEKERHNQQLIQEVRCSGQELSRVQEEVKLRQQLLSQNDKLLQSLRVELKAYEKLDEEHRRLREASGEGWKGQDPFRDLHSLLMEIQALRLQLERSIETSSTLQSRLKEQLARGAEKAQEGALTLAVQAVSIPEVPLQPDKHDGDKYPMESDNSFDLFDSSQAVTPKSVSETPPLSGNDTDSLSCDSGSSATSTPCVSRLVTGHHLWASKNGRHVLGLIEDYEALLKQISQGQRLLAEMDIQTQEAPSSTSQELGTKGPHPAPLSKFVSSVSTAKLTLEEAYRRLKLLWRVSLPEDGQCPLHCEQIGEMKAEVTKLHKKLFEQEKKLQNTMKLLQLSKRQEKVIFDQLVVTHKILRKARGNLELRPGGAHPGTCSPSRPGS

SEQ ID NO: 26162 - protein, 1814 aa, Homo sapiens
  REGION 1..1814: note = ENSP00000353317
MMDLVLEEDVTVPGTLSGCSGLVPSVPDDLDGINPNAGLGNGLLPNVSEETVSPTRARNMKDFENQITELKKENFNLKLRIYFLEERMQQEFHGPTEHIYKTNIELKVEVESLKRELQEREQLLIKASKAVESLAEAGGSEIQRVKEDARKKVQQVEDLLTKRILLLEKDVTAAQAELEKAFAGTETEKALRLRLESKLSEMKKMHEGDLAMALVLDEKDRLIEELKLSLKSKEALIQCLKEEKSQMACPDENVSSGELRGLCAAPREEKERETEAAQMEHQKERNSFEERIQALEEDLREKEREIATEKKNSLKRDKAIQGLTMALKSKEKKVEELNSEIEKLSAAFAKAREALQKAQTQEFQGSEDYETALSGKEALSAALRSQNLTKSTENHRLRRSIKKITQELSDLQQERERLEKDLEEAHREKSKGDCTIRDLRNEVEKLRNEVNEREKAMENRYKSLLSESNKKLHNQEQVIKHLTESTNQKDVLLQKFNEKDLEVIQQNCYLMAAEDLELRSEGLITEKCSSQQPPGSKTIFSKEKKQSSDYEELIQVLKKEQDIYTHLVKSLQESDSINNLQAELNKIFALRKQLEQDVLSYQNLRKTLEEQISEIRRREEESFSLYSDQTSYLSICLEENNRFQVEHFSQEELKKKVSDLIQLVKELYTDNQHLKKTIFDLSCMGFQGNGFPDRLASTEQTELLASKEDEDTIKIGEDDEINFLSDQHLQQSNEIMKDLSKGGCKNGYLRHTESKISDCDGAHAPGCLEEGAFINLLAPLFNEKATLLLESRPDLLKVVRELLLGQLFLTEQEVSGEHLDGKTEKTPKQKGELVHFVQTNSFSKPHDELKLSCEAQLVKAGEVPKVGLKDASVQTVATEGDLLRFKHEATREAWEEKPINTALSAEHRPENLHGVPGWQAALLSLPGITNREAKKSRLPILIKPSRSLGNMYRLPATQEVVTQLQSQILELQGELKEFKTCNKQLHQKLILAEAVMEGRPTPDKTLLNAQPPVGAAYQDSPGEQKGIKTTSSVWRDKEMDSDQQRSYEIDSEICPPDDLASLPSCKENPEDVLSPTSVATYLSSKSQPSAKVSVMGTDQSESINTSNETEYLKQKIHDLETELEGYQNFIFQLQKHSQCSEAIITVLCGTEGAQDGLSKPKNGSDGEEMTFSSLHQVRYVKHVKILGPLAPEMIDSRVLENLKQQLEEQEYKLQKEQNLNMQLFSEIHNLQNKFRDLSPPRYDSLVQSQARELSLQRQQIKDGHGICVISRQHMNTMIKAFEELLQASDVDYCVAEGFQEQLNQCAELLEKLEKLFLNGKSVGVEMNTQNELMERIEEDNLTYQHLLPESPEPSASHALSDYETSEKSFFSRDQKQDNETEKTSVMVNSFSQDLLMEHIQEIRTLRKRLEESIKTNEKLRKQLERQGSEFVQGSTSIFASGSELHSSLTSEIHFLRKQNQALNAMLIKGSRDKQKENDKLRESLSRKTVSLEHLQREYASVKEENERLQKEGSEKERHNQQLIQEVRCSGQELSRVQEEVKLRQQLLSQNDKLLQSLRVELKAYEKLDEEHRRLRDGDKYPMESDNSFDLFDSSQAVTPKSVSETPPLSGNDTDSLSCDSGSSATSTPCVSRLVTGHHLWASKNGRHVLGLIEDYEALLKQISQGQRLLAEMDIQTQEAPSSTSQELGTKGPHPAPLSKFVSSVSTAKLTLEEAYRRLKLLWRVSLPEDGQCPLHCEQIGEMKAEVTKLHKKLFEQEKKLQNTMKLLQLSKRQEKVIFDQLVVTHKILRKARGNLELRPGGAHPGTCSPSRPGS

SEQ ID NO: 26163 - protein, 460 aa, Homo sapiens
  REGION 1..460: note = ENSP00000419265
MMDLVLEEDVTVPGTLSGCSGLVPSVPDDLDGINPNAGLGNVLPNVSEETVSPTRARNMKDFENQITELKKENFNLKLRIYFLEERMQQEFHGPTEHIYKTNIELKVEVESLKRELQEREQLLIKASKAVESLAEAGGSEIQRVKEDARKKVQQVEDLLTKRILLLEKDVTAAQAELEKAFAGTETEKALRLRLESKLSEMKKMHEGDLAMALVLDEKDRLIEELKLSLKSKEALIQCLKEEKSQMACPDENVSSGELRGLCAAPREEKERETEAAQMEHQKERNSFEERIQALEEDLREKEREIATEKKNSLKRDKAIQGLTMALKSKEKKVEELNSEIEKLSAAFAKAREALQKAQTQEFQGSEDYETALSGKEALSAALRSQNLTKSTENHRLRRSIKKITQELSDLQQERERLEKDLEEAHREKSKGDCTIRGLTLFPGLFLNSWAQVILPPQFLE

SEQ ID NO: 26164 - protein, 749 aa, Homo sapiens
  REGION 1..749: note = ENSP00000418418
MMDLVLEEDVTVPGTLSGCSGLVPSVPDDLDGINPNAGLGNVLPNVSEETVSPTRARNMKDFENQITELKKENFNLKLRIYFLEERMQQEFHGPTEHIYKTNIELKVEVESLKRELQEREQLLIKASKAVESLAEAGGSEIQRVKEDARKKVQQVEDLLTKRILLLEKDVTAAQAELEKAFAGTETEKALRLRLESKLSEMKKMHEGDLAMALVLDEKDRLIEELKLSLKSKEALIQCLKEEKSQMACPDENVSSGELRGLCAAPREEKERETEAAQMEHQKERNSFEERIQALEEDLREKEREIATEKKNSLKRDKAIQGLTMALKSKEKKVEELNSEIEKLSAAFAKAREALQKAQTQEFQGSEDYETALSGKEALSAALRSQNLTKSTENHRLRRSIKKITQELSDLQQERERLEKDLEEAHREKSKGDCTIRDLRNEVEKLRNEVNEREKAMENRYKSLLSESNKKLHNQEQVIKHLTESTNQKDVLLQKFNEKDLEVIQQNCYLMAAEDLELRSEGLITEKCSSQQPPGSKTIFSKEKKQSSDYEELIQVLKKEQDIYTHLVKSLQESDSINNLQAELNKIFALRKQLEQDVLSYQNLRKTLEEQISEIRRREEESFSLYSDQTSYLSICLEENNRFQVEHFSQEELKKKVSDLIQLVKELYTDNQHLKKTIFDLSCMGFQGNGFPDRLASTEQTETSLTYSYIFMLHTFLGCIFTPFHAPCSFWLARRTRTRSKLGRMTRLIS

SEQ ID NO: 26165 - protein, 1287 aa, Homo sapiens
  REGION 1..1287: note = ENSP00000400395
DSINNLQAELNKIFALRKQLEQDVLSYQNLRKTLEEQISEIRRREEESFSLYSDQTSYLSICLEENNRFQVEHFSQEELKKKVSDLIQLVKELYTDNQHLKKTIFDLSCMGFQGNGFPDRLASTEQTEIMKDLSKGGCKNGYLRHTESKISDCDGAHAPGCLEEGAFINLLAPLFNEKATLLLESRPDLLKVVRELLLGQLFLTEQEVSGEHLDGKTEKTPKQKGELVHFVQTNSFSKPHDELKLSCEAQLVKAGEVPKVGLKDASVQTVATEGDLLRFKHEATREAWEEKPINTALSAEHRPENLHGVPGWQAALLSLPGITNREAKKSRLPILIKPSRSLGNMYRLPATQEVVTQLQSQILELQGELKEFKTCNKQLHQKLILAEAVMEGRPTPDKTLLNAQPPVGAAYQDSPGEQKGIKTTSSVWRDKEMDSDQQRSYEIDSEICPPDDLASLPSCKENPEDVLSPTSVATYLSSKSQPSAKVSVMGTDQSESINTSNETEYLKQKIHDLETELEGYQNFIFQLQKHSQCSEAIITVLCGTEGAQDGLSKPKNGSDGEEMTFSSLHQVRYVKHVKILGPLAPEMIDSRVLENLKQQLEEQEYKLQKEQNLNMQLFSEIHNLQNKFRDLSPPRYDSLVQSQARELSLQRQQIKDGHGICVISRQHMNTMIKAFEELLQASDVDYCVAEGFQEQLNQCAELLEKLEKLFLNGKSVGVEMNTQNELMERIEEDNLTYQHLLPESPEPSASHALSDYETSEKSFFSRDQKQDNETEKTSVMVNSFSQDLLMEHIQEIRTLRKRLEESIKTNEKLRKQLERQGSEFVQGSTSIFASGSELHSSLTSEIHFLRKQNQALNAMLIKGSRDKQKENDKLRESLSRKTVSLEHLQREYASVKEENERLQKEGSEKERHNQQLIQEVRCSGQELSRVQEEVKLRQQLLSQNDKLLQSLRVELKAYEKLDEEHRRLREASGEGWKGQDPFRDLHSLLMEIQALRLQLERSIETSSTLQSRLKEQLARGAEKAQEGALTLAVQAVSIPEVPLQPDKHDGDKYPMESDNSFDLFDSSQAVTPKSVSETPPLSGNDTDSLSCDSGSSATSTPCVSRLVTGHHLWASKNGRHVLGLIEDYEALLKQISQGQRLLAEMDIQTQEAPSSTSQELGTKGPHPAPLSKFVSSVSTAKLTLEEAYRRLKLLWRVSLPEDGQCPLHCEQIGEMKAEVTKLHKKLFEQEKKLQNTMKLLQLSKRQEKVIFDQLVVTHKILRKARGNLELRPGGAHPGTCSPSRPGS

SEQ ID NO: 26166 - protein, 903 aa, Homo sapiens
  REGION 1..903: note = ENSP00000409941
NMYRLPATQEVVTQLQSQILELQGELKEFKTCNKQLHQKLILAEAVMEGRPTPDKTLLNDSEICPPDDLASLPSCKENPEDVLSPTSVATYLSSKSQPSAKVSVMGTDQSESINTSNETEYLKQKIHDLETELEGYQNFIFQLQKHSQCSEAIITVLCGTEGAQDGLSKPKNGSDGEEMTFSSLHQVRYVKHVKILGPLAPEMIDSRVLENLKQQLEEQEYKLQKEQNLNMQLFSEIHNLQNKFRDLSPPRYDSLVQSQARELSLQRQQIKDGHGICVISRQHMNTMIKAFEELLQASDVDYCVAEGFQEQLNQCAELLEKLEKLFLNGKSVGVEMNTQNELMERIEEDNLTYQHLLPESPEPSASHALSDYETSEKSFFSRDQKQDNETEKTSVMVNSFSQDLLMEHIQEIRTLRKRLEESIKTNEKLRKQLERQGSEFVQGSTSIFASGSELHSSLTSEIHFLRKQNQALNAMLIKGSRDKQKENDKLRESLSRKTVSLEHLQREYASVKEENERLQKEGSEKERHNQQLIQEVRCSGQELSRVQEEVKLRQQLLSQNDKLLQSLRVELKAYEKLDEEHRRLREASGEGWKGQDPFRDLHSLLMEIQALRLQLERSIETSSTLQSRLKEQLARGAEKAQEGALTLAVQAVSIPEVPLQPDKHDGDKYPMESDNSFDLFDSSQAVTPKSVSETPPLSGNDTDSLSCDSGSSATSTPCVSRLVTGHHLWASKNGRHVLGLIEDYEALLKQISQGQRLLAEMDIQTQEAPSSTSQELGTKGPHPAPLSKFVSSVSTAKLTLEEAYRRLKLLWRVSLPEDGQCPLHCEQIGEMKAEVTKLHKKLFEQEKKLQNTMKLLQLSKRQEKVIFDQLVVTHKILRKARGNLELRPGGAHPGTCSPSRPGS

SEQ ID NO: 26167 - protein, 133 aa, Homo sapiens
  REGION 1..133: note = ENSP00000419640
MACPDENVSSGELRGLCAAPREEKERETEAAQMEHQKERNSFEERIQALEEDLREKEREIATEKKNSLKRDKAIQGLTMALKSKEKKVEELNSEIEKLSAAFAKAREALQKAQTQEFQGSEDYETALSGKEAL

SEQ ID NO: 26168 - protein, 275 aa, Homo sapiens
  REGION 1..275: note = ENSP00000417925
MMDLVLEEDVTVPGTLSGCSGLVPSVPDDLDGINPNAGLGNGLLPNVSEETVSPTRARNMKDFENQITELKKENFNLKLRIYFLEERMQQEFHGPTEHIYKTNIELKVEVESLKRELQEREQLLIKASKAVESLAEAGGSEIQRVKEDARKKVQQVEDLLTKRILLLEKDVTAAQAELEKAFAGTETEKALRLRLESKLSEMKKMHEGDLAMALVLDEKDRLIEELKLSLKSKEALIQCLKEEKSQMACPDENVSSGELRGLCAAPREEKERETE

SEQ ID NO: 26169 - protein, 1663 aa, Homo sapiens
  REGION 1..1663: note = ENSP00000354065
MMDLVLEEDVTVPGTLSGCSGLVPSVPDDLDGINPNAGLGNGLLPNVSEETVSPTRARNMKDFENQITELKKENFNLKLRIYFLEERMQQEFHGPTEHIYKTNIELKVEVESLKRELQEREQLLIKASKAVESLAEAGGSEIQRVKEDARKKVQQVEDLLTKRILLLEKDVTAAQAELEKAFAGTETEKALRLRLESKLSEMKKMHEGDLAMALVLDEKDRLIEELKLSLKSKEALIQCLKEEKSQMACPDENVSSGELRGLCAAPREEKERETEAAQMEHQKERNSFEERIQALEEDLREKEREIATEKKNSLKRDKAIQGLTMALKSKEKKVEELNSEIEKLSAAFAKAREALQKAQTQEFQGSEDYETALSGKEALSAALRSQNLTKSTENHRLRRSIKKITQELSDLQQERERLEKDLEEAHREKSKGDCTIRDLRNEVEKLRNEVNEREKAMENRYKSLLSESNKKLHNQEQVIKHLTESTNQKDVLLQKFNEKDLEVIQQNCYLMAAEDLELRSEGLITEKCSSQQPPGSKTIFSKEKKQSSDYEELIQVLKKEQDIYTHLVKSLQESDSINNLQAELNKIFALRKQLEQDVLSYQNLRKTLEEQISEIRRREESFSLYSDQTSYLSICLEENNRFQVEHFSQEELKKKVSDLIQLVKELYTDNQHLKKTIFDLSCMGFQGNGFPDRLASTEQTEEAKKSRLPILIKPSRSLGNMYRLPATQEVVTQLQSQILELQGELKEFKTCNKQLHQKLILAEAVMEGRPTPDKTLLNAQPPVGAAYQDSPGEQKGIKTTSSVWRDKEMDSDQQRSYEIDSEICPPDDLASLPSCKENPEDVLSPTSVATYLSSKSQPSAKVSVMGTDQSESINTSNETEYLKQKIHDLETELEGYQNFIFQLQKHSQCSEAIITVLCGTEGAQDGLSKPKNGSDGEEMTFSSLHQVRYVKHVKILGPLAPEMIDSRVLENLKQQLEEQEYKLQKEQNLNMQLFSEIHNLQNKFRDLSPPRYDSLVQSQARELSLQRQQIKDGHGICVISRQHMNTMIKAFEELLQASDVDYCVAEGFQEQLNQCAELLEKLEKLFLNGKSVGVEMNTQNELMERIEEDNLTYQHLLPESPEPSASHALSDYETSEKSFFSRDQKQDNETEKTSVMVNSFSQDLLMEHIQEIRTLRKRLEESIKTNEKLRKQLERQGSEFVQGSTSIFASGSELHSSLTSEIHFLRKQNQALNAMLIKGSRDKQKENDKLRESLSRKTVSLEHLQREYASVKEENERLQKEGSEKERHNQQLIQEVRCSGQELSRVQEEVKLRQQLLSQNDKLLQSLRVELKAYEKLDEEHRRLREASGEGWKGQDPFRDLHSLLMEIQALRLQLERSIETSSTLQSRLKEQLARGAEKAQEGALTLAVQAVSIPEVPLQPDKHDGDKYPMESDNSFDLFDSSQAVTPKSVSETPPLSGNDTDSLSCDSGSSATSTPCVSRLVTGHHLWASKNGRHVLGLIEDYEALLKQISQGQRLLAEMDIQTQEAPSSTSQELGTKGPHPAPLSKFVSSVSTAKLTLEEAYRRLKLLWRVSLPEDGQCPLHCEQIGEMKAEVTKLHKKLFEQEKKLQNTMKLLQLSKRQEKVIFDQLVVTHKILRKARGNLELRPGGAHPGTCSPSRPGS

SEQ ID NO: 26170 - protein, 358 aa, Homo sapiens
  REGION 1..358: note = ENSP00000379176
MMEKYEKIGKIGEGSYGVVFKCRNRDTGQIVAIKKFLESEDDPVIKKIALREIRMLKQLKHPNLVNLLEVFRRKRRLHLVFEYCDHTVLHELDRYQRGVPEHLVKSITWQTLQAVNFCHKHNCIHRDVKPENILITKHSVIKLCDFGFARLLTGPSDYYTDYVATRWYRSPELLVGDTQYGPPVDVWAIGCVFAELLSGVPLWPGKSDVDQLYLIRKTLGDLIPRHQQVFSTNQYFSGVKIPDPEDMEPLELKFPNISYPALGLLKGCLHMDPTQRLTCEQLLHHPYFENIREIEDLAKEHNKPTRKTLRKSRKHHCFTETSKLQYLPQLTGSSILPALDNKKYYCDTKKLNYRFPNI

SEQ ID NO: 26171 - protein, 70 aa, Homo sapiens
  REGION 1..70: note = ENSP00000431449
  VARIANT 1: note = Any amino acid
XDLIPRHQQVFSTNQYFSGVKIPDPEDMEPLELKFPNISYPALGLLKLQYLPQLTGSSILPALDNKKYYC

SEQ ID NO: 26172 - protein, 140 aa, Homo sapiens
  REGION 1..140: note = ENSP00000435044
  VARIANT 1: note = Any amino acid
XAIGCVFAELLSGVPLWPGKSDVDQLYLIRKTLGDLIPRHQQVFSTNQYFSGVKIPDPEDMEPLELKFPNISYPALGLLKGCLHMDPTQRLTCEQLLHHPYFENIREIEDLAKEHNKPTRKTLRKSRKHHCFTETSKVII

SEQ ID NO: 26173 - protein, 276 aa, Homo sapiens
  REGION 1..276: note = ENSP00000216378
MMEKYEKIGKIGEGSYGVVFKCRNRDTGQIVAIKKFLESEDDPVIKKIALREIRMLKQLKHPNLVNLLEVFRRKRRLHLVFEYCDHTVLHELDRYQRGVPEHLVKSITWQTLQAVNFCHKHNCIHRDVKPENILITKHSVIKLCDFGFARLLTGPSDYYTDYVATRWYRSPELLVGDTQYGPPVDVWAIGCVFAELLSGVPLWPGKSDVDQLYLIRKTLGDLIPRHQQVFSTNQYFSGVKIPDPEDMEPLELKFPNISYPALGLLKGRVPIASRTE

SEQ ID NO: 26174 - protein, 164 aa, Homo sapiens
  REGION 1..164: note = ENSP00000244741
MSEPAGDVRQNPCGSKACRRLFGPVDSEQLSRDCDALMAGCIQEARERWNFDFVTETPLEGDFAWERVRGLGLPKLYLPTGPRRGRDELGGGRRPGTSPALLQGTAEEDHVDLSLSCTLVPRSGEQAEGSPGGPGDSQGRKRRQTSMTDFYHSKRRLIFSKRKP

SEQ ID NO: 26175 - protein, 164 aa, Homo sapiens; identical to SEQ ID NO: 26174
  REGION 1..164: note = ENSP00000362815

SEQ ID NO: 26176 - protein, 164 aa, Homo sapiens; identical to SEQ ID NO: 26174
  REGION 1..164: note = ENSP00000384849

SEQ ID NO: 26177 - protein, 164 aa, Homo sapiens; identical to SEQ ID NO: 26174
  REGION 1..164: note = ENSP00000482768

SEQ ID NO: 26178 - protein, 164 aa, Homo sapiens; identical to SEQ ID NO: 26174
  REGION 1..164: note = ENSP00000409259

SEQ ID NO: 26179 - protein, 200 aa, Homo sapiens
  REGION 1..200: note = ENSP00000250535
MEQTEVLKPRTLADLIRILHQLFAGDEVNVEEVQAIMEAYESDPTEWAMYAKFDQYRYTRNLVDQGNGKFNLMILCWGEGHGSSIHDHTNSHCFLKMLQGNLKETLFAWPDKKSNEMVKKSERVLRENQCAYINDSIGLHRVENISHTEPAVSLHLYSPPFDTCHAFDQRTGHKNKVTMTFHSKFGIRTPNATSGSLENN

SEQ ID NO: 26180 - protein, 598 aa, Homo sapiens
  REGION 1..598: note = ENSP00000330512
MTFQASHRSAWGKSRKKNWQYEGPTQKLFLKRNNVSAPDGPSDPSISVSSEQSGAQQPPALQVERIVDKRKNKKGKTEYLVRWKGYDSEDDTWEPEQHLVNCEEYIHDFNRRHTEKQKESTLTRTNRTSPNNARKQISRSTNSNFSKTSPKALVIGKDHESKNSQLFAASQKFRKNTAPSLSSRKNMDLAKSGIKILVPKSPVKSRTAVDGFQSESPEKLDPVEQGQEDTVAPEVAAEKPVGALLGPGAERARMGSRPRIHPLVPQVPGPVTAAMATGLAVNGKGTSPFMDALTANGTTNIQTSVTGVTASKRKFIDDRRDQPFDKRLRFSVRQTESAYRYRDIVVRKQDGFTHILLSTKSSENNSLNPEVMREVQSALSTAAADDSKLVLLSAVGSVFCCGLDFIYFIRRLTDDRKRESTKMAEAIRNFVNTFIQFKKPIIVAVNGPAIGLGASILPLCDVVWANEKAWFQTPYTTFGQSPDGCSTVMFPKIMGGASANEMLLSGRKLTAQEACGKGLVSQVFWPGTFTQEVMVRIKELASCNPVVLEESKALVRCNMKMELEQANERECEVLKKIWGSAQGMDSMLKYLQRKIDEF

SEQ ID NO: 26181 - protein, 171 aa, Homo sapiens
  REGION 1..171: note = ENSP00000394740
MLAYNNGSRSGTSPFMDALTANGTTNIQTSVTGVTASKRKFIDDRRDQPFDKRLRFSVRQTESAYRYRDIVVRKQDGFTHILLSTKSSENNSLNPEVMREVQSALSTAAADDSKLVLLSAVGSVFCCGLDFIYFIRRLTDDRKRESTKMAEAIRNFVNTFIQFKKPIIVAV

SEQ ID NO: 26182 - protein, 544 aa, Homo sapiens
  REGION 1..544: note = ENSP00000380718
MASEELYEVERIVDKRKNKKGKTEYLVRWKGYDSEDDTWEPEQHLVNCEEYIHDFNRRHTEKQKESTLTRTNRTSPNNARKQISRSTNSNFSKTSPKALVIGKDHESKNSQLFAASQKFRKNTAPSLSSRKNMDLAKSGIKILVPKSPVKSRTAVDGFQSESPEKLDPVEQGQEDTVAPEVAAEKPVGALLGPGAERARMGSRPRIHPLVPQVPGPVTAAMATGLAVNGKGTSPFMDALTANGTTNIQTSVTGVTASKRKFIDDRRDQPFDKRLRFSVRQTESAYRYRDIVVRKQDGFTHILLSTKSSENNSLNPEVMREVQSALSTAAADDSKLVLLSAVGSVFCCGLDFIYFIRRLTDDRKRESTKMAEAIRNFVNTFIQFKKPIIVAVNGPAIGLGASILPLCDVVWANEKAWFQTPYTTFGQSPDGCSTVMFPKIMGGASANEMLLSGRKLTAQEACGKGLVSQVFWPGTFTQEVMVRIKELASCNPVVLEESKALVRCNMKMELEQANERECEVLKKIWGSAQGMDSMLKYLQRKIDEF

SEQ ID NO: 26183 - protein, 412 aa, Homo sapiens
  REGION 1..412: note = ENSP00000394076
MDLAKSGIKILVPKSPVKSRTAVDGFQSESPEKLDPVEQGQEDTVAPEVAAEKPVGALLGPGAERARMGSRPRIHPLVPQVPGPVTAAMATGLAVNGKGTSPFMDALTANGTTNIQTSVTGVTASKRKFIDDRRDQPFDKRLRFSVRQTESAYRYRDIVVRKQDGFTHILLSTKSSENNSLNPEVMREVQSALSTAAADDSKLVLLSAVGSVFCCGLDFIYFIRRLTDDRKRESTKMAEAIRNFVNTFIQFKKPIIVAVNGPAIGLGASILPLCDVVWANEKAWFQTPYTTFGQSPDGCSTVMFPKIMGGASANEMLLSGRKLTAQEACGKGLVSQVFWPGTFTQEVMVRIKELASCNPVVLEESKALVRCNMKMELEQANERECEVLKKIWGSAQGMDSMLKYLQRKIDEF

SEQ ID NO: 26184 - protein, 412 aa, Homo sapiens; identical to SEQ ID NO: 26183
  REGION 1..412: note = ENSP00000340908

SEQ ID NO: 26185 - protein, 506 aa, Homo sapiens
  REGION 1..506: note = ENSP00000476295
MASGDLYEVERIVDKRKNKKGKWEYLIRWKGYGSTEDTWEPEHHLLHCEEFIDEFNGLHMSKDKRIKSGKQSSTSKLLRDSRGPSVEKLSHRPSDPGKSKGTSHKRKRINPPLAKPKKGYSGKPSSGGDRATKTVSYRTTPSGLQIMPLKKSQNGMENGDAGSEKDERHFGNGSHQPGLDLNDHVGEQDMGECDVNHATLAENGLGSALTNGGLNLHSPVKRKLEAEKDYVFDKRLRYSVRQNESNCRFRDIVVRKEEGFTHILLSSQTSDNNALTPEIMKEVRRALCNAATDDSKLLLLSAVGSVFCSGLDYSYLIGRLSSDRRKESTRIAEAIRDFVKAFIQFKKPIVVAINGPALGLGASILPLCDIVWASEKAWFQTPYATIRLTPAGCSSYTFPQILGVALANEMLFCGRKLTAQEACSRGLVSQVFWPTTFSQEVMLRVKEMASCSAVVLEESKCLVRSFLKSVLEDVNEKECLMLKQLWSSSKGLDSLFSYLQDKIYEV

SEQ ID NO: 26186 - protein, 507 aa, Homo sapiens
  REGION 1..507: note = ENSP00000454546
MASGDLYEVERIVDKRKNKKGKWEYLIRWKGYGSTEDTWEPEHHLLHCEEFIDEFNGLHMSKDKRIKSGKQSSTSKLLRDSRGPSVEKLSHRPSDPGKSKGTSHKRKRINPPLAKPKKGYSGKPSSGGDRATKTVSYRTTPSGLQIMPLKKSQNGMENGDAGSEKDERHFGNGSHQPGLDLNDHVGEQDMGECDVNHATLAENGLGGSALTNGGLNLHSPVKRKLEAEKDYVFDKRLRYSVRQNESNCRFRDIVVRKEEGFTHILLSSQTSDNNALTPEIMKEVRRALCNAATDDSKLLLLSAVGSVFCSGLDYSYLIGRLSSDRRKESTRIAEAIRDFVKAFIQFKKPIVVAINGPALGLGASILPLCDIVWASEKAWFQTPYATIRLTPAGCSSYTFPQILGVALANEMLFCGRKLTAQEACSRGLVSQVFWPTTFSQEVMLRVKEMASCSAVVLEESKCLVRSFLKSVLEDVNEKECLMLKQLWSSSKGLDSLFSYLQDKIYEV

SEQ ID NO: 26187 - protein, 507 aa, Homo sapiens; identical to SEQ ID NO: 26186
  REGION 1..507: note = ENSP00000455111

SEQ ID NO: 26188 - protein, 507 aa, Homo sapiens; identical to SEQ ID NO: 26186
  REGION 1..507: note = ENSP00000456934

SEQ ID NO: 26189 - protein, 345 aa, Homo sapiens
  REGION 1..345: note = ENSP00000305422
MQRLVAWDPACLPLPPPPPAFKSMEVANFYYEADCLAAAYGGKAAPAAPPAARPGPRPPAGELGSIGDHERAIDFSPYLEPLGAPQAPAPATATDTFEAAPPAPAPAPASSGQHHDFLSDLFSDDYGGKNCKKPAEYGYVSLGRLGAAKGALHPGCFAPLHPPPPPPPPPAELKAEPGFEPADCKRKEEAGAPGGGAGMAAGFPYALRAYLGYQAVPSGSSGSLSTSSSSSPPGTPSPADAKAPPTACYAGAAPAPSQVKSKAKKTVDKHSDEYKIRRERNNIAVRKSRDKAKMRNLETQHKVLELTAENERLQKKVEQLSRELSTLRNLFKQLPEPLLASSGHC

SEQ ID NO: 26190 - protein, 1361 aa, Homo sapiens
  REGION 1..1361: note = ENSP00000220244
MGAAGRQDFLFKAMLTISWLTLTCFPGATSTVAAGCPDQSPELQPWNPGHDQDHHVHIGQGKTLLLTSSATVYSIHISEGGKLVIKDHDEPIVLRTRHILIDNGGELHAGSALCPFQGNFTIILYGRADEGIQPDPYYGLKYIGVGKGGALELHGQKKLSWTFLNKTLHPGGMAEGGYFFERSWGHRGVIVHVIDPKSGTVIHSDRFDTYRSKKESERLVQYLNAVPDGRILSVAVNDEGSRNLDDMARKAMTKLGSKHFLHLGFRHPWSFLTVKGNPSSSVEDHIEYHGHRGSAAARVFKLFQTEHGEYFNVSLSSEWVQDVEWTEWFDHDKVSQTKGGEKISDLWKAHPGKICNRPIDIQATTMDGVNLSTEVVYKKGQDYRFACYDRGRACRSYRVRFLCGKPVRPKLTVTIDTNVNSTILNLEDNVQSWKPGDTLVIASTDYSMYQAEEFQVLPCRSCAPNQVKVAGKPMYLHIGEEIDGVDMRAEVGLLSRNIIVMGEMEDKCYPYRNHICNFFDFDTFGGHIKFALGFKAAHLEGTELKHMGQQLVGQYPIHFHLAGDVDERGGYDPPTYIRDLSIHHTFSRCVTVHGSNGLLIKDVVGYNSLGHCFFTEDGPEERNTFDHCLGLLVKSGTLLPSDRDSKMCKMITEDSYPGYIPKPRQDCNAVSTFWMANPNNNLINCAAAGSEETGFWFIFHHVPTGPSVGMYSPGYSEHIPLGKFYNNRAHSNYRAGMIIDNGVKTTEASAKDKRPFLSIISARYSPHQDADPLKPREPAIIRHFIAYKNQDHGAWLRGGDVWLDSCRFADNGIGLTLASGGTFPYDDGSKQEIKNSLFVGESGNVGTEMMDNRIWGPGGLDHSGRTLPIGQNFPIRGIQLYDGPINIQNCTFRKFVALEGRHTSALAFRLNNAWQSCPHNNVTGIAFEDVPITSRVFFGEPGPWFNQLDMDGDKTSVFHDVDGSVSEYPGSYLTKNDNWLVRHPDCINVPDWRGAICSGCYAQMYIQAYKTSNLRMKIIKNDFPSHPLYLEGALTRSTHYQQYQPVVTLQKGYTIHWDQTAPAELAIWLINFNKGDWIRVGLCYPRGTTFSILSDVHNRLLKQTSKTGVFVRTLQMDKVEQSYPGRSHYYWDEDSGLLFLKLKAQNEREKFAFCSMKGCERIKIKALIPKNAGVSDCTATAYPKFTERAVVDVPMPKKLFGSQLKTKDHFLEVKMESSKQHFFHLWNDFAYIEVDGKKYPSSEDGIQVVVIDGNQGRVVSHTSFRNSILQGIPWQLFNYVATIPDNSIVLMASKGRYVSRGPWTRVLEKLGADRGLKLKEQMAFVGFKGSFRPIWVTLDTEDHKAKIFQVVPIPVVKKKKL

SEQ ID NO: 26191 - protein, 1361 aa, Homo sapiens; identical to SEQ ID NO: 26190
  REGION 1..1361: note = ENSP00000378177

SEQ ID NO: 26192 - protein, 1361 aa, Homo sapiens; identical to SEQ ID NO: 26190
  REGION 1..1361: note = ENSP00000348583

SEQ ID NO: 26193 - protein, 145 aa, Homo sapiens
  REGION 1..145: note = ENSP00000453066
  VARIANT 1: note = Any amino acid
XRGAICSGCYAQMYIQAYKTSNLRMKIIKNDFPSHPLYLEGALTRSTHYQQYQPVVTLQKGYTIHWDQTAPAELAIWLINFNKGDWIRVGLCYPRGTTFSILSDVHNRLLKQTSKTGVFVRTLQMDKVEQSYPGRSHYYWDEDSG

SEQ ID NO: 26194 - protein, 76 aa, Homo sapiens
  REGION 1..76: note = ENSP00000431426
  VARIANT 1: note = Any amino acid
XINFNKGDWIRVGLCYPRGTTFSILSDVHNRLLKQTSKTGVFVRTLQMDKVEQSYPGRSHYYWDEDSGKQRTISWR

SEQ ID NO: 26195 - protein, 1117 aa, Homo sapiens
  REGION 1..1117: note = ENSP00000263468
MLAGRPGTRSAVGELGTESSDNLDRAPLGPRESGGHHRPGSYLDMKIHLEKNLEEERQILLQQQKICRNRARKYFVESNRRKKAFEEKRKEQEEKEHQIREQILQQRKQKFEEVTEKFQRAHVPLSQRRKAVSRKPVPPLEEALKQIQESNLKSEVNLPFSRRPTINWRAIDSALPSALSKNDHKHQKQLLSKINCEKEMNENMRATLATSKNVFQLKLEETQKLLEDQHLSNLQKFCDEVNQITNSETLSSIDSLEATEHEEIYLTLNKEHSTSIQRNTISLKPANMQSTNLSCFDEDKLAFSKTQHINNWLTNLDASNTQNVTAFSDILSKSNVLPSWEYFNSKEQNPSPLNGTVERATNTANNSVPFVSSPPMFVLDKKCEKTSETSTMRTTDSTSGAFKRERPLVTESPTFKFSKSQSTSDSLTQEVATFPDQEKYSELNQENGTTSIPTSCVPVATPLVLPSNIQSARPSAKNSIHIKEIDAVQCSDKLDELKDGKEEEIKYFNCNKEELPLFSDSFQDAYIPHNPDSKDEKQKLAETSSLSNVTSNYDFVGQHKKMKYNIHERNGVRFLKSILKKESKYEHGYLKALIINQSFKFGNQKAAAIRDSIELTKEKGAEIPKTIKKLRWFDETSNIENNAENSHSLKNKTGTTQQHSQQFHIQSGAGSNIISVSTCAVNSADTKKSREDSISENVTTLGGSGADHMPLNCFIPSGYNFAKHAWPASKKEESKIPVHDDSKTKQGKPQRGRAKIIRKPGSAKVQSGFICTNRKGAVIQPQSASKVNIFTQAQGKLIIPCPPPQSTSNIRSGKNIQVSQCQPVTPENPQNIITHNSFNSKHVLPTEHSLNQWNQESSSPLSNACSDLVTVIPSLPSYCSSECQTFAKINHSNGTQAVARQDATLYCTQRSPVCEESYPSVTLRTAEEESVPLWKRGPNVLHQNKRATGSTVMRRKRIAETKRRNILEQKRQNPGSVGQKYSEQINNFGQSVLLSSSEPKQTTRGTSYIEEVSDSTSEFLMAENLVKASVPEDEILTVLNSKQIQKSNLPLNKTQQFNICTLSAEEQKILESLNDLSERLHYIQESICKNPSIKNTLQIIPLLEKREDRTSSCRDKR

SEQ ID NO: 26196 - protein, 432 aa, Homo sapiens
  REGION 1..432: note = ENSP00000433643
  VARIANT 1: note = Any amino acid
XAHVPLSQRRKAVSRKPVPPLEEALKQIQESNLKSEVNLPFSRRPTINWRSIPACPAVSTPDPYLPDQLSPPRVPLRSHHFQILPSYPTVSPARQPHILPIHPSVPSTLPKTFAPVPLLPYPIKYHPCPPTPATSSISSSFPRLPAPIPSCPPGHPPHAPQSSPIIPDPESQHKLFYKTFRPKHFLPAQHSTAATLMPTLVRRSLPAPLVVSPTPLEPLPVLKPSCLSSHPPYPPVPTLSYVTPLPAHPASLDPFQSVQQSVPQATALSNQPEAFADHPPASVLSLASPCHSPSSSLPSSPSTSTSFSSACILFSSSSSILSSSSTSCSTSPSLPPSSIPLFSSPLHSSSSPGLPPTYLAFPSPVSPVSSSFMISSSFPPILHSPSVSTSPSPFIPIHPFNPPHWGKKVEKRREESGVEKKGIEKKVETRQL

SEQ ID NO: 26197 - protein, 81 aa, Homo sapiens
  REGION 1..81: note = ENSP00000437014
  VARIANT 1: note = Any amino acid
XEQKRQNPGSVGQKYSEQINNFGQSVLLSSSEPKQTTRGTSYIEEDIQESICKNPSIKNTLQIIPLLEKREDRTSSCRDKR

SEQ ID NO: 26198 - protein, 74 aa, Homo sapiens
  REGION 1..74: note = ENSP00000464760
MSLPPEKASELKQLIHQQLSKMDVHGRIREILAETIREELAPDQQHLSTEDLIKALRRRGIIDDVMKELNFVTC

SEQ ID NO: 26199 - protein, 659 aa, Homo sapiens
  REGION 1..659: note = ENSP00000262127
MSLPPEKASELKQLIHQQLSKMDVHGRIREILAETIREELAPDQQHLSTEDLIKALRRRGIIDDVMKELNFVTDSVEQELPSSPKQPICFDRQSTLKKTNIDPTRRYLYLQVLGGKAFLEHLQEPEPLPGQVCSTFTLCLHYRNQRFRSKPVPCACEPDFHDGFLLEVHRESLGDGTRMADSTTMLSISDPIHMVLIKTDIFGETTLVASYFLEWRSVLGSENGVTSLTVELMGVGTESKVSVGILNIKLEMYPPLNQTLSQEVVNTQLALERQKTAEKERLFLVYAKQWWREYLQIRPSHNSRLVKIFAQDENGINRPVCSYVKPLRAGRLLDTPRQAARFVNVLGYERAPVIGGGGKQEQWCTLLAFLCRNKGDCEDHANLLCSLLLGYGLEAFVCVGTKAKGVPHAWVMTCGTDGAITFWESLTGHRYIHKPTNPDEPPVAEQPKPLYPYRTIGCVFNHQMFLGNCQPSDAVETCVFDLNDESKWKPMSEEAIKSVCAPGATTSLPPFPPLCASTIDASVTSNEIEMQLRLLVSEHRKDLGLTTVWEDQLSYLLSPALASYEFERTTSISAGNEEFQDAIRRAVPDGHTFKGFPIHFVYRNARRAFATCLRSPFCEEIICCRGDQVRLAVRVRVFTYPESACAVWIMFACKYRSVL

SEQ ID NO: 26200 - protein, 584 aa, Homo sapiens
  REGION 1..584: note = ENSP00000403074
MSLPPEKASELKQLIHQQLSKMDVHGRIREILAETIREELAPDQQHLSTEDLIKALRRRGIIDDVMKELNFVTDSVEQELPSSPKQPICFDRQSTLKKSDGTRMADSTTMLSISDPIHMVLIKTDIFGETTLVASYFLEWRSVLGSENGVTSLTVELMGVGTESKVSVGILNIKLEMYPPLNQTLSQEVVNTQLALERQKTAEKERLFLVYAKQWWREYLQIRPSHNSRLVKIFAQDENGINRPVCSYVKPLRAGRLLDTPRQAARFVNVLGYERAPVIGGGGKQEQWCTLLAFLCRNKGDCEDHANLLCSLLLGYGLEAFVCVGTKAKGVPHAWVMTCGTDGAITFWESLTGHRYIHKPTNPDEPPVAEQPKPLYPYRTIGCVFNHQMFLGNCQPSDAVETCVFDLNDESKWKPMSEEAIKSVCAPGATTSLPPFPPLCASTIDASVTSNEIEMQLRLLVSEHRKDLGLTTVWEDQLSYLLSPALASYEFERTTSISAGNEEFQDAIRRAVPDGHTFKGFPIHFVYRNARRAFATCLRSPFCEEIICCRGDQVRLAVRVRVFTYPESACAVWIMFACKYRSVL

SEQ ID NO: 26201 - protein, 178 aa, Homo sapiens
  REGION 1..178: note = ENSP00000464911
NIKLEMYPPLNQTLSQEVVNTQDENGINRPVCSYVKPLRAGRLLDTPRQAARFVNVLGYERAPVIGGGGKQEQWCTLLAFLCRNKGDCEDHANLLCSLLLGYGLEAFVCVGTKAKGVPHAWVMTCGTDGAITFWESLTGHRYIHKPTNPDEPPVAEQPKPLYPYRTIGCVFNHQMFLG

SEQ ID NO: 26202 - protein, 74 aa, Homo sapiens; identical to SEQ ID NO: 26198
  REGION 1..74: note = ENSP00000466689

SEQ ID NO: 26203 - protein, 101 aa, Homo sapiens
  REGION 1..101: note = ENSP00000467361
  VARIANT 1: note = Any amino acid
XWRSVLGSENGVTSLTVELMGTESKVSVGILNIKLEMYPPLNQTLSQEVVNTQLALERQKTAEKERLFLVYAKQWWREYLQIRPSHNSRLVKIFAQVCKLY

SEQ ID NO: 26204 - protein, 191 aa, Homo sapiens
  REGION 1..191: note = ENSP00000467224
EPLPGQVCSTFTLCLHYRNQRFRSKPVPCACEPDFHDGFLLEVHRESLGDGTRMADSTTMLSISDPIHMVLIKTDIFGETTLVASYFLEWRSVLGSENGVTSLTVELMGVGTESKVSVGILNIKLEMYPPLNQTLSQEVVNTQLALERQKTAEKERLFLVYAKQWWREYLQIRPSHNSRLVKIFAQVCKLY

SEQ ID NO: 26205 - protein, 112 aa, Homo sapiens
  REGION 1..112: note = ENSP00000466833
MSLPPEKASELKQLIHQQLSKMDVHGRIREILAETIREELAPDQQHLSTEDLIKALRRRGIIDDVMKELNFVTDSVEQELPSSPKQPICFDRQSTLKKSFGWKSFLGTSART

SEQ ID NO: 26206 - protein, 416 aa, Homo sapiens
  REGION 1..416: note = ENSP00000349696
MSGHRSTRKRCGDSHPESPVGFGHMSTTGCVLNKLFQLPTPPLSRHQLKRLEEHRYQSAGRSLLEPLMQGYWEWLVRRVPSWIAPNLITIIGLSINICTTILLVFYCPTATEQAPLWAYIACACGLFIYQSLDAIDGKQARRTNSSSPLGELFDHGCDSLSTVFVVLGTCIAVQLGTNPDWMFFCCFAGTFMFYCAHWQTYVSGTLRFGIIDVTEVQIFIIIMHLLAVIGGPPFWQSMIPVLNIQMKIFPALCTVAGTIFSCTNYFRVIFTGGVGKNGSTIAGTSVLSPFLHIGSVITLAAMIYKKSAVQLFEKHPCLYILTFGFVSAKITNKLVVAHMTKSEMHLHDTAFIGPALLFLDQYFNSFIDEYIVLWIALVFSFFDLIRYCVSVCNQIASHLHIHVFRIKVSTAHSNHH

SEQ ID NO: 26207 - protein, 416 aa, Homo sapiens; identical to SEQ ID NO: 26206
  REGION 1..416: note = ENSP00000441980

SEQ ID NO: 26208 - protein, 280 aa, Homo sapiens [sequence omitted]

SEQ ID NO: 26209 - protein, 64 aa, Homo sapiens
  REGION 1..64: note = ENSP00000402508
MLQEWLAAVGDDYAAVVWRPEGEPRFYPDEEGPKHWTKERHQFLMELKQEALTFARNWGADYIL

SEQ ID NO: 26210 - protein, 517 aa, Homo sapiens
  REGION 1..517: note = ENSP00000361933
MLQEWLAAVGDDYAAVVWRPEGEPRFYPDEEGPKHWTKERHQFLMELKQEALTFARNWGADYILFADTDNILTNNQTLRLLMGQGLPVVAPMLDSQTYYSNFWCGITPQGYYRRTAEYFPTKNRQRRGCFRVPMVHSTFLASLRAEGADQLAFYPPHPNYTWPFDDIIVFAYACQAAGVSVHVCNEHRYGYMNVPVKSHQGLEDERVNFIHLILEALVDGPRMQASAHVTRPSKRPSKIGFDEVFVISLARRPDRRERMLASLWEMEISGRVVDAVDGWMLNSSAIRNLGVDLLPGYQDPYSGRTLTKGEVGCFLSHYSIWEEVVARGLARVLVFEDDVRFESNFRGRLERLMEDVEAEKLSWDLIYLGRKQVNPEKETAVEGLPGLVVAGYSYWTLAYALRLAGARKLLASQPLRRMLPVDEFLPIMFDQHPNEQYKAHFWPRDLVAFSAQPLLAAPTHYAGDAEWLSDTETSSPWDDDSGRLISWSGSQKTLRSPRLDLTGSSGHSLQPQPRDEL

SEQ ID NO: 26211 - protein, 109 aa, Homo sapiens
  REGION 1..109: note = ENSP00000402928
MLQEWLAAVGDDYAAVVWRPEGEPRFYPDEEGPKHWTKERHQFLMELKQEALTFARNWGADYILFADTDNILTNNQTLRLLMGQGLPVVAPMLDSQTYYSNFWCGITPQ

SEQ ID NO: 26212 - protein, 218 aa, Homo sapiens
  REGION 1..218: note = ENSP00000416676
MLQEWLAAVGDDYAAVVWRPEGEPRFYPDEEGPKHWTKERHQFLMELKQEALTFARNWGADYILFADTDNILTNNQTLRLLMGQGLPVVAPMLDSQTYYSNFWCGITPQGYYRRTAEYFPTKNRQRRGCFRVPMVHSTFLASLRAEGADQLAFYPPHPNYTWPFDDIIVFAYACQAAGVSVHVCNEHRYGYMNVPVKSHQGLEDERVNFIHLILEALG

SEQ ID NO: 26213 - protein, 595 aa, Homo sapiens
  REGION 1..595: note = ENSP00000361929
MRAARAAPLLQLLLLLGPWLEAAGVAESPLPAVVLAILARNAEHSLPHYLGALERLDYPRARMALWCATDHNVDNTTEMLQEWLAAVGDDYAAVVWRPEGEPRFYPDEEGPKHWTKERHQFLMELKQEALTFARNWGADYILFADTDNILTNNQTLRLLMGQGLPVVAPMLDSQTYYSNFWCGITPQGYYRRTAEYFPTKNRQRRGCFRVPMVHSTFLASLRAEGADQLAFYPPHPNYTWPFDDIIVFAYACQAAGVSVHVCNEHRYGYMNVPVKSHQGLEDERVNFIHLILEALVDGPRMQASAHVTRPSKRPSKIGFDEVFVISLARRPDRRERMLASLWEMEISGRVVDAVDGWMLNSSAIRNLGVDLLPGYQDPYSGRTLTKGEVGCFLSHYSIWEEVVARGLARVLVFEDDVRFESNFRGRLERLMEDVEAEKLSWDLIYLGRKQVNPEKETAVEGLPGLVVAGYSYWTLAYALRLAGARKLLASQPLRRMLPVDEFLPIMFDQHPNEQYKAHFWPRDLVAFSAQPLLAAPTHYAGDAEWLSDTETSSPWDDDSGRLISWSGSQKTLRSPRLDLTGSSGHSLQPQPRDEL

SEQ ID NO: 26214 - protein, 79 aa, Homo sapiens
  REGION 1..79: note = ENSP00000403766
MLQEWLAAVGDDYAAVVWRPEGEPRFYPDEEGPKHWTKERHQFLMELKQEALTFARNWGADYILFADTDNILTNNQTLR

SEQ ID NO: 26215 - protein, 155 aa, Homo sapiens
  REGION 1..155: note = ENSP00000478713
MTAKQCPGAGHYCPESRGGGCWQGLQILSDLATTLGMATLPSGPVFHREKPLRDGSHSLKVSQQRSRTPRPLYPAWPDSGPCGPQLVSSWADPRIPSLPKDSAEGPLCPFYLHLSTLPQLDVWVSPAPSSLAGAKYREVKQDPCRHVAQHTVGPQ

SEQ ID NO: 26216 - protein, 517 aa, Homo sapiens [sequence omitted]

SEQ ID NO: 26217 - protein, 532 aa, Homo sapiens
  REGION 1..532: note = ENSP00000386725
MPWRRRRNRVSALEGGREEEAPPEAAAVPPALLTSPQQTEAAAERILLRGIFEIGRDSCDVVLSERALRWRPIQPERPAGDSKYDLLCKEEFIELKDIFSVKLKRRCSVKQQRSGTLLGITLFICLKKEQNKLKNSTLDLINLSEDHCDIWFRQFKKILAGFPNRPKSLKILLNPQSHKKEATQVYYEKVEPLLKLAGIKTDVTIMEYEGHALSLLKECELQGFDGVVCVGGDGSASEVAHALLLRAQKNAGMETDRILTPVRAQLPLGLIPAGSTNVLAHSLHGVPHVITATLHIIMGHVQLVDVCTFSTAGKLLRFGFSAMFGFGGRTLALAEKYRWMSPNQRRDFAVVKALAKLKAEDCEISFLPFNSSDDVQERRAQGSPKSDCNDQWQMIQGQFLNVSIMAIPCLCSVAPRGLAPNTRLNNGSMALIIARNTSRPEFIKHLKRYASVKNQFNFPFVETYTVEEVKVHPRNNTGGYNPEEEEDETASENCFPWNVDGDLMEVASEVHIRLHPRLISLYGGSMEEMIPK

SEQ ID NO: 26218 - protein, 514 aa, Homo sapiens
  REGION 1..514: note = ENSP00000387080
MPWRRRRNRVSALEGGREEEAPPEAAAVPPALLTSPQQTEAAAERILLRGIFEIGRDSCDVVLSERALRWRPIQPERPAGDSKYDLLCKEEFIELKDIFSVKLKRRCSVKQQRSGTLLGITLFICLKKEQNKLKNSTLDLINLSEDHCDIWFRQFKKILAVMEYEGHALSLLKECELQGFDGGHRKPLFAIHWSVQRLFTGMQTLEPSVVCVGGDGSASEVAHALLLRAQKNAGMETDRILTPVRAQLPLGLIPAGSTNVLAHSLHGVPHVITATLHIIMGHVQLVDVCTFSTAGKLLRFGFSAMFGFGGRTLALAEKYRWMSPNQRRDFAVVKALAKLKAEDCEISFLPFNSSDDVQERRAQGSPKSDCNDQWQMIQGQFLNVSIMAIPCLCSVAPRGLAPNTRLNNGSMALIIARNTSRPEFIKHLKRYASVKNQFNFPFVETYTVEEVKVHPRNNTGGYNPEEEEDETASENCFPWNVDGDLMEVASEVHIRLHPRLISLYGGSMEEMIPK

SEQ ID NO: 26219 - protein, 419 aa, Homo sapiens
  REGION 1..419: note = ENSP00000364108
MPWRRRRNRVSALEGGREEEAPPEAAAVPPALLTSPQQTEAAAERILLRGIFEIGRDSCDVVLSERALRWRPIQPERPAGDSKYDLLCKEEFIELKDIFSVKLKRRCSVKQQRSGTLLGITLFICLKKEQNKLKNSTLDLINLSEDHCDIWFRQFKKILAGSTNVLAHSLHGVPHVITATLHIIMGHVQLVDVCTFSTAGKLLRFGFSAMFGFGGRTLALAEKYRWMSPNQRRDFAVVKALAKLKAEDCEISFLPFNSSDDVQERRAQGSPKSDCNDQWQMIQGQFLNVSIMAIPCLCSVAPRGLAPNTRLNNGSMALIIARNTSRPEFIKHLKRYASVKNQFNFPFVETYTVEEVKVHPRNNTGGYNPEEEEDETASENCFPWNVDGDLMEVASEVHIRLHPRLISLYGGSMEEMIPK

SEQ ID NO: 26220 - protein, 173 aa, Homo sapiens
  REGION 1..173: note = ENSP00000409198
MPWRRRRNRVSALEGGREEEAPPEAAAVPPALLTSPQQTEAAAERILLRGIFEIGRDSCDVVLSERALRWRPIQPERPAGDSKYDLLCKEEFIELKDIFSVKLKRRCSVKQQRSGTLLGITLFICLKKEQNKLKNSTLDLINLSEDHCDIWFRQFKKILAVLSVLVEMDLLAK

SEQ ID NO: 26221 - protein, 558 aa, Homo sapiens
  REGION 1..558: note = ENSP00000341159
MPWRRRRNRVSALEGGREEEAPPEAAAVPPALLTSPQQTEAAAERILLRGIFEIGRDSCDVVLSERALRWRPIQPERPAGDSKYDLLCKEEFIELKDIFSVKLKRRCSVKQQRSGTLLGITLFICLKKEQNKLKNSTLDLINLSEDHCDIWFRQFKKILAGFPNRPKSLKILLNPQSHKKEATQVYYEKVEPLLKLAGIKTDVTIMEYEGHALSLLKECELQGFDGGHRKPLFAIHWSVQRLFTGMQTLEPSVVCVGGDGSASEVAHALLLRAQKNAGMETDRILTPVRAQLPLGLIPAGSTNVLAHSLHGVPHVITATLHIIMGHVQLVDVCTFSTAGKLLRFGFSAMFGFGGRTLALAEKYRWMSPNQRRDFAVVKALAKLKAEDCEISFLPFNSSDDVQERRAQGSPKSDCNDQWQMIQGQFLNVSIMAIPCLCSVAPRGLAPNTRLNNGSMALIIARNTSRPEFIKHLKRYASVKNQFNFPFVETYTVEEVKVHPRNNTGGYNPEEEEDETASENCFPWNVDGDLMEVASEVHIRLHPRLISLYGGSMEEMIPK

SEQ ID NO: 26222 - protein, 463 aa, Homo sapiens
  REGION 1..463: note = ENSP00000364109
MPWRRRRNRVSALEGGREEEAPPEAAAVPPALLTSPQQTEAAAERILLRGIFEIGRDSCDVVLSERALRWRPIQPERPAGDSKYDLLCKEEFIELKDIFSVKLKRRCSVKQQRSGTLLGITLFICLKKEQNKLKNSTLDLINLSEDHCDIWFRQFKKILAGFPNRPKSLKILLNPQSHKKEATQVYYEKVEPLLKLAGIKTDVTRSTNVLAHSLHGVPHVITATLHIIMGHVQLVDVCTFSTAGKLLRFGFSAMFGFGGRTLALAEKYRWMSPNQRRDFAVVKALAKLKAEDCEISFLPFNSSDDVQERRAQGSPKSDCNDQWQMIQGQFLNVSIMAIPCLCSVAPRGLAPNTRLNNGSMALIIARNTSRPEFIKHLKRYASVKNQFNFPFVETYTVEEVKVHPRNNTGGYNPEEEEDETASENCFPWNVDGDLMEVASEVHIRLHPRLISLYGGSMEEMIPK

SEQ ID NO: 26223 - protein, 217 aa, Homo sapiens
  REGION 1..217: note = ENSP00000364106
MPWRRRRNRVSALEGGREEEAPPEAAAVPPALLTSPQQTEAAAERILLRGIFEIGRDSCDVVLSERALRWRPIQPERPAGDSKYDLLCKEEFIELKDIFSVKLKRRCSVKQQRSGTLLGITLFICLKKEQNKLKNSTLDLINLSEDHCDIWFRQFKKILAGFPNRPKSLKILLNPQSHKKEATQVYYEKVEPLLKLAGIKTDVTMLSVLVEMDLLAK

SEQ ID NO: 26224 - protein, 173 aa, Homo sapiens; identical to SEQ ID NO: 26220
  REGION 1..173: note = ENSP00000411466

SEQ ID NO: 26225 - protein, 92 aa, Homo sapiens
  REGION 1..92: note = ENSP00000453796
MLSSFNEWFWQDRFWLPPNVTWTELEDRDGRVYPHPQDLLAALPLALVLLAMRLAFERFIGLPLSRWLGVRDQTRRQVKPNATLEKHFLTEG

SEQ ID NO: 26226 - protein, 113 aa, Homo sapiens
  REGION 1..113: note = ENSP00000453388
MLSSFNEWFWQDRFWLPPNVTWTELEDRDGRVYPHPQDLLAALPLALVLLAMRLAFERFIGLPLSRWLGVRDQTRRQVKPNATLEKHFLTEGHRPKEPQLSLLAAQCGLTLQQ

SEQ ID NO: 26227 - protein, 343 aa, Homo sapiens
  REGION 1..343: note = ENSP00000452753
MRLAFERFIGLPLSRWLGVRDQTRRQVKPNATLEKHFLTEGHRPKEPQLSLLAAQCGLTLQQTQRWFRRRRNQDRPQLTKKFCEASWRFLFYLSSFVGGLSVLYHESWLWAPVMCWDRYPNQTLKPSLYWWYLLELGFYLSLLIRLPFDVKRKDFKEQVIHHFVAVILMTFSYSANLLRIGSLVLLLHDSSDYLLEACKMVNYMQYQQVCDALFLIFSFVFFYTRLVLFPTQILYTTYYESISNRGPFFGYYFFNGLLMLLQLLHVFWSCLILRMLYSFMKKGQMEKDIRSDVEESDSSEEAAAAQEPLQLKNGAAGGPRPAPTDGPRSRVAGRLTNRHTTAT

SEQ ID NO: 26228 - protein, 136 aa, Homo sapiens
  REGION 1..136: note = ENSP00000452910
MLSSFNEWFWQDRFWLPPNVTWTELEDRDGRVYPHPQDLLAALPLALVLLAMRLAFERFIGLPLSRWLGVRDQTRRQVKPNATLEKHFLTEGHRPKEPQLSLLAAQCGLTLQQTQRWFRRRRNQDRPQLTKKFCEA

SEQ ID NO: 26229 - protein, 394 aa, Homo sapiens
  REGION 1..394: note = ENSP00000251363
MLSSFNEWFWQDRFWLPPNVTWTELEDRDGRVYPHPQDLLAALPLALVLLAMRLAFERFIGLPLSRWLGVRDQTRRQVKPNATLEKHFLTEGHRPKEPQLSLLAAQCGLTLQQTQRWFRRRRNQDRPQLTKKFCEASWRFLFYLSSFVGGLSVLYHESWLWAPVMCWDRYPNQTLKPSLYWWYLLELGFYLSLLIRLPFDVKRKDFKEQVIHHFVAVILMTFSYSANLLRIGSLVLLLHDSSDYLLEACKMVNYMQYQQVCDALFLIFSFVFFYTRLVLFPTQILYTTYYESISNRGPFFGYYFFNGLLMLLQLLHVFWSCLILRMLYSFMKKGQMEKDIRSDVEESDSSEEAAAAQEPLQLKNGAAGGPRPAPTDGPRSRVAGRLTNRHTTAT

SEQ ID NO: 26230 - protein, 394 aa, Homo sapiens; identical to SEQ ID NO: 26229
  REGION 1..394: note = ENSP00000453509

SEQ ID NO: 26231 - protein, 306 aa, Homo sapiens
  REGION 1..306: note = ENSP00000453815
MLSSFNEWFWQDRFWLPPNVTWTELEDRDGRVYPHPQDLLAALPLALVLLAMRLAFERFIGLPLSRWLGVRDQTRRQVKPNATLEKHFLTEGHRPKEPQLSLLAAQCGLTLQQTQRWFRRRRNQDRPQLTKKFCEASWRFLFYLSSFVGGLSVLYHESWLWAPVMCWDRYPNQTLKPSLYWWYLLELGFYLSLLIRLPFDVKRKDFKEQVIHHFVAVILMTFSYSANLLRIGSLVLLLHDSSDYLLEMEKDIRSDVEESDSSEEAAAAQEPLQLKNGAAGGPRPAPTDGPRSRVAGRLTNRHTTAT

SEQ ID NO: 26232 - protein, 31 aa, Homo sapiens
  REGION 1..31: note = ENSP00000452920
MLSSFNEWFWQDRFWLPPNVTWTELEDRDGR

SEQ ID NO: 26233 - protein, 192 aa, Homo sapiens
  REGION 1..192: note = ENSP00000454122
MLSSFNEWFWQDRFWLPPNVTWTELEDRDGRVYPHPQDLLAALPLALVLLAMRLAFERFIGLPLSRWLGVRDQTRRQVKPNATLEKHFLTEGHRPKEPQLSLLAAQCGLTLQQTQRWFRRRRNQDRPQLTKKFCEASWRFLFYLSSFVGGLSVLYHESWLWAPVMCWDRYPNQTLKPSLYWWYLLELGFYLS

SEQ ID NO: 26234 - protein, 111 aa, Homo sapiens
  REGION 1..111: note = ENSP00000453414
MKDFLEKRDKGKLLIQRSRRLKQNLLRPMQLSVTEDGYIHYGDKVMLVNPDDPDTEADVFLRGDLSLCMTPDEIQSHLKDELEVPCGLSAVQAKTPIGRNTFIILSVHRDA

SEQ ID NO: 26235 - protein, 105 aa, Homo sapiens
  REGION 1..105: note = ENSP00000454135
MKDFLEKRDKGKLLIQRSRRLKQNLLRPMQLSVTEDGYIHYGDKVMLVNPDDPDTEADVFLRGDLSLCMTPDEIQSHLKDELEVPCGLSAVQAKTPIGRNTFIIL

SEQ ID NO: 26236 - protein, 301 aa, Homo sapiens
  REGION 1..301: note = ENSP00000286732
MAQNVYGPGVRIGNWNEDVYLEEELMKDFLEKRDKGKLLIQRSRRLKQNLLRPMQLSVTEDGYIHYGDKVMLVNPDDPDTEADVFLRGDLSLCMTPDEIQSHLKDELEVPCGLSAVQAKTPIGRNTFIILSVHRDATGQVLRYGQDFCLGITGGFDNKMLYLSSDHRTLLKSSKRSWLQEVYLTDEVSHVNCWQAAFPDPQLRLEYEGFPVPANAKILINHCHTNRGLAAHRHLFLSTYFGKEAEVVAHTYLDSHRVEKPRNHWMLVTGNPRDASSSMLDLPKPPTEDTRAMEQAMGLDTQ

SEQ ID NO: 26237 - protein, 193 aa, Homo sapiens
  REGION 1..193: note = ENSP00000262498
MFKNTFQSGFLSILYSIGSKPLQIWDKKVRNGHIKRITDNDIQSLVLEIEGTNVSTTYITCPADPKKTLGIKLPFLVMIIKNLKKYFTFEVQVLDDKNVRRRFRASNYQSTTRVKPFICTMPMRLDDGWNQIQFNLLDFTRRAYGTNYIETLRVQIHANCRIRRVYFSDRLYSEDELPAEFKLYLPVQNKAKQ

SEQ ID NO: 26238 - protein, 108 aa, Homo sapiens
  REGION 1..108: note = ENSP00000455220
MFKNTFQSGFLSILYSIGSKPLQIWDKKVRNGHIKRITDNDIQSLVLEIEGTNVSTTYITCPADPKKTLGIKLPFLVMIIKNLKKYFTFEVQMTRMCVVAFGQVTTRA

SEQ ID NO: 26239 - protein, 269 aa, Homo sapiens
  REGION 1..269: note = ENSP00000295220
MAVVKTPSRGLKNAKEPFNNASPHLLKNLVEEPKKRKEVPNHLLESKVYAKLVNNKVIQARPGIIHFGGYQVEKQHQQILHLVNVSNEDTRVHILPPQTKYFEINYVRKEHHLVPGLSLTVTVTFSPDEWRYYYDCIRVHCKGDDTLLVPIHAYPVMNSLDFPSFINLSNVLLGESKTYVIPLQCSCPVDFEFYITLIQSHQAFAIEPTSGIIPANGKMTVTIKFTPFQYGTAQIKMQLWISQFNSQPYECVFTGTCYPNMALPSLSQL

SEQ ID NO: 26240 - protein, 134 aa, Homo sapiens
  REGION 1..134: note = ENSP00000470662
MAVVKTPSRGLKNAKEPFNNASPHLLKNLVEEPKKRKEVPNHLLESKVYAKLVNNKVIQARPGIIHFGGYQVEKQHQQILFTEKAHWHDVPWNCLRHYLVEISLPAPSLCLLTAFSAIHHVDHSSLLPQTPGLK

SEQ ID NO: 26241 - protein, 53 aa, Homo sapiens
  REGION 1..53: note = ENSP00000391760
MAVVKTPSRGLKNAKEPFNNASPHLLKNLVEEPKKRKEVPNHLLESTSGQCFQ

SEQ ID NO: 26242 - protein, 175 aa, Homo sapiens
  REGION 1..175: note = ENSP00000409912
MAVVKTPSRGLKNAKEPFNNASPHLLKNLVEEPKKRKEVPNHLLESKVYAKLVNNKVIQARPGIIHFGGYQVEKQHQQILHLVNVSNEDTRVHILPPQTKYFEINYVRKEHHLVPGLSLTVTVTFSPDEWRYYYDCIRVHCKGDDTLLVPIHAYPVMNSLDFPSFINLSNVLLGE

SEQ ID NO: 26243 - protein, 90 aa, Homo sapiens
  REGION 1..90: note = ENSP00000470784
MAVVKTPSRGLKNAKEPFNNASPHLLKNLVEEPKKRKEVPNHLLESKVYAKLVNNKVIQARPGIIHFGGYQVEKQHQQILVLAGSPVLGV

SEQ ID NO: 26244 - protein, 840 aa, Homo sapiens
  REGION 1..840: note = ENSP00000393222
MAVVKTPSRGLKNAKEPFNNASPHLLKNLVEEPKKRKEVPNHLLESKVYAKLVNNKVIQARPGIIHFGGYQVEKQHQQILHLVNVSNEDTRVHILPPQTKYFEINYVRKEHHLVPGLSLTVTVTFSPDEWRYYYDCIRVHCKGDDTLLVPIHAYPVMNSLDFPSFINLSNVLLGESKTYVIPLQCSCPVDFEFYITLIQSHQAFAIEPTSGIIPANGKMTVTIKFTPFQYGTAQIKMQLWISQFNSQPYECVFTGTCYPNMALPLEEFERLNTLSKKVNVPPEKAMMHINFHRPPAKPKPQKVKEIEYQNLRFPVDLSNPFAVATVLNQEPGKLKIKELREVLDQGTEISKTRQMKEALFEQKVRQDIHEEMENHLKWQVHLGKDPMSFKLKKELTEEWQKACAKYKLDRGDPILDEEFQRLKTEVSHKRVVRNQEEKIKEFHPTFDPLINNTWLSRSRAQKRFQQVARKVMIQGRLFNMLSAVREMDKESILRKIGQAKQSIAQEANFFKFFLRRISQDDYTSRFSVSPKEVLPFAFPDCSPPQDSNELAPDGLGLVPIKSSEVQIKQSYSFFNLQVPQLYKIKRYQPFSVHKSSTSYRPQKLARALKQGAEDEVTTITALPKQDSTTQLSGKTSVLSMKPPEALAMSLDYDPLYVFNPNPGLFAVMHPLTYAETLIDYHLCSHPKYKFTKESRHGSSIPVTQKQFLHHTDIIPGIMHWKSFQSLVLSSLPDPSKMETTKSCDSFNSFMLPIDVPAILDALPEEDRLETVERELCEQNVEVMLTPEMIKVEFPMLNYKDIRKEKEVKDQAQPAEKAGEKLLEEMRNLRGKALNTYLILE

SEQ ID NO: 26245 - protein, 187 aa, Homo sapiens
  REGION 1..187: note = ENSP00000472563
MAVVKTPSRGLKNAKEPFNNASPHLLKNLVEEPKKRKEVPNHLLESKVYAKLVNNKVIQARPGIIHFGGYQVEKQHQQILHLVNVSNEDTRVHILPPQTKYFEINYVRKEHHLVPGLSLTVTVTFSPDEWRYYYDCIRVHCKGDDTLLVPIHAYPVMNSLDFPSFINLSNVLLGESLPNSVFLVPDN

SEQ ID NO: 26246 - protein, 173 aa, Homo sapiens
  REGION 1..173: note = ENSP00000470283
  VARIANT 1: note = Any amino acid
XKNAKEPFNNASPHLLKNLVEEPKKRKEVPNHLLESKVYAKLVNNKVIQARPGIIHFGGYQVEKQHQQILHLVNVSNEDTRVHILPPQTKYFEINYVRKEHHLVPGLSLTVTVTFSPDEWRYYYDCIRVHCKGDDTLLVPIHAYPVMNSLDFPSFINLSNVLLGERIRKHLTE

SEQ ID NO: 26247 - protein, 46 aa, Homo sapiens
  REGION 1..46: note = ENSP00000472069
VIPLQCSCPVDFEFYITLIQSHQAFAIEPTSGTRSIIYAHLPGILC

SEQ ID NO: 26248 - protein, 118 aa, Homo sapiens
  REGION 1..118: note = ENSP00000471092
  VARIANT 1: note = Any amino acid
XGDPILDEEFQRLKTEVSHKRVVRNQEEKIKEFHPTFDPLINNTWLSRSRAQKRFQQVARKVMIQGRLFNMLSAVREMDKESILRKIGQAKQSIAQGEVWLQSTEMPRLIMPLSVNFP

SEQ ID NO: 26249 - protein, 399 aa, Homo sapiens
  REGION 1..399: note = ENSP00000413299
  VARIANT 1: note = Any amino acid
XHPTFDPLINNTWLSRSRAQKRFQQVARKVMIQGRLFNMLSAVREMDKESILRKIGQAKQSIAQEANFFKFFLRRISQDDYTSRFSVSPKEVLPFAFPDCSPPQDSNELAPDGLGLVPIKSSEVQIKQSYSFFNLQVPQLYKIKRYQPFSVHKSSTSYRPQKLARALKQGAEDEVTTITALPKQDSTTQLSGKTSVLSMKPPEALAMSLDYDPLYVFNPNPGLFAVMHPLTYAETLIDYHLCSHPKYKFTKESRHGSSIPVTQKQFLHHTDIIPGIMHWKSFQSLVLSSLPDPSKMETTKSCDSFNSFMLPIDVPAILDALPEEDRLETVERELCEQNVEVMLTPEMIKVEFPMLNYKDIRKEKEVKDQAQPAEKAGEKLLEEMRNLRGKALNTYLILE

SEQ ID NO: 26250 - protein, 88 aa, Homo sapiens
  REGION 1..88: note = ENSP00000471998
  VARIANT 1: note = Any amino acid
XFNLQVPQLYKIKRYQPFSVHKSSTSYRPQKLARALKQGAEDEVTTITALPKQDSTTQLSGKTSVLSMKPPEALAMSLDYDPLYVFTS

SEQ ID NO: 26251 - protein, 96 aa, Homo sapiens
  REGION 1..96: note = ENSP00000399793
  VARIANT 1: note = Any amino acid
XSRHGSSIPVTQKQFLHHTDIIPGIMHWKSFQSLVLSSLPDPSKMETTKSCDSFNSFMLPIDVPAILDALPEEDRLETVERSTWICCCICDDRVGV

SEQ ID NO: 26252 - protein, 514 aa, Homo sapiens
  REGION 1..514: note = ENSP00000394274
  VARIANT 1: note = Any amino acid
XWTEEERKQFKDYEKKVKELNEERDKYRKSLEAELKKLQNSIQESTQAFDEHLKRLFERRVKAEMVTNQEELKISNLAFSLLLDEELSSREKFLNNYLTRKQHEKSQTSEAVRKSREDLDVCKEHYDNLLAEDKVMDRSFKKEFSEIPGHQVDILYKLFKRRPRISKQKTHSETTSVVPFGELPGSGKLNKDAFAQLMKAMDELDNISNMPEGLDPLVWNHFCMTRRAKVENEQKVKQKAADLLEMATFLQKRVEEEEKVQQEIERVFHELILLQEEKVRFQLNLTIQILLKQGQVELENFQLVLEYSDAILINKNIIEDLNSVIRTQGQKKVASMMESKDVHKRILQIEWEHKKMEMEREDLNQKAWDIQMLFFSRDRQKYLNEPNYEALISIQIGIMEQTIAVLDKMHKKNVENCKKLLKKLGKFSNQKDIANYALSCNLREELVAVSERKDICNAMGSKLTCEKIVKERYENMMQQQKLTNISKQQAEQISILQTEVERLRMKTFPALVQM

SEQ ID NO: 26253 - protein, 997 aa, Homo sapiens
  REGION 1..997: note = ENSP00000391364
  VARIANT 1: note = Any amino acid
XPGLLYLSSHGLWLITIAKCGILCIRDVYTLETFAWCRSHSHQGHGIQSMRISMDGQNILVNGRDDGTLVYLKWKRFGGHLASEILDYYQKLLISLSSAMDKENHYLSTTPKVSVDLGSDSEHTKQKASTDLSQDELVLTDVKKEIPWIQQKSQEAIKKEVNLFSKKRKEIKQGIKSLSKTILNMMEENDKLENIAKLDQQEFGLDLEELERLHDESQEEVAKMIKDVEMHNLAKSYLAELIKEECWNSMAVKGRALKCFHIPCVVENFPMKARTVEELKELERVLQQKKIEAECLKLRKEIVEAQSGVKLIKQRHEEDDEEEEEEDKTVKYSNLPNYLLGSLSTDFGVDTSLLSSQLELHSREEKINQIILLKDIIYKVKTVFNNEFDAAYKQKEFEIARVKERNVRIREIILDLELEEAVWQPEFEDCEKPERTLVVQDEEITAHKHIKPWHKAKELIVNHEKEHWLLIQDASTRLRALMDMMGGVLEVKKEDILRMVIPQPAFMAKPDAVWTEEERKQFKDYEKKVKELNEERDKYRKSLEAELKKLQNSIQESTQAFDEHLKRLFERRVKAEMVTNQEELKISNLAFSLLLDEELSSREKFLNNYLTRKQHEKVMDRSFKKEFSEIPGHQVDILYKLFKRRPRISKQKTHSETTSVVPFGELPGSGKLNKDAFAQLMKAMDELDNISNMPEGLDPLVWNHFCMTRRAKVENEQKVKQKAADLLEMATFLQKRVEEEEKVQQEIERVFHELILLQEEKVRFQLNLTIQILLKQGQVELENFQLVLEYSDAILINKNIIEDLNSVIRTQGQKKVASMMESKDVHKRILQIEWEHKKMEMEREDLNQKAWDIQMLFFSRDRQKYLNEPNYEALISIQIGIMEQTIAVLDKMHKKNVENCKKLLKKLGKFSNQKDIANYALSCNLREELVAVSERKDICNAMGSKLTCEKIVKERYENMMQQQKLTNISKQQAEQISILQTEVERLRMKTFPALVQM

SEQ ID NO: 26254 - protein, 870 aa, Homo sapiens
  REGION 1..870: note = ENSP00000278064
MATNIPCEVVAFSDRKLKPLIYVYSFPGLTRRTKLKGNILLDYTLLSFSYCGTYLASYSSLPEFELALWNWESSIILCKKSQPGMDVNQMSFNPMNWRQLCLSSPSTVSVWTIERSNQEHCFRARSVKLPLEDGSFFNETDVVFPQSLPKDLIYGPVLPLSAIAGLVGKEAETFRPKDDLYPLLHPTMHCWTPTSDLYIGCEEGHLLMINGDTLQVTVLNKIEEESPLEDRRNFISPVTLVYQKEGVLASGIDGFVYSFIIKDRSYMIEDFLEIERPVEHMTFSPNYTVLLIQTDKGSVYIYTFGKEPTLNKVLDACDGKFQAIDFITPGTQYFMTLTYSGEICVWWLEDCACVSKIYLNTLATVLACCPSSLSAAVGTEDGSVYFISVYDKESPQVVHKAFLSESSVQHVVYDQQGIFLLVGTAEGKVFIINANSSSSFQIIGFTEVAKDILQISTVSLLETDIVEVMVLSSLPEAGRSRLEMFTLPTLLPQVSTTFADERGRLKDEIIHKYLYELEHALSSAVLGFQSNQIYGFCSQVPYICSYLLPEEEHTGIYILKPYKKVQSRQYGPGLLYLSSHGLWLITIAKCGILCIRDVYTLETFAWCRSHSHQGHGIQSMRISMDGQNILVNGRDDGTLVYLKWKRFGGHLASEILDYYQKLLISLSSAMDKENHYLSTTPKVSVDLGSDSEHTKQKASTDLSQDELVLTDVKKEIPWIQQKSQEAIKKEVNLFSKKRKEIKQGIKSLSKTILNMMEENDKLENIAKLDQQEFGLDLEELERLHDESQEEVAKMIKDVEMHNLAKSYLAELIKEECWNSMAVKGRALKCFHIPCVVENFPMKARTVEELKELERVLQQKKIEAECLKVLF

SEQ ID NO: 26255 - protein, 412 aa, Homo sapiens
  REGION 1..412: note = ENSP00000358734
MATNIPCEVVAFSDRKLKPLIYVYSFPGLTRRTKLKGNILLDYTLLSFSYCGTYLASYSSLPEFELALWNWESSIILCKKSQPGMDVNQMSFNPMNWRQLCLSSPSTVSVWTIERSNQEHCFRARSVKLPLEDGSFFNETDVVFPQSLPKDLIYGPVLPLSAIAGLVGKEAETFRPKDDLYPLLHPTMHCWTPTSDLYIGCEEGHLLMINGDTLQVTVLNKIEEESPLEDRRNFISPVTLVYQKEGVLASGIDGFVYSFIIKDRSYMIEDFLEIERPVEHMTFSPNYTVLLIQTDKGSVYIYTFGKEPTLNKVLDACDGKFQAIDFITPGTQYFMTLTYSGEICVWWLEDCACVSKIYLNTLATVLACCPSSLSAAVGTEDGSVYFISVYDKESPQVVHKAFLSESSVQHVV

SEQ ID NO: 26256 - protein, 303 aa, Homo sapiens
  REGION 1..303: note = ENSP00000358733
MATNIPCEVVAFSDRKLKPLIYVYSFPGLTRRTKLKGNILLDYTLLSFSYCGTYLASYSSLPEFELALWNWESSIILCKKSQPGMDVNQMSFNPMNWRQLCLSSPSTVSVWTIERSNQEHCFRARSVKLPLEDGSFFNETDVVFPQSLPKDLIYGPVLPLSAIAGLVGKEAETFRPKDDLYPLLHPTMHCWTPTSDLYIGCEEGHLLMINGDTLQVTVLNKIEEESPLEDRRNFISPVTLVYQKEGVLASGIDGFVYSFIIKDRSYMIEDFLEIERPVEHMTFSPNYTVLLIQTDKVCWMVIS

SEQ ID NO: 26257 - protein, 1665 aa, Homo sapiens
  REGION 1..1665: note = ENSP00000349568
MAQGRERDEGPHSAGGASLSVRWVQGFPKQNVHFVNDNTICYPCGNYVIFINIETKKKTVLQCSNGIVGVMATNIPCEVVAFSDRKLKPLIYVYSFPGLTRRTKLKGNILLDYTLLSFSYCGTYLASYSSLPEFELALWNWESSIILCKKSQPGMDVNQMSFNPMNWRQLCLSSPSTVSVWTIERSNQEHCFRARSVKLPLEDGSFFNETDVVFPQSLPKDLIYGPVLPLSAIAGLVGKEAETFRPKDDLYPLLHPTMHCWTPTSDLYIGCEEGHLLMINGDTLQVTVLNKIEEESPLDRRNFISPVTLVYQKEGVLASGIDGFVYSFIIKDRSYMIEDFLEIERPVEHMTFSPNYTVLLIQTDKGSVYIYTFGKEPTLNKVLDACDGKFQAIDFITPGTQYFMTLTYSGEICVWWLEDCACVSKIYLNTLATVLACCPSSLSAAVGTEDGSVYFISVYDKESPQVVHKAFLSESSVQHVVYDQQGIFLLVGTAEGKVFIINANSSSSFQIIGFTEVAKDILQISTVSLLETDIVEVMVLSSLPEAGRSRLEMFTLPTLLPQVSTTFADERGRLKDEIIHKYLYELEHALSSAVLGFQSNQIYGFCSQVPYICSYLLPEEEHTGIYILKPYKKVQSRQYGPGLLYLSSHGLWLITIAKCGILCIRDVYTLETFAWCRSHSHQGHGIQSMRISMDGQNILVNGRDDGTLVYLKWKRFGGHLASEILDYYQKLLISLSSAMDKENHYLSTTPKVSVDLGSDSEHTKQKASTDLSQDELVLTDVKKEIPWIQQKSQEAIKKEVNLFSKKRKEIKQGIKSLSKTILNMMEENDKLENIAKLDQQEFGLDLEELERLHDESQEEVAKMIKDVEMHNLAKSYLAELIKEECWNSMAVKGRALKCFHIPCVVENFPMKARTVEELKELERVLQQKKIEAECLKLRKEIVEAQSGVKLIKQRHEEDDEEEEEEDKTVKYSNLPNYLLGSLSTDFGVDTSLLSSQLELHSREEKINQIILLKDIIYKVKTVFNNEFDAAYKQKEFEIARVKERNVRIREIILDLELEEAVWQPEFEDCEKPERTLVVQDEEITAHKHIKPWHKAKELIVNHEKEHWLLIQDASTRLRALMDMMGGVLEVKKEDILRMVIPQPAFMAKPDAVWTEEERKQFKDYEKKVKELNEERDKYRKSLEAELKKLQNSIQESTQAFDEHLKRLFERRVKAEMVTNQEELKISNLAFSLLLDEELSSREKFLNNYLTRKQHEKSQTSEAVRKSREDLDVCKEHYDNLLAEDKVMDRSFKKEFSEIPGHQVDILYKLFKRRPRISKQKTHSETTSVVPFGELPGSGKLNKDAFAQLMKAMDELDNISNMPEGLDPLVWNHFCMTRRAKVENEQKVKQKAADLLEMATFLQKRVEEEEKVQQEIERVFHELILLQEEKVRFQLNLTIQILLKQGQVELENFQLVLEYSDAILINKNIIEDLNSVIRTQGQKKVASMMESKDVHKRILQIEWEHKKMEMEREDLNQKAWDIQMLFFSRDRQKYLNEPNYEALISIQIGIMEQTIAVLDKMHKKNVENCKKLLKKLGKFSNQKDIANYALSCNLREELVAVSERKDICNAMGSKLTCEKIVKERYENMMQQQKLTNISKQQAEQISILQTEVERLRMKTFPALVQM

SEQ ID NO: 26258 - protein, 2715 aa, Homo sapiens
  REGION 1..2715: note = ENSP00000357575
MDLVITQELARAESQQDAASLKKAYELIKSANLGKSEFDPSESFSPDLFVLCAEQALKMRQPEVSEDCIQMYFKVKAPITQFLGRAHLCRAQMCAPKSAENLEEFENCVTEYMKAINFAKGEPRYYFLVYNASVLYWQMVRPFLKPGYRHHLIPSLSQIINVLSQTEEEDKEWRAELMLELLECYLQAGRKEEAARFCSTAAPFIKSHVPQKYRQIFSVMVRHELMDELQLKEEKKNSISLSVTFYINMLKAKAEQNDLPGDISVILRKAYRHLGHYNHQRFPSISEEKMLLLFELARFSLTLKCMEISSACLSDLKKMESKDPGKLIEMECLECESEALRLESKMKVYNRAAVEAQLDIIQRLDVALQRAVRLGDPRVIHVVCATQWNTCLPLLQHNLRHHLRKPLAGVADVLEKLDSLMTLLRCQVHMEMAQIEEDEDRLEPATEHLRKAARLDSLGLYRDRIQMASTRLRLCTTLYQAPERAEDKAIMAVEQAKKATPKDSVRKKRALLVNAGLALAPDAFQIVLDSENEAKVSTGKNRGRFTYLCAKAWHHTVSVDKAAGHLRRLGNENDKERIQIWAELAKVARKQGVWDVCRTASRFCLLYDNVKVKKLRLRRGKKKRGRDGSVQDTWSQPEVVLQRQVCPDLLRKFAEVGFIHAEATVHLLRSEGVELNDRAIPPEDLSQHPAGYVPEPPEVNAEWITYRTWIESLSRCAMNNWLRSAEIGQEIQEAWIVQNAVVYVLNHNHHLILAGRQKELVDALYHLLSIVKATGHSGDPVMLVTLCNTLARGLIISWIPVQAAEKSRKFMRPNAFHSPLDAGATSEIKTAVEVCEFALNLTNGSAPEETVPTGTRQQLIATWVKAKQLLQQQIGPRLGTEEQGTNEDVSSVTRVLVALEMYSCNGLGLMDFTVPSLAQLVKMASECNWSDPLVELQTLTRLTHFAHAARDHETTMACAHRALEMGIKYLKKFGPEESRLVAEMLCTATAIQGRSIMENLKGRKQLRLVAAKAFTESARFGGIAGSSALVMLAARHYWNAWLPLLSSAVYRKKAKGALKRLIGIINKTEARKQEKGKTLLLHQWPTADFQGGGTTEGYFLPGAEDDLALRAALYGLLFHSHADQDDWEGGLKVLDEAVQVLPRTAHRLLIFKHMVIVKAKLGQNFSMEIQKFKAESEDYLARMWHRLALNSPSVSGELACYNNAIQALQKPEMEWQKVEYLMEFGQWLHHRHFPLEDVVFHLRWAVEILLAMKPPGDVPEPQPTPDGEYVAVEMPPRSPVSEAEEAVSLEQLRSVRQLEALARVHILLALVLSPGAEGYEDCCLAAYAFFRHIWQVSLMTAGKSVLENRPLAATSSHLLLPKKEKENERSKEKEKERSKEKENERSKEKDKEKGKEEKVKEPKQSQSPAPIKQLEDLPMSIEEWASYSCPEEVLSVLKQDRSDSTVNPSSIQKPTYSLYFLDHLVKALQKMCLHELTVPVLQLGVLISDSVVGSKGLSDLYHLRLAHACSELKLREAAARHEEAVGQVCVSELEQASCRKEIALKKEKNKEPLLEESLPALNEQTLPVQPGEIKPLDAKDKILKMNGETGRDLDGTSFPHLWMLKAEVLLEMNLYQPARLLLSEAYLAFQELDEPCAEAQCLLLLAQLANKEKNYGQAKKMIAQAQHLGGSEEFWYNSTLTLAEALLSMEHSGREATVCHIFQKLINAFKILKKERPNRLPLLEFMITDLEARCLSLRVRVAQHSAVTEPTECSLLLKEMDDGLLEIERKFIDCGCKENCVDVKLERAKIKRLRAQNEKDEEQKTAYYLEAYGLAQGAVAEEEGRLHSIQGLYGLAQGAMAEEEGRLHSVQGLLSLQDLQNVNTPLMRKLARLKLGLVEMALDMLQFIWEEAHGQQSEQGSLEKLLADYLQNTSDYTSVGLQWFTLKRTLAHGALAQLGSLQPLSVGCVEIRARLLGLAGRALHLLAMQADPVHPTCYWEAGPSVGAKLSGLKSLELEVEEEGATKSSRDPPASRAAPEEHCRRGEDLKRRMVLAQQYLAQASEVLLQCLQVALGSGLLDVAAAASLEMVECVGTLDPATTCQFLALSQSCSASETMRDVLLAATANTSSSQLAALLQLQHQLRCQDRTTTSLGARVEQRLAAVSKAWQNLCVTEQHFNLLNEMPPTFWILFLHLSGDRSRLYGAAYEKPKFITAAKGKVQAVGGSCKVMRLAISPTAFSHLLACAQQFRKQTQAQVYSEDMALNIGSEPEGLQVEEKERPVQRLSSVLGPLEELLQPLFPLLSLSKARVQTPAVVADSGKSKGKDKERKTSTGQHSTVQPEVADKIVLVADRHLLELPLEGLSVFDEGTISSVSREFSLQMLWNRLHKEETEGGVKKEGRSRDPKKRSLAKKGRKGSIPRTIPPDCIIVDSDNFKFVVDPYEEAQGPEMLTPVSITQDILERFQDTFTSRWAGHLGSKHFPSQAQWEQALGSCSGFFFYGMESFLSHILVERLVAMNLQECQVAVLLDLARSYQSLKRHMESVEHRRSVGRWEANWRNSASPSEDEWRRGGEPRRGFSDLEGQAAAAPKLRAPSHHAQLGPVWAAAPSHRVVQAWTCLPSAAGAPALASALGSAPLPTHPHLPAPIPSSQLALPFLGLSPALGAASARDPPPATSRKAAAWTSSSACLCAPWGLRRGWSCVSSRGQDKGGLPLAALVLSCLDQKTIQTVSLFLI

SEQ ID NO: 26259 - protein, 144 aa, Homo sapiens
  REGION 1..144: note = ENSP00000491877
  VARIANT 1: note = Any amino acid
XVAMNLQECQVAVLLDLARSYQSLKRHMESVEHRSASQLSLEEPVEAAILLSLVGVKSILANQWPTLLQDNALRASVLWENLLAVGKPIGETVRLLQKMSGDEAVNQDEASQTLKDKLLLLQSSELLPTTLNLVLYGLPHQAIG

SEQ ID NO: 26260 - protein, 153 aa, Homo sapiens
  REGION 1..153: note = ENSP00000417039
  VARIANT 1: note = Any amino acid
XTQAQVYSEDMALNIGSEPEGLQVEEKERPVQRLSSVLGPLEELLQPLFPLLSLSKARVQTPAVVADSGKSKGKDKERKTSTGQHSTVQPEVADKIVLVADRHLLELPLEGLSVFDEGTISSVSREFSLQMLWNRLHKEETDSEKHEGARGRP

SEQ ID NO: 26261 - protein, 405 aa, Homo sapiens
  REGION 1..405: note = ENSP00000357574
MDLVITQELARAESQQDAASLKKAYELIKSANLGKSEFDPSESFSPDLFVLCAEQALKMRQPEVSEDCIQMYFKVKAPITQFLGRAHLCRAQMCAPKSAENLEEFENCVTEYMKAINFAKGEPRYYFLVYNASVLYWQMVRPFLKPGYRHHLIPSLSQIINVLSQTEEEDKEWRAELMLELLECYLQAGRKEEAARFCSTAAPFIKSHVPQKYRQIFSVMVRHELMDELQLKEEKKNSISLSVTFYINMLKAKAEQNDLPGDISVILRKAYRHLGHYNHQRFPSISEEKMLLLFELARFSLTLKCMEISSACLSDLKKMESKVSGFMTLLPGDEALLTVQLDKRQRKEEQFTRPRPPGLRSVVGTLPSFLPVFCTVAVRWCLQFYTCPFLFTFLVATGPQHHSCF

SEQ ID NO: 26262 - protein, 514 aa, Homo sapiens
  REGION 1..514: note = ENSP00000381553
MYSQRFGTVQREVKGPTPKVVIVRSKPPKGQGAEHHLERIRRSHQKHNAILASIKSSERDRLKAEWDQHNDCKILDSLVRARIKDAVQGFIINIEERRNKLRELLALEENEYFTEMQLKKETIEEKKDRMREKTKLLKEKNEKERQDFVAEKLDQQFRERCEELRVELLSIHQKKVCEERKAQIAFNEELSRQKLVEEQMFSKLWEEDRLAKEKREAQEARRQKELMENTRLGLNAQITSIKAQRQATQLLKEEEARLVESNNAQIKHENEQDMLKKQKAKQETRTILQKALQERIEHIQQEYRDEQDLNMKLVQRALQDLQEEADKKKQKREDMIREQKIYHKYLAQRREEEKAQEKEFDRILEEDKAKKLAEKDKELRLEKEARRQLVDEVMCTRKLQVQEKLQREAKEQEERAMEQKHINESLKELNCEEKENFARRQRLAQEYRKQLQMQIAYQQQSQEAEKEEKRREFEAGVAANKMCLDKVQEVLSTHQVLPQNIHPMRKACPSKLPP

SEQ ID NO: 26263 - protein, 498 aa, Homo sapiens
  REGION 1..498: note = ENSP00000409527
QEELQTFISELYVFLVDQMHVALNQTMPDDVQGTVATIYTSSEQLQLFAFEAEVNENFEMAAAYYKERLVREPQNLDHWLDYGAFCLLTEDNIKAQECFQKALSLNQSHIHSLLLCGVLAVLLENYEQAEIFFEDATCLEPTNVVAWTLLGLYYEIQNNDIRMEMAFHEASKQLQARMLQAQVTKQKSTGVEDTEERGKRESSLGPWGITNGSATAIKVEAPAGPGAALSILDKFLEESSKLQSDSQEPILTTQTWDPSISQKPSNTFIKEIPTKKEASKCQDSSALLHPGLHYGVSQTTTIFMETIHFLMKVKAVQYVHRVLAHELLCPQGGPSCEYYLVLAQTHILKKNFAKAEEYLQQAAQMDYLNPNVWGLKGHLYFLSGNHSEAKACYERTISFVVDASEMHFIFLRLGLIYLEEKELEELTEAEDALSEANALNNYNAEVWAYLALVCLKVGRQLEAEQAYKYMIKLKLKDEALLAEIHTLQETVGFGNPSF

SEQ ID NO: 26264 - protein, 361 aa, Homo sapiens
  REGION 1..361: note = ENSP00000343650
MEQVPSAGRLVQITVTEGYDLKGFKGDTPVTFIRAEFNQVVLGDSAKITVSPEGSAKYNFTSSFEFNPEGGITSDDLAHKPVFLTVTEVLPKEKKQKEEKTLILGQAVVDLLPLLEGQSSFQTTVPLHPVQGSPLETPRSSAKQCSLEVKVLVAEPLLTTAQISGGNLLKVTLEAAYSVPESFIPTGPGQNYMVGLQVPSLGEKDYPILFKNGTLNGNHSEAKACYERTISFVVDASEMHFIFLRLGLIYLEEKEYEKAKKTYMQACKRSPSCLTWLGLGIACYRLEELTEAEDALSEANALNNYNAEVWAYLALVCLKVGRQLEAEQAYKYMIKLKLKDEALLAEIHTLQETVGFGNPSF

SEQ ID NO: 26265 - protein, 590 aa, Homo sapiens
  REGION 1..590: note = ENSP00000347781
MFGKQVAKLESDMDSETLEEQKCQLSYELNCSGKYFAFKEQLKHAVVKIVRDKYLKTTSFESQEELQTFISELYVFLVDQMHVALNQTMPDDVQGTVATIYTSSEQLQLFAFEAEVNENFEMAAAYYKERLVREPQNLDHWLDYGAFCLLTEDNIKAQECFQKALSLNQSHIHSLLLCGVLAVLLENYEQAEIFFEDATCLEPTNVVAWTLLGLYYEIQNNDIRMEMAFHEASKQLQARMLQAQVTKQKSTGVEDTEERGKRESSLGPWGITNGSATAIKVEAPAGPGAALSILDKFLEESSKLQSDSQEPILTTQTWDPSISQKPSNTFIKEIPTKKEASKCQDSSALLHPGLHYGVSQTTTIFMETIHFLMKVKAVQYVHRVLAHELLCPQGGPSCEYYLVLAQTHILKKNFAKAEEYLQQAAQMDYLNPNVWGLKGHLYFLSGNHSEAKACYERTISFVVDASEMHFIFLRLGLIYLEEKEYEKAKKTYMQACKRSPSCLTWLGLGIACYRLEELTEAEDALSEANALNNYNAEVWAYLALVCLKVGRQLEAEQAYKYMIKLKLKDEALLAEIHTLQETVGFGNPSF

SEQ ID NO: 26266 - protein, 1121 aa, Homo sapiens
  REGION 1..1121: note = ENSP00000310829
MEQVPSAGRLVQITVTEGYDLKGFKGDTPVTFIRAEFNQVVLGDSAKITVSPEGSAKYNFTSSFEFNPEGGITSDDLAHKPVFLTVTEVLPKEKKQKEEKTLILGQAVVDLLPLLEGQSSFQTTVPLHPVQGSPLETPRSSAKQCSLEVKVLVAEPLLTTAQISGGNLLKVTLEAAYSVPESFIPTGPGQNYMVGLQVPSLGEKDYPILFKNGTLKLGGEREPVPRPKKWPIANILAPGANNIPDAFIVGGPYEEEEGELNHPEDSEFRNQAECIKKRIIWDLESRCYLDPSAVVSFQKRIADCRLWPVEITRVPLVTIPKGKAGKTEKTDEEAQLSFHGVAYVNMVPLLYPGVKRIRGAFHVYPYLDSVVHEKTKCLLSLFRDIGHHLIHNNKIGGINSLLSKQAVSKNLKEDKPVKEKDIDGRPRPGDVQAPSIKSQSSDTPLEGEPPLSHNPEGQQYVEAGTYIVLEIQLDKALVPKRMPEELARRVKEMIPPRPPLTRRTGGAQKAMSDYHIQIKNISRAILDEYYRMFGKQVAKLESDMDSETLEEQKCQLSYELNCSGKYFAFKEQLKHAVVKIVRDKYLKTTSFESQEELQTFISELYVFLVDQMHVALNQTMPDDVQGTVATIYTSSEQLQLFAFEAEVNENFEMAAAYYKERLVREPQNLDHWLDYGAFCLLTEDNIKAQECFQKALSLNQSHIHSLLLCGVLAVLLENYEQAEIFFEDATCLEPTNVVAWTLLGLYYEIQNNDIRMEMAFHEASKQLQARMLQAQVTKQKSTGVEDTEERGKRESSLGPWGITNGSATAIKVEAPAGPGAALSILDKFLEESSKLQSDSQEPILTTQTWDPSISQKPSNTFIKEIPTKKEASKCQDSSALLHPGLHYGVSQTTTIFMETIHFLMKVKAVQYVHRVLAHELLCPQGGPSCEYYLVLAQTHILKKNFAKAEEYLQQAAQMDYLNPNVWGLKGHLYFLSGNHSEAKACYERTISFVVDASEMHFIFLRLGLIYLEEKEYEKAKKTYMQACKRSPSCLTWLGLGIACYRLEELTEAEDALSEANALNNYNAEVWAYLALVCLKVGRQLEAEQAYKYMIKLKLKDEALLAEIHTLQETVGFGNPSF

SEQ ID NO: 26267 - protein, 179 aa, Homo sapiens [sequence omitted]

SEQ ID NO: 26268 - protein, 1584 aa, Homo sapiens
  REGION 1..1584: note = ENSP00000417061
MEDDGSLLPEDELLADALLLEDERDELEDPEFDIKCLLQEAEDDVDPGHSSSVKELDTDADKLKKKTAEDRTQAFHLRQNLSALDKMHEEQELFTEKMRGELRACRQRRDLIDKQQEAVAAEIATEEEAGNMAAVGRLQAVSRRLFAELENERDLQSRTEAVLKESENTMWHIEIQEGRLEAFRTADREEVEATGRRLQVRAAEQLCREQEALGKVERNRLLRIRKSLNTQKELGLRHQKLLEDARKNHKVAVRFLKASLGRIREQEKKEEMECHEYMRRRMDAVVALKGSISANRDTLRKFQAWDRAKAELAEQRVQAEKKAILAQGRDAFRHLVHQRRRQELEAQKRAFEEEQKLRKQEIISRILKEEAEEEKRKKQHPPTSARHRLTLRDKTWNYISDFCKKTTVPTNTYTLDYEAAAGPGPSRLLEVVSSELIQGDPGASSEEETLAEPEISGLWNEDYKPYQVPKEDVDRKPVGGTKMDKDILERTVERLRSRVVHKQVVWGREFQGRPFNSKPELLHFQDFDIGKVYKKKITLVNTTYTINYCKLVGVEEHLRDFIHVDFDPPGPLSAGMSCEVLVTFKPMINKDLEGNISFLAQTGEFSVPLKCSTKKCSLSLDKELIDFGSYVVGETTSRTITLTNVGGLGTTFKFLPASEPCEMDDSQSALKLSSLLTYEDKSLYDKAATSFSEQQLEGTESSQADMQSRKELEKLDKEQEEEQPAEPERLTTVIPPSEEQTEITLGEVTEGEIGPFSSIKVPIVFTPVVPGDVQARFKVTFKNPQCPTLHFRVVGVAIDVPVWVPKPSVDLKICMYDRLYQDSVLVHTRSKAALRLKFEVCKELRAHLELLPKTGYIQAQSSYSVQLKFLPRHSLPEDAGRYFDKETRVLEAPMTIWVADQNKPVGFTVHAIVTTSDLELSPSEVDFGYCTIYEAIRTEISLHNHSLLPQEFGFVRLPKFVDVQPNDGFGTILPLETLQFCVIFQPTKAEEHRFQLTCKSEINRCFKLSCRAVGVHPPLELSHYQIKFAATALYDTSVATVYVINSHLSMSSPTHSKPRIGSEDASPMGPTSFEFLLPPDSPITISPSVGTVWPGKRCLVQVAFRPVLPEKLIRQEALPLLNKEMETKSFRKNMAPQRKDLHGLSFSVLRAQNRDKLFKVSVPHVLEMRKRELRPSSDEYQAARATLLRAFQAKFDTFVVPCVVASGDIKDRKGSEPLSFSPHNTLYLELWCPTVAPSVVVTSHKGKTIFNFGDVAVGHRSIKKISIQNVSPEDLALDFSLLNPNGPFVLLNHSSLLRAGGTQVLVLSFSPHESILAQETLDIITKRGTLTLTLMGTGVASMITCSIEGSVLNMGYVIAGESVSSGFKLQNNSLLPIKFSMHLDSLSSTRGRGQQQLPQFLSSPSQRTEVVGTQNLNGQSVFSVAPVKGVMDPGKTQDFTVTFSPDHESLYFSDKLQVVLFEKKISHQILLKGAACQHMMFVEGGDPLDVPVESLTAIPVFDPRHREEAEELRPILVTLDYIQFDTDTPAPPATRELQVGCIRTTQPSPKKPDHPLMVSALLQLRGDVKETYKVIFVAQVLTGP

SEQ ID NO: 26269 - protein, 92 aa, Homo sapiens
  REGION 1..92: note = ENSP00000367853
EDELLADALLLEDERDELEDPEFDIKCLLQEAEDDVDPGHSSSVKELDTDADKLKKKTAEDRTQAFHLRQNLSALDKMHEEQELFTEKMSVS

SEQ ID NO: 26270 - protein, 170 aa, Homo sapiens
  REGION 1..170: note = ENSP00000425532
MEQAPNMAEPRGPVDHGVQIRFITEPVSGAEMGTLRRGGRRPAKDARASTYGVAVRVQGIAGQPFVVLNSGEKGGDSFGVQIKGANDQGASGALSSDLELPENPYSQVKGFPAPSQSSTSDEEPGAYWNGKLLRSHSQASLAGPGPVDPSNRSNSMLELAPKVASPGSTI

SEQ ID NO: 26271 - protein, 170 aa, Homo sapiens; identical to SEQ ID NO: 26270
  REGION 1..170: note = ENSP00000422299

SEQ ID NO: 26272 - protein, 291 aa, Homo sapiens
  REGION 1..291: note = ENSP00000410836
MEQAPNMAEPRGPVDHGVQIRFITEPVSGAEMGTLRRGGRRPAKDARASTYGVAVRVQGIAGQPFVVLNSGEKGGDSFGVQIKGANDQGASGALSSDLELPENPYSQVKGFPAPSQSSTSDEEPGAYWNGKLLRSHSQASLAGPGPVDPSNRSNSMLELAPKVASPGSTIDTAPLSSVDSLINKFDSQLGGQARGRTGRRTRMLPPEQRKRSKSLDSRLPRDTFEERERQSTNHWTSSTKYDNHVGTSKQPAQSQNLSPLSGFSRSRQTQDWVLQSFEEPRRSAQDPTMLQ

SEQ ID NO: 26273 - protein, 1203 aa, Homo sapiens
  REGION 1..1203: note = ENSP00000271636
MEQAPNMAEPRGPVDHGVQIRFITEPVSGAEMGTLRRGGRRPAKDARASTYGVAVRVQGIAGQPFVVLNSGEKGGDSFGVQIKGANDQGASGALSSDLELPENPYSQVKGFPAPSQSSTSDEEPGAYWNGKLLRSHSQASLAGPGPVDPSNRSNSMLELAPKVASPGSTIDTAPLSSVDSLINKFDSQLGGQARGRTGRRTRMLPPEQRKRSKSLDSRLPRDTFEERERQSTNHWTSSTKYDNHVGTSKQPAQSQNLSPLSGFSRSRQTQDWVLQSFEEPRRSAQDPTMLQFKSTPDLLRDQQEAAPPGSVDHMKATIYGILREGSSESETSVRRKVSLVLEKMQPLVMVSSGSTKAVAGQGELTRKVEELQRKLDEEVKKRQKLEPSQVGLERQLEEKTEECSRLQELLERRKGEAQQSNKELQNMKRLLDQGEDLRHGLETQVMELQNKLKHVQGPEPAKEVLLKDLLETRELLEEVLEGKQRVEEQLRLRERELTALKGALKEEVASRDQEVEHVRQQYQRDTEQLRRSMQDATQDHAVLEAERQKMSALVRGLQRELEETSEETGHWQSMFQKNKEDLRATKQELLQLRMEKEEMEEELGEKIEVLQRELEQARASAGDTRQVEVLKKELLRTQEELKELQAERQSQEVAGRHRDRELEKQLAVLRVEADRGRELEEQNLQLQKTLQQLRQDCEEASKAKMVAEAEATVLGQRRAAVETTLRETQEENDEFRRRILGLEQQLKETRGLVDGGEAVEARLRDKLQRLEAEKQQLEEALNASQEEEGSLAAAKRALEARLEEAQRGLARLGQEQQTLNRALEEEGKQREVLRRGKAELEEQKRLLDRTVDRLNKELEKIGEDSKQALQQLQAQLEDYKEKARREVADAQRQAKDWASEAEKTSGGLSRLQDEIQRLRQALQASQAERDTARLDKELLAQRLQGLEQEAENKKRSQDDRARQLKGLEEKVSRLETELDEEKNTVELLTDRVNRGRDQVDQLRTELMQERSARQDLECDKISLERQNKDLKTRLASSEGFQKPSASLSQLESQNQLLQERLQAEEREKTVLQSTNRKLERKVKELSIQIEDERQHVNDQKDQLSLRVKALKRQVDEAEEEIERLDGLRKKAQREVEEQHEVNEQLQARIKSLEKDSWRKASRSAAESALKNEGLSSDEEFDSVYDPSSIASLLTESNLQTSSC

SEQ ID NO: 26274 - protein, 131 aa, Homo sapiens
  REGION 1..131: note = ENSP00000390686
  VARIANT 1: note = Any amino acid
XQDPTMLQFKSTPDLLRDQQEAAPPGSVDHMKATIYGILREGSSESETSVRRKVSLVLEKMQPLVAVAGQGELTRKVEELQRKLDEEVKKRQKLEPSQVGLERQLEEKTEECSRLQELLERRKGEAQQSNK

SEQ ID NO: 26275 - protein, 1302 aa, Homo sapiens
  REGION 1..1302: note = ENSP00000281282
MELYFGEYQHVQQEYGVHLRLASDDTQKSRSSQNSKAGSYGVSIRVQGIDGHPYIVLNNTERCLAGTSFSENGPPFPPPVINNLPLHSSNGSVPKENSEELQLPENPYAQPSPIRNLKQPLLHEGKNGVLDRKDGSVKPSHLLNFQRHPELLQPYDPEKNELNLQNHQPSESNWLKTLTEEGINNKKPWTCFPKPSNSQPTSPSLEDPAKSGVTAIRLCSSVVIEDPKKQTSVCVNVQSCTKERVGEEALFTSGRPLTAHSPHAHPETKKTRPDVLPFRRQDSAGPVLDGARSRRSSSSSTTPTSANSLYRFLLDDQECAIHADNVNRHENRRYIPFLPGTGRDIDTGSIPGVDQLIEKFDQKPGLQRRGRSGKRNRINTDDRKRSRSVDSAFPFGLQGNSEYLIEFSRNLGKSSEHLLRPSQVCPQRPLSQERRGKQSVGRTFAKLQGAAHGASCAHSRPPQPNIDGKVLETEGSQESTVIRAPSLGAQSKKEEEVKTATATLMLQNRATATSPDSGAKKISVKTFPSASNTQATPDLLKGQQELTQQTNEETAKQILYNYLKEGSTDNDDATKRKVNLVFEKIQTLKSRAAGSAQGNNQACNSTSEVKDLLEQKSKLTIEVAELQRQLQLEVKNQQNIKEERERMRANLEELRSQHNEKVEENSTLQQRLEESEGELRKNLEELFQVKMEREQHQTEIRDLQDQLSEMHDELDSAKRSEDREKGALIEELLQAKQDLQDLLIAKEEQEDLLRKRERELTALKGALKEEVSSHDQEMDKLKEQYDAELQALRESVEEATKNVEVLASRSNTSEQDQAGTEMRVKLLQEENEKLQGRSEELERRVAQLQRQIEDLKGDEAKAKETLKKYEGEIRQLEEALVHARKEEKEAVSARRALENELEAAQGNLSQTTQEQKQLSEKLKEESEQKEQLRRLKNEMENERWHLGKTIEKLQKEMADIVEASRTSTLELQNQLDEYKEKNRRELAEMQRQLKEKTLEAEKSRLTAMKMQDEMRLMEEELRDYQRAQDEALTKRQLLEQTLKDLEYELEAKSHLKDDRSRLVKQMEDKVSQLEMELEEERNNSDLLSERISRSREQMEQLRNELLQERAARQDLECDKISLERQNKDLKSRIIHLEGSYRSSKEGLVVQMEARIAELEDRLESEERDRANLQLSNRRLERKVKELVMQVDDEHLSLTDQKDQLSLRLKAMKRQVEEAEEEIDRLESSKKKLQRELEEQMDMNEHLQGQLNSMKKDLRLKKLPSKVLDDMDDDDDLSTDGGSLYEAPVSYTFSKDSTVASQI

SEQ ID NO: 26276 - protein, 219 aa, Homo sapiens
  REGION 1..219: note = ENSP00000395466
MGGAQLELPSGARPGVCVRRSFRAHAGDQPRRPPGPIPVPGTMKQESAAPNTPPTSQSPTPSAQFPRNDGDPQALWIFGYGSLVWRPDFAYSDSRVGFVRGYSRRFWQGDTFHRGSDKMPGRVVTLLEDHEGCTWGVAYQVQGEQNPGYLGPAPEEAIATQILACRGFSGHNLEYLLRLADFMQLCGPQAQDEHLAAIVDAVGTMLPCFCPTEQALALV

SEQ ID NO: 26277 - protein, 264 aa, Homo sapiens
  REGION 1..264: note = ENSP00000398105
MGGAQLELPSGARPGVCVRRSFRAHAGDQPRRPPGPIPVPGTMKQESAAPNTPPTSQSPTPSAQFPRNDGDPQALWIFGYGSLVWRPDFAYSDSRVGFVRGYSRRFWQGDTFHRGSDKMPGRVVTLLEDHEGCTWGVAYQVQGEQVSKALKYLNVREAVLGGYDTKEVTFYPQDAPDQPLKALAYVATPQNPGYLGPAPEEAIATQILACRGFSGHNLEYLLRLADFMQLCGPQAQDEHLAAIVDAVGTMLPCFCPTEQALALV

SEQ ID NO: 26278 - protein, 222 aa, Homo sapiens
  REGION 1..222: note = ENSP00000481816
MKQESAAPNTPPTSQSPTPSAQFPRNDGDPQALWIFGYGSLVWRPDFAYSDSRVGFVRGYSRRFWQGDTFHRGSDKMPGRVVTLLEDHEGCTWGVAYQVQGEQVSKALKYLNVREAVLGGYDTKEVTFYPQDAPDQPLKALAYVATPQNPGYLGPAPEEAIATQILACRGFSGHNLEYLLRLADFMQLCGPQAQDEHLAAIVDAVGTMLPCFCPTEQALALV

SEQ ID NO: 26279 - protein, 37 aa, Homo sapiens
  REGION 1..37: note = ENSP00000452707
MQLCGPQAQDEHLAAIVDAVGTMLPCFCPTEQALALV

SEQ ID NO: 26280 - protein, 264 aa, Homo sapiens; identical to SEQ ID NO: 26277
  REGION 1..264: note = ENSP00000484644

SEQ ID NO: 26281 - protein, 2997 aa, Homo sapiens
  REGION 1..2997: note = ENSP00000392028
MADPGMMSLFGEDGNIFSEGLEGLGECGYPENPVNPMGQQMPIDQGFASLQPSLHHPSTNQNQTKLTHFDHYNQYEQQKMHLMDQPNRMMSNTPGNGLASPHSQYHTPPVPQVPHGGSGGGQMGVYPGMQNERHGQSFVDSSSMWGPRAVQVPDQIRAPYQQQQPQPQPPQPAPSGPPAQGHPQHMQQMGSYMARGDFSMQQHGQPQQRMSQFSQGQEGLNQGNPFIATSGPGHLSHVPQQSPSMAPSLRHSVQQFHHHPSTALHGESVAHSPRFSPNPPQQGAVRPQTLNFSSRSQTVPSPTINNSGQYSRYPYSNLNQGLVNNTGMNQNLGLTNNTPMNQSVPRYPNAVGFPSNSGQGLMHQQPIHPSGSLNQMNTQTMHPSQPQGTYASPPPMSPMKAMSNPAGTPPPQVRPGSAGIPMEVGSYPNMPHPQPSHQPPGAMGIGQRNMGPRNMQQSRPFIGMSSAPRELTGHMRPNGCPGVGLGDPQAIQERLIPGQQHPGQQPSFQQLPTCPPLQPHPGLHHQSSPPHPHHQPWAQLHPSPQNTPQKVPVHQHSPSEPFLEKPVPDMTQVSGPNAQLVKSDDYLPSIEQQPQQKKKKKKNNHIVAEDPSKGFGKDDFPGGVDNQELNRNSLDGSQEEKKKKKRSKAKKDPKEPKEPKEKKEPKEPKTPKAPKIPKEPKEKKAKTATPKPKSSKKSSNKKPDSEASALKKKVNKGKTEGSENSDLDKTPPPSPPPEEDEDPGVQKRRSSRQVKRKRYTEDLEFKISDEEADDADAAGRDSPSNTSQSEQQESVDAEGPVVEKIMSSRSVKKQKESGEEVEIEEFYVKYKNFSYLHCQWASIEDLEKDKRIQQKIKRFKAKQGQNKFLSEIEDELFNPDYVEVDRIMDFARSTDDRGEPVTHYLVKWCSLPYEDSTWERRQDIDQAKIEEFEKLMSREPETERVERPPADDWKKSESSREYKNNNKLREYQLEGVNWLLFNWYNMRNCILADEMGLGKTIQSITFLYEIYLKGIHGPFLVIAPLSTIPNWEREFRTWTELNVVVYHGSQASRRTIQLYEMYFKDPQGRVIKGSYKFHAIITTFEMILTDCPELRNIPWRCVVIDEAHRLKNRNCKLLEGLKMMDLEHKVLLTGTPLQNTVEELFSLLHFLEPSRFPSETTFMQEFGDLKTEEQVQKLQAILKPMMLRRLKEDVEKNLAPKEETIIEVELTNIQKKYYRAILEKNFTFLSKGGGQANVPNLLNTMMELRKCCNHPYLINGAEEKILEEFKETHNAESPDFQLQAMIQAAGKLVLIDKLLPKLKAGGHRVLIFSQMVRCLDILEDYLIQRRYPYERIDGRVRGNLRQAAIDRFSKPDSDRFVFLLCTRAGGLGINLTAADTCIIFDSDWNPQNDLQAQARCHRIGQSKSVKIYRLITRNSYEREMFDKASLKLGLDKAVLQSMSGRENATNGVQQLSKKEIEDLLRKGAYGALMDEEDEGSKFCEEDIDQILLRRTHTITIESEGKGSTFAKASFVASGNRTDISLDDPNFWQKWAKKAELDIDALNGRNNLVIDTPRVRKQTRLYSAVKEDELMEFSDLESDSEEKPCAKPRRPQDKSQGYARSECFRVEKNLLVYGWGRWTDILSHGRYKRQLTEQDVETICRTILVYCLNHYKGDENIKSFIWDLITPTADGQTRALVNHSGLSAPVPRGRKGKKVKAQSTQPVVQDADWLASCNPDALFQEDSYKKHLKHHCNKVLLRVRMLYYLRQEVIGDQADKILEGADSSEADVWIPEPFHAEVPADWWDKEADKSLLIGVFKHGYEKYNSMRADPALCFLERVGMPDAKAIAAEQRGTDMLADGGDGGEFDREDEDPEYKPTRTPFKDEIDEFANSPSEDKEESMEIHATGKHSESNAELGQLYWPNTSTLTTRLRRLITAYQRSYKRQQMRQEALMKTDRRRRRPREEVRALEAEREAIISEKRQKWTRREEADFYRVVSTFGVIFDPVKQQFDWNQFRAFARLDKKSDESLEKYFSCFVAMCRRVCRMPVKPDDEPPDLSSIIEPITEERASRTLYRIELLRKIREQVLHHPQLGERLKLCQPSLDLPEWWECGRHDRDLLVGAAKHGVSRTDYHILNDPELSFLDAHKNFAQNRGAGNTSSLNPLAVGFVQTPPVISSAHIQDERVLEQAEGKVEEPENPAAKEKCEGKEEEEETDGSGKESKQECEAEASSVKNELKGVEVGADTGSKSISEKGSEEDEEEKLEDDDKSEESSQPEAGAVSRGKNFDEESNASMSTARDETRDGFYMEDGDPSVAQLLHERTFAFSFWPKDRVMINRLDNICEAVLKGKWPVNRRQMFDFQGLIPGYTPTTVDSPLQKRSFAELSMVGQASISGSEDITTSPQLSKEDALNLSVPRQRRRRRRKIEIEAERAAKRRNLMEMVAQLRESQVVSENGQEKVVDLSKASREATSSTSNFSSLSSKFILPNVSTPVSDAFKTQMELLQAGLSRTPTRHLLNGSLVDGEPPMKRRRGRRKNVEGLDLLFMSHKRTSLSAEDAEVTKAFEEDIETPPTRNIPSPGQLDPDTRIPVINLEDGTRLVGEDAPKNKDLVEWLKLHPTYTVDMPSYVPKNADVLFSSFQKPKQKRHRCRNPNKLDINTLTGEERVPVVNKRNGKKMGGAMAPPMKDLPRWLEENPEFAVAPDWTDIVKQSGFVPESMFDRLLTGPVVRGEGASRRGRRPKSEIARAAAAAAAVASTSGINPLLVNSLFAGMDLTSLQNLQNLQSLQLAGLMGFPPGLATAATAGGDAKNPAAVLPLMLPGMAGLPNVFGLGGLLNNPLSAATGNTTTASSQGEPEDSTSKGEEKGNENEDENKDSEKSTDAVSAADSANGSVGAATAPAGLPSNPLAFNPFLLSTMAPGLFYPSMFLPPGLGGLTLPGFPALAGLQNAVGSSEEKAADKAEGGPFKDGETLEGSDAEESLDKTAESSLLEDEIAQGEELDSLDGGDEIENNENDE

SEQ ID NO: 26282 - protein, 32 aa, Homo sapiens
  REGION 1..32: note = ENSP00000436492
MADPGMMSLFGEDGNIFSEGLEGLGECGYPEN

SEQ ID NO: 26283 - protein, 948 aa, Homo sapiens
  REGION 1..948: note = ENSP00000437061
MADPGMMSLFGEDGNIFSEGLEGLGECGYPENPVNPMGQQMPIDQGFASLQPSLHHPSTNQNQTKLTHFDHYNQYEQQKMHLMDQPNRMMSNTPGNGLASPHSQYHTPPVPQVPHGGSGGGQMGVYPGMQNERHGQSFVDSSSMWGPRAVQVPDQIRAPYQQQQPQPQPPQPAPSGPPAQGHPQHMQQMGSYMARGDFSMQQHGQPQQRMSQFSQGQEGLNQGNPFIATSGPGHLSHVPQQSPSMAPSLRHSVQQFHHHPSTALHGESVAHSPRFSPNPPQQGAVRPQTLNFSSRSQTVPSPTINNSGQYSRYPYSNLNQGLVNNTGMNQNLGLTNNTPMNQSVPRYPNAVGFPSNSGQGLMHQQPIHPSGSLNQMNTQTMHPSQPQGTYASPPPMSPMKAMSNPAGTPPPQVRPGSAGIPMEVGSYPNMPHPQPSHQPPGAMGIGQRNMGPRNMQQSRPFIGMSSAPRELTGHMRPNGCPGVGLGDPQAIQERLIPGQQHPGQQPSFQQLPTCPPLQPHPGLHHQSSPPHPHHQPWAQLHPSPQNTPQKVPVHQHSPSEPFLEKPVPDMTQKPKQKRHRCRNPNKLDINTLTGEERVPVVNKRNGKKMGGAMAPPMKDLPRWLEENPEFAVAPDWTDIVKQSGFVPESMFDRLLTGPVVRGEGASRRGRRPKSEIARAAAAAAAVASTSGINPLLVNSLFAGMDLTSLQNLQNLQSLQLAGLMGFPPGLATAATAGGDAKNPAAVLPLMLPGMAGLPNVFGLGGLLNNPLSAATGNTTTASSQGEPEDSTSKGEEKGNENEDENKDSEKSTDAVSAADSANGSVGAATAPAGLPSNPLAFNPFLLSTMAPGLFYPSMFLPPGLGGLTLPGFPALAGLQNAVGSSEEKAADKAEGGPFKDGETLEGSDAEESLDKTAESSLLEDEIAQGEELDSLDGGDEIENNENDE

SEQ ID NO: 26284 - protein, 1138 aa, Homo sapiens
  REGION 1..1138: note = ENSP00000436027
MADPGMMSLFGEDGNIFSEGLEGLGECGYPENPVNPMGQQMPIDQGFASLQPSLHHPSTNQNQTKLTHFDHYNQYEQQKMHLMDQPNRMMSNTPGNGLASPHSQYHTPPVPQVPHGGSGGGQMGVYPGMQNERHGQSFVDSSSMWGPRAVQVPDQIRAPYQQQQPQPQPPQPAPSGPPAQGHPQHMQQMGSYMARGDFSMQQHGQPQQRMSQFSQGQEGLNQGNPFIATSGPGHLSHVPQQSPSMAPSLRHSVQQFHHHPSTALHGESVAHSPRFSPNPPQQGAVRPQTLNFSSRSQTVPSPTINNSGQYSRYPYSNLNQGLVNNTGMNQNLGLTNNTPMNQSVPRYPNAVGFPSNSGQGLMHQQPIHPSGSLNQMNTQTMHPSQPQGTYASPPPMSPMKAMSNPAGTPPPQVRPGSAGIPMEVGSYPNMPHPQPSHQPPGAMGIGQRNMGPRNMQQSRPFIGMSSAPRELTGHMRPNGCPGVGLGDPQAIQERLIPGQQHPGQQPSFQQLPTCPPLQPHPGLHHQSSPPHPHHQPWAQLHPSPQNTPQKVPVHQHSPSEPFLEKPVPDMTQVSGPNAQLVKSDDYLPSIEQQPQQKKKKKKNNHIVAEDPSKGFGKDDFPGGVDNQELNRNSLDGSQEEKKKKKRSKAKKDPKEPKEPKEKKEPKEPKTPKAPKIPKEPKEKKAKTATPKPKSSKKSSNKKPDSEASALKKKVNKGKTEGSENSDLDKTPPPSPPPEEDEDPGVQKRRSSRQVKRKRYTEDLEFKISDEEADDADAAGRDSPSNTSQSEQQESVDAEGPVVEKIMSSRSVKKQKESGEEVEIEEFYVKYKNFSYLHCQWASIEDLEKDKRIQQKIKRFKAKQGQNKFLSEIEDELFNPDYVEVDRIMDFARSTDDRGEPVTHYLVKWCSLPYEDSTWERRQDIDQAKIEEFEKLMSREPETERVERPPADDWKKSESSREYKNNNKLREYQLEGVNWLLFNWYNMRNCILADEMGLGKTIQSITFLYEIYLKGIHGPFLVIAPLSTIPNWEREFRTWTELNVVVYHGSQASRRTIQLYEMYFKDPQGRVIKGSYKFHAIITTFEMILTDCPELRNIPWRCVVIDEAHRLKNRNCKLLEGLKMMDLVSDHIGDCTEPE

SEQ ID NO: 26285 - protein, 19 aa, Homo sapiens
  REGION 1..19: note = ENSP00000432627
  VARIANT 1: note = Any amino acid
XSSMWGPRAVQACPRHQGN

SEQ ID NO: 26286 - protein, 39 aa, Homo sapiens
  REGION 1..39: note = ENSP00000433336
HQPWAQLHPSPQNTPQKVPVHQHSPSEPFLEKPVPDMTQ

SEQ ID NO: 26287 - protein, 594 aa, Homo sapiens
  REGION 1..594: note = ENSP00000319851
MWCLLRGLGRPGALARGALGQQQSLGARALASAGSESRDEYSYVVVGAGSAGCVLAGRLTEDPAERVLLLEAGPKDVLAGSKRLSWKIHMPAALVANLCDDRYNWCYHTEVQRGLDGRVLYWPRGRVWGGSSSLNAMVYVRGHAEDYERWQRQGARGWDYAHCLPYFRKAQGHELGASRYRGADGPLRVSRGKTNHPLHCAFLEATQQAGYPLTEDMNGFQQEGFGWMDMTIHEGKRWSAACAYLHPALSRTNLKAEAETLVSRVLFEGTRAVGVEYVKNGQSHRAYASKEVILSGGAINSPQLLMLSGIGNADDLKKLGIPVVCHLPGVGQNLQDHLEIYIQQACTRPITLHSAQKPLRKVCIGLEWLWKFTGEGATAHLETGGFIRSQPGVPHPDIQFHFLPSQVIDHGRVPTQQEAYQVHVGPMRGTSVGWLKLRSANPQDHPVIQPNYLSTETDIEDFRLCVKLTREIFAQEALAPFRGKELQPGSHIQSDKEIDAFVRAKADSAYHPSCTCKMGQPSDPTAVVDPQTRVLGVENLRVVDASIMPSMVSGNLNAPTIMIAEKAADIIKGQPALWDKDVPVYKPRTLATQR

SEQ ID NO: 26288 - protein, 155 aa, Homo sapiens
  REGION 1..155: note = ENSP00000418273
MWCLLRGLGRPGALARGALGQQQSLGARALASAGSESRDEYSYVVVGAGSAGCVLAGRLTEDPAERVLLLEAGPKDVLAGSKRLSWKIHMPAALVANLCDDRYNWCYHTEVQRGLDGRVLYWPRGRVWGGSSSLNAMVYVRGHAEDYERWQRQGA

SEQ ID NO: 26289 - protein, 126 aa, Homo sapiens
  REGION 1..126: note = ENSP00000419863
MWCLLRGLGRPGALARGALGQQQSLGARALASAGSESRDEYSYVVVGAGSAGCVLAGRLTEDPAERVLLLEAGPKDVLAGSKRLSWKIHMPAALVANLCDDRYNWCYHTEVQRGLDGRVLYWPRGR

SEQ ID NO: 26290 - protein, 677 aa, Homo sapiens
  REGION 1..677: note = ENSP00000368244
MQPTLLLSLLGAVGLAAVNSMPVDNRNHNEGMVTRCIIEVLSNALSKSSAPPITPECRQVLKTSRKDVKDKETTENENTKFEVRLLRDPADASEAHESSSRGEAGAPGEEDIQGPTKADTEKWAEGGGHSRERADEPQWSLYPSDSQVSEEVKTRHSEKSQREDEEEEEGENYQKGERGEDSSEEKHLEEPGETQNAFLNERKQASAIKKEELVARSETHAAGHSQEKTHSREKSSQESGEETGSQENHPQESKGQPRSQEESEEGEEDATSEVDKRRTRPRHHHGRSRPDRSSQGGSLPSEEKGHPQEESEESNVSMASLGEKRDHHSTHYRASEEEPEYGEEIKGYPGVQAPEDLEWERYRGRGSEEYRAPRPQSEESWDEEDKRNYPSLELDKMAHGYGEESEEERGLEPGKGRHHRGRGGEPRAYFMSDTREEKRFLGEGHHRVQENQMDKARRHPQGAWKELDRNYLNYGEEGAPGKWQQQGDLQDTKENREEARFQDKQYSSHHTAEKRKRLGELFNPYYDPLQWKSSHFERRDNMNDNFLEGEEENELTLNEKNFFPEYNYDWWEKKPFSEDVNWGYEKRNLARVPKLDLKRQYDRVAQLDQLLHYRKKSAEFPDFYDSEEPVSTHQEAENEKDRADQTVLTEDEKKELENLAAMDLELQKIAEKFSQRG

SEQ ID NO: 26291 - protein, 289 aa, Homo sapiens
  REGION 1..289: note = ENSP00000416643
MPVDNRNHNEGMVTRCIIEVLSNALSKSSAPPITPECRQVLKTSRKDVKDKETTENENTKFEVRLLRDPADASEAHESSSRGEAGAPGEEDIQGPTKADTEKWAEGGGHSRERADEPQWSLYPSDSQVSEEVKTRHSEKSQREDEEEEEGENYQKGERGEDSSEEKHLEEPGETQNAFLNERKQASAIKKEELVARSETHAAGHSQEKTHSREKSSQESGEETGSQENHPQESKGQPRSQEESEEGEEDATSEVDKRRTRPRHHHGRSRPDRSSQGGSLPSEEKGHPQE

SEQ ID NO: 26292 - protein, 69 aa, Homo sapiens
  REGION 1..69: note = ENSP00000433879
LKDHRPRMVWDSQASEHFFEYKKSRSGRHVVFYPTLKSLQVRLELARELGVGVSIWELGQGLDYFYDLL

SEQ ID NO: 26293 - protein, 108 aa, Homo sapiens
  REGION 1..108: note = ENSP00000431169
  VARIANT 1: note = Any amino acid
XPKSKWRSKILLGLNFYGMDYATSKDAREPVVGARYIQTLKDHRPRMVWDSQASEHFFEYKKSRSGRHVVFYPTLKSLQVRLELARELGVGVSIWELGQGLDYFYDLL

SEQ ID NO: 26294 - protein, 393 aa, Homo sapiens
  REGION 1..393: note = ENSP00000325055
MRTLFNLLWLALACSPVHTTLSKSDAKKAASKTLLEKSQFSDKPVQDRGLVVTDLKAESVVLEHRSYCSAKARDRHFAGDVLGYVTPWNSHGYDVTKVFGSKFTQISPVWLQLKRRGREMFEVTGLHDVDQGWMRAVRKHAKGLHIVPRLLFEDWTYDDFRNVLDSEDEIEELSKTVVQVAKNQHFDGFVVEVWNQLLSQKRVGLIHMLTHLAEALHQARLLALLVIPPAITPGTDQLGMFTHKEFEQLAPVLDGFSLMTYDYSTAHQPGPNAPLSWVRACVQVLDPKSKWRSKILLGLNFYGMDYATSKDAREPVVGARYIQTLKDHRPRMVWDSQASEHFFEYKKSRSGRHVVFYPTLKSLQVRLELARELGVGVSIWELGQGLDYFYDLL

SEQ ID NO: 26295 - protein, 84 aa, Homo sapiens
  REGION 1..84: note = ENSP00000431356
  VARIANT 1: note = Any amino acid
XDAREPVVGARYIQTLKDHRPRMVWDSQASEHFFEYKKSRSGRHVVFYPTLKSLQVRLELARELGVGVSIWELGQGLDYFYDLL

SEQ ID NO: 26296 - protein, 362 aa, Homo sapiens
  REGION 1..362: note = ENSP00000416034
MRTLFNLLWLALACSPVHTTLSKSDAKKAASKTLLEKSQFSDKPVQDRGLVVTDLKAESVVLEHRSYCSAKARDRHFAGDVLGYVTPWNSHGYDVTKVFGSKFTQISPVWLQLKRRGREMFEVTGLHDVDQGWMRAVRKHAKGLHIVPRLLFEDWTYDDFRNVLDSEDEIEELSKTVVQVAKNQHFDGFVVEVWNQLLSQKRVTDQLGMFTHKEFEQLAPVLDGFSLMTYDYSTAHQPGPNAPLSWVRACVQVLDPKSKWRSKILLGLNFYGMDYATSKDAREPVVGARYIQTLKDHRPRMVWDSQASEHFFEYKKSRSGRHVVFYPTLKSLQVRLELARELGVGVSIWELGQGLDYFYDLL

SEQ ID NO: 26297 - protein, 418 aa, Homo sapiens
  REGION 1..418: note = ENSP00000435503
MRTLFNLLWLALACSPVHTTLSKSDAKKAASKTLLEKVKFCSCCPGWSAMARSWLTATSATQSQFSDKPVQDRGLVVTDLKAESVVLEHRSYCSAKARDRHFAGDVLGYVTPWNSHGYDVTKVFGSKFTQISPVWLQLKRRGREMFEVTGLHDVDQGWMRAVRKHAKGLHIVPRLLFEDWTYDDFRNVLDSEDEIEELSKTVVQVAKNQHFDGFVVEVWNQLLSQKRVGLIHMLTHLAEALHQARLLALLVIPPAITPGTDQLGMFTHKEFEQLAPVLDGFSLMTYDYSTAHQPGPNAPLSWVRACVQVLDPKSKWRSKILLGLNFYGMDYATSKDAREPVVGARYIQTLKDHRPRMVWDSQASEHFFEYKKSRSGRHVVFYPTLKSLQVRLELARELGVGVSIWELGQGLDYFYDLL

SEQ ID NO: 26298 - protein, 393 aa, Homo sapiens; identical to SEQ ID NO: 26294
  REGION 1..393: note = ENSP00000388156

SEQ ID NO: 26299 - protein, 72 aa, Homo sapiens
  REGION 1..72: note = ENSP00000435336
  VARIANT 1: note = Any amino acid
XQLGMFTHKEFEQLAPVLDGFSLMTYDYSTAHQPGPNAPLSWVRACVQVLDPKSKWRSKILLGLNFYGTSRH

SEQ ID NO: 26300 - protein, 224 aa, Homo sapiens
  REGION 1..224: note = ENSP00000434651
MRTLFNLLWLALACSPVHTTLSKSDAKKAASKTLLEKSQFSDKPVQDRGLVVTDLKAESVVLEHRSYCSAKARDRHFAGDVLGYVTPWNSHGYDVTKVFGSKFTQISPVWLQLKRRGREMFEARLLALLVIPPAITPGTDQLGMFTHKEFEQLAPVLDGFSLMTYDYSTAHQPGPNAPLSWVRACVQVLDPKSKWRSKILLGLNFYGMDYATSKDAREPVVGAR

SEQ ID NO: 26301 - protein, 162 aa, Homo sapiens
  REGION 1..162: note = ENSP00000432697
MRTLFNLLWLALACSPVHTTLSKSDAKKAASKTLLEKSQFSDKPVQDRGLVVTDLKAESVVLEHRSYCSAKARDRHFAGDVLGYVTPWNSHGYDVTKVFGSKFTQISPVWLQLKRRGREMFEVTGLHDVDQGSHPSCLTVLAPQAEKSGGCELSGSMPRACT

SEQ ID NO: 26302 - protein, 84 aa, Homo sapiens
  REGION 1..84: note = ENSP00000432431
MRTLFNLLWLALACSPVHTTLSKSDAKKAASKTLLEKAGAQWRDLGSPQPLPPRFKRFSCFSLPSSWDYRVSFQISRCKTGVWW

SEQ ID NO: 26303 - protein, 131 aa, Homo sapiens
  REGION 1..131: note = ENSP00000436017
MRTLFNLLWLALACSPVHTTLSKSDAKKAASKTLLEKSQFSDKPVQDRGLVVTDLKAESVVLEHRSYCSAKARDRHFAGDVLGYVTPWNSHGYDVTKVFGSKFTQISPVWLQLKRRGREMFEVTGLHDVDQ

SEQ ID NO: 26304 - protein, 119 aa, Homo sapiens
  REGION 1..119: note = ENSP00000435731
MRTLFNLLWLALACSPVHTTLSKSDAKKAASKTLLEKSQFSDKPVQDRGLVVTDLKAESVVLEHRSYCSAKARDRHFAGDVLGYVTPWNSHGYDVTKVFGSKFTQISPVWLQLKRRGRE

SEQ ID NO: 26305 - protein, 115 aa, Homo sapiens
  REGION 1..115: note = ENSP00000436752
MRTLFNLLWLALACSPVHTTLSKSDAKKAASKTLLEKSQFSDKPVQDRGLVVTDLKAESVVLEHRSYCSAKARDRHFAGDVLGYVTPWNSHGYDVTKVFGSKFTQISPVWLQLKR

SEQ ID NO: 26306 - protein, 84 aa, Homo sapiens
  REGION 1..84: note = ENSP00000433570
MRTLFNLLWLALACSPVHTTLSKSDAKKAASKTLLEKSQFSDKPVQDRGLVVTDLKAESVVLEHRSYCSAKARDRHFAGDVLGY

SEQ ID NO: 26307 - protein, 38 aa, Homo sapiens
  REGION 1..38: note = ENSP00000435607
MRTLFNLLWLALACSPVHTTLSKSDAKKAASKTLLEKV

SEQ ID NO: 26308 - protein, 26 aa, Homo sapiens
  REGION 1..26: note = ENSP00000431766
MRTLFNLLWLALACSPVHTTLSKSDA

SEQ ID NO: 26309 - protein, 418 aa, Homo sapiens; identical to SEQ ID NO: 26297
  REGION 1..418: note = ENSP00000398722

SEQ ID NO: 26310 - protein, 393 aa, Homo sapiens; identical to SEQ ID NO: 26294
  REGION 1..393: note = ENSP00000391255

SEQ ID NO: 26311 - protein, 1224 aa, Homo sapiens
  REGION 1..1224: note = ENSP00000256509
MEPLLLGRGLIVYLMFLLLKFSKAIEIPSSVQQVPTIIKQSKVQVAFPFDEYFQIECEAKGNPEPTFSWTKDGNPFYFTDHRIIPSNNSGTFRIPNEGHISHFQGKYRCFASNKLGIAMSEEIEFIVPSVPKFPKEKIDPLEVEEGDPIVLPCNPPKGLPPLHIYWMNIELEHIEQDERVYMSQKGDLYFANVEEKDSRNDYCCFAAFPRLRTIVQKMPMKLTVNSLKHANDSSSSTEIGSKANSIKQRKPKLLLPPTESGSESSITILKGEILLLECFAEGLPTPQVDWNKIGGDLPKGRETKENYGKTLKIENVSYQDKGNYRCTASNFLGTATHDFHVIVEEPPRWTKKPQSAVYSTGSNGILLCEAEGEPQPTIKWRVNGSPVDNHPFAGDVVFPREISFTNLQPNHTAVYQCEASNVHGTILANANIDVVDVRPLIQTKDGENYATVVGYSAFLHCEFFASPEAVVSWQKVEEVKPLEGRRYHIYENGTLQINRTTEEDAGSYSCWVENAIGKTAVTANLDIRNATKLRVSPKNPRIPKLHMLELHCESKCDSHLKHSLKLSWSKDGEAFEINGTEDGRIIIDGANLTISNVTLEDQGIYCCSAHTALDSAADITQVTVLDVPDPPENLHLSERQNRSVRLTWEAGADHNSNISEYIVEFEGNKEEPGRWEELTRVQGKKTTVILPLAPFVRYQFRVIAVNEVGRSQPSQPSDHHETPPAAPDRNPQNIRVQASQPKEMIIKWEPLKSMEQNGPGLEYRVTWKPQGAPVEWEEETVTNHTLRVMTPAVYAPYDVKVQAINQLGSGPDPQSVTLYSGEDYPDTAPVIHGVDVINSTLVKVTWSTVPKDRVHGRLKGYQINWWKTKSLLDGRTHPKEVNILRFSGQRNSGMVPSLDAFSEFHLTVLAYNSKGAGPESEPYIFQTPEGVPEQPTFLKVIKVDKDTATLSWGLPKKLNGNLTGYLLQYQIINDTYEIGELNDINITTPSKPSWHLSNLNATTKYKFYLRACTSQGCGKPITEESSTLGEGSKGIGKISGVNLTQKTHPIEVFEPGAEHIVRLMTKNWGDNDSIFQDVIETRGREYAGLYDDISTQGWFIGLMCAIALLTLLLLTVCFVKRNRGGKYSVKEKEDLHPDPEIQSVKDETFGEYSDSDEKPLKGSLRSLNRDMQPTESADSLVEYGEGDHGLFSEDGSFIGAYAGSKEKGSVESNGSSTATFPLRA

SEQ ID NO: 26312 - protein, 1208 aa, Homo sapiens
  REGION 1..1208: note = ENSP00000380628
MEPLLLGRGLIVYLMFLLLKFSKAIEIPSSVQQVPTIIKQSKVQVAFPFDEYFQIECEAKGNPEPTFSWTKDGNPFYFTDHRIIPSNNSGTFRIPNEGHISHFQGKYRCFASNKLGIAMSEEIEFIVPSVPKFPKEKIDPLEVEEGDPIVLPCNPPKGLPPLHIYWMNIELEHIEQDERVYMSQKGDLYFANVEEKDSRNDYCCFAAFPRLRTIVQKMPMKLTVNSSNSIKQRKPKLLLPPTESGSESSITILKGEILLLECFAEGLPTPQVDWNKIGGDLPKGRETKENYGKTLKIENVSYQDKGNYRCTASNFLGTATHDFHVIVEEPPRWTKKPQSAVYSTGSNGILLCEAEGEPQPTIKWRVNGSPVDNHPFAGDVVFPREISFTNLQPNHTAVYQCEASNVHGTILANANIDVVDVRPLIQTKDGENYATVVGYSAFLHCEFFASPEAVVSWQKVEEVKPLEGRRYHIYENGTLQINRTTEEDAGSYSCWVENAIGKTAVTANLDIRNATKLRVSPKNPRIPKLHMLELHCESKCDSHLKHSLKLSWSKDGEAFEINGTEDGRIIIDGANLTISNVTLEDQGIYCCSAHTALDSAADITQVTVLDVPDPPENLHLSERQNRSVRLTWEAGADHNSNISEYIVEFEGNKEEPGRWEELTRVQGKKTTVILPLAPFVRYQFRVIAVNEVGRSQPSQPSDHHETPPAAPDRNPQNIRVQASQPKEMIIKWEPLKSMEQNGPGLEYRVTWKPQGAPVEWEEETVTNHTLRVMTPAVYAPYDVKVQAINQLGSGPDPQSVTLYSGEDYPDTAPVIHGVDVINSTLVKVTWSTVPKDRVHGRLKGYQINWWKTKSLLDGRTHPKEVNILRFSGQRNSGMVPSLDAFSEFHLTVLAYNSKGAGPESEPYIFQTPEGVPEQPTFLKVIKVDKDTATLSWGLPKKLNGNLTGYLLQYQIINDTYEIGELNDINITTPSKPSWHLSNLNATTKYKFYLRACTSQGCGKPITEESSTLGEGSKGIGKISGVNLTQKTHPIEVFEPGAEHIVRLMTKNWGDNDSIFQDVIETRGREYAGLYDDISTQGWFIGLMCAIALLTLLLLTVCFVKRNRGGKYSVKEKEDLHPDPEIQSVKDETFGEYSDSDEKPLKGSLRSLNRDMQPTESADSLVEYGEGDHGLFSEDGSFIGAYAGSKEKGSVESNGSSTATFPLRA

SEQ ID NO: 26313 - protein, 65 aa, Homo sapiens
  REGION 1..65: note = ENSP00000403311
MEPLLLGRGLIVYLMFLLLKFSKAIEIPSSVQQVPTIIKQSKVQVAFPFDEYFQIECEAKGNPEP

SEQ ID NO: 26314 - protein, 96 aa, Homo sapiens
  REGION 1..96: note = ENSP00000413628
MEPLLLGRGLIVYLMFLLLKFSKAIEIPSSVQQVPTIIKQSKVQVAFPFDEYFQIECEAKGNPEPTFSWTKDGNPFYFTDHRIIPSNNSGTFRIPN

SEQ ID NO: 26315 - protein, 93 aa, Homo sapiens
  REGION 1..93: note = ENSP00000413109
MPPAWSGESMDRGVVGLGSTKTQRGARAPPPQTAEGREGAPGAVVAMAPGSGARGAGDAGRGWSLLPLCASLFLSLFFFFWSVSVRGEAARRK

SEQ ID NO: 26316 - protein, 181 aa, Homo sapiens
  REGION 1..181: note = ENSP00000397445
MEPLLLGRGLIVYLMFLLLKFSKAIEIPSSVQQVPTIIKQSKVQVAFPFDEYFQIECEAKGNPEPTFSWTKDGNPFYFTDHRIIPSNNSGTFRIPNEGHISHFQGKYRCFASNKLGIAMSEEIEFIVPSVPKFPKEKIDPLEVEEGDPIVLPCNPPKGLPPLHIYWMNIELEHIEQDERVY

SEQ ID NO: 26317 - protein, 84 aa, Homo sapiens
  REGION 1..84: note = ENSP00000390440
MEPLLLGRGLIVYLMFLLLKFSKAIEIPSSVQQVPTIIKQSKVQVAFPFDEYFQIECEAKGNPEPTFSWTKDGNPFYFTDHRII

SEQ ID NO: 26318 - protein, 358 aa, Homo sapiens
  REGION 1..358: note = ENSP00000395239
  VARIANT 1: note = Any amino acid
XSVTLYSGEDYPDTAPVIHGVDVINSTLVKVTWSTVPKDRVHGRLKGYQINWWKTKSLLDGRTHPKEVNILRFSGQRNSGMVPSLDAFSEFHLTVLAYNSKGAGPESEPYIFQTPEGVPEQPTFLKVIKVDKDTATLSWGLPKKLNGNLTGYLLQYQIINDTYEIGELNDINITTPSKPSWHLSNLNATTKYKFYLRACTSQGCGKPITEESSTLGEGKYAGLYDDISTQGWFIGLMCAIALLTLLLLTVCFVKRNRGGKYSVKEKEDLHPDPEIQSVKDETFGEYSDSDEKPLKGSLRSLNRDMQPTESADSLVEYGEGDHGLFSEDGSFIGAYAGSKEKGSVESNGSSTATFPLRA

SEQ ID NO: 26319 - protein, 1171 aa, Homo sapiens
  REGION 1..1171: note = ENSP00000483512
MEPLLLGRGLIVYLMFLLLKFSKAIEIPSSVQQVPTIIKQSKVQVAFPFDEYFQIECEAKGNPEPTFSWTKDGNPFYFTDHRIIPSNNSGTFRIPNEGHISHFQGKYRCFASNKLGIAMSEEIEFIVPSVPKFPKEKIDPLEVEEGDPIVLPCNPPKGLPPLHIYWMNIELEHIEQDERVYMSQKGDLYFANVEEKDSRNDYCCFAAFPRLRTIVQKMPMKLTVNSLKHANDSSSSTEIGSKANSIKQRKPKLLLPPTESGSESSITILKGEILLLECFAEGLPTPQVDWNKIGGDLPKGRETKENYGKTLKIENVSYQDKGNYRCTASNFLGTATHDFHVIVEEPPRWTKKPQSAVYSTGSNGILLCEAEGEPQPTIKWRVNGSPVDNHPFAGDVVFPREISFTNLQPNHTAVYQCEASNVHGTILANANIDVVDVRPLIQTKDGENYATVVGYSAFLHCEFFASPEAVVSWQKVEEVKPLEGRRYHIYENGTLQINRTTEEDAGSYSCWVENAIGKTAVTANLDIRNATKLRVSPKNPRIPKLHMLELHCESKCDSHLKHSLKLSWSKDGEAFEINGTEDGRIIIDGANLTISNVTLEDQGIYCCSAHTALDSAADITQVTVLDVPDPPENLHLSERQNRSVRLTWEAGADHNSNISEYIVEFEGNKEEPGRWEELTRVQGKKTTVILPLAPFVRYQFRVIAVNEVGRSQPSQPSDHHETPPAAPDRNPQNIRVQASQPKEMIIKWEPLKSMEQNGPGLEYRVTWKPQGAPVEWEEETVTNHTLRVMTPAVYAPYDVKVQAINQLGSGPDPQSVTLYSGEDYPDTAPVIHGVDVINSTLVKVTWSTVPKDRVHGRLKGYQINWWKTKSLLDGRTHPKEVNILRFSGQRNSGMVPSLDAFSEFHLTVLAYNSKGAGPESEPYIFQTPEGVPEQPTFLKVIKVDKDTATLSWGLPKKLNGNLTGYLLQYQIINDTYEIGELNDINITTPSKPSWHLSNLNATTKYKFYLRACTSQGCGKPITEESSTLGEGKYAGLYDDISTQGWFIGLMCAIALLTLLLLTVCFVKRNRGGKYSVKEKEDLHPDPEIQSVKDETFGEYSDSDEKPLKGSLRSLNRDMQPTESADSLVEYGEGDHGLFSEDGSFIGAYAGSKEKGSVESNGSSTATFPLRA

SEQ ID NO: 26320 - protein, 37 aa, Homo sapiens
  REGION 1..37: note = ENSP00000462650
MTQTHRAKSASSCPNLLVPETWPHQVSASHAGRSKQP

SEQ ID NO: 26321 - protein, 187 aa, Homo sapiens
  REGION 1..187: note = ENSP00000409843
MTQTHRAKSASSCPNLLVPETWPHQVSASHAGRSKQPQGGILKINEEHRRGAIQDLLASPGFTFGKRVVFDSHCLKRQHTFADGLHSSCTSNAEEYQPPIWKSYLYQLQQEAPRPKRIICPREVENRPKYYGREFHGIISREQADELLGGVEGAYILRESQRQPGCYTLALRFGNQTLNYRLFHDGK

SEQ ID NO: 26322 - protein, 136 aa, Homo sapiens
  REGION 1..136: note = ENSP00000441183
  VARIANT 1: note = Any amino acid
XRAKSASSCPNLLVPETWPHQVSASHAGRSKQPQGGILKINEEHRRGAIQMLKNTSLLYGNHTYISYSKRHLVPRESFVLGRWKTDQNIMEESFMGSSLGSRRMSFLEAWRVPTSLEKASGNQDATRWLSGLETRP

SEQ ID NO: 26323 - protein, 468 aa, Homo sapiens
  REGION 1..468: note = ENSP00000222792
MAASSNSSLSGSSVSSDAEEYQPPIWKSYLYQLQQEAPRPKRIICPREVENRPKYYGREFHGIISREQADELLGGVEGAYILRESQRQPGCYTLALRFGNQTLNYRLFHDGKHFVGEKRFESIHDLVTDGLITLYIETKAAEYISKMTTNPIYEHIGYATLLREKVSRRLSRSKNEPRKTNVTHEEHTAVEKISSLVRRAALTHNDNHFNYEKTHNFKVHTFRGPHWCEYCANFMWGLIAQGVRCSDCGLNVHKQCSKHVPNDCQPDLKRIKKVYCCDLTTLVKAHNTQRPMVVDICIREIEARGLKSEGLYRVSGFTEHIEDVKMAFDRDGEKADISANVYPDINIITGALKLYFRDLPIPVITYDTYSKFIDAAKISNADERLEAVHEVLMLLPPAHYETLRYLMIHLKKVTMNEKDNFMNAENLGIVFGPTLMRPPEDSTLTTLHDMRYQKLIVQILIENEDVLF

SEQ ID NO: 26324 - protein, 174 aa, Homo sapiens
  REGION 1..174: note = ENSP00000386968
MAASSNSSLSGSSVSSVYSEPRSPRELPKYAEEYQPPIWKSYLYQLQQEAPRPKRIICPREVENRPKYYGREFHGIISREQADELLGGVEGAYILRESQRQPGCYTLALRFGNQTLNYRLFHDGKHFVGEKRFESIHDLVTDGLITLYIETKAAEYISKMTTNPIYEHIGYATL

SEQ ID NO: 26325 - protein, 180 aa, Homo sapiens
  REGION 1..180: note = ENSP00000396867
NPIYEHIGYATLLREKVSRRLSRSKNEPRKTNVTHEEHTAVEKVHTFRGPHWCEYCANFMWGLIAQGVRCSDCGLNVHKQCSKHVPNDCQPDLKRIKKVYCCDLTTLVKAHNTQRPMVVDICIREIEARGLKSEGLYRVSGFTEHIEDVKMAFDRDGEKADISANVYPDINIITGALKLY

SEQ ID NO: 26326 - protein, 332 aa, Homo sapiens
  REGION 1..332: note = ENSP00000486515
MFSEELWLENEKKCAVVRKSKQGRKRQELLAVAFGVKVGVKGGFLWPPLKLFACSQISSLVRRAALTHNDNHFNYEKTHNFKVHTFRGPHWCEYCANFMWGLIAQGVRCSDCGLNVHKQCSKHVPNDCQPDLKRIKKVYCCDLTTLVKAHNTQRPMVVDICIREIEARGLKSEGLYRVSGFTEHIEDVKMAFDRDGEKADISANVYPDINIITGALKLYFRDLPIPVITYDTYSKFIDAAKISNADERLEAVHEVLMLLPPAHYETLRYLMIHLKKVTMNEKDNFMNAENLGIVFGPTLMRPPEDSTLTTLHDMRYQKLIVQILIENEDVLF

SEQ ID NO: 26327 - protein, 91 aa, Homo sapiens
  REGION 1..91: note = ENSP00000398326
  VARIANT 1: note = Any amino acid
XDVKMAFDRDGEKADISANVYPDINIITGALKLYFRDLPIPVITYDTYSKFIDAAKISNADERLEAVHEVLMLLPPAHYETLRYLMIHLKK

SEQ ID NO: 26328 - protein, 197 aa, Homo sapiens
  REGION 1..197: note = ENSP00000387425
MFSEELWLENEKKCAVVRKSKQGRKRQELLAVAFGVKVGVKGGFLWPPLKLFACSQISSLVRRAALTHNDNHFNYEKTHNFKVHTFRGPHWCEYCANFMWGLIAQGVRCSDCGLNVHKQCSKHVPNDCQPDLKRIKKVYCCDLTTLVKAHNTQRPMVVDICIREIEARGLKSEGLYRVSGFTEHIEDVKMAFDRGLL

SEQ ID NO: 26329 - protein, 274 aa, Homo sapiens
  REGION 1..274: note = ENSP00000394284
MFSEELWLENEKKCAVVRKSKQGRKRQELLAVAFGVKVGVKGGFLWPPLKLFACSQISSLVRRAALTHNDNHFNYEKTHNFKVHTFRGPHWCEYCANFMWGLIAQGVRCSGLKSEGLYRVSGFTEHIEDVKMAFDRDGEKADISANVYPDINIITGALKLYFRDLPIPVITYDTYSKFIDAAKISNADERLEAVHEVLMLLPPAHYETLRYLMIHLKKVTMNEKDNFMNAENLGIVFGPTLMRPPEDSTLTTLHDMRYQKLIVQILIENEDVLF

SEQ ID NO: 26330 - protein, 228 aa, Homo sapiens
  REGION 1..228: note = ENSP00000406337
MFSEELWLENEKKCAVVRKSKQGRKRQELLAVAFGVKVGVKGGFLWPPLKLFACSQISSLVRRAALTHNDNHFNYEKTHNFKVHTFRGPHWCEYCANFMWGLIAQGVRCSGLKSEGLYRVSGFTEHIEDVKMAFDREISNADERLEAVHEVLMLLPPAHYETLRYLMIHLKKVTMNEKDNFMNAENLGIVFGPTLMRPPEDSTLTTLHDMRYQKLIVQILIENEDVLF

SEQ ID NO: 26331 - protein, 260 aa, Homo sapiens
  REGION 1..260: note = ENSP00000386849
MFSEELWLENEKKCAVVRKSKQGRKRQELLAVAFGVKVGVKGGFLWPPLKLFACSQISSLVRRAALTHNDNHFNYEKTHNFKVHTFRGPHWCEYCANFMWGLIAQGVRCSDCGLNVHKQCSKHVPNDCQPDLKRIKKVYCCDLTTLVKAHNTQRPMVVDICIREIEAREISNADERLEAVHEVLMLLPPAHYETLRYLMIHLKKVTMNEKDNFMNAENLGIVFGPTLMRPPEDSTLTTLHDMRYQKLIVQILIENEDVLF

SEQ ID NO: 26332 - protein, 216 aa, Homo sapiens [sequence omitted]

SEQ ID NO: 26333 - protein, 232 aa, Homo sapiens
  REGION 1..232: note = ENSP00000382993
MAYFHELSSRVSFQEARLACESEGGVLLSLENEAEQKLIESMLQNLTKPGTGISDGDFWIGLWRNGDGQTSGACPDLYQWSDGSNSQYRNWYTDEPSCGSEKCVVMYHQPTANPGLGGPYLYQWNDDRCNMKHNYICKYEPEINPTAPVEKPYLTNQPGDTHQNVVVTEAGIIPNLIYVVIPTIPLLLLILVAFGTCCFQMLHKSKGRTKTSPNQSTLWISKSTRKESGMEV

SEQ ID NO: 26334 - protein, 236 aa, Homo sapiens
  REGION 1..236: note = ENSP00000382996
MAYFHELSSRVSFQEARLACESEGGVLLSLENEAEQKLIESMLQNLTKPGTGISDGDFWIGLWRNGDGQTSGACPDLYQWSDGSNSQYRNWYTDEPSCGSEKCVVMYHQPTANPGLGGPYLYQWNDDRCNMKHNYICKYEPEINPTAPVEKPYLTNQPGDTHQNVVVTEAVKEEQKLVQTSLHCGFQRVPEKKVAWKYNNSLTWFQNFVILDLYKEWHQNNSLEWLEITKDLQDEL

SEQ ID NO: 26335 - protein, 236 aa, Homo sapiens; identical to SEQ ID NO: 26334
  REGION 1..236: note = ENSP00000383001

SEQ ID NO: 26336 - protein, 232 aa, Homo sapiens; identical to SEQ ID NO: 26333
  REGION 1..232: note = ENSP00000382992

SEQ ID NO: 26337 - protein, 273 aa, Homo sapiens
  REGION 1..273: note = ENSP00000299295
MSRVVSLLLGAALLCGHGAFCRRVVSGQKVCFADFKHPCYKMAYFHELSSRVSFQEARLACESEGGVLLSLENEAEQKLIESMLQNLTKPGTGISDGDFWIGLWRNGDGQTSGACPDLYQWSDGSNSQYRNWYTDEPSCGSEKCVVMYHQPTANPGLGGPYLYQWNDDRCNMKHNYICKYEPEINPTAPVEKPYLTNQPGDTHQNVVVTEAGIIPNLIYVVIPTIPLLLLILVAFGTCCFQMLHKSKGRTKTSPNQSTLWISKSTRKESGMEV

SEQ ID NO: 26338 - protein, 254 aa, Homo sapiens
  REGION 1..254: note = ENSP00000443566
MTAGSAHSQKVCFADFKHPCYKMAYFHELSSRVSFQEARLACESEGGVLLSLENEAEQKLIESMLQNLTKPGTGISDGDFWIGLWRNGDGQTSGACPDLYQWSDGSNSQYRNWYTDEPSCGSEKCVVMYHQPTANPGLGGPYLYQWNDDRCNMKHNYICKYEPEINPTAPVEKPYLTNQPGDTHQNVVVTEAGIIPNLIYVVIPTIPLLLLILVAFGTCCFQMLHKSKGRTKTSPNQSTLWISKSTRKESGMEV

SEQ ID NO: 26339 - protein, 236 aa, Homo sapiens; identical to SEQ ID NO: 26334
  REGION 1..236: note = ENSP00000339975

SEQ ID NO: 26340 - protein, 332 aa, Homo sapiens
  REGION 1..332: note = ENSP00000319255
MALLCYNRGCGQRFDPETNSDDACTYHPGVPVFHDALKGWSCCKRRTTDFSDFLSIVGCTKGRHNSEKPPEPVKPEVKTTEKKELCELKPKFQEHIIQAPKPVEAIKRPSPDEPMTNLELKISASLKQALDKLKLSSGNEENKKEEDNDEIKIGTSCKNGGCSKTYQGLESLEEVCVYHSGVPIFHEGMKYWSCCRRKTSDFNTFLAQEGCTKGKHMWTKKDAGKKVVPCRHDWHQTGGEVTISVYAKNSLPELSRVEANSTLLNVHIVFEGEKEFDQNVKLWGVIDVKRSYVTMTATKIEITMRKAEPMQWASLELPAAKKQEKQKDATTD

SEQ ID NO: 26341 - protein, 144 aa, Homo sapiens
  REGION 1..144: note = ENSP00000433719
MKYWSCCRRKTSDFNTFLAQEGCTKGKHMWTKKDAGKKVVPCRHDWHQTGGEVTISVYAKNSLPELSRVEANSTLLNVHIVFEGEKEFDQNVKLWGVIDVKRSYVTMTATKIEITMRKAEPMQWASLELPAAKKQEKQKDATTD

SEQ ID NO: 26342 - protein, 313 aa, Homo sapiens
  REGION 1..313: note = ENSP00000401080
MALLCYNRGCGQRFDPETNSDDACTYHPGVPVFHDALKGCTKGRHNSEKPPEPVKPEVKTTEKKELCELKPKFQEHIIQAPKPVEAIKRPSPDEPMTNLELKISASLKQALDKLKLSSGNEENKKEEDNDEIKIGTSCKNGGCSKTYQGLESLEEVCVYHSGVPIFHEGMKYWSCCRRKTSDFNTFLAQEGCTKGKHMWTKKDAGKKVVPCRHDWHQTGGEVTISVYAKNSLPELSRVEANSTLLNVHIVFEGEKEFDQNVKLWGVIDVKRSYVTMTATKIEITMRKAEPMQWASLELPAAKKQEKQKDATTD

SEQ ID NO: 26343 - protein, 144 aa, Homo sapiens; identical to SEQ ID NO: 26341
  REGION 1..144: note = ENSP00000436632

SEQ ID NO: 26344 - protein, 184 aa, Homo sapiens
  REGION 1..184: note = ENSP00000436945
MALLCYNRGCGQRFDPETNSDDACTYHPGVPVFHDALKGWSCCKRRTTDFSDFLSIVGCTKGRHNSEKPPEPVKPEVKTTEKKELCELKPKFQEHIIQAPKPVEAIKRPSPDEPMTNLELKISASLKQALDKLKLSSGNEENKKEEDNDEIKIGTSCKNGGCSKSLHLQQQWGPDLPDKPWIYI

SEQ ID NO: 26345 - protein, 120 aa, Homo sapiens
  REGION 1..120: note = ENSP00000434040
MALLCYNRGCGQRFDPETNSDDACTYHPGVPVFHDALKGWSCCKRRTTDFSDFLSIVGCTKGRHNSEKPPEPVKPEVKTTEKKELCELKPKFQEHIIQAPKPVEAIKRPRFQNSPAQMNQ

SEQ ID NO: 26346 - protein, 116 aa, Homo sapiens
  REGION 1..116: note = ENSP00000431929
MALLCYNRGCGQRFDPETNSDDACTYHPGVPVFHDALKGWSCCKRRTTDFSDFLSIVGCTKGRHNSEKPPEPVKPEVKTTEKKELCELKPKFQEHIIQAPKPVEAIKRPRSSSCYT

SEQ ID NO: 26347 - protein, 39 aa, Homo sapiens
  REGION 1..39: note = ENSP00000433440
MALLCYNRGCGQRFDPETNSDDACTYHPGVPVFHDALKS

SEQ ID NO: 26348 - protein, 117 aa, Homo sapiens
  REGION 1..117: note = ENSP00000432019
MALLCYNRGCGQRFDPETNSDGKRNAPPALPPLHLISRGGPLGRRVSADLLQPSSRGPRSMPLLGLPWLPAQPAGRPSVAPRSLGERPAPAPDCPLPLRRETLPWIHVFPPSSPHSF

SEQ ID NO: 26349 - protein, 86 aa, Homo sapiens
  REGION 1..86: note = ENSP00000348930
MPSLPAPPAPLLLLGLLLLGSRPARGAGPEPPVLPIRSEKEPLPVRGAAGCTFGGKVYALDETWHPDLGEPFGVMRCVLCACEAGP

SEQ ID NO: 26350 - protein, 955 aa, Homo sapiens
  REGION 1..955: note = ENSP00000204604
MPSLPAPPAPLLLLGLLLLGSRPARGAGPEPPVLPIRSEKEPLPVRGAAGCTFGGKVYALDETWHPDLGEPFGVMRCVLCACEAPQWGRRTRGPGRVSCKNIKPECPTPACGQPRQLPGHCCQTCPQERSSSERQPSGLSFEYPRDPEHRSYSDRGEPGAEERARGDGHTDFVALLTGPRSQAVARARVSLLRSSLRFSISYRRLDRPTRIRFSDSNGSVLFEHPAAPTQDGLVCGVWRAVPRLSLRLLRAEQLHVALVTLTHPSGEVWGPLIRHRALAAETFSAILTLEGPPQQGVGGITLLTLSDTEDSLHFLLLFRGLLEPRSGGLTQVPLRLQILHQGQLLRELQANVSAQEPGFAEVLPNLTVQEMDWLVLGELQMALEWAGRPGLRISGHIAARKSCDVLQSVLCGADALIPVQTGAAGSASLTLLGNGSLIYQVQVVGTSSEVVAMTLETKPQRRDQRTVLCHMAGLQPGGHTAVGICPGLGARGAHMLLQNELFLNVGTKDFPDGELRGHVAALPYCGHSARHDTLPVPLAGALVLPPVKSQAAGHAWLSLDTHCHLHYEVLLAGLGGSEQGTVTAHLLGPPGTPGPRRLLKGFYGSEAQGVVKDLEPELLRHLAKGMASLMITTKGSPRGELRGQVHIANQCEVGGLRLEAAGAEGVRALGAPDTASAAPPVVPGLPALAPAKPGGPGRPRDPNTCFFEGQQRPHGARWAPNYDPLCSLCTCQRRTVICDPVVCPPPSCPHPVQAPDQCCPVCPEKQDVRDLPGLPRSRDPGEGCYFDGDRSWRAAGTRWHPVVPPFGLIKCAVCTCKGGTGEVHCEKVQCPRLACAQPVRVNPTDCCKQCPVGSGAHPQLGDPMQADGPRGCRFAGQWFPESQSWHPSVPPFGEMSCITCRCGAGVPHCERDDCSLPLSCGSGKESRCCSRCTAHRRPAPETRTDPELEKEAEGS

SEQ ID NO: 26351 - protein, 94 aa, Homo sapiens
  REGION 1..94: note = ENSP00000408624
MPSLPAPPAPLLLLGLLLLGSRPARGAGPEPPVLPIRSEKEPLPVRGAAGCTFGGKVYALDETWHPDLGEPFGVMRCVLCACEATGTLRPREMK

SEQ ID NO: 26352 - protein, 350 aa, Homo sapiens
  REGION 1..350: note = ENSP00000392794
MPSLPAPPAPLLLLGLLLLGSRPARGAGPEPPVLPIRSEKEPLPVRGAAGCTFGGKVYALDETWHPDLGEPFGVMRCVLCACEAPQWGRRTRGPGRVSCKNIKPECPTPACGQPRQLPGHCCQTCPQERSSSERQPSGLSFEYPRDPEHRSYSDRGEPGAEERARGDGHTDFVALLTGPRSQAVARARVSLLRSSLRFSISYRRLDRPTRIRFSDSNGSVLFEHPAAPTQDGLVCGVWRAVPRLSLRLLRAEQLHVALVTLTHPSGEVWGPLIRHRALAAETFSAILTLEGPPQQGVGGITLLTLSDTEDSLHFLLLFRGLLEPRSGDSTPGAATARTSGQCLSPGTRLC

SEQ ID NO: 26353 - protein, 954 aa, Homo sapiens
  REGION 1..954: note = ENSP00000408972
MPSLPAPPAPLLLLGLLLLGSRPARGAGPEPPVLPIRSEKEPLPVRGAAGCTFGGKVYALDETWHPDLGEPFGVMRCVLCACEAPQWGRRTRGPGRVSCKNIKPECPTPACGQPRQLPGHCCQTCPQERSSSERQPSGLSFEYPRDPEHRSYSDRGEPGAEERARGDGHTDFVALLTGPRSQAVARARVSLLRSSLRFSISYRRLDRPTRIRFSDSNGSVLFEHPAAPTQDGLVCGVWRAVPRLSLRLLRAEQLHVALVTLTHPSGEVWGPLIRHRALAAETFSAILTLEGPPQQGVGGITLLTLSDTEDSLHFLLLFRGLLEPRSGGLTQVPLRLQILHQGQLLRELQANVSAQEPGFAEVLPNLTVQEMDWLVLGELQMALEWAGRPGLRISGHIAARKSCDVLQSVLCGADALIPVQTGAAGSASLTLLGNGSLIYQVQVVGTSSEVVAMTLETKPQRRDQRTVLCHMAGLQPGGHTAVGICPGLGARGAHMLLQNELFLNVGTKDFPDGELRGHVAALPYCGHSARHDTLPVPLAGALVLPPVKSQAAGHAWLSLDTHCHLHYEVLLAGLGGSEQGTVTAHLLGPPGTPGPRRLLKGFYGSEAQGVVKDLEPELLRHLAKGMASLMITTKGSPRGELRGQVHIANQCEVGGLRLEAAGAEGVRALGAPDTASAAPPVVPGLPALAPAKPGGPGRPRDPNTCFFEGQQRPHGARWAPNYDPLCSLCTCQRRTVICDPVVCPPPSCPHPVQAPDQCCPVCPEKQDVRDLPGLPRSRDPGEGCYFDGDRSWRAAGTRWHPVVPPFGLIKCAVCTCKGGTGEVHCEKVQCPRLACAQPVRVNPTDCCKQCPVGSGAHPQLGDPMQADGPRGCRFAGQWFPESQSWHPSVPPFGEMSCITCRCGAGVPHCERDDCSLPLSCGSGKESRCCSRCTAHRRPPETRTDPELEKEAEGS

SEQ ID NO: 26354 - protein, 915 aa, Homo sapiens
  REGION 1..915: note = ENSP00000334036
MPSLPAPPAPLLLLGLLLLGSRPARGAGPEPPVLPIRSEKEPLPVRGAAGCTFGGKVYALDETWHPDLGEPFGVMRCVLCACEAPQWGRRTRGPGRVSCKNIKPECPTPACGQPRQLPGHCCQTCPQERSSSERQPSGLSFEYPRDPEHRSYSDRGEPGAEERARGDGHTDFVALLTGPRSQAVARARVSLLRSSLRFSISYRRLDRPTRIRFSDSNGSVLFEHPAAPTQDGLVCGVWRAVPRLSLRLLRAEQLHVALVTLTHPSGEVWGPLIRHRALAAETFSAILTLEGPPQQGVGGITLLTLSDTEDSLHFLLLFRGLLEPRSGGLTQVPLRLQILHQGQLLRELQANVSAQEPGFAEVLPNLTVQEMDWLVLGELQMALEWAGRPGLRISGHIAARKSCDVLQSVLCGADALIPVQTGAAGSASLTLLGNGSLIYQAVGICPGLGARGAHMLLQNELFLNVGTKDFPDGELRGHVAALPYCGHSARHDTLPVPLAGALVLPPVKSQAAGHAWLSLDTHCHLHYEVLLAGLGGSEQGTVTAHLLGPPGTPGPRRLLKGFYGSEAQGVVKDLEPELLRHLAKGMASLMITTKGSPRGELRGQVHIANQCEVGGLRLEAAGAEGVRALGAPDTASAAPPVVPGLPALAPAKPGGPGRPRDPNTCFFEGQQRPHGARWAPNYDPLCSLCTCQRRTVICDPVVCPPPSCPHPVQAPDQCCPVCPEKQDVRDLPGLPRSRDPGEGCYFDGDRSWRAAGTRWHPVVPPFGLIKCAVCTCKGGTGEVHCEKVQCPRLACAQPVRVNPTDCCKQCPVGSGAHPQLGDPMQADGPRGCRFAGQWFPESQSWHPSVPPFGEMSCITCRCGAGVPHCERDDCSLPLSCGSGKESRCCSRCTAHRRPAPETRTDPELEKEAEGS

SEQ ID NO: 26355 - protein, 460 aa, Homo sapiens
  REGION 1..460: note = ENSP00000306490
MNTSAPPAVSPNITVLAPGKGPWQVAFIGITTGLLSLATVTGNLLVLISFKVNTELKTVNNYFLLSLACADLIIGTFSMNLYTTYLLMGHWALGTLACDLWLALDYVASNASVMNLLLISFDRYFSVTRPLSYRAKRTPRRAALMIGLAWLVSFVLWAPAILFWQYLVGERTVLAGQCYIQFLSQPIITFGTAMAAFYLPVTVMCTLYWRIYRETENRARELAALQGSETPGKGGGSSSSSERSQPGAEGSPETPPGRCCRCCRAPRLLQAYSWKEEEEEDEGSMESLTSSEGEEPGSEVVIKMPMVDPEAQAPTKQPPRSSPNTVKRPTKKGRDRAGKGQKPRGKEQLAKRKTFSLVKEKKAARTLSAILLAFILTWTPYNIMVLVSTFCKDCVPETLWELGYWLCYVNSTINPMCYALCNKAFRDTFRLLLLCRWDKRRWRKIPKRPGSVHRTPSRQC

SEQ ID NO: 26356 - protein, 454 aa, Homo sapiens
  REGION 1..454: note = ENSP00000441188
MNTSAPPAVSPNITVLAPGKGPWQVAFIGITTGLLSLATVTGNLLVLISFKVNTELKTVNNYFLLSLACADLIIGTFSMNLYTTYLLMGHWALGTLACDLWLALDYVASNASVMNLLLISFDRYFSVTRPLSYRAKRTPRRAALMIGLAWLVSFVLWAPAILFWQYLVGERTVLAGQCYIQFLSQPIITFGTAMAAFYLPVTVMCTLYWRIYRETENRARELAALQGSETPGKGGGSSSSSERSQPGAEGSPETPPGRCCRCCRAPRLLQAYSWKEEEEEDEGSMESLTSSEGEEPGSEVVIKMPMVDPEAQAPTKQPPRSSPNTVKRPTKKGRDRAGKGQKPRGKEQLAKRKTFSLVKEKKAARTLSAILLAFILTWTPYNIMVLVSTFCKDCVPETLWELGYWLCYVNSTINPMCYALCNKAFRDTFRLLLLCRWDKRRWRKIPKRPGSVHR

SEQ ID NO: 26357 - protein, 134 aa, Homo sapiens
  REGION 1..134: note = ENSP00000444482
MNTSAPPAVSPNITVLAPGKGPWQVAFIGITTGLLSLATVTGNLLVLISFKVNTELKTVNNYFLLSLACADLIIGTFSMNLYTTYLLMGHWALGTLACDLWLALDYVASNASVMNLLLISFDRYFSVTRPLSYR

SEQ ID NO: 26358 - protein, 590 aa, Homo sapiens
  REGION 1..590: note = ENSP00000255380
MTLHNNSTTSPLFPNISSSWIHSPSDAGLPPGTVTHFGSYNVSRAAGNFSSPDGTTDDPLGGHTVWQVVFIAFLTGILALVTIIGNILVIVSFKVNKQLKTVNNYFLLSLACADLIIGVISMNLFTTYIIMNRWALGNLACDLWLAIDYVASNASVMNLLVISFDRYFSITRPLTYRAKRTTKRAGVMIGLAWVISFVLWAPAILFWQYFVGKRTVPPGECFIQFLSEPTITFGTAIAAFYMPVTIMTILYWRIYKETEKRTKELAGLQASGTEAETENFVHPTGSSRSCSSYELQQQSMKRSNRRKYGRCHFWFTTKSWKPSSEQMDQDHSSSDSWNNNDAAASLENSASSDEEDIGSETRAIYSIVLKLPGHSTILNSTKLPSSDNLQVPEEELGMVDLERKADKLQAQKSVDDGGSFPKSFSKLPIQLESAVDTAKTSDVNSSVGKSTATLPLSFKEATLAKRFALKTRSQITKRKRMSLVKEKKAAQTLSAILLAFIITWTPYNIMVLVNTFCDSCIPKTFWNLGYWLCYINSTVNPVCYALCNKTFRTTFKMLLLCQCDKKKRRKQQYQQRQSVIFHKRAPEQAL

SEQ ID NO: 26359 - protein, 109 aa, Homo sapiens
  REGION 1..109: note = ENSP00000404764
MTLHNNSTTSPLFPNISSSWIHSPSDAGLPPGTVTHFGSYNVSRAAGNFSSPDGTTDDPLGGHTVWQVVFIAFLTGILALVTIIGNILVIVSFKVNKQLKTVNNYFLLS

SEQ ID NO: 26360 - protein, 590 aa, Homo sapiens; identical to SEQ ID NO: 26358
  REGION 1..590: note = ENSP00000482377

SEQ ID NO: 26361 - protein, 505 aa, Homo sapiens
  REGION 1..505: note = ENSP00000452896
MGSGPLSLPLALSPPRLLLLLLLSLLPVARASEAEHRLFERLFEDYNEIIRPVANVSDPVIIHFEVSMSQLVKVDEVNQIMETNLWLKQIWNDYKLKWNPSDYGGAEFMRVPAQKIWKPDIVLYNNAVGDFQVDDKTKALLKYTGEVTWIPPAIFKSSCKIDVTYFPFDYQNCTMKFGSWSYDKAKIDLVLIGSSMNLKDYWESGEWAIIKAPGYKHDIKYNCCEEIYPDITYSLYIRRLPLFYTINLIIPCLLISFLTVLVFYLPSDCGEKVTLCISVLLSLTVFLLVITETIPSTSLVIPLIGEYLLFTMIFVTLSIVITVFVLNVHYRTPTTHTMPSWVKTVFLNLLPRVMFMTRPTSNEGNAQKPRPLYGAELSNLNCFSRAESKGCKEGYPCQDGMCGYCHHRRIKISNFSANLTRSSSSESVDAVLSLSALSPEIKEAIQSVKYIAENMKAQNEAKEIQDDWKYVAMVIDRIFLWVFTLVCILGTAGLFLQPLMAREDA

SEQ ID NO: 26362 - protein, 489 aa, Homo sapiens
  REGION 1..489: note = ENSP00000267951
MGSGPLSLPLALSPPRLLLLLLLSLLPVARASEAEHRLFERLFEDYNEIIRPVANVSDPVIIHFEVSMSQLVKVDEVNQIMETNLWLKQIWNDYKLKWNPSDYGGAEFMRVPAQKIWKPDIVLYNNAVGDFQVDDKTKALLKYTGEVTWIPPAIFKSSCKIDVTYFPFDYQNCTMKFGSWSYDKAKIDLVLIGSSMNLKDYWESGEWAIIKAPGYKHDIKYNCCEEIYPDITYSLYIRRLPLFYTINLIIPCLLISFLTVLVFYLPSDCGEKVTLCISVLLSLTVFLLVITETIPSTSLVIPLIGEYLLFTMIFVTLSIVITVFVLNVHYRTPTTHTMPSWVKTVFLNLLPRVMFMTRPTSNEGNAQKPRPLYGAELSNLNCFSRAESKGCKEGYPCQDGMCGYCHHRRIKISNFSANLTRSSSSESVDAVLSLSALSPEIKEAIQSVKYIAENMKAQNEAKEEQKAQEIQQLKRKEKSTETSDQEPGL

SEQ ID NO: 26363 - protein, 505 aa, Homo sapiens; identical to SEQ ID NO: 26361
  REGION 1..505: note = ENSP00000315602

SEQ ID NO: 26364 - protein, 17 aa, Homo sapiens
  REGION 1..17: note = ENSP00000453993
MSQLVKVDEVNQIMETN

SEQ ID NO: 26365 - protein, 411 aa, Homo sapiens
  REGION 1..411: note = ENSP00000309270
MQCSWKAVLLLALASIAIQYTAIRTFTAKSFHTCPGLAEAGLAERLCEESPTFAYNLSRKTHILILATTRSGSSFVGQLFNQHLDVFYLFEPLYHVQNTLIPRFTQGKSPADRRVMLGASRDLLRSLYDCDLYFLENYIKPPPVNHTTDRIFRRGASRVLCSRPVCDPPGPADLVLEEGDCVRKCGLLNLTVAAEACRERSHVAIKTVRVPEVNDLRALVEDPRLNLKVIQLVRDPRGILASRSETFRDTYRLWRLWYGTGRKPYNLDVTQLTTVCEDFSNSVSTGLMRPPWLKGKYMLVRYEDLARNPMKKTEEIYGFLGIPLDSHVARWIQNNTRGDPTLGKHKYGTVRNSAATAEKWRFRLSYDIVAFAQNACQQVLAQLGYKIAASEEELKNPSVSLVEERDFRPFS

SEQ ID NO: 26366 - protein, 356 aa, Homo sapiens
  REGION 1..356: note = ENSP00000264249
MHHQWLLLAACFWVIFMFMVASKFITLTFKDPDVYSAKQEFLFLTTMPEVRKLPEEKHIPEELKPTGKELPDSQLVQPLVYMERLELIRNVCRDDALKNLSHTPVSKFVLDRIFVCDKHKILFCQTPKVGNTQWKKVLIVLNGAFSSIEEIPENVVHDHEKNGLPRLSSFSDAEIQKRLKTYFKFFIVRDPFERLISAFKDKFVHNPRFEPWYRHEIAPGIIRKYRRNRTETRGIQFEDFVRYLGDPNHRWLDLQFGDHIIHWVTYVELCAPCEIMYSVIGHHETLEDDAPYILKEAGIDHLVSYPTIPPGITVYNRTKVEHYFLGISKRDIRRLYARFEGDFKLFGYQKPDFLLN

SEQ ID NO: 26367 - protein, 356 aa, Homo sapiens; identical to SEQ ID NO: 26366
  REGION 1..356: note = ENSP00000387309

SEQ ID NO: 26368 - protein, 141 aa, Homo sapiens
  REGION 1..141: note = ENSP00000387121
MHHQWLLLAACFWVIFMFMVASKFITLTFKDPDVYSAKQEFLFLTTMPEVRKLPEEKHIPEELKPTGKELPDSQLVQPLVYMERLELIRNVCRDDALKNLSHTPVSKFVLDRIFVCDKHKILFCQTPKVGNTQWKKVLIVL

SEQ ID NO: 26369 - protein, 133 aa, Homo sapiens
  REGION 1..133: note = ENSP00000405922
MHHQWLLLAACFWVIFMFMVASKFITLTFKDPDVYSAKQEFLFLTTMPEVRKLPEEKHIPEELKPTGKELPDSQLVQPLVYMERLELIRNVCRDDALKNLSHTPVSKFVLDRIFVCDKHKILFCQTPKVGNTQ

SEQ ID NO: 26370 - protein, 142 aa, Homo sapiens
  REGION 1..142: note = ENSP00000387977
MQRKAGKKEHVQLRDKRNQEPQFRGNTARKCEPQAAEGRVSEWLRCDNMHHQWLLLAACFWVIFMFMVASKFITLTFKDPDVYSAKQEFLFLTTMPEVRKLPEEKHIPEELKPTGKELPDSQLVQPLVYMERLELIRNVCRD

SEQ ID NO: 26371 - protein, 85 aa, Homo sapiens
  REGION 1..85: note = ENSP00000407525
MHHQWLLLAACFWVIFMFMVASKFITLTFKDPDVYSAKQEFLFLTTMPEVRKLPEEKHIPEELKPTGKELPDSQLVQPLVYMERL

SEQ ID NO: 26372 - protein, 64 aa, Homo sapiens
  REGION 1..64: note = ENSP00000416831
MHHQWLLLAACFWVIFMFMVASKFITLTFKDPDVYSAKQEFLFLTTMPEVRKLPEEKHIPEELK

SEQ ID NO: 26373 - protein, 33 aa, Homo sapiens
  REGION 1..33: note = ENSP00000395643
MHHQWLLLAACFWVIFMFMVASKFITLTFKDPD

SEQ ID NO: 26374 - protein, 77 aa, Homo sapiens
  REGION 1..77: note = ENSP00000449093
MKPALLEVMRMNRICRMVLATCLGSFILVIFYFQSMLHPVMRRNPFGVDICCRKGSRSPLQELYNPIQVSFKHSVSM

SEQ ID NO: 26375 - protein, 347 aa, Homo sapiens
  REGION 1..347: note = ENSP00000450004
MKPALLEVMRMNRICRMVLATCLGSFILVIFYFQIMRRNPFGVDICCRKGSRSPLQELYNPIQLELSNTAVLHQMRRDQVTDTCRANSATSRKRRVLTPNDLKHLVVDEDHELIYCYVPKVACTNWKRLMMVLTGRGKYSDPMEIPANEAHVSANLKTLNQYSIPEINHRLKSYMKFLFVREPFERLVSAYRNKFTQKYNISFHKRYGTKIIKRQRKNATQEALRKGDDVKFEEFVAYLIDPHTQREEPFNEHWQTVYSLCHPCHIHYDLVGKYETLEEDSNYVLQLAGVGSYLKFPTYAKSTRTTDEMTTEFFQNISSEHQTQLYEVYKLDFLMFNYSVPSYLKLE

SEQ ID NO: 26376 - protein, 352 aa, Homo sapiens
  REGION 1..352: note = ENSP00000305725
MKPALLEVMRMNRICRMVLATCLGSFILVIFYFQSMLHPVMRRNPFGVDICCRKGSRSPLQELYNPIQLELSNTAVLHQMRRDQVTDTCRANSATSRKRRVLTPNDLKHLVVDEDHELIYCYVPKVACTNWKRLMMVLTGRGKYSDPMEIPANEAHVSANLKTLNQYSIPEINHRLKSYMKFLFVREPFERLVSAYRNKFTQKYNISFHKRYGTKIIKRQRKNATQEALRKGDDVKFEEFVAYLIDPHTQREEPFNEHWQTVYSLCHPCHIHYDLVGKYETLEEDSNYVLQLAGVGSYLKFPTYAKSTRTTDEMTTEFFQNISSEHQTQLYEVYKLDFLMFNYSVPSYLKLE

SEQ ID NO: 26377 - protein, 72 aa, Homo sapiens
  REGION 1..72: note = ENSP00000448678
MKPALLEVMRMNRICRMVLATCLGSFILVIFYFQIMRRNPFGVDICCRKGSRSPLQELYNPIQVSFKHSVSM

SEQ ID NO: 26378 - protein, 158 aa, Homo sapiens
  REGION 1..158: note = ENSP00000449095
MRRNPFGVDICCRKGSRSPLQELYNPIQLELSNTAVLHQMRRDQVTDTCRANSATSRKRRVLTPNDLKHLVVDEDHELIYCYVPKVACTNWKRLMMVLTGRGKYSDPMEIPANEAHVSANLKTLNQYSIPEINHRLKSYMKFLFVREPFERLVSAYRN

SEQ ID NO: 26379 - protein, 414 aa, Homo sapiens
  REGION 1..414: note = ENSP00000258711
MTKARLFRLWLVLGSVFMILLIIVYWDSAGAAHFYLHTSFSRPHTGPPLPTPGPDRDRELTADSDVDEFLDKFLSAGVKQSDLPRKETEQPPAPGSMEESVRGYDWSPRDARRSPDQGRQQAERRSVLRGFCANSSLAFPTKERAFDDIPNSELSHLIVDDRHGAIYCYVPKVACTNWKRVMIVLSGSLLHRGAPYRDPLRIPREHVHNASAHLTFNKFWRRYGKLSRHLMKVKLKKYTKFLFVRDPFVRLISAFRSKFELENEEFYRKFAVPMLRLYANHTSLPASAREAFRAGLKVSFANFIQYLLDPHTEKLAPFNEHWRQVYRLCHPCQIDYDFVGKLETLDEDAAQLLQLLQVDRQLRFPPSYRNRTASSWEEDWFAKIPLAWRQQLYKLYEADFVLFGYPKPENLLRD

SEQ ID NO: 26380 - protein, 245 aa, Homo sapiens
  REGION 1..245: note = ENSP00000411207
MTKARLFRLWLVLGSVFMILLIIVYWDSAGAAHFYLHTSFSRPHTGPPLPTPGPDRDRELTADSDVDEFLDKFLSAGVKQSDLPRKETEQPPAPGSMEESVRGYDWSPRDARRSPDQGRQQAERRSVLRGFCANSSLAFPTKERAFDDIPNSELSHLIVDDRHGAIYCYVPKVACTNWKRVMIVLSGSLLHRGAPYRDPLRIPREHVHNASAHLTFNKFWRRYGKLSRHLMKVKLKKYTKFLFVR

SEQ ID NO: 26381 - protein, 414 aa, Homo sapiens; identical to SEQ ID NO: 26379
  REGION 1..414: note = ENSP00000481912

SEQ ID NO: 26382 - protein, 561 aa, Homo sapiens
  REGION 1..561: note = ENSP00000333947
MRHCINCCIQLLPDGAHKQQVNCQGGPHHGHQACPTCKGENKILFRVDSKQMNLLAVLEVRTEGNENWGGFLRFKKGKRCSLVFGLIIMTLVMASYILSGAHQELLISSPFHYGGFPSNPSLMDSENPSDTKEHHHQSSVNNISYMKDYPSIKLIINSITTRIEFTTRQLPDLEDLKKQELHMFSVIPNKFLPNSKSPCWYEEFSGQNTTDPYLTNSYVLYSKRFRSTFDALRKAFWGHLAHAHGKHFRLRCLPHFYIIGQPKCGTTDLYDRLRLHPEVKFSAIKEPHWWTRKRFGIVRLRDGLRDRYPVEDYLDLFDLAAHQIHQGLQASSAKEQSKMNTIIIGEASASTMWDNNAWTFFYDNSTDGEPPFLTQDFIHAFQPNARLIVMLRDPVERLYSDYLYFASSNKSADDFHEKVTEALQLFENCMLDYSLRACVYNNTLNNAMPVRLQVGLYAVYLLDWLSVFDKQQFLILRLEDHASNVKYTMHKVFQFLNLGPLSEKQEALMTKSPASNARRPEDRNLGPMWPITQKILRDFYRPFNARLAQVLADEAFAWKTT

SEQ ID NO: 26383 - protein, 506 aa, Homo sapiens
  REGION 1..506: note = ENSP00000485905
MRHCINCCIQLLPDGAHKQQVNCQGGPHHGHQACPTCKGENKILFRVDSKQMNLLAVLEVRTEGNENWGGFLRFKKGKRCSLVFGLIIMTLVMASYILSGAHQELLISSPFHYGGFPSNPSLMDSENPSDTKEHHHQSSVNNISYMKDYPSIKLIINSITTRIEFTTRQLPDLEDLKKQELHMFSVIPNKFLPNSKSPCWYEEFSGQNTTDPYLTNSYVLYSKRFRSTFDALRKAFWGHLAHAHGKHFRLRCLPHFYIIGQPKCGTTDLYDRLRLHPEVKFSAIKEPHWWTRKRFGIVRLRDGLRDRYPVEDYLDLFDLAAHQIHQGLQASSAKEQSKMNTIIIGEASASTMWDNNAWTFFYDNSTDGEPPFLTQDFIHAFQPNARLIVMLRDPVERLYSDYLYFASSNKSADDFHEKVTEALQLFENCMLDYSLRACVYNNTLNNAMPVCTPPPRTPRAGPWQKELVCCYYASGIVGLRFSIGTERSVLMCKCCSPLFMDVKAEN

SEQ ID NO: 26384 - protein, 66 aa, Homo sapiens
  REGION 1..66: note = ENSP00000487014
MRHCINCCIQLLPDGAHKQQVNCQGGPHHGHQACPTCKGENKILFRVDSKQMNLLAVLEVRTEGNE

SEQ ID NO: 26385 - protein, 561 aa, Homo sapiens; identical to SEQ ID NO: 26382
  REGION 1..561: note = ENSP00000402394

SEQ ID NO: 26386 - protein, 411 aa, Homo sapiens
  REGION 1..411: note = ENSP00000338783
MGMRARVPKVAHSTRRPPAARMWLPRFSSKTVTVLLLAQTTCLLLFIISRPGPSSPAGGEDRVHVLVLSSWRSGSSFLGQLFSQHPDVFYLMEPAWHVWTTLSQGSAATLHMAVRDLMRSIFLCDMDVFDAYMPQSRNLSAFFNWATSRALCSPPACSAFPRGTISKQDVCKTLCTRQPFSLAREACRSYSHVVLKEVRFFNLQVLYPLLSDPALNLRIVHLVRDPRAVLRSREAAGPILARDNGIVLGTNGKWVEADPHLRLIREVCRSHVRIAEAATLKPPPFLRGRYRLVRFEDLAREPLAEIRALYAFTGLTLTPQLEAWIHNITHGSGIGKPIEAFHTSSRNARNVSQAWRHALPFTKILRVQEVCAGALQLLGYRPVYSADQQRDLTLDLVLPRGPDHFSWASPD

SEQ ID NO: 26387 - protein, 99 aa, Homo sapiens
  REGION 1..99: note = ENSP00000454375
MSRHLPWICDQRCSSPSSPGRWPPAARMWLPRFSSKTVTVLLLAQTTCLLLFIISRPGPSSPAGGEDRVHVLVLSSWRSGSSFLGQLFSQHPDVFYLME

SEQ ID NO: 26388 - protein, 178 aa, Homo sapiens
  REGION 1..178: note = ENSP00000467012
MTLRPGTMRLACMFSSILLFGAAGLLLFISLQDPTELAPQQVPGIKFNIRPRQPHHDLPPGGSQDGDLKEPTERVTRDLSSGAPRGRNLPAPDQPQPPLQRGTRLRLRQRRRRLLIKKMPAAATIPANSSDAPFIRPGPGTLDGRWVSLHRSQQERKRVMQEACAKYRASSSRRAVTP

SEQ ID NO: 26389 - protein, 424 aa, Homo sapiens
  REGION 1..424: note = ENSP00000393879
MTLRPGTMRLACMFSSILLFGAAGLLLFISLQDPTELAPQQVPGIKFNIRPRQPHHDLPPGGSQDGDLKEPTERVTRDLSSGAPRGRNLPAPDQPQPPLQRGTRLRLRQRRRRLLIKKMPAAATIPANSSDAPFIRPGPGTLDGRWVSLHRSQQERKRVMQEACAKYRASSSRRAVTPRHVSRIFVEDRHRVLYCEVPKAGCSNWKRVLMVLAGLASSTADIQHNTVHYGSALKRLDTFDRQGILHRLSTYTKMLFVREPFERLVSAFRDKFEHPNSYYHPVFGKAILARYRANASREALRTGSGVRFPEFVQYLLDVHRPVGMDIHWDHVSRLCSPCLIDYDFVGKFESMEDDANFFLSLIRAPRNLTFPRFKDRHSQEARTTARIAHQYFAQLSALQRQRTYDFYYMDYLMFNYSKPFADLY

SEQ ID NO: 26390 - protein, 424 aa, Homo sapiens; identical to SEQ ID NO: 26389
  REGION 1..424: note = ENSP00000262622

SEQ ID NO: 26391 - protein, 424 aa, Homo sapiens; identical to SEQ ID NO: 26389
  REGION 1..424: note = ENSP00000392604

SEQ ID NO: 26392 - protein, 443 aa, Homo sapiens
  REGION 1..443: note = ENSP00000480991
MQPSEMVMNPKQVFLSVLIFGVAGLLLFMYLQVWIEEQHTGRVEKRREQKVTSGWGPVKYLRPVPRIMSTEKIQEHITNQNPKFHMPEDVREKKENLLLNSERSTRLLTKTSHSQGGDQALSKSTGSPTEKLIEKRQGAKTVFNKFSNMNWPVDIHPLNKSLVKDNKWKKTEETQEKRRSFLQEFCKKYGGVSHHQSHLFHTVSRIYVEDKHKILYCEVPKAGCSNWKRILMVLNGLASSAYNISHNAVHYGKHLKKLDSFDLKGIYTRLNTYTKAVFVRDPMERLVSAFRDKFEHPNSYYHPVFGKAIIKKYRPNACEEALINGSGVKFKEFIHYLLDSHRPVGMDIHWEKVSKLCYPCLINYDFVGKFETLEEDANYFLQMIGAPKELKFPNFKDRHSSDERTNAQVVRQYLKDLTRTERQLIYDFYYLDYLMFNYTTPFL

SEQ ID NO: 26393 - protein, 443 aa, Homo sapiens; identical to SEQ ID NO: 26392
  REGION 1..443: note = ENSP00000462852

SEQ ID NO: 26394 - protein, 74 aa, Homo sapiens
  REGION 1..74: note = ENSP00000464655
MQPSEMVMNPKQVFLSVLIFGVAGLLLFMYLQVWIEEQHTGRVEKRREQKVTSGWGPVKYLRPVPRIKPQVSHA

SEQ ID NO: 26395 - protein, 802 aa, Homo sapiens
  REGION 1..802: note = ENSP00000254190
MAARGRRAWLSVLLGLVLGFVLASRLVLPRASELKRAGPRRRASPEGCRSGQAAASQAGGARGDARGAQLWPPGSDPDGGPRDRNFLFVGVMTAQKYLQTRAVAAYRTWSKTIPGKVQFFSSEGSDTSVPIPVVPLRGVDDSYPPQKKSFMMLKYMHDHYLDKYEWFMRADDDVYIKGDRLENFLRSLNSSEPLFLGQTGLGTTEEMGKLALEPGENFCMGGPGVIMSREVLRRMVPHIGKCLREMYTTHEDVEVGRCVRRFAGVQCVWSYEMQQLFYENYEQNKKGYIRDLHNSKIHQAITLHPNKNPPYQYRLHSYMLSRKISELRHRTIQLHREIVLMSKYSNTEIHKEDLQLGIPPSFMRFQPRQREEILEWEFLTGKYLYSAVDGQPPRRGMDSAQREALDDIVMQVMEMINANAKTRGRIIDFKEIQYGYRRVNPMYGAEYILDLLLLYKKHKGKKMTVPVRRHAYLQQTFSKIQFVEHEELDAQELAKRINQESGSLSFLSNSLKKLVPFQLPGSKSEHKEPKDKKINILIPLSGRFDMFVRFMGNFEKTCLIPNQNVKLVVLLFNSDSNPDKAKQVELMRDYRIKYPKADMQILPVSGEFSRALALEVGSSQFNNESLLFFCDVDLVFTTEFLQRCRANTVLGQQIYFPIIFSQYDPKIVYSGKVPSDNHFAFTQKTGFWRNYGFGITCIYKGDLVRVGGFDVSIQGWGLEDVDLFNKVVQAGLKTFRSQEVGVVHVHHPVFCDPNLDPKQYKMCLGSKASTYGSTQQLAEMWLEKNDPSYSKSSNNNGSVRTA

SEQ ID NO: 26396 - protein, 882 aa, Homo sapiens
  REGION 1..882: note = ENSP00000302629
MAVRSRRPWMSVALGLVLGFTAASWLIAPRVAELSERKRRGSSLCSYYGRSAAGPRAGAQQPLPQPQSRPRQEQSPPPARQDLQGPPLPEAAPGITSFRSSPWQQPPPLQQRRRGREPEGATGLPGAPAAEGEPEEEDGGAAGQRRDGRPGSSHNGSGDGGAAAPSARPRDFLYVGVMTAQKYLGSRALAAQRTWARFIPGRVEFFSSQQPPNAGQPPPPLPVIALPGVDDSYPPQKKSFMMIKYMHDHYLDKYEWFMRADDDVYIKGDKLEEFLRSLNSSKPLYLGQTGLGNIEELGKLGLEPGENFCMGGPGMIFSREVLRRMVPHIGECLREMYTTHEDVEVGRCVRRFGGTQCVWSYEMQQLFHENYEHNRKGYIQDLHNSKIHAAITLHPNKRPAYQYRLHNYMLSRKISELRYRTIQLHRESALMSKLSNTEVSKEDQQLGVIPSFNHFQPRERNEVIEWEFLTGKLLYSAAENQPPRQSLSSILRTALDDTVLQVMEMINENAKSRGRLIDFKEIQYGYRRVNPMHGVEYILDLLLLYKRHKGRKLTVPVRRHAYLQQLFSKPFFRETEELDVNSLVESINSETQSFSFISNSLKILSSFQGAKEMGGHNEKKVHILVPLIGRYDIFLRFMENFENMCLIPKQNVKLVIILFSRDSGQDSSKHIELIKGYQNKYPKAEMTLIPMKGEFSRGLGLEMASAQFDNDTLLLFCDVDLIFREDFLQRCRDNTIQGQQVYYPIIFSQYDPKVTNGGNPPTDDYFIFSKKTGFWRDYGYGITCIYKSDLLGAGGFDTSIQGWGLEDVDLYNKVILSGLRPFRSQEVGVVHIFHPVHCDPNLDPKQYKMCLGSKASTFASTMQLAELWLEKHLGVRYNRTLS

SEQ ID NO: 26397 - protein, 975 aa, Homo sapiens
  REGION 1..975: note = ENSP00000262315
MEDYEQELCGVEDDFHNQFAAELEVLAELEGASTPSPSGVPLFTAGRPPRTFEEALARGDAASSPAPAASVGSSQGGARKRQVDADLQPAGSLPHAPRIKRPRLQVVKRLNFRSEEMEEPPPPDSSPTDITPPPSPEDLAELWGHGVSEAAADVGLTRASPAARNPVLRRPPILEDYVHVTSTEGVRAYLVLRADPMAPGVQGSLLHVPWRGGGQLDLLGVSLASLKKQVDGERRERLLQEAQKLSDTLHSLRSGEEEAAQPLGAPEEEPTDGQDASSHCLWVDEFAPRHYTELLSDDFTNRCLLKWLKLWDLVVFGHERPSRKPRPSVEPARVSKEATAPGKWKSHEQVLEEMLEAGLDPSQRPKQKVALLCGPPGLGKTTLAHVIARHAGYSVVEMNASDDRSPEVFRTRIEAATQMESVLGAGGKPNCLVIDEIDGAPVAAINVLLSILNRKGPQEVGPQGPAVPSGGGRRRRAEGGLLMRPIICICNDQFAPSLRQLKQQAFLLHFPPTLPSRLVQRLQEVSLRQGMRADPGVLAALCEKTDNDIRACINTLQFLYSRGQRELSVRDVQATRVGLKDQRRGLFSVWQEVFQLPRAQRRRVGQDPALPADTLLLGDGDAGSLTSASQRFYRVLHAAASAGEHEKVVQGLFDNFLRLRLRDSSLGAVCVALDWLAFDDLLAGAAHHSQSFQLLRYPPFLPVAFHVLFASSHTPRITFPSSQQEAQNRMSQMRNLIQTLVSGIAPATRSRATPQALLLDALCLLLDILAPKLRPVSTQLYSTREKQQLASLVGTMLAYSLTYRQERTPDGQYIYRLEPNVEELCRFPELPARKPLTYQTKQLIAREIEVEKMRRAEASARVENSPQVDGSPPGLEGLLGGIGEKGVHRPAPRNHEQRLEHIMRRAAREEQPEKDFFGRVVVRSTAVPSAGDTAPEQDSVERRMGTAVGRSEVWFRFNEGVSNAVRRSLYIRDLL

SEQ ID NO: 26398 - protein, 103 aa, Homo sapiens
  REGION 1..103: note = ENSP00000456998
MEDYEQELCGVEDDFHNQFAAELEGRRLRRPPGSPCSPRADPRGRSRRPLPEGTRPPVPPQPHLWAAARAAPGRGRWTPTCSRPGPCPTPPGSNGLGCRWSRG

SEQ ID NO: 26399 - protein, 1003 aa, Homo sapiens
  REGION 1..1003: note = ENSP00000406252
MEDYEQELCGVEDDFHNQFAAELEVLAELEGASTPSPSGVPLFTAGRPPRTFEEALARGDAASSPAPAASVGSSQGGARKRQVDADLQPAGSLPHGRLAALPQGLRSGREAEEASGSLHVSPPAPRIKRPRLQVVKRLNFRSEEMEEPPPPDSSPTDITPPPSPEDLAELWGHGVSEAAADVGLTRASPAARNPVLRRPPILEDYVHVTSTEGVRAYLVLRADPMAPGVQGSLLHVPWRGGGQLDLLGVSLASLKKQVDGERRERLLQEAQKLSDTLHSLRSGEEEAAQPLGAPEEEPTDGQDASSHCLWVDEFAPRHYTELLSDDFTNRCLLKWLKLWDLVVFGHERPSRKPRPSVEPARVSKEATAPGKWKSHEQVLEEMLEAGLDPSQRPKQKVALLCGPPGLGKTTLAHVIARHAGYSVVEMNASDDRSPEVFRTRIEAATQMESVLGAGGKPNCLVIDEIDGAPVAAINVLLSILNRKGPQEVGPQGPAVPSGGGRRRRAEGGLLMRPIICICNDQFAPSLRQLKQQAFLLHFPPTLPSRLVQRLQEVSLRQGMRADPGVLAALCEKTDNDIRACINTLQFLYSRGQRELSVRDVQATRVGLKDQRRGLFSVWQEVFQLPRAQRRRVGQDPALPADTLLLGDGDAGSLTSASQRFYRVLHAAASAGEHEKVVQGLFDNFLRLRLRDSSLGAVCVALDWLAFDDLLAGAAHHSQSFQLLRYPPFLPVAFHVLFASSHTPRITFPSSQQEAQNRMSQMRNLIQTLVSGIAPATRSRATPQALLLDALCLLLDILAPKLRPVSTQLYSTREKQQLASLVGTMLAYSLTYRQERTPDGQYIYRLEPNVEELCRFPELPARKPLTYQTKQLIAREIEVEKMRRAEASARVENSPQVDGSPPGLEGLLGGIGEKGVHRPAPRNHEQRLEHIMRRAAREEQPEKDFFGRVVVRSTAVPSAGDTAPEQDSVERRMGTAVGRSEVWFRFNEGVSNAVRRSLYIRDLL

SEQ ID NO: 26400 - protein, 456 aa, Homo sapiens
  REGION 1..456: note = ENSP00000399111
MEDYEQELCGVEDDFHNQFAAELEVLAELEAGASTPSPSGVPLFTAGRPPRTFEEALARGDAASSPAPAASVGSSQGGARKRQVDADLQPAGSLPHAPRIKRPRLQVVKRLNFRSEEMEEPPPPDSSPTDITPPPSPEDLAELWGHGVSEAAADVGLTRASPAARNPVLRRPPILEDYVHVTSTEGVRAYLVLRADPMAPGVQGSLLHVPWRGGGQLDLLGVSLASLKKQVDGERRERLLQEAQKLSDTLHSLRSGEEEAAQPLGAPEEEPTDGQDASSHCLWVDEFAPRHYTELLSDDFTNRCLLKWLKLWDLVVFGHERPSRKPRPSVEPARVSKEATAPGKWKSHEQVLEEMLEAGLDPSQRPKQKVALLCGPPGLGKTTLAHVIARHAGYSVVEMNASDDRSPEVFRTRIEAATQMESVLGAGGKPNCLVIDEIDGAPVVGSLMPGPPSTSS

SEQ ID NO: 26401 - protein, 264 aa, Homo sapiens
  REGION 1..264: note = ENSP00000412015
  VARIANT 1: note = Any amino acid
XTPPPSPEDLAELWGHGVSEAAADVGLTRASPAARNPVLRRPPILEDYVHVTSTEGVRAYLVLRADPMAPGVQLTHLDGFIPLAPLSSLPPLTGQLTGGSLLHVPWRGGGQLDLLGVSLASLKKQVDGERRERLLQEAQKLSDTLHSLRSGEEEAAQPLGAPEEEPTDGQDASSHCLWVDEFAPRHYTELLSDDFTNRCLLKWLKLWDLVVFGHERPSRKPRPSVEPARVSKEATAPGKWKSHEQVLEEMLEAGLDPSQRPKQK

SEQ ID NO: 26402 - protein, 81 aa, Homo sapiens
  REGION 1..81: note = ENSP00000454679
  VARIANT 1: note = Any amino acid
XSRSTASGGSGCFRRPRSFQTPCTVSGRGRRRQPSPWGPLRRSRLTVKTPPVTASGWMSLHPATTRSCSVMTSPTAACSSG

SEQ ID NO: 26403 - protein, 1184 aa, Homo sapiens
  REGION 1..1184: note = ENSP00000486314
MHVNASARRWGRGGAAALPGPAASPRRPAPRTGPVGRPTLAPSPSRAHAHAKTNLLPGRAVQAPDAVPGAGSSRAPARWRPRDPGSSAPDAWQRFRPAPLRAQPRPPPRPAPGPPPPRKGGCGGQWRAPQDRTRGLRSRNSPRPPLAQPRLRHANQWRAPPGTPAADWRRPARSGRAVRDGGGGAGGSERELGLADGMEDYEQELCGVEDDFHNQFAAELEVLAELEGASTPSPSGVPLFTAGRPPRTFEEALARGDAASSPAPAASVGSSQGGARKRQVDADLQPAGSLPHAPRIKRPRLQVVKRLNFRSEEMEEPPPPDSSPTDITPPPSPEDLAELWGHGFSEAAADVGLTRASPAARNPVLRRPPILEDYVHVTSTEGVRAYLVLRADPMAPGVQGSLLHVPWRGGGQLDLLGVSLASLKKQVDGERRERLLQEAQKLSDTLHRSGEEEAAQPLGAPEEEPTDGQDASSHCLWVDEFAPRHYTELLSDDFTNRCLLKWLKLWDLVVFGHERPSRKPRPSVEPARVSKEATAPGKWKSHEQVLEEMLEAGLDPSQRPKQKVALLCGPPGLGKTTLAHVIARHAGYSVVEMNASDDRSPEVFRTRIEAATQMESVLGAGGKPNCLVIDEIDGAPVAAINVLLSILNRKGPQEVGPQGPAVPSGGGRRRRAEGGLLMRPIICICNDQFAPSLRQLKQQAFLLHFPPTLPSRLVQRLQEGMRADPGVLAALCEKTDNDIRACINTLQFLYSRGQRELSVRDVQATRVGLKDQRRGLFSVWQEVFQLPRAQRSSQHVSVLTCHGTPGDAGLVVLQDMGDAGLGLWDVLLLAWTRRGTFPGRFYRVLHAAASAGEHEKVVQGLFDNFLRLRLRDSSLGAVCVALDWLAFDDLLAGAAHHSQSFQLLRYPPFLPVAFHVLFASSHTPRITFPSSQQEAQNRMSQMRNLIQTLVSGIAPATRSRATPQALLLDALCLLLDILAPKLRPVSTQLYSTREKQQLASLVGTMLAYSLTYRQERTPDGQYIYRLEPNVEELCRFPELPARKPLTYQTKQLIAREIEVEKMRRAEASARVENSPQVDGSPPGLEGLLGGIGEKGVHRPAPRNHEQRLEHIMRRAAREEQPEKDFFGRVVVRSTAVPSAGDTAPEQDSVERRMGTAVGRSEVWFRFNEGVSNAVRRSLYIRDLL

SEQ ID NO: 26404 - protein, 975 aa, Homo sapiens
  REGION 1..975: note = ENSP00000313029
MEDYEQELCGVEDDFHNQFAAELEVLAELEGASTPSPSGVPLFTAGRPPRTFEEALARGDAASSPAPAASVGSSQGGARKRQVDADLQPAGSLPHAPRIKRPRLQVVKRLNFRSEEMEEPPPPDSSPTDITPPPSPEDLAELWGHGFSEAAADVGLTRASPAARNPVLRRPPILEDYVHVTSTEGVRAYLVLRADPMAPGVQGSLLHVPWRGGGQLDLLGVSLASLKKQVDGERRERLLQEAQKLSDTLHSLRSGEEEAAQPLGAPEEEPTDGQDASSHCLWVDEFAPRHYTELLSDDFTNRCLLKWLKLWDLVVFGHERPSRKPRPSVEPARVSKEATAPGKWKSHEQVLEEMLEAGLDPSQRPKQKVALLCGPPGLGKTTLAHVIARHAGYSVVEMNASDDRSPEVFRTRIEAATQMESVLGAGGKPNCLVIDEIDGAPVAAINVLLSILNRKGPQEVGPQGPAVPSGGGRRRRAEGGLLMRPIICICNDQFAPSLRQLKQQAFLLHFPPTLPSRLVQRLQEVSLRQGMRADPGVLAALCEKTDNDIRACINTLQFLYSRGQRELSVRDVQATRVGLKDQRRGLFSVWQEVFQLPRAQRRRVGQDPALPADTLLLGDGDAGSLTSASQRFYRVLHAAASAGEHEKVVQGLFDNFLRLRLRDSSLGAVCVALDWLAFDDLLAGAAHHSQSFQLLRYPPFLPVAFHVLFASSHTPRITFPSSQQEAQNRMSQMRNLIQTLVSGIAPATRSRATPQALLLDALCLLLDILAPKLRPVSTQLYSTREKQQLASLVGTMLAYSLTYRQERTPDGQYIYRLEPNVEELCRFPELPARKPLTYQTKQLIAREIEVEKMRRAEASARVENSPQVDGSPPGLEGLLGGIGEKGVHRPAPRNHEQRLEHIMRRAAREEQPEKDFFGRVVVRSTAVPSAGDTAPEQDSVERRMGTAVGRSEVWFRFNEGVSNAVRRSLYIRDLL

SEQ ID NO: 26405 - protein, 399 aa, Homo sapiens
  REGION 1..399: note = ENSP00000355319
MERKNPSRESPRRLSAKVGKGTEMKKVARQLGMAAAESDKDSGFSDGSSECLSSAEQMESEDMLSALGWSREDRPRQNSKTAKNAFPTLSPMVVMKNVLVKQGSSSSQLQSWTVQPSFEVISAQPQLLFLHPPVPSPVSPCHTGEKKSDSRNYLPILNSYTKIAPHPGKRGLSLGPEEKGTSGVQKKICTERLGPSLSSSEPTKAGAVPSSPSTPAPPSAKLAEDSALQGVPSLVAGGSPQTLQPVSSSHVAKAPSLTFASPASPVCASDSTLHGLESNSPLSPLSANYSSPLWAAEHLCRSPDIFSEQRQSKHRRFQNTLVVLHKSGLLEITLKTKELIRQNQATQVELDQLKEQTQLFIEATKSRAPQAWAKLQASLTPGSSNTGSDLEAFSDHPAI

SEQ ID NO: 26406 - protein, 61 aa, Homo sapiens
  REGION 1..61: note = ENSP00000451997
MERKNPSRESPRRLSAKVGKGTEMKKVARQLGMAAAESDKDSGFSGQQLIPAPVVDCPALL

SEQ ID NO: 26407 - protein, 103 aa, Homo sapiens
  REGION 1..103: note = ENSP00000450972
MERKNPSRESPRRLSAKVGKGTEMKKVARQLGMAAAESDKDSGFSDGSSECLSSAEQMESEDMLSALGWSREDRPRQNSKTAKNAFPTLSPMVVMKNVLVKQQ

SEQ ID NO: 26408 - protein, 134 aa, Homo sapiens
  REGION 1..134: note = ENSP00000451522
MERKNPSRESPRRLSAKVGKGTEMKKVARQLGMAAAESDKDSGFSDGSSECLSSAEQMESEDMLSALGWSREDRPRQNSKTAKNAFPTLSPMVVMKNVLVKQGSSSSQLQSWTVQPSFEVISAQPQLLFLHPPV

SEQ ID NO: 26409 - protein, 156 aa, Homo sapiens
  REGION 1..156: note = ENSP00000452589
MERKNPSRESPRRLSAKVGKGTEMKKVARQLGMAAAESDKDSGFSDGSSECLSSAEQMESEDMLSALGWSREDRPRQNSKTAKNAFPTLSPMVVMKNVLVKQGSSSSQLQSWTVQPSFEVISAQPQLLFLHPPVPSPVSPCHTGEKKSDSRNYLPI

SEQ ID NO: 26410 - protein, 151 aa, Homo sapiens
  REGION 1..151: note = ENSP00000452380
MERKNPSRESPRRLSAKVGKGTEMKKVARQLGMAAAESDKDSGFSDGSSECLSSAEQMESEDMLSALGWSREDRPRQNSKTAKNAFPTLSPMVVMKNVLVKQGSSSSQLQSWTVQPSFEVISAQPQLLFLHPPVPSPVSPCHTGEKKSDSR

SEQ ID NO: 26411 - protein, 141 aa, Homo sapiens
  REGION 1..141: note = ENSP00000451493
MERKNPSRESPRRLSAKVGKGTEMKKVARQLGMAAAESDKDSGFSDGSSECLSSAEQMESEDMLSALGWSREDRPRQNSKTAKNAFPTLSPMVVMKNVLVKQGSSSSQLQSWTVQPSFEVISAQPQLLFLHPPVPSPVSPC

SEQ ID NO: 26412 - protein, 2069 aa, Homo sapiens
  REGION 1..2069: note = ENSP00000376306
MLKFKYGARNPLDAGAAEPIASRASRLNLFFQGKPPFMTQQQMSPLSREGILDALFVLFEECSQPALMKIKHVSNFVRKYSDTIAELQELQPSAKDFEVRSLVGCGHFAEVQVVREKATGDIYAMKVMKKKALLAQEQVSFFEEERNILSRSTSPWIPQLQYAFQDKNHLYLVMEYQPGGDLLSLLNRYEDQLDENLIQFYLAELILAVHSVHLMGYVHRDIKPENILVDRTGHIKLVDFGSAAKMNSNKMVNAKLPIGTPDYMAPEVLTVMNGDGKGTYGLDCDWWSVGVIAYEMIYGRSPFAEGTSARTFNNIMNFQRFLKFPDDPKVSSDFLDLIQSLLCGQKERLKFEGLCCHPFFSKIDWNNIRNSPPPFVPTLKSDDDTSNFDEPEKNSWVSSSPCQLSPSGFSGEELPFVGFSYSKALGILGRSESVVSGLDSPAKTSSMEKKLLIKSKELQDSQDKCHKMEQEMTRLHRRVSEVEAVLSQKEVELKASETQRSLLEQDLATYITECSSLKRSLEQARMEVSQEDDKALQLLHDIREQSRKLQEIKEQEYQAQVEEMRLMMNQLEEDLVSARRRSDLYESELRESRLAAEEFKRKATECQHKLLKAKDQGKPEVGEYAKLEKINAEQQLKIQELQEKLEKAVKASTEATELLQNIRQAKERAERELEKLQNREDSSEGIRKKLVEAEERRHSLENKVKRLETMERRENRLKDDIQTKSQQIQQMADKILELEEKHREAQVSAQHLEVHLKQKEQHYEEKIKVLDNQIKKDLADKETLENMMQRHEEEAHEKGKILSEQKAMINAMDSKIRSLEQRIVELSEANKLAANSSLFTQRNMKAQEEMISELRQQKFYLETQAGKLEAQNRKLEEQLEKISHQDHSDKNRLLELETRLREVSLEHEEQKLELKRQLTELQLSLQERESQLTALQAARAALESQLRQAKTELEETTAEAEEEIQALTAHRDEIQRKFDALRNSCTVITDLEEQLNQLTEDNAELNNQNFYLSKQLDEASGANDEIVQLRSEVDHLRREITEREMQLTSQKQTMEALKTTCTMLEEQVMDLEALNDELLEKERQWEAWRSVLGDEKSQFECRVRELQRMLDTEKQSRARADQRITESRQVVELAVKEHKAEILALQQALKEQKLKAESLSDKLNDLEKKHAMLEMNARSLQQKLETERELKQRLLEEQAKLQQQMDLQKNHIFRLTQGLQEALDRADLLKTERSDLEYQLENIQVLYSHEKVKMEGTISQQTKLIDFLQAKMDQPAKKKKGLFSRRKEDPALPTQVPLQYNELKLALEKEKARCAELEEALQKTRIELRSAREEAAHRKATDHPHPSTPATARQQIAMSAIVRSPEHQPSAMSLLAPPSSRRKESSTPEEFSRRLKERMHHNIPHRFNVGLNMRATKCAVCLDTVHFGRQASKCLECQVMCHPKCSTCLPATCGLPAEYATHFTEAFCRDKMNSPGLQTKEPSSSLHLEGWMKVPRNNKRGQQGWDRKYIVLEGSKVLIYDNEAREAGQRPVEEFELCLPDGDVSIHGAVGASELANTAKADVPYILKMESHPHTTCWPGRTLYLLAPSFPDKQRWVTALESVVAGGRVSREKAEADAKLLGNSLLKLEGDDRLDMNCTLPFSDQVVLVGTEEGLYALNVLKNSLTHVPGIGAVFQIYIIKDLEKLLMIAGEERALCLVDVKKVKQSLAQSHLPAQPDISPNIFEAVKGCHLFGAGKIENGLCICAAMPSKVVILRYNENLSKYCIRKEIETSEPCSCIHFTNYSILIGTNKFYEIDMKQYTLEEFLDKNDHSLAPAVFAASSNSFPVSIVQVNSAGQREEYLLCFHEFGVFVDSYGRRSRTDDLKWSRLPLAFAYREPYLFVTHFNSLEVIEIQARSSAGTPARAYLDIPNPRYLGPAISSGAIYLASSYQDKLRVICCKGNLVKESGTEHHRGPSTSRSSPNKRGPPTYNEHITKRVASSPAPPEGPSHPREPSTPHRYREGRTELRRDKSPGRPLEREKSPGRMLSTRRERSPGRLFEDSSRGRLPAGAVRTPLSQVNKVWDQSSV

SEQ ID NO: 26413 - protein, 2027 aa, Homo sapiens
  REGION 1..2027: note = ENSP00000261833
MLKFKYGARNPLDAGAAEPIASRASRLNLFFQGKPPFMTQQQMSPLSREGILDALFVLFEECSQPALMKIKHVSNFVRKYSDTIAELQELQPSAKDFEVRSLVGCGHFAEVQVVREKATGDIYAMKVMKKKALLAQEQVSFFEEERNILSRSTSPWIPQLQYAFQDKNHLYLVMEYQPGGDLLSLLNRYEDQLDENLIQFYLAELILAVHSVHLMGYVHRDIKPENILVDRTGHIKLVDFGSAAKMNSNKMVNAKLPIGTPDYMAPEVLTVMNGDGKGTYGLDCDWWSVGVIAYEMIYGRSPFAEGTSARTFNNIMNFQRFLKFPDDPKVSSDFLDLIQSLLCGQKERLKFEGLCCHPFFSKIDWNNIRNSPPPFVPTLKSDDDTSNFDEPEKNSWVSSSPCQLSPSGFSGEELPFVGFSYSKALGILGRSESVVSGLDSPAKTSSMEKKLLIKSKELQDSQDKCHKMEQEMTRLHRRVSEVEAVLSQKEVELKASETQRSLLEQDLATYITECSSLKRSLEQARMEVSQEDDKALQLLHDIREQSRKLQEIKEQEYQAQVEEMRLMMNQLEEDLVSARRRSDLYESELRESRLAAEEFKRKATECQHKLLKAKDQGKPEVGEYAKLEKINAEQQLKIQELQEKLEKAVKASTEATELLQNIRQAKERAERELEKLQNREDSSEGIRKKLVEAEELEEKHREAQVSAQHLEVHLKQKEQHYEEKIKVLDNQIKKDLADKETLENMMQRHEEEAHEKGKILSEQKAMINAMDSKIRSLEQRIVELSEANKLAANSSLFTQRNMKAQEEMISELRQQKFYLETQAGKLEAQNRKLEEQLEKISHQDHSDKNRLLELETRLREVSLEHEEQKLELKRQLTELQLSLQERESQLTALQAARAALESQLRQAKTELEETTAEAEEEIQALTAHRDEIQRKFDALRNSCTVITDLEEQLNQLTEDNAELNNQNFYLSKQLDEASGANDEIVQLRSEVDHLRREITEREMQLTSQKQTMEALKTTCTMLEEQVMDLEALNDELLEKERQWEAWRSVLGDEKSQFECRVRELQRMLDTEKQSRARADQRITESRQVVELAVKEHKAEILALQQALKEQKLKAESLSDKLNDLEKKHAMLEMNARSLQQKLETERELKQRLLEEQAKLQQQMDLQKNHIFRLTQGLQEALDRADLLKTERSDLEYQLENIQVLYSHEKVKMEGTISQQTKLIDFLQAKMDQPAKKKKGLFSRRKEDPALPTQVPLQYNELKLALEKEKARCAELEEALQKTRIELRSAREEAAHRKATDHPHPSTPATARQQIAMSAIVRSPEHQPSAMSLLAPPSSRRKESSTPEEFSRRLKERMHHNIPHRFNVGLNMRATKCAVCLDTVHFGRQASKCLECQVMCHPKCSTCLPATCGLPAEYATHFTEAFCRDKMNSPGLQTKEPSSSLHLEGWMKVPRNNKRGQQGWDRKYIVLEGSKVLIYDNEAREAGQRPVEEFELCLPDGDVSIHGAVGASELANTAKADVPYILKMESHPHTTCWPGRTLYLLAPSFPDKQRWVTALESVVAGGRVSREKAEADAKLLGNSLLKLEGDDRLDMNCTLPFSDQVVLVGTEEGLYALNVLKNSLTHVPGIGAVFQIYIIKDLEKLLMIAGEERALCLVDVKKVKQSLAQSHLPAQPDISPNIFEAVKGCHLFGAGKIENGLCICAAMPSKVVILRYNENLSKYCIRKEIETSEPCSCIHFTNYSILIGTNKFYEIDMKQYTLEEFLDKNDHSLAPAVFAASSNSFPVSIVQVNSAGQREEYLLCFHEFGVFVDSYGRRSRTDDLKWSRLPLAFAYREPYLFVTHFNSLEVIEIQARSSAGTPARAYLDIPNPRYLGPAISSGAIYLASSYQDKLRVICCKGNLVKESGTEHHRGPSTSRSSPNKRGPPTYNEHITKRVASSPAPPEGPSHPREPSTPHRYREGRTELRRDKSPGRPLEREKSPGRMLSTRRERSPGRLFEDSSRGRLPAGAVRTPLSQVNKVWDQSSV

SEQ ID NO: 26414 - protein, 1640 aa, Homo sapiens
  REGION 1..1640: note = ENSP00000376305
  VARIANT 1: note = Any amino acid
XPFVPTLKSDDDTSNFDEPEKNSWVSSSPCQLSPSGFSGEELPFVGFSYSKALGILGRSESVVSGLDSPAKTSSMEKKLLIKSKELQDSQDKCHKMEQEMTRLHRRVSEVEAVLSQKEVELKASETQRSLLEQDLATYITECSSLKRSLEQARMEVSQEDDKALQLLHDIREQSRKLQEIKEQEYQAQVEEMRLMMNQLEEDLVSARRRSDLYESELRESRLAAEEFKRKATECQHKLLKAKDQGKPEVGEYAKLEKINAEQQLKIQELQEKLEKAVKASTEATELLQNIRQAKERAERELEKLQNREDSSEGIRKKLVEAEELEEKHREAQVSAQHLEVHLKQKEQHYEEKIKVLDNQIKKDLADKETLENMMQRHEEEAHEKGKILSEQKAMINAMDSKIRSLEQRIVELSEANKLAANSSLFTQRNMKAQEEMISELRQQKFYLETQAGKLEAQNRKLEEQLEKISHQDHSDKNRLLELETRLREVSLEHEEQKLELKRQLTELQLSLQERESQLTALQAARAALESQLRQAKTELEETTAEAEEEIQALTAHRDEIQRKFDALRNSCTVITDLEEQLNQLTEDNAELNNQNFYLSKQLDEASGANDEIVQLRSEVDHLRREITEREMQLTSQKQTMEALKTTCTMLEEQVMDLEALNDELLEKERQWEAWRSVLGDEKSQFECRVRELQRMLDTEKQSRARADQRITESRQVVELAVKEHKAEILALQQALKEQKLKAESLSDKLNDLEKKHAMLEMNARSLQQKLETERELKQRLLEEQAKLQQQMDLQKNHIFRLTQGLQEALDRADLLKTERSDLEYQLENIQVLYSHEKVKMEGTISQQTKLIDFLQAKMDQPAKKKKVPLQYNELKLALEKEKARCAELEEALQKTRIELRSAREEAAHRKATDHPHPSTPATARQQIAMSAIVRSPEHQPSAMSLLAPPSSRRKESSTPEEFSRRLKERMHHNIPHRFNVGLNMRATKCAVCLDTVHFGRQASKCLECQVMCHPKCSTCLPATCGLPAEYATHFTEAFCRDKMNSPGLQTKEPSSSLHLEGWMKVPRNNKRGQQGWDRKYIVLEGSKVLIYDNEAREAGQRPVEEFELCLPDGDVSIHGAVGASELANTAKADVPYILKMESHPHTTCWPGRTLYLLAPSFPDKQRWVTALESVVAGGRVSREKAEADAKLLGNSLLKLEGDDRLDMNCTLPFSDQVVLVGTEEGLYALNVLKNSLTHVPGIGAVFQIYIIKDLEKLLMIAGEERALCLVDVKKVKQSLAQSHLPAQPDISPNIFEAVKGCHLFGAGKIENGLCICAAMPSKVVILRYNENLSKYCIRKEIETSEPCSCIHFTNYSILIGTNKFYEIDMKQYTLEEFLDKNDHSLAPAVFAASSNSFPVSIVQVNSAGQREEYLLCFHEFGVFVDSYGRRSRTDDLKWSRLPLAFAYREPYLFVTHFNSLEVIEIQARSSAGTPARAYLDIPNPRYLGPAISSGAIYLASSYQDKLRVICCKGNLVKESGTEHHRGPSTSRSSPNKRGPPTYNEHITKRVASSPAPPEGPSHPREPSTPHRYREGRTELRRDKSPGRPLEREKSPGRMLSTRRERSPGRLFEDSSRGRLPAGAVRTPLSQVNKVWDQSSV

SEQ ID NO: 26415 - protein, 109 aa, Homo sapiens
  REGION 1..109: note = ENSP00000443199
IAELQELQPSAKDFEVRSLVGCGHFAEVQVVREKATGDIYAMKVMKKKALLAQEQVSFFEEERNILSRSTSPWIPQLQYAFQDKNHLYLVLYSHEKVKMEGTISQQTKL

SEQ ID NO: 26416 - protein, 162 aa, Homo sapiens
  REGION 1..162: note = ENSP00000446105
MRLLAPTTRLYNCEVKWTISAGRSRNERCSLPARSKKSLFKDKAQISATDLQTMEALKTTCTMLEEQVMDLEALNDELLEKERQWEAWRSVLGDEKSQFECRVRELQRMLDTEKQSRARADQRITESRQVVELAVKEHKAEILALQQALKEQKLKAESLSDK

SEQ ID NO: 26417 - protein, 482 aa, Homo sapiens
  REGION 1..482: note = ENSP00000482318
MLKFKYGARNPLDAGAAEPIASRASRLNLFFQGKPPFMTQQQMSPLSREGILDALFVLFEECSQPALMKIKHVSNFVRKYSDTIAELQELQPSAKDFEVRSLVGCGHFAEVQVVREKATGDIYAMKVMKKKALLAQEQVSFFEEERNILSRSTSPWIPQLQYAFQDKNHLYLVMEYQPGGDLLSLLNRYEDQLDENLIQFYLAELILAVHSVHLMGYVHRDIKPENILVDRTGHIKLVDFGSAAKMNSNKMVNAKLPIGTPDYMAPEVLTVMNGDGKGTYGLDCDWWSVGVIAYEMIYGRSPFAEGTSARTFNNIMNFQRFLKFPDDPKVSSDFLDLIQSLLCGQKERLKFEGLCCHPFFSKIDWNNIRNSPPPFVPTLKSDDDTSNFDEPEKNSWVSSSPCQLSPSGFSGEELPFVGFSYSKALGILGRSESVVSGLDSPAKTSSMEKKLLIKSKELQDSQDKCHKMEQEMTRLHRRVSGG

SEQ ID NO: 26418 - protein, 241 aa, Homo sapiens
  REGION 1..241: note = ENSP00000413999
MAGPFSRLLSARPGLRLLALAGAGSLAAGFLLRPEPVRAASERRRLYPPSAEYPDLRKHNNCMASHLTPAVYARLCDKTTPTGWTLDQCIQTGVDNPGHPFIKTVGMVAGDEETYEVFADLFDPVIQERHNGYDPRTMKHTTDLDASKIRSGYFDERYVLSSRVRTGRSIRGLSLPPACTRAERREVERVVVDALSGLKGDLAGRYYRLSEMTEAEQQQLIDDHFLFDKPVSPLLTAAGMA

SEQ ID NO: 26419 - protein, 129 aa, Homo sapiens
  REGION 1..129: note = ENSP00000391990
MAGPFSRLLSARPGLRLLALAGAGSLAAGFLLRPEPVRAASERRRLYPPSAEYPDLRKHNNCMASHLTPAVYARLCDKTTPTGWTLDQCIQTGVDNPGHPFIKTVGMVAGDEETYEVFADLFDPVIQER

SEQ ID NO: 26420 - protein, 96 aa, Homo sapiens
  REGION 1..96: note = ENSP00000416467
MAGPFSRLLSARPGLRLLALAGAGSLAAGFLLRPEPVRAASERRRLYPPSQTWPTGQLPGNCTRSRRLCPPSMVTGYPLPSAEYPDLRKHNNCMAS

SEQ ID NO: 26421 - protein, 103 aa, Homo sapiens
  REGION 1..103: note = ENSP00000396707
MAGPFSRLLSARPGLRLLALAGAGSLAAGFLLRPEPVRAASERRRLYPPSAEYPDLRKHNNCMASHLTPAVYARLCDKTTPTGWTLDQCIQTGVDNPGHPFIK

SEQ ID NO: 26422 - protein, 417 aa, Homo sapiens
  REGION 1..417: note = ENSP00000413255
MAGPFSRLLSARPGLRLLALAGAGSLAAGFLLRPEPVRAASERRRLYPPSAEYPDLRKHNNCMASHLTPAVYARLCDKTTPTGWTLDQCIQTGVDNPGHPFIKTVGMVAGDEETYEVFADLFDPVIQERHNGYDPRTMKHTTDLDASKIRSGYFDERYVLSSRVRTGRSIRGLSLPPACTRAERREVERVVVDALSGLKGDLAGRYYRLSEMTEAEQQQLIDDHFLFDKPVSPLLTAAGMARDWPDARGIWHNNEKSFLIWVNEEDHTRVISMEKGGNMKRVFERFCRGLKEVERLIQERGWEFMWNERLGYILTCPSNLGTGLRAGVHIKLPLLSKDSRFPKILENLRLQKRGTGGVDTAATGGVFDISNLDRLGKSEVELVQLVIDGVNYLIDCERRLERGQDIRIPTPVIHTKH

SEQ ID NO: 26423 - protein, 203 aa, Homo sapiens
  REGION 1..203: note = ENSP00000411531
MAGPFSRLLSARPGLRLLALAGAGSLAAGFLLRPEPVRAASERRRLYPPSQTWPTGQLPGNCTRSRRLCPPSMVTGYPLPSAEYPDLRKHNNCMASHLTPAVYARLCDKTTPTGWTLDQCIQTGVDNPGHPFIKTVGMVAGDEETYEVFADLFDPVIQERHNGYDPRTMKHTTDLDASKIRSGYFDERYVLSSRVRTGRSIRG

SEQ ID NO: 26424 - protein, 298 aa, Homo sapiens
  REGION 1..298: note = ENSP00000416717
MAGPFSRLLSARPGLRLLALAGAGSLAAGFLLRPEPVRAASERRRLYPPSAEYPDLRKHNNCMASHLTPAVYARLCDKTTPTGWTLDQCIQTGVDNPGHPFIKTVGMVAGDEETYEVFADLFDPVIQERHNGYDPRTMKHTTDLDASKIRSGYFDERYVLSSRVRTGRSIRGLSLPPACTRAERREVERVVVDALSGLKGDLAGRYYRLSEMTEAEQQQLIDDHFLFDKPVSPLLTAAGMARDWPDARGIWHNNEKSFLIWVNEEDHTRVISMEKGGNMKRVFERFCRGLKEVVVGIK

SEQ ID NO: 26425 - protein, 58 aa, Homo sapiens
  REGION 1..58: note = ENSP00000399467
MAGPFSRLLSARPGLRLLALAGAGSLAAGFLLRPEPVRAASERRRLYPPRYLLTCLTL

SEQ ID NO: 26426 - protein, 417 aa, Homo sapiens; identical to SEQ ID NO: 26422
  REGION 1..417: note = ENSP00000300283

SEQ ID NO: 26427 - protein, 298 aa, Homo sapiens; identical to SEQ ID NO: 26424
  REGION 1..298: note = ENSP00000486477

SEQ ID NO: 26428 - protein, 674 aa, Homo sapiens
  REGION 1..674: note = ENSP00000221455
MWHEARKHERKLRGMMVDYKKRAERRREYYEKIKKDPAQFLQVHGRACKVHLDSAVALAAESPVNMMPWQGDTNNMIDRFDVRAHLDHIPDYTPPLLTTISPEQESDERKCNYERYRGLVQNDFAGISEEQCLYQIYIDELYGGLQRPSEDEKKKLAEKKASIGYTYEDSTVAEVEKAAEKPEEEESAAEEESNSDEDEVIPDIDVEVDVDELNQEQVADLNKQATTYGMADGDFVRMLRKDKEEAEAIKHAKALEEEKAMYSGRRSRRQRREFREKRLRGRKISPPSYARRDSPTYDPYKRSPSESSSESRSRSRSPTPGREEKITFITSFGGSDEEAAAAAAAAAASGVTTGKPPAPPQPGGPAPGRNASARRRSSSSSSSSSASRTSSSRSSSRSSSRSRRGGGYYRSGRHARSRSRSWSRSRSRSRRYSRSRSRGRRHSGGGSRDGHRYSRSPARRGGYGPRRRSRSRSHSGDRYRRGGRGLRHHSSSRSRSSWSLSPSRSRSLTRSRSHSPSPSQSRSRSRSRSQSPSPSPAREKLTRPAASPAVGEKLKKTEPAAGKETGAAKPKLTPQEKLKLRMQKALNRQFKADKKAAQEKMIQQEHERQEREDELRAMARKIRMKERERREKEREEWERQYSRQSRSPSPRYSREYSSSRRRSRSRSRSPHYRH

SEQ ID NO: 26429 - protein, 612 aa, Homo sapiens
  REGION 1..612: note = ENSP00000375815
MWHEARKHERKLRGMMVDYKKRAERRREYYEKIKKDPAQFLQESDERKCNYERYRGLVQNDFAGISEEQCLYQIYIDELYGGLQRPSEDEKKKLAEKKASIGYTYEDSTVAEVEKAAEKPEEEESAAEEESNSDEDEVIPDIDVEVDVDELNQEQVADLNKQATTYGMADGDFVRMLRKDKEEAEAIKHAKALEEEKAMYSGRRSRRQRREFREKRLRGRKISPPSYARRDSPTYDPYKRSPSESSSESRSRSRSPTPGREEKITFITSFGGSDEEAAAAAAAAAASGVTTGKPPAPPQPGGPAPGRNASARRRSSSSSSSSSASRTSSSRSSSRSSSRSRRGGGYYRSGRHARSRSRSWSRSRSRSRRYSRSRSRGRRHSGGGSRDGHRYSRSPARRGGYGPRRRSRSRSHSGDRYRRGGRGLRHHSSSRSRSSWSLSPSRSRSLTRSRSHSPSPSQSRSRSRSRSQSPSPSPAREKLTRPAASPAVGEKLKKTEPAAGKETGAAKPKLTPQEKLKLRMQKALNRQFKADKKAAQEKMIQQEHERQEREDELRAMARKIRMKERERREKEREEWERQYSRQSRSPSPRYSREYSSSRRRSRSRSRSPHYRH

SEQ ID NO: 26430 - protein, 81 aa, Homo sapiens
  REGION 1..81: note = ENSP00000465750
MWHEARKHERKLRGMMVDYKKRAERRREYYEKISQRSSACTRSTLMSCTEASRDPAKMRRRSWQRRRLPSVIPTRTARWPR

SEQ ID NO: 26431 - protein, 594 aa, Homo sapiens
  REGION 1..594: note = ENSP00000375814
MWHEARKHERKLRGMMVDYKKRAERRREYYEKIKKDPAQFLQVHGRACKVHLDSAVALAAESPVNMMPWQGDTNNMIDRFDVRAHLDHIPDYTPPLLTTISPEQESDERKCNYERYRGLVQNDFAGISEEQCLYQIYIDELYGGLQRPSEDEKKKLAEKKASIGYTYEDSTVAEVEKAAEKPEEEESAAEEESNSDEDEVIPDIDVEVDVDELNQEQVADLNKQATTYGMADGDFVRMLRKDKEEAEAIKHAKALEEEKAMYSGRRSRRQRREFREKRLRGRKISPPSYARRDSPTYDPYKRSPSESSSESRSRSRSPTPGREEKITFITSFGGSDEEAAAAAAAAAASGVTTGKPPAPPQPGGPAPGRNASARRRSSSSSSSSSASRTSSSRSSSRSSSRSRRGGGYYRSGRHARSRSRSWSRSRSRSRRYSRSRSRGRRHSGGGSRDGHRYSRSPARRGGYGPRRRSRSRSHSGDRYRRGGRGLRHHSSSRSRSSWSLSPSRSRSLTRSRSHSPSPSQSRSRSRSRSQSPSPSPAREKLTRPAASPAVGEKLKKTEPAAGKETGAAKVTQADASGEAETEDAEGAEQAVQGG

SEQ ID NO: 26432 - protein, 86 aa, Homo sapiens
  REGION 1..86: note = ENSP00000465562
MWHEARKHERKLRGMMVDYKKRAERRREYYEKIKKDPAQFLQVHGRACKVHLDSAVALAAESPVNMMPWQGDTNNMIDRFDVRAHL

SEQ ID NO: 26433 - protein, 655 aa, Homo sapiens
  REGION 1..655: note = ENSP00000438702
MWHEARKHERKLRGMMVDYKKRAERRREYYEKIKKDPAQFLQVHGRACKVHLDSAVALAAESPVNMMPWQGDTNNMIDRFDVRAHLDHIPDYTPPLLTTISPEQESDERKCNYERYRGLVQNDFAGISEEQCLYQIYIDELYGGLQRPSEDEKKKLAEKKASIGYTYEDSTVAEVEKAAEKPEEEESAAEEESNSDEDEVIPDIDVEVDVDELNQEQVADLNKQATTYGMADGDFVRMLRKDKEEAEAIKHAKALEEEKAMYSGRRSRRQRREFREKRLRGRKISPPSYARRDSPTYDPYKRSPSESSSESRSRSRSPTPGREEKITFITSFGGSDEEAAAAAAAAAASGVTTGKPPAPPQPGGPAPGRNASARRRSSSSSSSSSASRTSSSRSSSRSSSRSRRGGGYYRSGRHARSRSRSWSRSRSRSRRYSRSRSRGRRHSGGGSRDGHRYSRSPARRGGYGPRRRSRSRSHSGDRYRRGGRGLRHHSSSRSRSSWSLSPSRSRSLTRSRSHSPSPSQSRSRSRSRSQSPSPSPAREKLTRPAASPAVGEKLKKTEPAAGKETGAAKVIKADKKAAQEKMIQQEHERQEREDELRAMARKIRMKERERREKEREEWERQYSRQSRSPSPRYSREYSSSRRRSRSRSRSPHYRH

SEQ ID NO: 26434 - protein, 188 aa, Homo sapiens
  REGION 1..188: note = ENSP00000466371
KKRAERRREYYEKIKKDPAQFLQVHGRACKVHLDSAVALAAESPVNMMPWQGDTNNMIDRFDVRAHLDHIPDYTPPLLTTISPEQESDERKCNYERYRGLVQNDFAGISEEQCLYQIYIDELYGGLQRPSEDEKKKLAEKKASIGYTYEDSTVAEVEKAAEKPEEEESAAEEESNSDEDETWRWTWMN

SEQ ID NO: 26435 - protein, 131 aa, Homo sapiens
  REGION 1..131: note = ENSP00000467177
PKLTPQEKLKLRMQKALNRQFKADKKAAQEKMIQQEHERQEREDELRAMARKIRMKVLEAPALPEFSVSSVPGQMLMPCLRRERERREKEREEWERQYSRQSRSPSPRYSREYSSSRRRSRSRSRSPHYRH

SEQ ID NO: 26436 - protein, 988 aa, Homo sapiens
  REGION 1..988: note = ENSP00000339867
MEQSRSQQRGGEQSWWGSDPQYQYMPFEHCTSYGLPSENGGLQHRLRKDAGPRHNVHPTQIYGHHKEQFSDREQDIGMPKKTGSSSTVDSKDEDHYSKCQDCIHRLGQVVRRKLGEDGIFLVLLGLLMALVSWSMDYVSAKSLQAYKWSYAQMQPSLPLQFLVWVTFPLVLILFSALFCHLISPQAVGSGIPEMKTILRGVVLKEYLTMKAFVAKVVALTAGLGSGIPVGKEGPFVHIASICAAVLSKFMSVFCGVYEQPYYYSDILTVGCAVGVGCCFGTPLGGVLFSIEVTSTYFAVRNYWRGFFAATFSAFVFRVLAVWNKDAVTITALFRTNFRMDFPFDLKELPAFAAIGICCGLLGAVFVYLHRQVMLGVRKHKALSQFLAKHRLLYPGIVTFVIASFTFPPGMGQFMAGELMPREAISTLFDNNTWVKHAGDPESLGQSAVWIHPRVNVVIIIFLFFVMKFWMSIVATTMPIPCGGFMPVFVLGAAFGRLVGEIMAMLFPDGILFDDIIYKILPGGYAVIGAAALTGAVSHTVSTAVICFELTGQIAHILPMMVAVILANMVAQSLQPSLYDSIIQVKKLPYLPDLGWNQLSKYTIFVEDIMVRDVKFVSASYTYGELRTLLQTTTVKTLPLVDSKDSMILLGSVERSELQALLQRHLCPERRLRAAQEMARKLSELPYDGKARLAGEGLPGAPPGRPESFAFVDEDEDEDLSGKSELPPSLALHPSTTAPLSPEEPNGPLPGHKQQPEAPEPAGQRPSIFQSLLHCLLGRARPTKKKTTQDSTDLVDNMSPEEIEAWEQEQLSQPVCFDSCCIDQSPFQLVEQTTLHKTHTLFSLLGLHLAYVTSMGKLRGVLALEELQKAIEGHTKSGVQLRPPLASFRNTTSTRKSTGAPPSSAENWNLPEDRPGATGTGDVIAASPETPVPSPSPEPPLSLAPGKVEGELEELELVESPGLEEELADILQGPSLRSTDEEDEDELIL

SEQ ID NO: 26437 - protein, 76 aa, Homo sapiens
  REGION 1..76: note = ENSP00000395949
  VARIANT 1: note = Any amino acid
XISPQAVGSGIPEMKTILRGVVLKEYLTMKAFVAKVVALTAGLGSGIPVGKEPVPVLQMSTPLSPVAPHGDRAWAA

SEQ ID NO: 26438 - protein, 102 aa, Homo sapiens
  REGION 1..102: note = ENSP00000400027
  VARIANT 1: note = Any amino acid
XISPQAVGSGIPEMKTILRGVVLKEYLTMKAFVAKVVALTAGLGSGIPVGKEGPFVHIASICAAVLSKFMSVFCGVYEPVPVLQMSTPLSPVAPHGDRAWAA

SEQ ID NO: 26439 - protein, 173 aa, Homo sapiens
  REGION 1..173: note = ENSP00000425160
MESEQLFHRGYYRNSYNSITSASSDEELLDGAGVIMDFQTSEDDNLLDGDTAVGTHYTMTNGGSINSSTHLLDLLDEPIPGVGTYDDFHTIDWVREKCKDRERHRRINSKKKESAWEMTKSLYDAWSGWLVVTLTGLASGALAGLIDIAADWMTDLKEGICLSALWYNHEQCC

SEQ ID NO: 26440 - protein, 818 aa, Homo sapiens
  REGION 1..818: note = ENSP00000424603
MESEQLFHRGYYRNSYNSITSASSDEELLDGAGVIMDFQTSEDDNLLDGDTAVGTHYTMTNGGSINSSTHLLDLLDEPIPGVGTYDDFHTIDWVREKCKDRERHRRINSKKKESAWEMTKSLYDAWSGWLVVTLTGLASGALAGLIDIAADWMTDLKEGICLSALWYNHEQCCWGSNETTFEERDKCPQWKTWAELIIGQAEGPGSYIMNYIMYIFWALSFAFLAVSLVKVFAPYACGSGIPEIKTILSGFIIRGYLGKWTLMIKTITLVLAVASGLSLGKEGPLVHVACCCGNIFSYLFPKYSTNEAKKREVLSAASAAGVSVAFGAPIGGVLFSLEEVSYYFPLKTLWRSFFAALVAAFVLRSINPFGNSRLVLFYVEYHTPWYLFELFPFILLGVFGGLWGAFFIRANIAWCRRRKSTKFGKYPVLEVIIVAAITAVIAFPNPYTRLNTSELIKELFTDCGPLESSSLCDYRNDMNASKIVDDIPDRPAGIGVYSAIWQLCLALIFKIIMTVFTFGIKVPSGLFIPSMAIGAIAGRIVGIAVEQLAYYHHDWFIFKEWCEVGADCITPGLYAMVGAAACLGGVTRMTVSLVVIVFELTGGLEYIVPLMAAVMTSKWVGDAFGREGIYEAHIRLNGYPFLDAKEEFTHTTLAADVMRPRRNDPPLAVLTQDNMTVDDIENMINETSYNGFPVIMSKESQRLVGFALRRDLTIAIESARKKQEGIVGSSRVCFAQHTPSLPAESPRPLKLRSILDMSPFTVTDHTPMEIVVDIFRKLGLRQCLVTHNGRLLGIITKKDILRHMAQTANQDPASIMFN

SEQ ID NO: 26441 - protein, 866 aa, Homo sapiens
  REGION 1..866: note = ENSP00000261514
MESEQLFHRGYYRNSYNSITSASSDEELLDGAGVIMDFQTSEDDNLLDGDTAVGTHYTMTNGGSINSSTHLLDLLDEPIPGVGTYDDFHTIDWVREKCKDRERHRRINSKKKESAWEMTKSLYDAWSGWLVVTLTGLASGALAGLIDIAADWMTDLKEGICLSALWYNHEQCCWGSNETTFEERDKCPQWKTWAELIIGQAEGPGSYIMNYIMYIFWALSFAFLAVSLVKVFAPYACGSGIPEIKTILSGFIIRGYLGKWTLMIKTITLVLAVASGLSLGKEGPLVHVACCCGNIFSYLFPKYSTNEAKKREVLSAASAAGVSVAFGAPIGGVLFSLEEVSYYFPLKTLWRSFFAALVAAFVLRSINPFGNSRLVLFYVEYHTPWYLFELFPFILLGVFGGLWGAFFIRANIAWCRRRKSTKFGKYPVLEVIIVAAITAVIAFPNPYTRLNTSELIKELFTDCGPLESSSLCDYRNDMNASKIVDDIPDRPAGIGVYSAIWQLCLALIFKIIMTVFTFGIKVPSGLFIPSMAIGAIAGRIVGIAVEQLAYYHHDWFIFKEWCEVGADCITPGLYAMVGAAACLGGVTRMTVSLVVIVFELTGGLEYIVPLMAAVMTSKWVGDAFGREGIYEAHIRLNGYPFLDAKEEFTHTTLAADVMRPRRNDPPLAVLTQDNMTVDDIENMINETSYNGFPVIMSKESQRLVGFALRRDLTIAIESARKKQEGIVGSSRVCFAQHTPSLPAESPRPLKLRSILDMSPFTVTDHTPMEIVVDIFRKLGLRQCLVTHNGIVLGIITKKNILEHLEQLKQHVEPLAPPWHYNKKRYPPAYGPDGKPRPRFNNVQLNLTDEEREETEEEVYLLNSTTL

SEQ ID NO: 26442 - protein, 791 aa, Homo sapiens
  REGION 1..791: note = ENSP00000353857
MESEQLFHRGYYRNSYNSITSASSDEELLDGAGVIMDFQTSEDDNLLDGDTAVGTHYTMTNGGSINSSTHLLDLLDEPIPGVGTYDDFHTIDWVREKCKDRERHRRINSKKKESAWEMTKSLYDAWSGWLVVTLTGLASGALAGLIDIAADWMTDLKEGICLSALWYNHEQCCWGSNETTFEERDKCPQWKTWAELIIGQAEGPGSYIMNYIMYIFWALSFAFLAVSLVKVFAPYACGSGIPEIKTILSGFIIRGYLGKWTLMIKTITLVLAVASGLSLGKEGPLVHVACCCGNIFSYLFPKYSTNEAKKREVSYYFPLKTLWRSFFAALVAAFVLRSINPFGNSRLVLFYVEYHTPWYLFELFPFILLGVFGGLWGAFFIRANIAWCRRRKSTKFGKYPVLEVIIVAAITAVIAFPNPYTRLNTSELIKELFTDCGPLESSSLCDYRNDMNASKIVDDIPDRPAGIGVYSAIWQLCLALIFKIIMTVFTFGIKVPSGLFIPSMAIGAIAGRIVGIAVEQLAYYHHDWFIFKEWCEVGADCITPGLYAMVGAAACLGGVTRMTVSLVVIVFELTGGLEYIVPLMAAVMTSKWVGDAFGREGIYEAHIRLNGYPFLDAKEEFTHTTLAADVMRPRRNDPPLAVLTQDNMTVDDIENMINETSYNGFPVIMSKESQRLVGFALRRDLTIAIESARKKQEGIVGSSRVCFAQHTPSLPAESPRPLKLRSILDMSPFTVTDHTPMEIVVDIFRKLGLRQCLVTHNGRLLGIITKKDILRHMAQTANQDPASIMFN

SEQ ID NO: 26443 - protein, 138 aa, Homo sapiens
  REGION 1..138: note = ENSP00000425823
MESEQLFHRGYYRNSYNSITSASSDEELLDGAGVIMDFQTSEDDNLLDGDTAVGTHYTMTNGGSINSSTHLLDLLDEPIPGVGTYDDFHTIDWVREKCKDRERHRRINSKKKESAWEMTKSLYDAWSGWLVVTLTGLA

SEQ ID NO: 26444 - protein, 725 aa, Homo sapiens
  REGION 1..725: note = ENSP00000425323
MDASSDPYLPYDGGGDSIPLRELHKRGTHYTMTNGGSINSSTHLLDLLDEPIPGVGTYDDFHTIDWVREKCKDRERHRRINSKKKESAWEMTKSLYDAWSGWLVVTLTGLASGALAGLIDIAADWMTDLKEGICLSALWYNHEQCCWGSNETTFEERDKCPQWKTWAELIIGQAEGPGSYIMNYIMYIFWALSFAFLAVSLVKVFAPYACGSGIPEIKTILSGFIIRGYLGKWTLMIKTITLVLAVASGLSLGKEGPLVHVACCCGNIFSYLFPKYSTNEAKKREVLSAASAAGVSVAFGAPIGGVLFSLEEVSYYFPLKTLWRSFFAALVAAFVLRSINPFGNSRLVLFYVEYHTPWYLFELFPFILLGVFGGLWGAFFIRANIAWCRRRKSTKFGKYPVLEVIIVAAITAVIAFPNPYTRLNTSELIKELFTDCGPLESSSLCDYRNDMNASKIVDDIPDRPAGIGVYSAIWQLCLALIFKIIMTVFTFGIKVPSGLFIPSMAIGAIAGRIVGIAVEQLAYYHHDWFIFKEWCEVGADCITPGLYAMVGAAACLGGVTRMTVSLVVIVFELTGGLEYIVPLMAAVMTSKWVGDAFGREGIYEAHIRLNGYPFLDAKEEFTHTTLAADVMRPRRNDPPLAVLTQDNMTVDDIENMINETSYNGFPVIMSKESQRLVGFALRRDLTIAIESARKKQEGIVGSSRVCFAQHTPSLPAESPRPLKLR

SEQ ID NO: 26445 - protein, 245 aa, Homo sapiens
  REGION 1..245: note = ENSP00000422678
  VARIANT 1: note = Any amino acid
XAGVSVAFGAPIGGVLFSLEEVSYYFPLKTLWRSFFAALVAAFVLRSINPFGVFGGLWGAFFIRANIAWCRRRKSTKFGKYPVLEVIIVAAITAVIAFPNPYTRLNTSELIKELFTDCGPLESSSLCDYRNDMNASKIVDDIPDRPAGIGVYSAIWQLCLALIFKIIMTVFTFGIKVPSGLFIPSMAIGAIAGRIVGIAVEQLAYYHHDWFIFKEWCEVGADCITPGLYAMVGAAACLGGVTRMT

SEQ ID NO: 26446 - protein, 791 aa, Homo sapiens
  REGION 1..791: note = ENSP00000478336
MDASSDPYLPYDGGGDSIPLRELHKRGTHYTMTNGGSINSSTHLLDLLDEPIPGVGTYDDFHTIDWVREKCKDRERHRRINSKKKESAWEMTKSLYDAWSGWLVVTLTGLASGALAGLIDIAADWMTDLKEGICLSALWYNHEQCCWGSNETTFEERDKCPQWKTWAELIIGQAEGPGSYIMNYIMYIFWALSFAFLAVSLVKVFAPYACGSGIPEIKTILSGFIIRGYLGKWTLMIKTITLVLAVASGLSLGKEGPLVHVACCCGNIFSYLFPKYSTNEAKKREVLSAASAAGVSVAFGAPIGGVLFSLEEVSYYFPLKTLWRSFFAALVAAFVLRSINPFGNSRLVLFYVEYHTPWYLFELFPFILLGVFGGLWGAFFIRANIAWCRRRKSTKFGKYPVLEVIIVAAITAVIAFPNPYTRLNTSELIKELFTDCGPLESSSLCDYRNDMNASKIVDDIPDRPAGIGVYSAIWQLCLALIFKIIMTVFTFGIKVPSGLFIPSMAIGAIAGRIVGIAVEQLAYYHHDWFIFKEWCEVGADCITPGLYAMVGAAACLGGVTRMTVSLVVIVFELTGGLEYIVPLMAAVMTSKWVGDAFGREGIYEAHIRLNGYPFLDAKEEFTHTTLAADVMRPRRNDPPLAVLTQDNMTVDDIENMINETSYNGFPVIMSKESQRLVGFALRRDLTIAIESARKKQEGIVGSSRVCFAQHTPSLPAESPRPLKLRSILDMSPFTVTDHTPMEIVVDIFRKLGLRQCLVTHNGRLLGIITKKDILRHMAQTANQDPASIMFN

SEQ ID NO: 26447 - protein, 801 aa, Homo sapiens [sequence omitted]

SEQ ID NO: 26448 - protein, 816 aa, Homo sapiens
  REGION 1..816: note = ENSP00000365256
MAMWQGAMDNRGFQQGSFSSFQNSSSDEDLMDIPATAMDFSMRDDVPPLDREVGEDKSYNGGGIGSSNRIMDFLEEPIPGVGTYDDFNTIDWVREKSRDRDRHREITNKSKESTWALIHSVSDAFSGWLLMLLIGLLSGSLAGLIDISAHWMTDLKEGICTGGFWFNHEHCCWNSEHVTFEERDKCPEWNSWSQLIISTDEGAFAYIVNYFMYVLWALLFAFLAVSLVKVFAPYACGSGIPEIKTILSGFIIRGYLGKWTLVIKTITLVLAVSSGLSLGKEGPLVHVACCCGNILCHCFNKYRKNEAKRREVLSAAAAAGVSVAFGAPIGGVLFSLEEVSYYFPLKTLWRSFFAALVAAFTLRSINPFGNSRLVLFYVEFHTPWHLFELVPFILLGIFGGLWGALFIRTNIAWCRKRKTTQLGKYPVIEVLVVTAITAILAFPNEYTRMSTSELISELFNDCGLLDSSKLCDYENRFNTSKGGELPDRPAGVGVYSAMWQLALTLILKIVITIFTFGMKIPSGLFIPSMAVGAIAGRLLGVGMEQLAYYHQEWTVFNSWCSQGADCITPGLYAMVGAAACLGGVTRMTVSLVVIMFELTGGLEYIVPLMAAAMTSKWVADALGREGIYDAHIRLNGYPFLEAKEEFAHKTLAMDVMKPRRNDPLLTVLTQDSMTVEDVETIISETTYSGFPVVVSRESQRLVGFVLRRDLIISIENARKKQDGVVSTSIIYFTEHSPPLPPYTPPTLKLRNILDLSPFTVTDLTPMEIVVDIFRKLGLRQCLVTHNGRLLGIITKKDVLKHIAQMANQDPDSILFN

SEQ ID NO: 26449 - protein, 816 aa, Homo sapiens; identical to SEQ ID NO: 26448
  REGION 1..816: note = ENSP00000365259

SEQ ID NO: 26450 - protein, 64 aa, Homo sapiens
  REGION 1..64: note = ENSP00000476732
MAMWQGAMDNRGFQQGSFSSFQNSSSDEDLMDIPATAMDFSMRDDVPPLDREVGGIIIGDDNLS

SEQ ID NO: 26451 - protein, 746 aa, Homo sapiens
  REGION 1..746: note = ENSP00000365276
MDFLEEPIPGVGTYDDFNTIDWVREKSRDRDRHREITNKSKESTWALIHSVSDAFSGWLLMLLIGLLSGSLAGLIDISAHWMTDLKEGICTGGFWFNHEHCCWNSEHVTFEERDKCPEWNSWSQLIISTDEGAFAYIVNYFMYVLWALLFAFLAVSLVKVFAPYACGSGIPEIKTILSGFIIRGYLGKWTLVIKTITLVLAVSSGLSLGKEGPLVHVACCCGNILCHCFNKYRKNEAKRREVLSAAAAAGVSVAFGAPIGGVLFSLEEVSYYFPLKTLWRSFFAALVAAFTLRSINPFGNSRLVLFYVEFHTPWHLFELVPFILLGIFGGLWGALFIRTNIAWCRKRKTTQLGKYPVIEVLVVTAITAILAFPNEYTRMSTSELISELFNDCGLLDSSKLCDYENRFNTSKGGELPDRPAGVGVYSAMWQLALTLILKIVITIFTFGMKIPSGLFIPSMAVGAIAGRLLGVGMEQLAYYHQEWTVFNSWCSQGADCITPGLYAMVGAAACLGGVTRMTVSLVVIMFELTGGLEYIVPLMAAAMTSKWVADALGREGIYDAHIRLNGYPFLEAKEEFAHKTLAMDVMKPRRNDPLLTVLTQDSMTVEDVETIISETTYSGFPVVVSRESQRLVGFVLRRDLIISIENARKKQDGVVSTSIIYFTEHSPPLPPYTPPTLKLRNILDLSPFTVTDLTPMEIVVDIFRKLGLRQCLVTHNGRLLGIITKKDVLKHIAQMANQDPDSILFN

SEQ ID NO: 26452 - protein, 746 aa, Homo sapiens; identical to SEQ ID NO: 26451
  REGION 1..746: note = ENSP00000304257

SEQ ID NO: 26453 - protein, 211 aa, Homo sapiens
  REGION 1..211: note = ENSP00000295522
MANAGLQLLGFILAFLGWIGAIVSTALPQWRIYSYAGDNIVTAQAMYEGLWMSCVSQSTGQIQCKVFDSLLNLSSTLQATRALMVVGILLGVIAIFVATVGMKCMKCLEDDEVQKMRMAVIGGAIFLLAGLAILVATAWYGNRIVQEFYDPMTPVNARYEFGQALFTGWAAASLCLLGGALLCCSCPRKTTSYPTPRPYPKPAPSSGKDYV

SEQ ID NO: 26454 - protein, 207 aa, Homo sapiens
  REGION 1..207: note = ENSP00000064724
MVATCLQVVGFVTSFVGWIGVIVTTSTNDWVVTCGYTIPTCRKLDELGSKGLWADCVMATGLYHCKPLVDILILPGYVQACRALMIAASVLGLPAILLLLTVLPCIRMGQEPGVAKYRRAQLAGVLLILLALCALVATIWFPVCAHRETTIVSFGYSLYAGWIGAVLCLVGGCVILCCAGDAQAFGENRFYYTAGSSSPTHAKSAHV

SEQ ID NO: 26455 - protein, 165 aa, Homo sapiens
  REGION 1..165: note = ENSP00000417434
MVATCLQVVGFVTSFVGWIGVIVTTSTNDWVVTCGYTIPTCRKLDELGSKGLWADCVMATGLYHCKPLVDILILPGYVQACRALMIAASVLGLPAILLLLTVLPCIRMGQEPGVAKYRRAQLAGVLLILLGCQLLWAKTESSLHSQHLVQFKQKYLEDFSYLQGD

SEQ ID NO: 26456 - protein, 214 aa, Homo sapiens
  REGION 1..214: note = ENSP00000390661
MEPAREPPSRARPPPPLAARPAPAPAAPRPRSPAEAEARGPEGLLRRSGSGYEGSTSWKAALEDTTTRLLLGAIAVLLFAILVVMSILASKGCIKCEAPCPEDWLLYGRKCYFFSEEPRDWNTGRQYCHTHEAVLAVIQSQKELEFMFKFTRREPWIGLRRVGDEFHWVNGDPFDPDTFTIAGPGECVFVEPTRLVSTECLMTRPWVCSKMAYT

SEQ ID NO: 26457 - protein, 108 aa, Homo sapiens
  REGION 1..108: note = ENSP00000428508
  VARIANT 1: note = Any amino acid
XEGSTSWKAALEASKGCIKCEAPCPEDWLLYGRKCYFFSEEPRDWNTGRQYCHTHEAVLAVIQSQKELEFMFKFTRREPWIGLRRVGDEFHWVNGDPFDPDTFTIAGP

SEQ ID NO: 26458 - protein, 201 aa, Homo sapiens
  REGION 1..201: note = ENSP00000266456
MEYHPDLENLDEDGYTQLHFDSQSNTRIAVVSEKGSCAASPPWRLIAVILGILCLVILVIAVVLGTMGVLSSPCPPNWIIYEKSCYLFSMSLNSWDGSKRQCWQLGSNLLKIDSSNELGFIVKQVSSQPDNSFWIGLSRPQTEVPWLWEDGSTFSSNLFQIRTTATQENPSPNCVWIHVSVIYDQLCSVPSYSICEKKFSM

SEQ ID NO: 26459 - protein, 247 aa, Homo sapiens
  REGION 1..247: note = ENSP00000432876
MEYHPDLENLDEDGYTQLHFDSQSNTRIAVVSEKGSCAASPPWRLIAVILGILCLVILVIAVVLGTMAIWRSNSGSNTLENGYFLSRNKENHSQPTQSSLEDSVTPTKAVKTTGVLSSPCPPNWIIYEKSCYLFSMSLNSWDGSKRQCWQLGSNLLKIDSSNELGFIVKQVSSQPDNSFWIGLSRPQTEVPWLWEDGSTFSSNLFQIRTTATQENPSPNCVWIHVSVIYDQLCSVPSYSICEKKFSM

SEQ ID NO: 26460 - protein, 143 aa, Homo sapiens
  REGION 1..143: note = ENSP00000298523
MEYHPDLENLDEDGYTQLHFDSQSNTRIAVVSEKGSCAASPPWRLIAVILGILCLVILVIAVVLGTMGVLSSPCPPNWIIYEKSCYLFSMSLNSWDGSKRQCWQLGSNLLKIDSSNELISDQNHSYPRKPISKLCMDSRVSHL

SEQ ID NO: 26461 - protein, 168 aa, Homo sapiens
  REGION 1..168: note = ENSP00000379743
MEYHPDLENLDEDGYTQLHFDSQSNTRIAVVSEKGVLSSPCPPNWIIYEKSCYLFSMSLNSWDGSKRQCWQLGSNLLKIDSSNELGFIVKQVSSQPDNSFWIGLSRPQTEVPWLWEDGSTFSSNLFQIRTTATQENPSPNCVWIHVSVIYDQLCSVPSYSICEKKFSM

SEQ ID NO: 26462 - protein, 247 aa, Homo sapiens; identical to SEQ ID NO: 26459
  REGION 1..247: note = ENSP00000302569

SEQ ID NO: 26463 - protein, 116 aa, Homo sapiens
  REGION 1..116: note = ENSP00000436923
MEYHPDLENLDEDGYTQLHFDSQSNTRIAVVSEKGSCAASPPWRLIAVILGILCLVILVIAVVLGTMGTGQFLKDLSFLNNRRKLFGDPIQEATHWRMATFYQEIKRTTVNPHNHL

SEQ ID NO: 26464 - protein, 45 aa, Homo sapiens
  REGION 1..45: note = ENSP00000344723
MEYHPDLENLDEDGYTQLHFDSQSNTRIAVVSEKGIYSKTSVFPT

SEQ ID NO: 26465 - protein, 189 aa, Homo sapiens
  REGION 1..189: note = ENSP00000431461
MEYHPDLENLDEDGYTQLHFDSQSNTRIAVVSEKGSCAASPPWRLIAVILGILCLVILVIAVVLGTMAIWRSNSGSNTLENGYFLSRNKENHSQPTQSSLEDSVTPTKAVKTTGVLSSPCPPNWIIYEKSCYLFSMSLNSWDGSKRQCWQLGSNLLKIDSSNELISDQNHSYPRKPISKLCMDSRVSHL

SEQ ID NO: 26466 - protein, 192 aa, Homo sapiens
  REGION 1..192: note = ENSP00000434392
MEYHPDLENLDEDGYTQLHFDSQSNTRIAVVSEKGSCAASPPWRLIAVILGILCLVILVIAVVLGTMAIWRSNSGSNTLENGYFLSRNKENHSQPTQSSLEDSVTPTKAVKTTGVLSSPCPPNWIIYEKSCYLFSMSLNSWDGSKRQCWQLGSNLLKIDSSNELSLTLLPKLECSEAATSQAQVILPPQLPE

SEQ ID NO: 26467 - protein, 77 aa, Homo sapiens
  REGION 1..77: note = ENSP00000312089
MEYHPDLENLDEDGYTQLHFDSQSNTRIAVVSEKGSCAASPPWRLIAVILGILCLVILVIAVVLGTMAGFKAVEFKG

SEQ ID NO: 26468 - protein, 136 aa, Homo sapiens
  REGION 1..136: note = ENSP00000434954
MEYHPDLENLDEDGYTQLHFDSQSNTRIAVVSEKGSCAASPPWRLIAVILGILCLVILVIAVVLGTMGEYLVEEINNRQFSKQLLCARHSFKGLTCIIYFNLYIIWFYLYWVGAVNAHFTYKGCERLRGYFTFPGL

SEQ ID NO: 26469 - protein, 410 aa, Homo sapiens
  REGION 1..410: note = ENSP00000185206
MNDEDYSTIYDTIQNERTYEVPDQPEENESPHYDDVHEYLRPENDLYATQLNTHEYDFVSVYTIKGEETSLASVQSEDRGYLLPDEIYSELQEAHPGEPQEDRGISMEGLYSSTQDQQLCAAELQENGSVMKEDLPSPSSFTIQHSKAFSTTKYSCYSDAEGLEEKEGAHMNPEIYLFVKAGIDGESIGNCPFSQRLFMILWLKGVVFNVTTVDLKRKPADLHNLAPGTHPPFLTFNGDVKTDVNKIEEFLEETLTPEKYPKLAAKHRESNTAGIDIFSKFSAYIKNTKQQNNAALERGLTKALKKLDDYLNTPLPEEIDANTCGEDKGSRRKFLDGDELTLADCNLLPKLHVVKIVAKKYRNYDIPAEMTGLWRYLKNAYARDEFTNTCAADSEIELAYADVAKRLSRS

SEQ ID NO: 26470 - protein, 251 aa, Homo sapiens
  REGION 1..251: note = ENSP00000344165
MTDSATANGDDRDPEIELFVKAGIDGESIGNCPFSQRLFMILWLKGVVFNVTTVDLKRKPADLHNLAPGTHPPFLTFNGDVKTDVNKIEEFLEETLTPEKYPKLAAKHRESNTAGIDIFSKFSAYIKNTKQQNNAALERGLTKALKKLDDYLNTPLPEEIDANTCGEDKGSRRKFLDGDELTLADCNLLPKLHVVKIVAKKYRNYDIPAEMTGLWRYLKNAYARDEFTNTCAADSEIELAYADVAKRLSRS

SEQ ID NO: 26471 - protein, 205 aa, Homo sapiens
  REGION 1..205: note = ENSP00000439195
MTDSATANGDDRDPEIELFVKAGIDGESIGNCPFSQRLFMILWLKGVVFNVTTVDLKRKPADLHNLAPGTHPPFLTFNGDVKTDVNKIEEFLEETLTPEKYPKLAAKHRESNTAGIDIFSKFSAYIKNTKQQNNAALERGLTKALKKLDDYLNTPLPEEIDANTCGEDKGSRRKFLDGDELTLADCNLLPKLHVVKEQVPLKGMI

SEQ ID NO: 26472 - protein, 704 aa, Homo sapiens
  REGION 1..704: note = ENSP00000353959
MAEAAEPEGVAPGPQGPPEVPAPLAERPGEPGAAGGEAEGPEGSEGAEEAPRGAAAVKEAGGGGPDRGPEAEARGTRGAHGETEAEEGAPEGAEVPQGGEETSGAQQVEGASPGRGAQGEPRGEAQREPEDSAAPERQEEAEQRPEVPEGSASGEAGDSVDAEGPLGDNIEAEGPAGDSVEAEGRVGDSVDAEGPAGDSVDAEGPLGDNIQAEGPAGDSVDAEGRVGDSVDAEGPAGDSVDAEGRVGDSVEAGDPAGDGVEAGVPAGDSVEAEGPAGDSMDAEGPAGRARRVSGEPQQSGDGSLSPQAEAIEVAAGESAGRSPGELAWDAAEEAEVPGVKGSEEAAPGDARADAGEDRVGDGPQQEPGEDEERRERSPEGPREEEAAGGEEESPDSSPHGEASRGAAEPEAQLSNHLAEEGPAEGSGEAARVNGRREDGEASEPRALGQEHDITLFVKVKLTALGCSRIAIKKYLRAGYDGESIGNCPFSQRLFMILWLKGVIFNVTTVDLKRKPADLQNLAPGTNPPFMTFDGEVKTDVNKIEEFLEEKLAPPRYPKLGTQHPESNSAGNDVFAKFSAFIKNTKKDANEIHEKNLLKALRKLDNYLNSPLPDEIDAYSTEDVTVSGRKFLDGDELTLADCNLLPKLHIIKIVAKKYRDFEFPSEMTGIWRYLNNAYARDEFTNTCPADQEIEHAYSDVAKRMK

SEQ ID NO: 26473 - protein, 686 aa, Homo sapiens
  REGION 1..686: note = ENSP00000290332
MAEAAEPEGVAPGPQGPPEVPAPLAERPGEPGAAGGEAEGPEGSEGAEEAPRGAAAVKEAGGGGPDRGPEAEARGTRGAHGETEAEEGAPEGAEVPQGGEETSGAQQVEGASPGRGAQGEPRGEAQREPEDSAAPERQEEAEQRPEVPEGSASGEAGDSVDAEGPLGDNIEAEGPAGDSVEAEGRVGDSVDAEGPAGDSVDAEGPLGDNIQAEGPAGDSVDAEGRVGDSVDAEGPAGDSVDAEGRVGDSVEAGDPAGDGVEAGVPAGDSVEAEGPAGDSMDAEGPAGRARRVSGEPQQSGDGSLSPQAEAIEVAAGESAGRSPGELAWDAAEEAEVPGVKGSEEAAPGDARADAGEDRVGDGPQQEPGEDEERRERSPEGPREEEAAGGEEESPDSSPHGEASRGAAEPEAQLSNHLAEEGPAEGSGEAARVNGRREDGEASEPRALGQEHDITLFVKAGYDGESIGNCPFSQRLFMILWLKGVIFNVTTVDLKRKPADLQNLAPGTNPPFMTFDGEVKTDVNKIEEFLEEKLAPPRYPKLGTQHPESNSAGNDVFAKFSAFIKNTKKDANEIHEKNLLKALRKLDNYLNSPLPDEIDAYSTEDVTVSGRKFLDGDELTLADCNLLPKLHIIKIVAKKYRDFEFPSEMTGIWRYLNNAYARDEFTNTCPADQEIEHAYSDVAKRMK

SEQ ID NO: 26474 - protein, 484 aa, Homo sapiens
  REGION 1..484: note = ENSP00000326830
MRHSKRTYCPDWDDKDWDYGKWRSSSSHKRRKRSHSSAQENKRCKYNHSKMCDSHYLESRSINEKDYHSRRYIDEYRNDYTQGCEPGHRQRDHESRYQNHSSKSSGRSGRSSYKSKHRIHHSTSHRRSHGKSHRRKRTRSVEDDEEGHLICQSGDVLSARYEIVDTLGEGAFGKVVECIDHKAGGRHVAVKIVKNVDRYCEAARSEIQVLEHLNTTDPNSTFRCVQMLEWFEHHGHICIVFELLGLSTYDFIKENGFLPFRLDHIRKMAYQICKSVNFLHSNKLTHTDLKPENILFVQSDYTEAYNPKIKRDERTLINPDIKVVDFGSATYDDEHHSTLVSTRHYRAPEVILALGWSQPCDVWSIGCILIEYYLGFTVFPTHDSKEHLAMMERILGPLPKHMIQKTRKRKYFHHDRLDWDEHSSAGRYVSRRCKPLKEFMLSQDVEHERLFDLIQKMLEYDPAKRITLREALKHPFFDLLKKSI

SEQ ID NO: 26475 - protein, 136 aa, Homo sapiens
  REGION 1..136: note = ENSP00000400487
MRHSKRTYCPDWDDKDWDYGKWRSSSSHKRRKRSHSSAQENKRCKYNHSKMCDSHYLESRSINEKDYHSRRYIDEYRNDYTQGCEPGHRQRDHESRYQNHSSKSSGRSGRSSYKSKHRIHHSTSHRRSHGMKLLIL

SEQ ID NO: 26476 - protein, 307 aa, Homo sapiens
  REGION 1..307: note = ENSP00000386358
MHLSNRGGRHVAVKIVKNVDRYCEAARSEIQVLEHLNTTDPNSTFRCVQMLEWFEHHGHICIVFELLGLSTYDFIKENGFLPFRLDHIRKMAYQICKSVNFLHSNKLTHTDLKPENILFVQSDYTEAYNPKIKRDERTLINPDIKVVDFGSATYDDEHHSTLVSTRHYRAPEVILALGWSQPCDVWSIGCILIEYYLGFTVFPTHDSKEHLAMMERILGPLPKHMIQKTRKRKYFHHDRLDWDEHSSAGRYVSRRCKPLKEFMLSQDVEHERLFDLIQKMLEYDPAKRITLREALKHPFFDLLKKSI

SEQ ID NO: 26477 - protein, 355 aa, Homo sapiens
  REGION 1..355: note = ENSP00000386875
MRHSKRTYCPDWDDKDWDYGKWRSSSSHKRRKRSHSSAQENKRCKYNHSKMCDSHYLESRSINEKDYHSRRYIDEYRNDYTQGCEPGHRQRDHESRYQNHSSKSSGRSGRSSYKSKHRIHHSTSHRRSHGKSHRRKRTRSVEDDEEGHLICQSGDVLSARYEIVDTLGEGAFGKVVECIDHKAGGRHVAVKIVKNVDRYCEAARSEIQVLEHLNTTDPNSTFRCVQMLEWFEHHGHICIVFELLGLSTYDFIKENGFLPFRLDHIRKMAYQICKSVNFLHSNKLTHTDLKPENILFVQSDYTEAYNPKIKRDERTLINPDIKVVDFGSATYDDEHHSTLVSTRHYRAPEVILDTR

SEQ ID NO: 26478 - protein, 526 aa, Homo sapiens
  REGION 1..526: note = ENSP00000394734
MAAGRRPASALWPERRGSPLRGDLLGFQNVREPSSCGETLSGMRHSKRTYCPDWDDKDWDYGKWRSSSSHKRRKRSHSSAQENKRCKYNHSKMCDSHYLESRSINEKDYHSRRYIDEYRNDYTQGCEPGHRQRDHESRYQNHSSKSSGRSGRSSYKSKHRIHHSTSHRRSHGKSHRRKRTRSVEDDEEGHLICQSGDVLSARYEIVDTLGEGAFGKVVECIDHKAGGRHVAVKIVKNVDRYCEAARSEIQVLEHLNTTDPNSTFRCVQMLEWFEHHGHICIVFELLGLSTYDFIKENGFLPFRLDHIRKMAYQICKSVNFLHSNKLTHTDLKPENILFVQSDYTEAYNPKIKRDERTLINPDIKVVDFGSATYDDEHHSTLVSTRHYRAPEVILALGWSQPCDVWSIGCILIEYYLGFTVFPTHDSKEHLAMMERILGPLPKHMIQKTRKRKYFHHDRLDWDEHSSAGRYVSRRCKPLKEFMLSQDVEHERLFDLIQKMLEYDPAKRITLREALKHPFFDLLKKSI

SEQ ID NO: 26479 - protein, 454 aa, Homo sapiens
  REGION 1..454: note = ENSP00000479484
MRHSKRTYCPDWDDKDWDYGKWRSSSSHKRRKRSHSSAQENKRCKYNHSKMCDSHYLESRSINEKDYHSRRYIDEYRNDYTQGCEPGHRQRDHESRYQNHSSKSSGRSGRSSYKSKHRIHHSTSHRRSHGDEIVDTLGEGAFGKVVECIDHKAGGRHVAVKIVKNVDRYCEAARSEIQVLEHLNTTDPNSTFRCVQMLEWFEHHGHICIVFELLGLSTYDFIKENGFLPFRLDHIRKMAYQICKSVNFLHSNKLTHTDLKPENILFVQSDYTEAYNPKIKRDERTLINPDIKVVDFGSATYDDEHHSTLVSTRHYRAPEVILALGWSQPCDVWSIGCILIEYYLGFTVFPTHDSKEHLAMMERILGPLPKHMIQKTRKRKYFHHDRLDWDEHSSAGRYVSRRCKPLKEFMLSQDVEHERLFDLIQKMLEYDPAKRITLREALKHPFFDLLKKSI

SEQ ID NO: 26480 - protein, 1002 aa, Homo sapiens
  REGION 1..1002: note = ENSP00000298912
MAAHEWDWFQREELIGQISDIRVQNLQVERENVQKRTFTRWINLHLEKCNPPLEVKDLFVDIQDGKILMALLEVLSGRNLLHEYKSSSHRIFRLNNIAKALKFLEDSNVKLVSIDAAEIADGNPSLVLGLIWNIILFFQIKELTGNLSRNSPSSSLSPGSGGTDSDSSFPPTPTAERSVAISVKDQRKAIKALLAWVQRKTRKYGVAVQDFAGSWRSGLAFLAVIKAIDPSLVDMKQALENSTRENLEKAFSIAQDALHIPRLLEPEDIMVDTPDEQSIMTYVAQFLERFPELEAEDIFDSDKEVPIESTFVRIKETPSEQESKVFVLTENGERTYTVNHETSHPPPSKVFVCDKPESMKEFRLDGVSSHALSDSSTEFMHQIIDQVLQGGPGKTSDISEPSPESSILSSRKENGRSNSLPIKKTVHFEADTYKDPFCSKNLSLCFEGSPRVAKESLRQDGHVLAVEVAEEKEQKQESSKIPESSSDKVAGDIFLVEGTNNNSQSSSCNGALESTARHDEESHSLSPPGENTVMADSFQIKVNLMTVEALEEGDYFEAIPLKASKFNSDLIDFASTSQAFNKVPSPHETKPDEDAEAFENHAEKLGKRSIKSAHKKKDSPEPQVKMDKHEPHQDSGEEAEGCPSAPEETPVDKKPEVHEKAKRKSTRPHYEEEGEDDDLQGVGEELSSSPPSSCVSLETLGSHSEEGLDFKPSPPLSKVSVIPHDLFYFPHYEVPLAAVLEAYVEDPEDLKNEEMDLEEPEGYMPDLDSREEEADGSQSSSSSSVPGESLPSASDQVLYLSRGGVGTTPASEPAPLAPHEDHQQRETKENDPMDSHQSQESPNLENIANPLEENVTKESISSKKKEKRKHVDHVESSLFVAPGSVQSSDDLEEDSSDYSIPSRTSHSDSSIYLRRHTHRSSESDHFSYVQLRNAADLDDRRNRILTRKANSSGEAMSLGSHSPQSDSLTQLVQQPDMMYFILFLWLLVYCLLLFPQLDVSRL

SEQ ID NO: 26481 - protein, 67 aa, Homo sapiens
  REGION 1..67: note = ENSP00000452305
MKRESKHARMSMKANSSGEAMSLGSHSPQSDSLTQLVQQPDMMYFILFLWLLVYCLLLFPQLDVSRL

SEQ ID NO: 26482 - protein, 132 aa, Homo sapiens
  REGION 1..132: note = ENSP00000451705
MALLEVLSGRNLLHEYKSSSHRIFRLNNIAKALKFLEDSNVKLVSIDAAEIADGNPSLVLGLIWNIILFFQIKELTGNLSRNSPSSSLSPGSGGTDSDSSFPPTPTAERSVAISVKDQRKAIKALLAWVQRK

SEQ ID NO: 26483 - protein, 101 aa, Homo sapiens
  REGION 1..101: note = ENSP00000452525
MALLEVLSGRNLLHEYKSSSHRIFRLNNIAKALKFLEDSNVKLVSIDAAEIADGNPSLVLGLIWNIILFFQIKELTGNLSRNSPSSSLSPGSGGTDSDSSF

SEQ ID NO: 26484 - protein, 97 aa, Homo sapiens
  REGION 1..97: note = ENSP00000451189
MAAHEWDWFQREELIGQISDIRVQNLQVERENVQKRTFTRWINLHLEKCNPPLEVKDLFVDIQDGKILMALLEVLSGRNLSPGHQLLCPWWASTGSL

SEQ ID NO: 26485 - protein, 373 aa, Homo sapiens
  REGION 1..373: note = ENSP00000405577
MSLLLLLLLVSYYVGTLGTHTEIKRVAEEKVTLPCHHQLGLPEKDTLDIEWLLTDNEGNQKVVITYSSRHVYNNLTEEQKGRVAFASNFLAGDASLQIEPLKPSDEGRYTCKVKNSGRYVWSHVILKVLVRPSKPKCELEGELTEGSDLTLQCESSSGTEPIVYYWQRIREKEGEDERLPPKSRIDYNHPGRVLLQNLTMSYSGLYQCTAGNEAGKESCVVRVTVQYVQSIGMVAGAVTGIVAGALLIFLLVWLLIRRKDKERYEEEERPNEIREDAEAPKARLVKPSSSSSGSRSSRSGSSSTRSTANSASRSQRTLSTDAAPQPGLATQAYSLVGPEVRGSEPKKVHHANLTKAETTPSMIPSQSRAFQTV

SEQ ID NO: 26486 - protein, 955 aa, Homo sapiens
  REGION 1..955: note = ENSP00000402460
MLPGRLCWVPLLLALGVGSGSGGGGDSRQRRLLAAKVNKHKPWIETSYHGVITENNDTVILDPPLVALDKDAPVPFAGEICAFKIHGQELPFEAVVLNKTSGEGRLRAKSPIDCELQKEYTFIIQAYDCGAGPHETAWKKSHKAVVHIQVKDVNEFAPTFKEPAYKAVVTEGKIYDSILQVEAIDEDCSPQYSQICNYEIVTTDVPFAIDRNGNIRNTEKLSYDKQHQYEILVTAYDCGQKPAAQDTLVQVDVKPVCKPGWQDWTKRIEYQPGSGSMPLFPSIHLETCDGAVSSLQIVTELQTNYIGKGCDRETYSEKSLQKLCGASSGIIDLLPSPSAATNWTAGLLVDSSEMIFKFDGRQGAKVPDGIVPKNLTDQFTITMWMKHGPSPGVRAEKETILCNSDKTEMNRHHYALYVHNCRLVFLLRKDFDQADTFRPAEFHWKLDQICDKEWHYYVINVEFPVVTLYMDGATYEPYLVTNDWPIHPSHIAMQLTVGACWQGGEVTKPQFAQFFHGSLASLTIRPGKMESQKVISCLQACKEGLDINSLESLGQGIKYHFNPSQSILVMEGDDIGNINRALQKVSYINSRQFPTAGVRRLKVSSKVQCFGEDVCISIPEVDAYVMVLQAIEPRITLRGTDHFWRPAAQFESARGVTLFPDIKIVSTFAKTEAPGDVKTTDPKSEVLEEMLHNLDFCDILVIGGDLDPRQECLELNHSELHQRHLDATNSTAGYSIYGVGSMSRYEQVLHHIRYRNWRPASLEARRFRIKCSELNGRYTSNEFNLEVSILHEDQVSDKEHVNHLIVQPPFLQSVHHPESRSSIQHSSVVPSIATVVIIISVCMLVFVVAMGVYRVRIAHQHFIQETEAAKESEMDWDDSALTITVNPMEKHEGPGHGEDETEGEEEEEAEEEMSSSSGSDDSEEEEEEEGMGRGRHGQNGARQAQLEWDDSTLPY

SEQ ID NO: 26487 - protein, 134 aa, Homo sapiens
  REGION 1..134: note = ENSP00000443959
MTLLLLPLLLASLLASCSCNKANKHKPWIEAEYQGIVMENDNTVLLNPPLFALDKDAPLRYAGEICGFRLHGSGVPFEAVILDKATGEGLIRAKEPVDCEAQKEHTFTIQAYDCGEGPDGANTKKSHKATVHVR

SEQ ID NO: 26488 - protein, 956 aa, Homo sapiens
  REGION 1..956: note = ENSP00000266546
MTLLLLPLLLASLLASCSCNKANKHKPWIEAEYQGIVMENDNTVLLNPPLFALDKDAPLRYAGEICGFRLHGSGVPFEAVILDKATGEGLIRAKEPVDCEAQKEHTFTIQAYDCGEGPDGANTKKSHKATVHVRVNDVNEFAPVFVERLYRAAVTEGKLYDRILRVEAIDGDCSPQYSQICYYEILTPNTPFLIDNDGNIENTEKLQYSGERLYKFTVTAYDCGKKRAADDAEVEIQVKPTCKPSWQGWNKRIEYAPGAGSLALFPGIRLETCDEPLWNIQATIELQTSHVAKGCDRDNYSERALRKLCGAATGEVDLLPMPGPNANWTAGLSVHYSQDSSLIYWFNGTQAVQVPLGGPSGLGSGPQDSLSDHFTLSFWMKHGVTPNKGKKEEETIVCNTVQNEDGFSHYSLTVHGCRIAFLYWPLLESARPVKFLWKLEQVCDDEWHHYALNLEFPTVTLYTDGISFDPALIHDNGLIHPPRREPALMIGACWTEEKNKEKEKGDNSTDTTQGDPLSIHHYFHGYLAGFSVRSGRLESREVIECLYACREGLDYRDFESLGKGMKVHVNPSQSLLTLEGDDVETFNHALQHVAYMNTLRFATPGVRPLRLTTAVKCFSEESCVSIPEVEGYVVVLQPDAPQILLSGTAHFARPAVDFEGTNGVPLFPDLQITCSISHQVEAKKDESWQGTVTDTRMSDEIVHNLDGCEISLVGDDLDPERESLLLDTTSLQQRGLELTNTSAYLTIAGVESITVYEEILRQARYRLRHGAALYTRKFRLSCSEMNGRYSSNEFIVEVNVLHSMNRVAHPSHVLSSQQFLHRGHQPPPEMAGHSLASSHRNSMIPSAATLIIVVCVGFLVLMVVLGLVRIHSLHRRVSGAGGPPGASSDPKDPDLFWDDSALTIIVNPMESYQNRQSCVTGAVGGQQEDEDSSDSEVADSPSSDERRIIETPPHRY

SEQ ID NO: 26489 - protein, 142 aa, Homo sapiens
  REGION 1..142: note = ENSP00000442612
MENDNTVLLNPPLFALDKDAPLRYAGEICGFRLHGSGVPFEAVILDKATGEGLIRAKEPVDCEAQKEHTFTIQAYDCGEGPDGANTKKSHKATVHVRVNDVNEFAPVFVERLYRAAVTEGKLYDRILRVEAIDGDCSPQYSQ

SEQ ID NO: 26490 - protein, 129 aa, Homo sapiens
  REGION 1..129: note = ENSP00000443468
MENDNTVLLNPPLFALDKDAPLRYAGEICGFRLHGSGVPFEAVILDKATGEGLIRAKEPVDCEAQKEHTFTIQAYDCGEGPDGANTKKSHKATVHVRVNDVNEFAPVFVERLYRAAVTEGKLYDRILRV

SEQ ID NO: 26491 - protein, 154 aa, Homo sapiens
  REGION 1..154: note = ENSP00000443490
MENDNTVLLNPPLFALDKDAPLRYAGEICGFRLHGSGVPFEAVILDKATGEGLIRAKEPVDCEAQKEHTFTIQAYDCGEGPDGANTKKSHKATVHVRVNDVNEFAPVFVERLYRAAVTEGKLYDRILRVEAIDGDCSPQYSQICYYEILTPNTP

SEQ ID NO: 26492 - protein, 176 aa, Homo sapiens
  REGION 1..176: note = ENSP00000442801
MVVITNKHKPWIEAEYQGIVMENDNTVLLNPPLFALDKDAPLRYAGEICGFRLHGSGVPFEAVILDKATGEGLIRAKEPVDCEAQKEHTFTIQAYDCGEGPDGANTKKSHKATVHVRVNDVNEFAPVFVERLYRAAVTEGKLYDRILRVEAIDGDCSPQYSQICYYEILTPNTPFL

SEQ ID NO: 26493 - protein, 968 aa, Homo sapiens
  REGION 1..968: note = ENSP00000440679
MVLGCELSGSTRVVVGVEALLTGASSPLPGVGPANKHKPWIEAEYQGIVMENDNTVLLNPPLFALDKDAPLRYAGEICGFRLHGSGVPFEAVILDKATGEGLIRAKEPVDCEAQKEHTFTIQAYDCGEGPDGANTKKSHKATVHVRVNDVNEFAPVFVERLYRAAVTEGKLYDRILRVEAIDGDCSPQYSQICYYEILTPNTPFLIDNDGNIENTEKLQYSGERLYKFTVTAYDCGKKRAADDAEVEIQVKPTCKPSWQGWNKRIEYAPGAGSLALFPGIRLETCDEPLWNIQATIELQTSHVAKGCDRDNYSERALRKLCGAATGEVDLLPMPGPNANWTAGLSVHYSQDSSLIYWFNGTQAVQVPLGGPSGLGSGPQDSLSDHFTLSFWMKHGVTPNKGKKEEETIVCNTVQNEDGFSHYSLTVHGCRIAFLYWPLLESARPVKFLWKLEQVCDDEWHHYALNLEFPTVTLYTDGISFDPALIHDNGLIHPPRREPALMIGACWTEEKNKEKEKGDNSTDTTQGDPLSIHHYFHGYLAGFSVRSGRLESREVIECLYACREGLDYRDFESLGKGMKVHVNPSQSLLTLEGDDVETFNHALQHVAYMNTLRFATPGVRPLRLTTAVKCFSEESCVSIPEVEGYVVVLQPDAPQILLSGTAHFARPAVDFEGTNGVPLFPDLQITCSISHQVEAKKDESWQGTVTDTRMSDEIVHNLDGCEISLVGDDLDPERESLLLDTTSLQQRGLELTNTSAYLTIAGVESITVYEEILRQARYRLRHGAALYTRKFRLSCSEMNGRYSSNEFIVEVNVLHSMNRVAHPSHVLSSQQFLHRGHQPPPEMAGHSLASSHRNSMIPSAATLIIVVCVGFLVLMVVLGLVRIHSLHRRVSGAGGPPGASSDPKDPDLFWDDSALTIIVNPMESYQNRQSCVTGAVGGQQEDEDSSDSEVADSPSSDERRIIETPPHRY

SEQ ID NO: 26494 - protein, 327 aa, Homo sapiens
  REGION 1..327: note = ENSP00000275162
MTHLQAGLSPETLEKARLELNENPDTLHQDIQEVRDMVITRPDIGFLRTDDAFILRFLRARKFHHFEAFRLLAQYFEYRQQNLDMFKSFKATDPGIKQALKDGFPGGLANLDHYGRKILVLFAANWDQSRYTLVDILRAILLSLEAMIEDPELQVNGFVLIIDWSNFTFKQASKLTPSMLRLAIEGLQDSFPARFGGIHFVNQPWYIHALYTVIRPFLKEKTRKRIFLHGNNLNSLHQLIHPEILPSEFGGMLPPYDMGTWARTLLDHEYDDDSEYNVDSYSMPVKEVEKELSPKSMKRSQSVVDPTVLKRMDKNEEENMQPLLSLD

SEQ ID NO: 26495 - protein, 181 aa, Homo sapiens
  REGION 1..181: note = ENSP00000357423
MIEDPELQVNGFVLIIDWSNFTFKQASKLTPSMLRLAIEGLQDSFPARFGGIHFVNQPWYIHALYTVIRPFLKEKTRKRIFLHGNNLNSLHQLIHPEILPSEFGGMLPPYDMGTWARTLLDHEYDDDSEYNVDSYSMPVKEVEKELSPKSMKRSQSVVDPTVLKRMDKNEEENMQPLLSLD

SEQ ID NO: 26496 - protein, 227 aa, Homo sapiens
  REGION 1..227: note = ENSP00000272425
MAPCHIRKYQESDRQWVVGLLSRGMAEHAPATFRQLLKLPRTLILLLGGPLALLLVSGSWLLALVFSISLFPALWFLAKKPWTEYVDMTLCTDMSDITKSYLSERGSCFWVAESEEKVVGMVGALPVDDPTLREKRLQLFHLFVDSEHRRQGIAKALVRTVLQFARDQGYSEVILDTGTIQLSAMALYQSMGFKKTGQSFFCVWARLVALHTVHFIYHLPSSKVGSL

SEQ ID NO: 26497 - protein, 156 aa, Homo sapiens
  REGION 1..156: note = ENSP00000352270
MLSARDRRDRHPEEGVVAELQGFAVDKAFLTSHKGILLETELALTLIIFICFTASISAYMAAALLEFFITLAFLFLYATQYYQRFDRINWPCLDFLRCVSAIIIFLVVSFAAVTSRDGAAIAAFVFGIILVSIFAYDAFKIYRTEMAPGASQGDQQ

SEQ ID NO: 26498 - protein, 223 aa, Homo sapiens
  REGION 1..223: note = ENSP00000344819
MLSARDRRDRHPEEGVVAELQGFAVDKAFLTSHKGILLETELALTLIIFICFTASISAYMAAALLEFFITLAFLFLYATQYYQRFDRINWPCLLQGHGQSGGPHPLDLLSHSAKVQPQPWPGLTPPGWHTPAAVPWVPAPAPGFWSWLLWFICFHSLGSSDFLRCVSAIIIFLVVSFAAVTSRDGAAIAAFVFGIILVSIFAYDAFKIYRTEMAPGASQGDQQ

SEQ ID NO: 26499 - protein, 74 aa, Homo sapiens
  REGION 1..74: note = ENSP00000344160
MLSARDRRDRHPEEGVVAELQGFAVDKAFLTSHKGILLETELVFGIILVSIFAYDAFKIYRTEMAPGASQGDQQ

SEQ ID NO: 26500 - protein, 105 aa, Homo sapiens
  REGION 1..105: note = ENSP00000380404
MLSARDRRDRHPEEGVVAELQGFAVDKAFLTSHKGILLETELDFLRCVSAIIIFLVVSFAAVTSRDGAAIAAFVFGIILVSIFAYDAFKIYRTEMAPGASQGDQQ

SEQ ID NO: 26501 - protein, 118 aa, Homo sapiens
  REGION 1..118: note = ENSP00000451514
MLSARDRRDRHPEEGVVAELQGFAVDKAFLTSHKGILLETELYYQRFDRINWPCLDFLRCVSAIIIFLVVSFAAVTSRDGAAIAAFVFGIILVSIFAYDAFKIYRTEMAPGASQGDQQ

SEQ ID NO: 26502 - protein, 125 aa, Homo sapiens
  REGION 1..125: note = ENSP00000372259
MLSARDRRDRHPEEGVVAELQGFAVDKAFLTSHKGILLETELALTLIIFICFTASISAYMAAALLEFFITLAFLFLYATQYYQRFDRINWPCLVFGIILVSIFAYDAFKIYRTEMAPGASQGDQQ

SEQ ID NO: 26503 - protein, 115 aa, Homo sapiens
  REGION 1..115: note = ENSP00000412934
MEEPQRARSHTVTTTASSFAENFSTSSSSFAYDREFLRTLPGFLIVAEIGLCFNGSAFVLYLSAAVVDASSVSPERDSHNFNSWAASSFFAFLVTICYAGNTYFSFIAWRSRTIQ

SEQ ID NO: 26504 - protein, 173 aa, Homo sapiens
  REGION 1..173: note = ENSP00000307741
MEEPQRARSHTVTTTASSFAENFSTSSSSFAYDREFLRTLPGFLIVAEIVLGLLVWTLIAGTEYFRVPAFGWVMFVAVFYWVLTVFFLIIYITMTYTRIPQVPWTTVGLCFNGSAFVLYLSAAVVDASSVSPERDSHNFNSWAASSFFAFLVTICYAGNTYFSFIAWRSRTIQ

SEQ ID NO: 26505 - protein, 507 aa, Homo sapiens
  REGION 1..507: note = ENSP00000351682
MDPKLGRMAASLLAVLLLLLERGMFSSPSPPPALLEKVFQYIDLHQDEFVQTLKEWVAIESDSVQPVPRFRQELFRMMAVAADTLQRLGARVASVDMGPQQLPDGQSLPIPPVILAELGSDPTKGTVCFYGHLDVQPADRGDGWLTDPYVLTEVDGKLYGRGATDNKGPVLAWINAVSAFRALEQDLPVNIKFIIEGMEEAGSVALEELVEKEKDRFFSGVDYIVISDNLWISQRKPAITYGTRGNSYFMVEVKCRDQDFHSGTFGGILHEPMADLVALLGSLVDSSGHILVPGIYDEVVPLTEEEINTYKAIHLDLEEYRNSSRVEKFLFDTKEEILMHLWRYPSLSIHGIEGAFDEPGTKTVIPGRVIGKFSIRLVPHMNVSAVEKQVTRHLEDVFSKRNSSNKMVVSMTLGLHPWIANIDDTQYLAAKRAIRTVFGTEPDMIRDGSTIPIAKMFQEIVHKSVVLIPLGAVDDGEHSQNEKINRWNYIEGTKLFAAFFLEMAQLH

SEQ ID NO: 26506 - protein, 464 aa, Homo sapiens
  REGION 1..464: note = ENSP00000462096
MDPKLGRMTLKEWVAIESDSVQPVPRFRQELFRMMAVAADTLQRLGARVASVDMGPQQLPDGQSLPIPPVILAELGSDPTKGTVCFYGHLDVQPADRGDGWLTDPYVLTEVDGKLYGRGATDNKGPVLAWINAVSAFRALEQDLPVNIKFIIEGMEEAGSVALEELVEKEKDRFFSGVDYIVISDNLWISQRKPAITYGTRGNSYFMVEVKCRDQDFHSGTFGGILHEPMADLVALLGSLVDSSGHILVPGIYDEVVPLTEEEINTYKAIHLDLEEYRNSSRVEKFLFDTKEEILMHLWRYPSLSIHGIEGAFDEPGTKTVIPGRVIGKFSIRLVPHMNVSAVEKQVTRHLEDVFSKRNSSNKMVVSMTLGLHPWIANIDDTQYLAAKRAIRTVFGTEPDMIRDGSTIPIAKMFQEIVHKSVVLIPLGAVDDGEHSQNEKINRWNYIEGTKLFAAFFLEMAQLH

SEQ ID NO: 26507 - protein, 38 aa, Homo sapiens
  REGION 1..38: note = ENSP00000463807
  VARIANT 1: note = Any amino acid
XADRGDGWLTDPYVLTEGNFMDEERPTTKALSWLGSML

SEQ ID NO: 26508 - protein, 160 aa, Homo sapiens
  REGION 1..160: note = ENSP00000272133
MAFTFAAFCYMLSLVLCAALIFFAIWHIIAFDELRTDFKSPIDQCNPVHARERLRNIERICFLLRKLVLPEYSIHSLFCIMFLCAQEWLTLGLNVPLLFYHFWRYFHCPADSSELAYDPPVVMNADTLSYCQKEAWCKLAFYLLSFFYYLYCMIYTLVSS

SEQ ID NO: 26509 - protein, 555 aa, Homo sapiens
  REGION 1..555: note = ENSP00000475915
MEPVTKWSPKQVVDWTRGLDDCLQQYVHKFEREKINGEQLLQISHQDLEELGVTRIGHQELVLEAVDLLCALNYGLETDNMKNLVLKLRASSHNLQNYISSRRKSPAYDGNTSRKAPNEFLTSVVELIGAAKALLAWLDRAPFTGITDFSVTKNKIIQLCLDLTTTVQKDCFVAEMEDKVLTVVKVLNGICDKTIRSTTDPVMSQCACLEEVHLPNIKPGEGLGMYIKSTYDGLHVITGTTENSPADRSQKIHAGDEVIQVNQQTVVGWQLKNLVKKLRENPTGVVLLLKKRPTGSFNFTPAPLKNLRWKPPLVQTSPPPATTQSPESTMDTSLKKEKSAILDLYIPPPPAVPYSPRDENGSFVYGGSSKCKQPLPGPKGSESPNSFLDQESRRRRFTIADSDQLPGYSVETNILPTKMREKTPSYGKPRPLSMPADGNWMGIVDPFARPRGHGRKGEDALCRYFSNERIPPIIEESSSPPYRFSRPTTERHLVRGADYIRGSRCYINSDLHSSATIPFQEEGTKKKSGSSATKSSSTEPSLLVSWFTRLKLLTH

SEQ ID NO: 26510 - protein, 475 aa, Homo sapiens
  REGION 1..475: note = ENSP00000418975
MKNLVLKLRASSHNLQNYISSRRKSPAYDGNTSRKAPNEFLTSVVELIGAAKALLAWLDRAPFTGITDFSVTKNKIIQLCLDLTTTVQKDCFVAEMEDKVLTVVKVLNGICDKTIRSTTDPVMSQCACLEEVHLPNIKPGEGLGMYIKSTYDGLHVITGTTENSPADRSQKIHAGDEVIQVNQQTVVGWQLKNLVKKLRENPTGVVLLLKKRPTGSFNFTPAPLKNLRWKPPLVQTSPPPATTQSPESTMDTSLKKEKSAILDLYIPPPPAVPYSPRDENGSFVYGGSSKCKQPLPGPKGSESPNSFLDQESRRRRFTIADSDQLPGYSVETNILPTKMREKTPSYGKPRPLSMPADGNWMGIVDPFARPRGHGRKGEDALCRYFSNERIPPIIEESSSPPYRFSRPTTERHLVRGADYIRGSRCYINSDLHSSATIPFQEEGTKKKSGSSATKSSSTEPSLLVSWFTRLKLLTH

SEQ ID NO: 26511 - protein, 178 aa, Homo sapiens
  REGION 1..178: note = ENSP00000393225
NIKPGEGLGMYIKSTYDGLHVITGTTENVGWQLKNLVKKLRENPTGVVLLLKKRPTGSFNFTPAPLKNLRWKPPLVQTSPPPATTQSPESTMDTSLKKEKSAILDLYIPPPPAVPYSPRDENGSFVYGGSSKCKQPLPGPKGSESPNSFLDQESRRRRFTIADSDQLPGYSVETNILP

SEQ ID NO: 26512 - protein, 421 aa, Homo sapiens
  REGION 1..421: note = ENSP00000377470
MNRGFSRKSHTFLPKIFFRKMSSSGAKDKPELQFPFLQDEDTVATLLECKTLFILRGLPGSGKSTLARVIVDKYRDGTKMVSADAYKITPGARGAFSEEYKRLDEDLAAYCRRRDIRILVLDDTNHERERLEQLFEMADQYQYQVVLVEPKTAWRLDCAQLKEKNQWQLSADDLKKLKPGLEKDFLPLYFGWFLTKKSSETLRKAGQVFLEELGNHKAFKKELRQFVPGDEPREKMDLVTYFGKRPPGVLHCTTKFCDYGKAPGAEEYAQQDVLKKSYSKAFTLTISALFVTPKTTGARVELSEQQLQLWPSDVDKLSPTDNLPRGSRAHITLGCAADVEAVQTGLDLLEILRQEKGGSRGEEVGELSRGKLYSLGNGRWMLTLAKNMEVRAIFTGYYGKGKPVPTQGSRKGGALQSCTII

SEQ ID NO: 26513 - protein, 49 aa, Homo sapiens
  REGION 1..49: note = ENSP00000467641
MSSLGMSPGRRWTWSPTLERDPQACCIAQPSFVTTGRLPGQRSTLNKMC

SEQ ID NO: 26514 - protein, 164 aa, Homo sapiens
  REGION 1..164: note = ENSP00000468198
MDEDTVATLLECKTLFILRGLPGSGKSTLARVIVDKYRDGTKMVSADAYKITPGARGAFSEEYKRLDEDLAAYCRRRDIRILVLDDTNHERERLEQLFEMADQYQYQVVLVEPKTAWRLDCAQLKEKNQWQLSADDLKKLKPGLEKDFLPLYFGWFLTKKSSET

SEQ ID NO: 26515 - protein, 401 aa, Homo sapiens
  REGION 1..401: note = ENSP00000377466
MSSSGAKDKPELQFPFLQDEDTVATLLECKTLFILRGLPGSGKSTLARVIVDKYRDGTKMVSADAYKITPGARGAFSEEYKRLDEDLAAYCRRRDIRILVLDDTNHERERLEQLFEMADQYQYQVVLVEPKTAWRLDCAQLKEKNQWQLSADDLKKLKPGLEKDFLPLYFGWFLTKKSSETLRKAGQVFLEELGNHKAFKKELRQFVPGDEPREKMDLVTYFGKRPPGVLHCTTKFCDYGKAPGAEEYAQQDVLKKSYSKAFTLTISALFVTPKTTGARVELSEQQLQLWPSDVDKLSPTDNLPRGSRAHITLGCAADVEAVQTGLDLLEILRQEKGGSRGEEVGELSRGKLYSLGNGRWMLTLAKNMEVRAIFTGYYGKGKPVPTQGSRKGGALQSCTII

SEQ ID NO: 26516 - protein, 144 aa, Homo sapiens
  REGION 1..144: note = ENSP00000413104
MSSSGAKDKPELQFPFLQDEDTVATLLECKTLFILRGLPGSGKSTLARVIVDKYRDGTKMVSADAYKITPGARGAFSEEYKRLDEDLAAYCRRRDIRILVLDDTNHERERLEQLFEMADQYQYQVVLVEPKTAWRLDCAQLKEK

SEQ ID NO: 26517 - protein, 120 aa, Homo sapiens
  REGION 1..120: note = ENSP00000466807
MSSSGAKDKPELQFPFLQDEDTVATLLECKTLFILRGLPGSGKSTLARVIVDKYRDGTKMVSADAYKITPGARGAFSEEYKRLDEDLAAYCRRRDIRILVLDDTNHERERLEQLFEMADQ

SEQ ID NO: 26518 - protein, 153 aa, Homo sapiens
  REGION 1..153: note = ENSP00000468471
MSSSGAKDKPELQFPFLQDEDTVATLLECKTLFILRGLPGSGKSTLARVIVDKYRDGTKMVSADAYKITPGARGAFSEEYKRLDEDLAAYCRRRDIRILVLDDTNHERERLEQLFEMADQYQYQVVLVEPKTAWRLDCAQLKEKNQWQLSADD

SEQ ID NO: 26519 - protein, 92 aa, Homo sapiens
  REGION 1..92: note = ENSP00000384514
MNDYKLEEDPVTKERTFKRFAPRKGDKIYQEFKKLYFYSDAYRPLKFACETIIEEYEDEISSLIAQETHYLADKLCSEKSDLCETSANHTEL

SEQ ID NO: 26520 - protein, 92 aa, Homo sapiens; identical to SEQ ID NO: 26519
  REGION 1..92: note = ENSP00000317439

SEQ ID NO: 26521 - protein, 164 aa, Homo sapiens
  REGION 1..164: note = ENSP00000490477
MVADTCNPSNSGGQACRALMDEIEHDITKARQKKTKVGSFRINPDGTQERRKIPLAQSEAFLTDLLEKVCERMNDYKLEEDPVTKERTFKRFAPRKGDKIYQEFKKLYFYSDAYRPLKFACETIIEEYEDEISSLIAQETHYLADKLCSEKSDLCETSANHTEL

SEQ ID NO: 26522 - protein, 145 aa, Homo sapiens
  REGION 1..145: note = ENSP00000490060
MDEIEHDITKARQKKTKVGSFRINPDGTQERRKIPLAQSEAFLTDLLEKVCERMNDYKLEEDPVTKERTFKRFAPRKGDKIYQEFKKLYFYSDAYRPLKFACETIIEEYEDEISSLIAQETHYLADKLCSEKSDLCETSANHTEL

SEQ ID NO: 26523 - protein, 472 aa, Homo sapiens
  REGION 1..472: note = ENSP00000358513
MKSILDGLADTTFRTITTDLLYVGSNDIQYEDIKGDMASKLGYFPQKFPLTSFRGSPFQEKMTAGDNPQLVPADQVNITEFYNKSLSSFKENEENIQCGENFMDIECFMVLNPSQQLAIAVLSLTLGTFTVLENLLVLCVILHSRSLRCRPSYHFIGSLAVADLLGSVIFVYSFIDFHVFHRKDSRNVFLFKLGGVTASFTASVGSLFLTAIDRYISIHRPLAYKRIVTRPKAVVAFCLMWTIAIVIAVLPLLGWNCEKLQSVCSDIFPHIDETYLMFWIGVTSVLLLFIVYAYMYILWKAHSHAVRMIQRGTQKSIIIHTSEDGKVQVTRPDQARMDIRLAKTLVLILVVLIICWGPLLAIMVYDVFGKMNKLIKTVFAFCSMLCLLNSTVNPIIYALRSKDLRHAFRSMFPSCEGTAQPLDNSMGDSDCLHKHANNAASVHRAAESCIKSTVKIAKVTMSVSTDTSAEAL

SEQ ID NO: 26524 - protein, 472 aa, Homo sapiens; identical to SEQ ID NO: 26523
  REGION 1..472: note = ENSP00000358511

SEQ ID NO: 26525 - protein, 472 aa, Homo sapiens; identical to SEQ ID NO: 26523
  REGION 1..472: note = ENSP00000446819

SEQ ID NO: 26526 - protein, 36 aa, Homo sapiens
  REGION 1..36: note = ENSP00000355418
MKSILDGLADTTFRTITTDLLYVGSNDIQYEDIKGE

SEQ ID NO: 26527 - protein, 439 aa, Homo sapiens
  REGION 1..439: note = ENSP00000420188
MKSILDGLADTTFRTITTDLLGSPFQEKMTAGDNPQLVPADQVNITEFYNKSLSSFKENEENIQCGENFMDIECFMVLNPSQQLAIAVLSLTLGTFTVLENLLVLCVILHSRSLRCRPSYHFIGSLAVADLLGSVIFVYSFIDFHVFHRKDSRNVFLFKLGGVTASFTASVGSLFLTAIDRYISIHRPLAYKRIVTRPKAVVAFCLMWTIAIVIAVLPLLGWNCEKLQSVCSDIFPHIDETYLMFWIGVTSVLLLFIVYAYMYILWKAHSHAVRMIQRGTQKSIIIHTSEDGKVQVTRPDQARMDIRLAKTLVLILVVLIICWGPLLAIMVYDVFGKMNKLIKTVFAFCSMLCLLNSTVNPIIYALRSKDLRHAFRSMFPSCEGTAQPLDNSMGDSDCLHKHANNAASVHRAAESCIKSTVKIAKVTMSVSTDTSAEAL

SEQ ID NO: 26528 - protein, 472 aa, Homo sapiens; identical to SEQ ID NO: 26523
  REGION 1..472: note = ENSP00000412192

SEQ ID NO: 26529 - protein, 78 aa, Homo sapiens
  REGION 1..78: note = ENSP00000446702
MKSILDGLADTTFRTITTDLLYVGSNDIQYEDIKGDMASKLGYFPQKFPLTSFRGSPFQEKMTAGDNPQLVPADQVNI

SEQ ID NO: 26530 - protein, 372 aa, Homo sapiens
  REGION 1..372: note = ENSP00000242338
MAAPVPWACCAVLAAAAAVVYAQRHSPQEAPHVQYERLGSDVTLPCGTANWDAAVTWRVNGTDLAPDLLNGSQLVLHGLELGHSGLYACFHRDSWHLRHQVLLHVGLPPREPVLSCRSNTYPKGFYCSWHLPTPTYIPNTFNVTVLHGSKIMVCEKDPALKNRCHIRYMHLFSTIKYKVSISVSNALGHNATAITFDEFTIVKPDPPENVVARPVPSNPRRLEVTWQTPSTWPDPESFPLKFFLRYRPLILDQWQHVELSDGTAHTITDAYAGKEYIIQVAAKDNEIGTWSDWSVAAHATPWTEEPRHLTTEAQAAETTTSTTSSLAPPPTTKICDPGELGSGGGPSAPFLVSVPITLALAAAAATASSLLI

SEQ ID NO: 26531 - protein, 372 aa, Homo sapiens; identical to SEQ ID NO: 26530
  REGION 1..372: note = ENSP00000368265

SEQ ID NO: 26532 - protein, 256 aa, Homo sapiens
  REGION 1..256: note = ENSP00000388082
MAAPVPWACCAVLAAAAAVVYAQRHSPQEAPHVQYERLGSDVTLPCGTANWDAAVTWRVNGTDLAPDLLNGSQLVLHGLELGHSGLYACFHRDSWHLRHQVLLHVGLPPREPVLSCRSNTYPKGFYCSWHLPTPTYIPNTFNVTVLHGSKIMVCEKDPALKNRCHIRYMHLFSTIKYKVSISVSNALGHNATAITFDEFTIVKPDPPENVVARPVPSNPRRLEVTWQTPSTWPDPESFPLKFFLRYRPLILDQWQH

SEQ ID NO: 26533 - protein, 372 aa, Homo sapiens; identical to SEQ ID NO: 26530
  REGION 1..372: note = ENSP00000480451

SEQ ID NO: 26534 - protein, 41 aa, Homo sapiens
  REGION 1..41: note = ENSP00000491080
MGTATRRKPHLLLVAAVALVSSSGEDTEAQKSSITFPRSHS

SEQ ID NO: 26535 - protein, 1040 aa, Homo sapiens
  REGION 1..1040: note = ENSP00000492617
MGTATRRKPHLLLVAAVALVSSSAWSSALGSQTTFGPVFEDQPLSVLFPEESTEEQVLLACRARASPPATYRWKMNGTEMKLEPGSRHQLVGGNLVIMNPTKAQDAGVYQCLASNPVGTVVSREAILRFGFLQEFSKEERDPVKAHEGWGVMLPCNPPAHYPGLSYRWLLNEFPNFIPTDGRHFVSQTTGNLYIARTNASDLGNYSCLATSHMDFSTKSVFSKFAQLNLAAEDTRLFAPSIKARFPAETYALVGQQVTLECFAFGNPVPRIKWRKVDGSLSPQWTTAEPTLQIPSVSFEDEGTYECEAENSKGRDTVQGRIIVQAQPEWLKVISDTEADIGSNLRWGCAAAGKPRPTVRWLRNGEPLASQNRVEVLAGDLRFSKLSLEDSGMYQCVAENKHGTIYASAELAVQALAPDFRLNPVRRLIPAARGGEILIPCQPRAAPKAVVLWSKGTEILVNSSRVTVTPDGTLIIRNISRSDEGKYTCFAENFMGKANSTGILSVRDATKITLAPSSADINLGDNLTLQCHASHDPTMDLTFTWTLDDFPIDFDKPGGHYRRTNVKETIGDLTILNAQLRHGGKYTCMAQTVVDSASKEATVLVRGPPGPPGGVVVRDIGDTTIQLSWSRGFDNHSPIAKYTLQARTPPAGKWKQVRTNPANIEGNAETAQVLGLTPWMDYEFRVIASNILGTGEPSGPSSKIRTREAAPSVAPSGLSGGGGAPGELIVNWTPMSREYQNGDGFGYLLSFRRQGSTHWQTARVPGADAQYFVYSNESVRPYTPFEVKIRSYNRRGDGPESLTALVYSAEEEPRVAPTKVWAKGVSSSEMNVTWEPVQQDMNGILLGYEIRYWKAGDKEAAADRVRTAGLDTSARVSGLHPNTKYHVTVRAYNRAGTGPASPSANATTMKPPPRRPPGNISWTFSSSSLSIKWDPVVPFRNESAVTGYKMLYQNDLHLTPTLHLTGKNWIEIPVPEDIGHALVQIRTTGPGGDGIPAEVHIVRNGGTSMMVENMAVRPAPHPGTVISHSVAMLILIGSLEL

SEQ ID NO: 26536 - protein, 1040 aa, Homo sapiens; identical to SEQ ID NO: 26535
  REGION 1..1040: note = ENSP00000330633

SEQ ID NO: 26537 - protein, 1085 aa, Homo sapiens
  REGION 1..1085: note = ENSP00000491474
MGTATRRKPHLLLVAAVALVSSSAWSSALGSQTTFGPVFEDQPLSVLFPEESTEEQVLLACRARASPPATYRWKMNGTEMKLEPGSRHQLVGGNLVIMNPTKAQDAGVYQCLASNPVGTVVSREAILRFGFLQEFSKEERDPVKAHEGWGVMLPCNPPAHYPGLSYRWLLNEFPNFIPTDGRHFVSQTTGNLYIARTNASDLGNYSCLATSHMDFSTKSVFSKFAQLNLAAEDTRLFAPSIKARFPAETYALVGQQVTLECFAFGNPVPRIKWRKVDGSLSPQWTTAEPTLQIPSVSFEDEGTYECEAENSKGRDTVQGRIIVQAQPEWLKVISDTEADIGSNLRWGCAAAGKPRPTVRWLRNGEPLASQNRVEVLAGDLRFSKLSLEDSGMYQCVAENKHGTIYASAELAVQALAPDFRLNPVRRLIPAARGGEILIPCQPRAAPKAVVLWSKGTEILVNSSRVTVTPDGTLIIRNISRSDEGKYTCFAENFMGKANSTGILSVRDATKITLAPSSADINLGDNLTLQCHASHDPTMDLTFTWTLDDFPIDFDKPGGHYRRTNVKETIGDLTILNAQLRHGGKYTCMAQTVVDSASKEATVLVRGPPGPPGGVVVRDIGDTTIQLSWSRGFDNHSPIAKYTLQARTPPAGKWKQVRTNPANIEGNAETAQVLGLTPWMDYEFRVIASNILGTGEPSGPSSKIRTREAAPSVAPSGLSGGGGAPGELIVNWTPMSREYQNGDGFGYLLSFRRQGSTHWQTARVPGADAQYFVYSNESVRPYTPFEVKIRSYNRRGDGPESLTALVYSAEEEPRVAPTKVWAKGVSSSEMNVTWEPVQQDMNGILLGYEIRYWKAGDKEAAADRVRTAGLDTSARVSGLHPNTKYHVTVRAYNRAGTGPASPSANATTMKPPPRRPPGNISWTFSSSSLSIKWDPVVPFRNESAVTGYKMLYQNDLHLTPTLHLTGKNWIEIPVPEDIGHALVQIRTTGPGGDGIPAEVHIVRNGEMALWDPIRTPPLESSPRPGRNTRHEQVEELERSAHLTILQSKEEGQALGPRALPPSPSSSSKDPDAVPDNSLGAPACPSG

SEQ ID NO: 26538 - protein, 41 aa, Homo sapiens; identical to SEQ ID NO: 26534
  REGION 1..41: note = ENSP00000491665

SEQ ID NO: 26539 - protein, 1040 aa, Homo sapiens; identical to SEQ ID NO: 26535
  REGION 1..1040: note = ENSP00000491671

SEQ ID NO: 26540 - protein, 764 aa, Homo sapiens
  REGION 1..764: note = ENSP00000491959
MGTATRRKPHLLLVAAVALVSSSAWSSALGSQTTFGPVFEDQPLSVLFPEESTEEQVLLACRARASPPATYRWKMNGTEMKLEPGSRHQLVGGNLVIMNPTKAQDAGVYQCLASNPVGTVVSREAILRFGFLQEFSKEERDPVKAHEGWGVMLPCNPPAHYPGLSYRWLLNEFPNFIPTDGRHFVSQTTGNLYIARTNASDLGNYSCLATSHMDFSTKSVFSKFAQLNLAAEDTRLFAPSIKARFPAETYALVGQQVTLECFAFGNPVPRIKWRKVDGSLSPQWTTAEPTLQIPSVSFEDEGTYECEAENSKGRDTVQGRIIVQAQPEWLKVISDTEADIGSNLRWGCAAAGKPRPTVRWLRNGEPLASQNRVEVLAGDLRFSKLSLEDSGMYQCVAENKHGTIYASAELAVQALAPDFRLNPVRRLIPAARGGEILIPCQPRAAPKAVVLWSKGTEILVNSSRVTVTPDGTLIIRNISRSDEGKYTCFAENFMGKANSTGILSVRDATKITLAPSSADINLGDNLTLQCHASHDPTMDLTFTWTLDDFPIDFDKPGGHYRRTNVKETIGDLTILNAQLRHGGKYTCMAQTVVDSASKEATVLVRGPPGPPGGVVVRDIGDTTIQLSWSRGFDNHSPIAKYTLQARTPPAGKWKQVRTNPANIEGNAETAQVLGLTPWMDYEFRVIASNILGTGEPSGPSSKIRTREAAPSVAPSGLSGGGGAPGELIVNWTAGQHSLADRPGAWRRCPVLCLQQRERPALHAL

SEQ ID NO: 26541 - protein, 1040 aa, Homo sapiens; identical to SEQ ID NO: 26535
  REGION 1..1040: note = ENSP00000492495

SEQ ID NO: 26542 - protein, 1011 aa, Homo sapiens
  REGION 1..1011: note = ENSP00000489754
  VARIANT 1: note = Any amino acid
XPTDGRHFVSQTTGNLYIARTNASDLGNYSCLATSHMDFSTKSVFSKFAQLNLAAEDTRLFAPSIKARFPAETYALVGQQVTLECFAFGNPVPRIKWRKVDGSLSPQWTTAEPTLQIPSVSFEDEGTYECEAENSKGRDTVQGRIIVQAQPEWLKVISDTEADIGSNLRWGCAAAGKPRPTVRWLRNGEPLASQNRVEVLAGDLRFSKLSLEDSGMYQCVAENKHGTIYASAELAVQALAPDFRLNPVRRLIPAARGGEILIPCQPRAAPKAVVLWSKGTEILVNSSRVTVTPDGTLIIRNISRSDEGKYTCFAENFMGKANSTGILSVRDATKITLAPSSADINLGDNLTLQCHASHDPTMDLTFTWTLDDFPIDFDKPGGHYRRTNVKETIGDLTILNAQLRHGGKYTCMAQTVVDSASKEATVLVRGPPGPPGGVVVRDIGDTTIQLSWSRGFDNHSPIAKYTLQARTPPAGKWKQVRTNPANIEGNAETAQVLGLTPWMDYEFRVIASNILGTGEPSGPSSKIRTREAAPSVAPSGLSGGGGAPGELIVNWTPMSREYQNGDGFGYLLSFRRQGSTHWQTARVPGADAQYFVYSNESVRPYTPFEVKIRSYNRRGDGPESLTALVYSAEEEPRVAPTKVWAKGVSSSEMNVTWEPVQQDMNGILLGYEIRYWKAGDKEAAADRVRTAGLDTSARVSGLHPNTKYHVTVRAYNRAGTGPASPSANATTMKPPPRRPPGNISWTFSSSSLSIKWDPVVPFRNESAVTGYKMLYQNDLHLTPTLHLTGKNWIEIPVPEDIGHALVQIRTTGPGGDGIPAEVHIVRNGGAAPPLPLSPREIQDPPRYLRGSFPPRPTPISTRKGKWKAGRNQVQSSLRTASPPPFYPAPRTSPRAREGRRVQGEAEDQPAIANGLQSTVGVGLRRPPSRPLPGLQLALHKHDGGEHGSPPSTTPWHRHFPLRGDADPHRLPGALILEPLPLRRSWTPPPTDTASPFLLPRWPDTVPESGWF

SEQ ID NO: 26543 - protein, 473 aa, Homo sapiens
  REGION 1..473: note = ENSP00000491982
  VARIANT 1: note = Any amino acid
XIKWRKVDGSLSPQWTTAEPTLQIPSVSFEDEGTYECEAENSKGRDTVQGRIIVQAQPEWLKVISDTEADIGSNLRWGCAAAGKPRPTVRWLRNGEPLASQNRVEVLAGDLRFSKLSLEDSGMYQCVAENKHGTIYASAELAVQALAPDFRLNPVRRLIPAARGGEILIPCQPRAAPKAVVLWSKGTEILVNSSRVTVTPDGTLIIRNISRSDEGKYTCFAENFMGKANSTGILSVRDATKITLAPSSADINLGDNLTLQCHASHDPTMDLTFTWTLDDFPIDFDKPGGHYRRTNVKETIGDLTILNAQLRHGGKYTCMAQTVVDSASKEATVLVRGPPGPPGGVVVRDIGDTTIQLSWSRGFDNHSPIAKYTLQARTPPAGKWKQVRTNPANIEGNAETAQVLGLTPWMDYEFRVIASNILGTGEPSGPSSKIRTREAAPSVAPSGLSGGGGAPGELIVNWTQRERPALHAL

SEQ ID NO: 26544 - protein, 115 aa, Homo sapiens
  REGION 1..115: note = ENSP00000491680
  VARIANT 1: note = Any amino acid
XGKANSTGILSVRDATKITLAPSSADINLGDNLTLQCHASHDPTMDLTFTWTLDDFPIDFDKPGGHYRRTNVKETIGDLTILNAQLRHGGKYTCMAQTVVDSASKEATVLVRGPK

SEQ ID NO: 26545 - protein, 527 aa, Homo sapiens
  REGION 1..527: note = ENSP00000492457
  VARIANT 1: note = Any amino acid
XAQTVVDSASKEATVLVRGPPGPPGGVVVRDIGDTTIQLSWSRGFDNHSPIAKYTLQARTPPAGKWKQVRTNPANIEGNAETAQVLGLTPWMDYEFRVIASNILGTGEPSGPSSKIRTREAAPSVAPSGLSGGGGAPGELIVNWTPMSREYQNGDGFGYLLSFRRQGSTHWQTARVPGADAQYFVYSNESVRPYTPFEVKIRSYNRRGDGPESLTALVYSAEEEPRVAPTKVWAKGVSSSEMNVTWEPVQQDMNGILLGYEIRYWKAGDKEAAADRVRTAGLDTSARVSGLHPNTKYHVTVRAYNRAGTGPASPSANATTMKPPPRRPPGNISWTFSSSSLSIKWDPVVPFRNESAVTGYKMLYQNDLHLTPTLHLTGKNWIEIPVPEDIGHALVQIRTTGPGGDGIPAEVHIVRNGGAAPPLPLSPREIQDPPRYLRGSFPPRPTPISTRKGKWKAGRNQVQSSLRTASPPPFYPAPRTSPRAREGRRVQGEAEDQPAIANGLQSTVGVGLRRPPSRPLPGLQLAL

SEQ ID NO: 26546 - protein, 1028 aa, Homo sapiens
  REGION 1..1028: note = ENSP00000263665
MMFPWKQLILLSFIGCLGGELLLQGPVFIKEPSNSIFPVGSEDKKITLHCEARGNPSPHYRWQLNGSDIDMSMEHRYKLNGGNLVVINPNRNWDTGTYQCFATNSLGTIVSREAKLQFAYLENFKTKMRSTVSVREGQGVVLLCGPPPHSGELSYAWIFNEYPSFVEEDSRRFVSQETGHLYISKVEPSDVGNYTCVVTSMVTNARVLGSPTPLVLRSDGVMGEYEPKIEVQFPETLPAAKGSTVKLECFALGNPIPQINWRRSDGLPFSSKIKLRKFSGVLEIPNFQQEDAGSYECIAENSRGKNVARGRLTYYAKPHWVQLIKDVEIAVEDSLYWECRASGKPKPSYRWLKNGAALVLEERTQIENGALTISNLSVTDSGMFQCIAENKHGLVYSSAELKVVASAPDFSKNPMKKLVQVQVGSLVSLDCKPRASPRALSSWKKGDVSVQEHERISLLNDGGLKIANVTKADAGTYTCMAENQFGKANGTTHLVVTEPTRITLAPSNMDVSVGESVILPCQVQHDPLLDIIFTWYFNGALADFKKDGSHFEKVGGSSSGDLMIRNIQLKHSGKYVCMVQTGVDSVSSAADLIVRGSPGPPENVKVDEITDTTAQLSWKEGKDNHSPVISYSIQARTPFSVGWQTVTTVPEVIDGKTHTATVVELNPWVEYEFRVVASNKIGGGEPSLPSEKVRTEEAVPEVPPSEVNGGGGSRSELVITWDPVPEELQNGEGFGYVVAFRPLGVTTWIQTVVTSPDTPRYVFRNESIVPYSPYEVKVGVYNNKGEGPFSPVTTVFSAEEEPTVAPSQVSANSLSSSEIEVSWNTIPWKLSNGHLLGYEVRYWNGGGKEESSSKMKVAGNETSARLRGLKSNLAYYTAVRAYNSAGAGPFSATVNVTTKKTPPSQPPGNVVWNATDTKVLLNWEQVKAMENESEVTGYKVFYRTSSQNNVQVLNTNKTSAELVLPIKEDYIIEVKATTDGGDGTSSEQIRIPRITSMDARGSTSAISNVHPMSSYMPIVLFLIVYVLW

SEQ ID NO: 26547 - protein, 116 aa, Homo sapiens
  REGION 1..116: note = ENSP00000408594
MRLPWELLVLQSFILCLADDSTLHGPIFIQEPSPVMFPLDSEEKKVKLNCEVKGNPKPHIRWKLNGTDVDTGMDFRYSVVEGSLLINNPNKTQDAGTYQCTATNSFGTIVSREAKL

SEQ ID NO: 26548 - protein, 232 aa, Homo sapiens
  REGION 1..232: note = ENSP00000396719
MRLPWELLVLQSFILCLADDSTLHGPIFIQEPSPVMFPLDSEEKKVKLNCEVKGNPKPHIRWKLNGTDVDTGMDFRYSVVEGSLLINNPNKTQDAGTYQCTATNSFGTIVSREAKLQFAYLDNFKTRTRSTVSVRRGQGMVLLCGPPPHSGELSYAWIFNEYPSYQDNRRFVSQETGNLYIAKVEKSDVGNYTCVVTNTVTNHKVLGPPTPLILRNDVQYQLLSGEELMESQ

SEQ ID NO: 26549 - protein, 54 aa, Homo sapiens
  REGION 1..54: note = ENSP00000390560
MRLPWELLVLQSFILCLADDSTLHGPIFIQEPSPVMFPLDSEEKKVKLNCEVKG

SEQ ID NO: 26550 - protein, 1026 aa, Homo sapiens
  REGION 1..1026: note = ENSP00000396010
MRLPWELLVLQSFILCLADDSTLHGPIFIQEPSPVMFPLDSEEKKVKLNCEVKGNPKPHIRWKLNGTDVDTGMDFRYSVVEGSLLINNPNKTQDAGTYQCTATNSFGTIVSREAKLQFAYLDNFKTRTRSTVSVRRGQGMVLLCGPPPHSGELSYAWIFNEYPSYQDNRRFVSQETGNLYIAKVEKSDVGNYTCVVTNTVTNHKVLGPPTPLILRNDGVMGEYEPKIEVQFPETVPTAKGATVKLECFALGNPVPTIIWRRADGKPIARKARRHKSNGILEIPNFQQEDAGLYECVAENSRGKNVARGQLTFYAQPNWIQKINDIHVAMEENVFWECKANGRPKPTYKWLKNGEPLLTRDRIQIEQGTLNITIVNLSDAGMYQCLAENKHGVIFSNAELSVIAVGPDFSRTLLKRVTLVKVGGEVVIECKPKASPKPVYTWKKGRDILKENERITISEDGNLRIINVTKSDAGSYTCIATNHFGTASSTGNLVVKDPTRVMVPPSSMDVTVGESIVLPCQVTHDHSLDIVFTWSFNGHLIDFDRDGDHFERVGGQDSAGDLMIRNIQLKHAGKYVCMVQTSVDRLSAAADLIVRGPPGPPEAVTIDEITDTTAQLSWRPGPDNHSPITMYVIQARTPFSVGWQAVSTVPELIDGKTFTATVVGLNPWVEYEFRTVAANVIGIGEPSRPSEKRRTEEALPEVTPANVSGGGGSKSELVITWETVPEELQNGRGFGYVVAFRPYGKMIWMLTVLASADASRYVFRNESVHPFSPFEVKVGVFNNKGEGPFSPTTVVYSAEEEPTKPPASIFARSLSATDIEVFWASPLEKNRGRIQGYEVKYWRHEDKEENARKIRTVGNQTSTKITNLKGSVLYHLAVKAYNSAGTGPSSATVNVTTRKPPPSQPPGNIIWNSSDSKIILNWDQVKALDNESEVKGYKVLYRWNRQSSTSVIETNKTSVELSLPFDEDYIIEIKPFSDGGDGSSSEQIRIPKISNAYARGSGASTSNACTLSAISTIMISLTARSSL

SEQ ID NO: 26551 - protein, 1026 aa, Homo sapiens; identical to SEQ ID NO: 26550
  REGION 1..1026: note = ENSP00000380602

SEQ ID NO: 26552 - protein, 137 aa, Homo sapiens
  REGION 1..137: note = ENSP00000404085
MRLPWELLVLQSFILCLAGSQTDFWSLLGVLPALEADDSTLHGPIFIQEPSPVMFPLDSEEKKVKLNCEVKGNPKPHIRWKLNGTDVDTGMDFRYSVVEGSLLINNPNKTQDAGTYQCTATNSFGTIVSREAKLQFA

SEQ ID NO: 26553 - protein, 698 aa, Homo sapiens
  REGION 1..698: note = ENSP00000380600
MEENVFWECKANGRPKPTYKWLKNGEPLLTRDRIQIEQGTLNITIVNLSDAGMYQCLAENKHGVIFSNAELSVIAVGPDFSRTLLKRVTLVKVGGEVVIECKPKASPKPVYTWKKGRDILKENERITISEDGNLRIINVTKSDAGSYTCIATNHFGTASSTGNLVVKDPTRVMVPPSSMDVTVGESIVLPCQVTHDHSLDIVFTWSFNGHLIDFDRDGDHFERVGGQDSAGDLMIRNIQLKHAGKYVCMVQTSVDRLSAAADLIVRGPPGPPEAVTIDEITDTTAQLSWRPGPDNHSPITMYVIQARTPFSVGWQAVSTVPELIDGKTFTATVVGLNPWVEYEFRTVAANVIGIGEPSRPSEKRRTEEALPEVTPANVSGGGGSKSELVITWETVPEELQNGRGFGYVVAFRPYGKMIWMLTVLASADASRYVFRNESVHPFSPFEVKVGVFNNKGEGPFSPTTVVYSAEEEPTKPPASIFARSLSATDIEVFWASPLEKNRGRIQGYEVKYWRHEDKEENARKIRTVGNQTSTKITNLKGSVLYHLAVKAYNSAGTGPSSATVNVTTRKPPPSQPPGNIIWNSSDSKIILNWDQVKALDNESEVKGYKVLYRWNRQSSTSVIETNKTSVELSLPFDEDYIIEIKPFSDGGDGSSSEQIRIPKISNAYARGSGASTSNACTLSAISTIMISLTARSSL

SEQ ID NO: 26554 - protein, 143 aa, Homo sapiens
  REGION 1..143: note = ENSP00000422120
NDIHVAMEENVFWECKANGRPKPTYKWLKNGEPLLTRDRIQIEQGTLNITIVNLSDAGMYQCLAENKHGVIFSNAELSVIAVGPDFSRTLLKRVTLVKVGGEVVIECKPKASPKPVYTWKKGRDILKENESVHQGFGSGSAPL

SEQ ID NO: 26555 - protein, 1026 aa, Homo sapiens; identical to SEQ ID NO: 26550
  REGION 1..1026: note = ENSP00000413642

SEQ ID NO: 26556 - protein, 911 aa, Homo sapiens
  REGION 1..911: note = ENSP00000433575
MASSWKLMLFLSVTMCLSEYSKSLPGLSTSYAALLRIKKSSSSSLFGSKTRPRYSSPSLGTLSASSPSWLGAAQNYYSPINLYHSSDAFKQDESVDYGPVFVQEPDDIIFPTDSDEKKVALNCEVRGNPVPSYRWLRNGTEIDLESDYRYSLIDGTFIISNPSEAKDSGHYQCLATNTVGSILSREATLQFAYLGNFSGRTRSAVSVREGQGVVLMCSPPPHSPEIIYSWVFNEFPSFVAEDSRRFISQETGNLYISKVQTSDVGSYICLVKNTVTNARVLSPPTPLTLRNDGVMGEYEPKIEVHFPFTVTAAKGTTVKMECFALGNPVPTITWMKVNGYIPSKARLRKSQAVLEIPNVQLDDAGIYECRAENSRGKNSFRGQLQVYTYPHWVEKLNDTQLDSGSPLRWECKATGKPRPTYRWLKNGVPLSPQSRVEMVNGVLMIHNVNQSDAGMYQCLAENKYGAIYASAELKILASAPTFALNQLKKTIIVTKDQEVVIECKPQGSPKPTISWKKGDRAVRENKRIAILPDGSLRILNASKSDEGKYVCRGENVFGSAEIIASLSVKEPTRIELTPKRTELTVGESIVLNCKAIHDASLDVTFYWTLKGQPIDFEEEGGHFESIRAQASSADLMIRNILLMHAGRYGCRVQTTADSVSDEAELLVRGPPGPPGIVIVEEITESTATLSWSPAADNHSPISSYNLQARSPFSLGWQTVKTVPEIITGDMESAMAVDLNPWVEYEFRVVATNPIGTGDPSTPSRMIRTNEAVPKTAPTNVSGRSGRRHELVIAWEPVSEEFQNGEGFGYIVAFRPNGTRGWKEKMVTSSEASKFIYRDESVPPLTPFEVKVGVYNNKGDGPFSQIVVICSAEGEPSAAPTDVKATSVSVSEILVAWKHIKESLGRPQGFEV

SEQ ID NO: 26557 - protein, 1100 aa, Homo sapiens
  REGION 1..1100: note = ENSP00000436185
MASSWKLMLFLSVTMCLSEYSKSLPGLSTSYAALLRIKKSSSSSLFGSKTRPRYSSPSLGTLSASSPSWLGAAQNYYSPINLYHSSDAFKQDESVDYGPVFVQEPDDIIFPTDSDEKKVALNCEVRGNPVPSYRWLRNGTEIDLESDYRYSLIDGTFIISNPSEAKDSGHYQCLATNTVGSILSREATLQFAYLGNFSGRTRSAVSVREGQGVVLMCSPPPHSPEIIYSWVFNEFPSFVAEDSRRFISQETGNLYISKVQTSDVGSYICLVKNTVTNARVLSPPTPLTLRNDGVMGEYEPKIEVHFPFTVTAAKGTTVKMECFALGNPVPTITWMKVNGYIPSKARLRKSQAVLEIPNVQLDDAGIYECRAENSRGKNSFRGQLQVYTYPHWVEKLNDTQLDSGSPLRWECKATGKPRPTYRWLKNGVPLSPQSRVEMVNGVLMIHNVNQSDAGMYQCLAENKYGAIYASAELKILASAPTFALNQLKKTIIVTKDQEVVIECKPQGSPKPTISWKKGDRAVRENKRIAILPDGSLRILNASKSDEGKYVCRGENVFGSAEIIASLSVKEPTRIELTPKRTELTVGESIVLNCKAIHDASLDVTFYWTLKGQPIDFEEEGGHFESIRAQASSADLMIRNILLMHAGRYGCRVQTTADSVSDEAELLVRGPPGPPGIVIVEEITESTATLSWSPAADNHSPISSYNLQARSPFSLGWQTVKTVPEIITGDMESAMAVDLNPWVEYEFRVVATNPIGTGDPSTPSRMIRTNEAVPKTAPTNVSGRSGRRHELVIAWEPVSEEFQNGEGFGYIVAFRPNGTRGWKEKMVTSSEASKFIYRDESVPPLTPFEVKVGVYNNKGDGPFSQIVVICSAEGEPSAAPTDVKATSVSVSEILVAWKHIKESLGRPQGFEVGYWKDMEQEDTAETVKTRGNESFVILTGLEGNTLYHFTVRAYNGAGYGPPSSEVSATTKKSPPSQAPSNLRWEQQGSQVSLGWEPVIPLANESEVVGYKVFYRQEGHSNSQVIETQKLQAVVPLPDAGVYIIEVRAYSEGGDGTASSQIRVPSYSGGKITSAQSTLHSLSTSSSSVTLLLALMIPSTSW

SEQ ID NO: 26558 - protein, 1100 aa, Homo sapiens; identical to SEQ ID NO: 26557
  REGION 1..1100: note = ENSP00000435637

SEQ ID NO: 26559 - protein, 1026 aa, Homo sapiens
  REGION 1..1026: note = ENSP00000393229
MASSWKLMLFLSVTMCLSESVDYGPVFVQEPDDIIFPTDSDEKKVALNCEVRGNPVPSYRWLRNGTEIDLESDYRYSLIDGTFIISNPSEAKDSGHYQCLATNTVGSILSREATLQFAYLGNFSGRTRSAVSVREGQGVVLMCSPPPHSPEIIYSWVFNEFPSFVAEDSRRFISQETGNLYISKVQTSDVGSYICLVKNTVTNARVLSPPTPLTLRNDGVMGEYEPKIEVHFPFTVTAAKGTTVKMECFALGNPVPTITWMKVNGYIPSKARLRKSQAVLEIPNVQLDDAGIYECRAENSRGKNSFRGQLQVYTYPHWVEKLNDTQLDSGSPLRWECKATGKPRPTYRWLKNGVPLSPQSRVEMVNGVLMIHNVNQSDAGMYQCLAENKYGAIYASAELKILASAPTFALNQLKKTIIVTKDQEVVIECKPQGSPKPTISWKKGDRAVRENKRIAILPDGSLRILNASKSDEGKYVCRGENVFGSAEIIASLSVKEPTRIELTPKRTELTVGESIVLNCKAIHDASLDVTFYWTLKGQPIDFEEEGGHFESIRAQASSADLMIRNILLMHAGRYGCRVQTTADSVSDEAELLVRGPPGPPGIVIVEEITESTATLSWSPAADNHSPISSYNLQARSPFSLGWQTVKTVPEIITGDMESAMAVDLNPWVEYEFRVVATNPIGTGDPSTPSRMIRTNEAVPKTAPTNVSGRSGRRHELVIAWEPVSEEFQNGEGFGYIVAFRPNGTRGWKEKMVTSSEASKFIYRDESVPPLTPFEVKVGVYNNKGDGPFSQIVVICSAEGEPSAAPTDVKATSVSVSEILVAWKHIKESLGRPQGFEVGYWKDMEQEDTAETVKTRGNESFVILTGLEGNTLYHFTVRAYNGAGYGPPSSEVSATTKKSPPSQAPSNLRWEQQGSQVSLGWEPVIPLANESEVVGYKVFYRQEGHSNSQVIETQKLQAVVPLPDAGVYIIEVRAYSEGGDGTASSQIRVPSYSGGKITSAQSTLHSLSTSSSSVTLLLALMIPSTSW

SEQ ID NO: 26560 - protein, 1022 aa, Homo sapiens [sequence omitted]

SEQ ID NO: 26561 - protein, 1084 aa, Homo sapiens
  REGION 1..1084: note = ENSP00000279463
LTEYSKSLPGLSTSYAALLRIKKSSSSSLFGSKTRPRYSSPSLGTLSASSPSWLGAAQNYYSPINLYHSSDAFKQDESVDYGPVFVQEPDDIIFPTDSDEKKVALNCEVRGNPVPSYRWLRNGTEIDLESDYRYSLIDGTFIISNPSEAKDSGHYQCLATNTVGSILSREATLQFAYLGNFSGRTRSAVSVREGQGVVLMCSPPPHSPEIIYSWVFNEFPSFVAEDSRRFISQETGNLYISKVQTSDVGSYICLVKNTVTNARVLSPPTPLTLRNDGVMGEYEPKIEVHFPFTVTAAKGTTVKMECFALGNPVPTITWMKVNGYIPSKARLRKSQAVLEIPNVQLDDAGIYECRAENSRGKNSFRGQLQVYTYPHWVEKLNDTQLDSGSPLRWECKATGKPRPTYRWLKNGVPLSPQSRVEMVNGVLMIHNVNQSDAGMYQCLAENKYGAIYASAELKILASAPTFALNQLKKTIIVTKDQEVVIECKPQGSPKPTISWKKGDRAVRENKRIAILPDGSLRILNASKSDEGKYVCRGENVFGSAEIIASLSVKEPTRIELTPKRTELTVGESIVLNCKAIHDASLDVTFYWTLKGQPIDFEEEGGHFESIRAQASSADLMIRNILLMHAGRYGCRVQTTADSVSDEAELLVRGPPGPPGIVIVEEITESTATLSWSPAADNHSPISSYNLQARSPFSLGWQTVKTVPEIITGDMESAMAVDLNPWVEYEFRVVATNPIGTGDPSTPSRMIRTNEAVPKTAPTNVSGRSGRRHELVIAWEPVSEEFQNGEGFGYIVAFRPNGTRGWKEKMVTSSEASKFIYRDESVPPLTPFEVKVGVYNNKGDGPFSQIVVICSAEGEPSAAPTDVKATSVSVSEILVAWKHIKESLGRPQGFEVGYWKDMEQEDTAETVKTRGNESFVILTGLEGNTLYHFTVRAYNGAGYGPPSSEVSATTKKSPPSQAPSNLRWEQQGSQVSLGWEPVIPLANESEVVGYKVFYRQEGHSNSQVIETQKLQAVVPLPDAGVYIIEVRAYSEGGDGTASSQIRVPSYSGGKITSAQSTLHSLSTSSSSVTLLLALMIPSTSW

SEQ ID NO: 26562 - protein, 1308 aa, Homo sapiens
  REGION 1..1308: note = ENSP00000479811
MGSVTGAVLKTLLLLSTQNWNRVEAGNSYDCDDPLVSALPQASFSSSSELSSSHGPGFARLNRRDGAGGWSPLVSNKYQWLQIDLGERMEVTAVATQGGYGSSNWVTSYLLMFSDSGWNWKQYRQEDSIWGFSGNANADSVVYYRLQPSIKARFLRFIPLEWNPKGRIGMRIEVFGCAYRSEVVDLDGKSSLLYRFDQKSLSPIKDIISLKFKTMQSDGILLHREGPNGDHITLQLRRARLFLLINSGEAKLPSTSTLVNLTLGSLLDDQHWHSVLIQRLGKQVNFTVDEHRHHFHARGEFNLMNLDYEISFGGIPAPGKSVSFPHRNFHGCLENLYYNGVDIIDLAKQQKPQIIAMGNVSFSCSQPQSMPVTFLSSRSYLALPDFSGEEEVSATFQFRTWNKAGLLLFSELQLISGGILLFLSDGKLKSNLYQPGKLPSDITAGVELNDGQWHSVSLSAKKNHLSVAVDGQMASAAPLLGPEQIYSGGTYYFGGCPDKSFGSKCKSPLGGFQGCMRLISISGKVVDLISVQQGSLGNFSDLQIDSCGISDRCLPNYCEHGGECSQSWSTFHCNCTNTGYRGATCHNSIYEQSCEAYKHRGNTSGFYYIDSDGSGPLEPFLLYCNMTETAWTIIQHNGSDLTRVRNTNPENPYAGFFEYVASMEQLQATINRAEHCEQEFTYYCKKSRLVNKQDGTPLSWWVGRTNETQTYWGGSSPDLQKCTCGLEGNCIDSQYYCNCDADRNEWTNDTGLLAYKEHLPVTKIVITDTGRLHSEAAYKLGPLLCQGDRSFWNSASFDTEASYLHFPTFHGELSADVSFFFKTTASSGVFLENLGIADFIRIELRSPTVVTFSFDVGNGPFEISVQSPTHFNDNQWHHVRVERNMKEASLQVDQLTPKTQPAPADGHVLLQLNSQLFVGGTATRQRGFLGCIRSLQLNGMTLDLEERAQVTPEVQPGCRGHCSSYGKLCRNGGKCRERPIGFFCDCTFSAYTGPFCSNEISAYFGSGSSVIYNFQENYLLSKNSSSHAASFHGDMKLSREMIKFSFRTTRTPSLLLFVSSFYKEYLSVIIAKNGSLQIRYKLNKYQEPDVVNFDFKNMADGQLHHIMINREEGVVFIEIDDNRRRQVHLSSGTEFSAVKSLVLGRILEHSDVDQDTALAGAQGFTGCLSAVQLSHVAPLKAALHPSHPDPVTVTGHVTESSCMAQPGTDATSRERTHSFADHSGTIDDREPLANAIKSDSAVIGGLIAVVIFILLCITAIAVRIYQQKRLYKRSEAKRSENVDSAEAVLKSELNIQNAVNENQKEYFF

SEQ ID NO: 26563 - protein, 1260 aa, Homo sapiens
  REGION 1..1260: note = ENSP00000477698
MGSVTGAVLKTLLLLSTQNWNRVEAGNSYDCDDPLVSALPQASFSSSSELSSSHGPGFARLNRRDGAGGWSPLVSNKYQWLQIDLGERMEVTAVATQGGYGSSNWVTSYLLMFSDSGWNWKQYRQEDSIWGFSGNANADSVVYYRLQPSIKARFLRFIPLEWNPKGRIGMRIEVFGCAYRSEVVDLDGKSSLLYRFDQKSLSPIKDIISLKFKTMQSDGILLHREGPNGDHITLQLRRARLFLLINSGEAKLPSTSTLVNLTLGSLLDDQHWHSVLIQRLGKQVNFTVDEHRHHFHARGEFNLMNLDYEGNVSFSCSQPQSMPVTFLSSRSYLALPDFSGEEEVSATFQFRTWNKAGLLLFSELQLISGGILLFLSDGKLKSNLYQPGKLPSDITAGVELNDGQWHSVSLSAKKNHLSVAVDGQMASAAPLLGPEQIYSGGTYYFGGCPDKSFGSKCKSPLGGFQGCMRLISISGKVVDLISVQQGSLGNFSDLQIDSCGISDRCLPNYCEHGGECSQSWSTFHCNCTNTGYRGATCHNSIYEQSCEAYKHRGNTSGFYYIDSDGSGPLEPFLLYCNMTETAWTIIQHNGSDLTRVRNTNPENPYAGFFEYVASMEQLQATINRAEHCEQEFTYYCKKSRLVNKQDGTPLSWWVGRTNETQTYWGGSSPDLQKCTCGLEGNCIDSQYYCNCDADRNEWTNDTGLLAYKEHLPVTKIVITDTGRLHSEAAYKLGPLLCQGDRSFWNSASFDTEASYLHFPTFHGELSADVSFFFKTTASSGVFLENLGIADFIRIELRSPTVVTFSFDVGNGPFEISVQSPTHFNDNQWHHVRVERNMKEASLQVDQLTPKTQPAPADGHVLLQLNSQLFVGGTATRQRGFLGCIRSLQLNGMTLDLEERAQVTPEVQPGCRGHCSSYGKLCRNGGKCRERPIGFFCDCTFSAYTGPFCSNEISAYFGSGSSVIYNFQENYLLSKNSSSHAASFHGDMKLSREMIKFSFRTTRTPSLLLFVSSFYKEYLSVIIAKNGSLQIRYKLNKYQEPDVVNFDFKNMADGQLHHIMINREEGVVFIEIDDNRRRQVHLSSGTEFSAVKSLVLGRILEHSDVDQDTALAGAQGFTGCLSAVQLSHVAPLKAALHPSHPDPVTVTGHVTESSCMAQPGTDATSRERTHSFADHSGTIDDREPLANAIKSDSAVIGGLIAVVIFILLCITAIAVRIYQQKRLYKRSEAKRSENVDSAEAVLKSELNIQNAVNENQKEYFF

SEQ ID NO: 26564 - protein, 1235 aa, Homo sapiens
  REGION 1..1235: note = ENSP00000418741
MWNYDCDDPLVSALPQASFSSSSELSSSHGPGFARLNRRDGAGGWSPLVSNKYQWLQIDLGERMEVTAVATQGGYGSSNWVTSYLLMFSDSGWNWKQYRQEDSIWGFSGNANADSVVYYRLQPSIKARFLRFIPLEWNPKGRIGMRIEVFGCAYRSEVVDLDGKSSLLYRFDQKSLSPIKDIISLKFKTMQSDGILLHREGPNGDHITLQLRRARLFLLINSGEAKLPSTSTLVNLTLGSLLDDQHWHSVLIQRLGKQVNFTVDEHRHHFHARGEFNLMNLDYEGNVSFSCSQPQSMPVTFLSSRSYLALPDFSGEEEVSATFQFRTWNKAGLLLFSELQLISGGILLFLSDGKLKSNLYQPGKLPSDITAGVELNDGQWHSVSLSAKKNHLSVAVDGQMASAAPLLGPEQIYSGGTYYFGGCPDKSFGSKCKSPLGGFQGCMRLISISGKVVDLISVQQGSLGNFSDLQIDSCGISDRCLPNYCEHGGECSQSWSTFHCNCTNTGYRGATCHNSIYEQSCEAYKHRGNTSGFYYIDSDGSGPLEPFLLYCNMTETAWTIIQHNGSDLTRVRNTNPENPYAGFFEYVASMEQLQATINRAEHCEQEFTYYCKKSRLVNKQDGTPLSWWVGRTNETQTYWGGSSPDLQKCTCGLEGNCIDSQYYCNCDADRNEWTNDTGLLAYKEHLPVTKIVITDTGRLHSEAAYKLGPLLCQGDRSFWNSASFDTEASYLHFPTFHGELSADVSFFFKTTASSGVFLENLGIADFIRIELRSPTVVTFSFDVGNGPFEISVQSPTHFNDNQWHHVRVERNMKEASLQVDQLTPKTQPAPADGHVLLQLNSQLFVGGTATRQRGFLGCIRSLQLNGMTLDLEERAQVTPEVQPGCRGHCSSYGKLCRNGGKCRERPIGFFCDCTFSAYTGPFCSNEISAYFGSGSSVIYNFQENYLLSKNSSSHAASFHGDMKLSREMIKFSFRTTRTPSLLLFVSSFYKEYLSVIIAKNGSLQIRYKLNKYQEPDVVNFDFKNMADGQLHHIMINREEGVVFIEIDDNRRRQVHLSSGTEFSAVKSLVLGRILEHSDVDQDTALAGAQGFTGCLSAVQLSHVAPLKAALHPSHPDPVTVTGHVTESSCMAQPGTDATSRERTHSFADHSGTIDDREPLANAIKSDSAVIGGLIAVVIFILLCITAIAVRIYQQKRLYKRSEAKRSENVDSAEAVLKSELNIQNAVNENQKEYFF

SEQ ID NO: 26565 - protein, 1311 aa, Homo sapiens
  REGION 1..1311: note = ENSP00000417628
MLLFYLLVVLSIDSTKASALTNPNVALFLLADDCDDPLVSALPQASFSSSSELSSSHGPGFARLNRRDGAGGWSPLVSNKYQWLQIDLGERMEVTAVATQGGYGSSNWVTSYLLMFSDSGWNWKQYRQEDSIWGFSGNANADSVVYYRLQPSIKARFLRFIPLEWNPKGRIGMRIEVFGCAYRSEVVDLDGKSSLLYRFDQKSLSPIKDIISLKFKTMQSDGILLHREGPNGDHITLQLRRARLFLLINSGEAKLPSTSTLVNLTLGSLLDDQHWHSVLIQRLGKQVNFTVDEHRHHFHARGEFNLMNLDYEISFGGIPAPGKSVSFPHRNFHGCLENLYYNGVDIIDLAKQQKPQIIAMGNVSFSCSQPQSMPVTFLSSRSYLALPDFSGEEEVSATFQFRTWNKAGLLLFSELQLISGGILLFLSDGKLKSNLYQPGKLPSDITAGVELNDGQWHSVSLSAKKNHLSVAVDGQMASAAPLLGPEQIYSGGTYYFGGCPDKSFGSKCKSPLGGFQGCMRLISISGKVVDLISVQQGSLGNFSDLQIDSCGISDRCLPNYCEHGGECSQSWSTFHCNCTNTGYRGATCHNSIYEQSCEAYKHRGNTSGFYYIDSDGSGPLEPFLLYCNMTETAWTIIQHNGSDLTRVRNTNPENPYAGFFEYVASMEQLQATINRAEHCEQEFTYYCKKSRLVNKQDGTPLSWWVGRTNETQTYWGGSSPDLQKCTCGLEGNCIDSQYYCNCDADRNEWTNDTGLLAYKEHLPVTKIVITDTGRLHSEAAYKLGPLLCQGDRSFWNSASFDTEASYLHFPTFHGELSADVSFFFKTTASSGVFLENLGIADFIRIELRSPTVVTFSFDVGNGPFEISVQSPTHFNDNQWHHVRVERNMKEASLQVDQLTPKTQPAPADGHVLLQLNSQLFVGGTATRQRGFLGCIRSLQLNGMTLDLEERAQVTPEVQPGCRGHCSSYGKLCRNGGKCRERPIGFFCDCTFSAYTGPFCSNEISAYFGSGSSVIYNFQENYLLSKNSSSHAASFHGDMKLSREMIKFSFRTTRTPSLLLFVSSFYKEYLSVIIAKNGSLQIRYKLNKYQEPDVVNFDFKNMADGQLHHIMINREEGVVFIEIDDNRRRQVHLSSGTEFSAVKSLVLGRILEHSDVDQDTALAGAQGFTGCLSAVQLSHVAPLKAALHPSHPDPVTVTGHVTESSCMAQPGTDATSRERTHSFADHSGTIDDREPLANAIKSDSAVIGGLIAVVIFILLCITAIAVRIYQQKRLYKRSEAKRSENVDSAEAVLKSELNIQNAVNENQKEYFF

SEQ ID NO: 26566 - protein, 1260 aa, Homo sapiens
  REGION 1..1260: note = ENSP00000439733
MGSVTGAVLKTLLLLSTQNWNRVEAGNSYDCDDPLVSALPQASFSSSSELSSSHGPGFARLNRRDGAGGWSPLVSNKYQWLQIDLGERMEVTAVATQGGYGSSNWVTSYLLMFSDSGWNWKQYRQEDSIWGFSGNANADSVVYYRLQPSIKARFLRFIPLEWNPKGRIGMRIEVFGCAYRSEVVDLDGKSSLLYRFDQKSLSPIKDIISLKFKTMQSDGILLHREGPNGDHITLQLRRARLFLLINSGEAKLPSTSTLVNLTLGSLLDDQHWHSVLIQRLGKQVNFTVDEHRHHFHARGEFNLMNLDYEGNVSFSCSQPQSMPVTFLSSRSYLALPDFSGEEEVSATFQFRTWNKAGLLLFSELQLISGGILLFLSDGKLKSNLYQPGKLPSDITAGVELNDGQWHSVSLSAKKNHLSVAVDGQMASAAPLLGPEQIYSGGTYYFGGCPDKSFGSKCKSPLGGFQGCMRLISISGKVVDLISVQQGSLGNFSDLQIDSCGISDRCLPNYCEHGGECSQSWSTFHCNCTNTGYRGATCHNSIYEQSCEAYKHRGNTSGFYYIDSDGSGPLEPFLLYCNMTETAWTIIQHNGSDLTRVRNTNPENPYAGFFEYVASMEQLQATINRAEHCEQEFTYYCKKSRLVNKQDGTPLSWWVGRTNETQTYWGGSSPDLQKCTCGLEGNCIDSQYYCNCDADRNEWTNDTGLLAYKEHLPVTKIVITDTGRLHSEAAYKLGPLLCQGDRSFWNSASFDTEASYLHFPTFHGELSADVSFFFKTTASSGVFLENLGIADFIRIELRSPTVVTFSFDVGNGPFEISVQSPTHFNDNQWHHVRVERNMKEASLQVDQLTPKTQPAPADGHVLLQLNSQLFVGGTATRQRGFLGCIRSLQLNGMTLDLEERAQVTPEVQPGCRGHCSSYGKLCRNGGKCRERPIGFFCDCTFSAYTGPFCSNEISAYFGSGSSVIYNFQENYLLSKNSSSHAASFHGDMKLSREMIKFSFRTTRTPSLLLFVSSFYKEYLSVIIAKNGDLQIRYKLNKYQEPDVVNFDFKNMADGQLHHIMINREEGVVFIEIDDNRRRQVHLSSGTEFSAVKSLVLGRILEHSDVDQDTALAGAQGFTGCLSAVQLSHVAPLKAALHPSHPDPVTVTGHVTESSCMAQPGTDATSRERTHSFADHSGTIDDREPLANAIKSDSAVIGGLIAVVIFILLCITAIAVRIYQQKRLYKRSEAKRSENVDSAEAVLKSELNIQNAVNENQKEYFF

SEQ ID NO: 26567 - protein, 1308 aa, Homo sapiens
  REGION 1..1308: note = ENSP00000306893
MGSVTGAVLKTLLLLSTQNWNRVEAGNSYDCDDPLVSALPQASFSSSSELSSSHGPGFARLNRRDGAGGWSPLVSNKYQWLQIDLGERMEVTAVATQGGYGSSNWVTSYLLMFSDSGWNWKQYRQEDSIWGFSGNANADSVVYYRLQPSIKARFLRFIPLEWNPKGRIGMRIEVFGCAYRSEVVDLDGKSSLLYRFDQKSLSPIKDIISLKFKTMQSDGILLHREGPNGDHITLQLRRARLFLLINSGEAKLPSTSTLVNLTLGSLLDDQHWHSVLIQRLGKQVNFTVDEHRHHFHARGEFNLMNLDYEISFGGIPAPGKSVSFPHRNFHGCLENLYYNGVDIIDLAKQQKPQIIAMGNVSFSCSQPQSMPVTFLSSRSYLALPDFSGEEEVSATFQFRTWNKAGLLLFSELQLISGGILLFLSDGKLKSNLYQPGKLPSDITAGVELNDGQWHSVSLSAKKNHLSVAVDGQMASAAPLLGPEQIYSGGTYYFGGCPDKSFGSKCKSPLGGFQGCMRLISISGKVVDLISVQQGSLGNFSDLQIDSCGISDRCLPNYCEHGGECSQSWSTFHCNCTNTGYRGATCHNSIYEQSCEAYKHRGNTSGFYYIDSDGSGPLEPFLLYCNMTETAWTIIQHNGSDLTRVRNTNPENPYAGFFEYVASMEQLQATINRAEHCEQEFTYYCKKSRLVNKQDGTPLSWWVGRTNETQTYWGGSSPDLQKCTCGLEGNCIDSQYYCNCDADRNEWTNDTGLLAYKEHLPVTKIVITDTGRLHSEAAYKLGPLLCQGDRSFWNSASFDTEASYLHFPTFHGELSADVSFFFKTTASSGVFLENLGIADFIRIELRSPTVVTFSFDVGNGPFEISVQSPTHFNDNQWHHVRVERNMKEASLQVDQLTPKTQPAPADGHVLLQLNSQLFVGGTATRQRGFLGCIRSLQLNGMTLDLEERAQVTPEVQPGCRGHCSSYGKLCRNGGKCRERPIGFFCDCTFSAYTGPFCSNEISAYFGSGSSVIYNFQENYLLSKNSSSHAASFHGDMKLSREMIKFSFRTTRTPSLLLFVSSFYKEYLSVIIAKNGDLQIRYKLNKYQEPDVVNFDFKNMADGQLHHIMINREEGVVFIEIDDNRRRQVHLSSGTEFSAVKSLVLGRILEHSDVDQDTALAGAQGFTGCLSAVQLSHVAPLKAALHPSHPDPVTVTGHVTESSCMAQPGTDATSRERTHSFADHSGTIDDREPLANAIKSDSAVIGGLIAVVIFILLCITAIAVRIYQQKRLYKRSEAKRSENVDSAEAVLKSELNIQNAVNENQKEYFF

SEQ ID NO: 26568 - protein, 1306 aa, Homo sapiens
  REGION 1..1306: note = ENSP00000399013
MDSLPRLTSVLTLLFSGLWHLGLTATNYNCDDPLASLLSPMAFSSSSDLTGTHSPAQLNWRVGTGGWSPADSNAQQWLQMDLGNRVEITAVATQGRYGSSDWVTSYSLMFSDTGRNWKQYKQEDSIWTFAGNMNADSVVHHKLLHSVRARFVRFVPLEWNPSGKIGMRVEVYGCSYKSDVADFDGRSSLLYRFNQKLMSTLKDVISLKFKSMQGDGVLFHGEGQRGDHITLELQKGRLALHLNLGDSKARLSSSLPSATLGSLLDDQHWHSVLIERVGKQVNFTVDKHTQHFRTKGETDALDIDYELSFGGIPVPGKPGTFLKKNFHGCIENLYYNGVNIIDLAKRRKHQIYTGNVTFSCSEPQIVPITFVNSSGSYLLLPGTPQIDGLSVSFQFRTWNKDGLLLSTELSEGSGTLLLSLEGGILRLVIQKMTERVAEILTGSNLNDGLWHSVSINARRNRITLTLDDEAAPPAPDSTWVQIYSGNSYYFGGCPDNLTDSQCLNPIKAFQGCMRLIFIDNQPKDLISVQQGSLGNFSDLHIDLCSIKDRCLPNYCEHGGSCSQSWTTFYCNCSDTSYTGATCHNSIYEQSCEVYRHQGNTAGFFYIDSDGSGPLGPLQVYCNITEDKIWTSVQHNNTELTRVRGANPEKPYAMALDYGGSMEQLEAVIDGSEHCEQEVAYHCRRSRLLNTPDGTPFTWWIGRSNERHPYWGGSPPGVQQCECGLDESCLDIQHFCNCDADKDEWTNDTGFLSFKDHLPVTQIVITDTDRSNSEAAWRIGPLRCYGDRRFWNAVSFYTEASYLHFPTFHAEFSADISFFFKTTALSGVFLENLGIKDFIRLEISSPSEITFAIDVGNGPVELVVQSPSLLNDNQWHYVRAERNLKETSLQVDNLPRSTRETSEEGHFRLQLNSQLFVGGTSSRQKGFLGCIRSLHLNGQKMDLEERAKVTSGVRPGCPGHCSSYGSICHNGGKCVEKHNGYLCDCTNSPYEGPFCKKEVSAVFEAGTSVTYMFQEPYPVTKNISLSSSAIYTDSAPSKENIALSFVTTQAPSLLLFINSSSQDFVVVLLCKNGSLQVRYHLNKEETHVFTIDADNFANRRMHHLKINREGRELTIQMDQQLRLSYNFSPEVEFRVIRSLTLGKVTENLGLDSEVAKANAMGFAGCMSSVQYNHIAPLKAALRHATVAPVTVHGTLTESSCGFMVDSDVNAVTTVHSSSDPFGKTDEREPLTNAVRSDSAVIGGVIAVVIFIIFCIIGIMTRFLYQHKQSHRTSQMKEKEYPENLDSSFRNEIDLQNTVSECKREYFI

SEQ ID NO: 26569 - protein, 1146 aa, Homo sapiens
  REGION 1..1146: note = ENSP00000413498
LRDNIAGEELELSKSLNELGIKELYAWDNRRETFRKSSLGNDETDKEKKKFLGFFKVNKRSNSKAEQLVLSGADSDEDTSRAAPGRGLNGCLTTPNSPSMHSRSLTLGPSLSLGSISGVSVKSEMKKRRAPPPPGSGPPVQDKASEKVSLGSQIDLQKKKRRAPAPPPPQPPPPSPLIPNRTEDKEENRKSTMGGGRQVPQKPPRGTARGPPQLVLPPPPPYPPPDTDVVEPLSFPGEGAGSEASDPIPKLSLPLGSGSHCSPDGAPQVLSEAEETVSVGSCFASEDTTEDSGVMSSPSDIVSLDSQQDSMKYKDKWATDQEDCSDQDLAGTPDLGPQKSPLWEKNGSENSHLRTEKAVTASNDEEDLLIAGEFRKTLAELDEDLEEMEDSYETDTSSLTSSIHGASNHCPQDAMIPHGDTDAIPVTFIGEVSDDPVDSGLFSNRNNNAGSFDSEGVASRRDSLAPLQAEHSQPHEKAREEVPALHPASHDVGKGIRVALSNISKDGNLMETAPRVTSFASNLHTDNLNAKVKDKVYGCADGERTQATERVNSQPVNEKDSNDKNAALAPTSWHQRGQNPGKSYRLKHGLTTYKIIPPKSEMRCYDRDVSLSTGAIKIDELGNLVSPHATGIRIISLSSSVPEAESQPIGKVREFWRCNSVEKHLGRPSESSARGPPSTPVPTQTQNPESRLQADPKPISPQQKSAHHEGRNPLGEGRNQPPTMGMGHVRVPAAHTTEVTFLKPQRRTSSQYVASAIAKRIGAPKVHADVVRPHGYAEKGYAGKAPVLAAPPVTVKDDRTSSPHSETQGWKDGAQWPCVTPPNNHGEDLAVGAPPRGEVIGPHRKLSTQDRPAAIHRSSCFSLVQSSQRDRVSVGQSCGFSGKQSTSSQEASSASEPRRAPDGTDPPPPHTSDTQACSRELVNGSVRAPGHGEPSHPPGGSGTESHILLEREEKPSVFSTDGNETDSIWPPSIFGPKKKFKPVVQRPVPKDTSLHSALMEAIHSAGGKDRLRKTAEHTGEGRPAKLSYTEAEGERSALLAAIRGHSGTCSLRKVASSASEELQSFRDAALSAQGSESPLLEDLGLLSPPAIPPPPPPPSQALSAPRTASRFSTGTLSNTADARQALMDAIRSGTGAARLRKVPLLV

SEQ ID NO: 26570 - protein, 1106 aa, Homo sapiens
  REGION 1..1106: note = ENSP00000401204
LKEKVPEEKVKPGPPKVPEKSVRLVVNYLRTQKAVVRVSPEVPLQNILPVICAKCEVSPEHVVLLRDNIAGEELELSKSLNELGIKELYAWDNRRETFRKSSLGNDETDKEKKKFLGFFKVNKRSNSKAEQLVLSGADSDEDTSRAAPGRGLNGCLTTPNSPSMHSRSLTLGPSLSLGSISGVSVKSEMKKRRAPPPPGSGPPVQDKASEKVSLGSQIDLQKKKRRAPAPPPPQPPPPSPLIPNRTEDKEENRKSTMVSLPLGSGSHCSPDGAPQVLSEAEETVSVGSCFASEDTTEDSGVMSSPSDIVSLDSQQDSMKYKDKWATDQEDCSDQDLAGTPDLGPQKSPLWEKNGSENSHLRTEKAVTASNDEEDLLIAGEFRKTLAELDEDLEEMEDSYETDTSSLTSSIHGASNHCPQDAMIPHGDTDAIPVTFIGEVSDDPVDSGLFSNRNNNAGSFDSEGVASRRDSLAPLQAEHSQPHEKAREEVPALHPASHDVGKGIRVALSNISKDGNLMETAPRVTSFASNLHTDNLNAKVKDKVYGCADGERTQATERVNSQPVNEKDSNDKNAALAPTSWHQRGQNPGKSYRLKHGLTTYKIIPPKSEMRCYDRDVSLSTGAIKIDELGNLVSPHATGIRIISLSSSVPEAESQPIGKVREFWRCNSVEKHLGRPSESSARGPPSTPVPTQTQNPESRLQADPKPISPQQKSAHHEGRNPLGEGRNQPPTMGMGHVRVPAAHTTEVTFLKPQRRTSSQYVASAIAKRIGAPKVHADVVRPHGYAEKGYAGKAPVLAAPPVTVKDDRTSSPHSETQGWKDGAQWPCVTPPNNHGEDLAVGAPPRGEVIGPHRKLSTQDRPAAIHRSSCFSLVQSSQRDRVSVGQSCGFSGKQSTSSQEASSASEPRRAPDGTDPPPPHTSDTQACSRELVNGSVRAPGHGEPSHPPGGSGTESHILLEREEKPSVFSTDGNETDSIWPPSIFGPKKKFKPVVQRPVPKDTSLHSALMEAIHSAGGKDRLRKTAEHTGEGRPAKLSYTEAEGERSALLAAIRGHSGTCSLRKALSAPRTASRFSTGTLSNTADARQALMDAIRSGTGAARLRKVPLLV

SEQ ID NO: 26571 - protein, 1261 aa, Homo sapiens
  REGION 1..1261: note = ENSP00000265136
MDAPRASAAKPPTGRKMKARAPPPPGKAATLHVHSDQKPPHDGALGSQQNLVRMKEALRASTMDVTVVLPSGLEKRSVLNGSHAMMDLLVELCLQNHLNPSHHALEIRSSETQQPLSFKPNTLIGTLNVHTVFLKEKVPEEKVKPGPPKVPEKSVRLVVNYLRTQKAVVRVSPEVPLQNILPVICAKCEVSPEHVVLLRDNIAGEELELSKSLNELGIKELYAWDNRRETFRKSSLGNDETDKEKKKFLGFFKVNKRSNSKGCLTTPNSPSMHSRSLTLGPSLSLGSISGVSVKSEMKKRRAPPPPGSGPPVQDKASEKVSLGSQIDLQKKKRRAPAPPPPQPPPPSPLIPNRTEDKEENRKSTMVSLPLGSGSHCSPDGAPQVLSEAEETVSVGSCFASEDTTEDSGVMSSPSDIVSLDSQQDSMKYKDKWATDQEDCSDQDLAGTPDLGPQKSPLWEKNGSENSHLRTEKAVTASNDEEDLLIAGEFRKTLAELDEDLEEMEDSYETDTSSLTSSIHGASNHCPQDAMIPHGDTDAIPVTFIGEVSDDPVDSGLFSNRNNNAGSFDSEGVASRRDSLAPLQAEHSQPHEKAREEVPALHPASHDVGKGIRVALSNISKDGNLMETAPRVTSFASNLHTDNLNAKVKDKVYGCADGERTQATERVNSQPVNEKDSNDKNAALAPTSWHQRGQNPGKSYRLKHGLTTYKIIPPKSEMRCYDRDVSLSTGAIKIDELGNLVSPHATGIRIISLSSSVPEAESQPIGKVREFWRCNSVEKHLGRPSESSARGPPSTPVPTQTQNPESRLQADPKPISPQQKSAHHEGRNPLGEGRNQPPTMGMGHVRVPAAHTTEVTFLKPQRRTSSQYVASAIAKRIGAPKVHADVVRPHGYAEKGYAGKAPVLAAPPVTVKDDRTSSPHSETQGWKDGAQWPCVTPPNNHGEDLAVGAPPRGEVIGPHRKLSTQDRPAAIHRSSCFSLVQSSQRDRVSVGQSCGFSGKQSTSSQEASSASEPRRAPDGTDPPPPHTSDTQACSRELVNGSVRAPGHGEPSHPPGGSGTESHILLEREEKPSVFSTDGNETDSIWPPSIFGPKKKFKPVVQRPVPKDTSLHSALMEAIHSAGGKDRLRKTAEHTGEGRPAKLSYTEAEGERSALLAAIRGHSGTCSLRKVASSASEELQSFRDAALSAQGSESPLLEDLGLLSPPAIPPPPPPPSQALSAPRTASRFSTGTLSNTADARQALMDAIRSGTGAARLRKVPLLV

SEQ ID NO: 26572 - protein, 614 aa, Homo sapiens
  REGION 1..614: note = ENSP00000405059
  VARIANT 1: note = Any amino acid
XHAMMDLLVELCLQNHLNPSHHALEIRSSETQQPLSFKPNTLIGTLNVHTVFLKEKVPEEKVKPGPPKVPEKSVRLVVNYLRTQKAVVRVSPEVPLQNILPVICAKCEVSPEHVVLLRDNIAGEELELSKSLNELGIKELYAWDNRRETFRKSSLGNDETDKEKKKFLGFFKVNKRSNSKGCLTTPNSPSMHSRSLTLGPSLSLGSISGVSVKSEMKKRRAPPPPGSGPPVQDKASEKVSLGSQIDLQKKKRRAPAPPPPQPPPPSPLIPNRTEDKEENRKSTMGGGRQVPQKPPRGTARGPPQLVLPPPPPYPPPDTDVVEPLSFPGEGAGSEASDPIPKLSLPLGSGSHCSPDGAPQVLSEAEETVSVGSCFASEDTTEDSGVMSSPSDIVSLDSQQDSMKYKDKWATDQEDCSDQDLAGTPDLGPQKSPLWEKNGSENSHLRTEKAVTASNDEEDLLIAGEFRKTLAELDEDLEEMEDSYETDTSSLTSSIHGASNHCPQDAMIPHGDTDAIPVTFIGEVSDDPVDSGLFSNRNNNAGSFDSEGVASRRDSLAPLQAEHSQPHEKAREEVPALHPASHDVGKGIRVALSNISKDGNLMETAPRVTSFASNL

SEQ ID NO: 26573 - protein, 469 aa, Homo sapiens
  REGION 1..469: note = ENSP00000378910
MDAPRASAAKPPTGRKMKARAPPPPGKAATLHVHSDQKPPHDGALGSQQNLVRMKEALRASTMDVTVVLPSGLEKRSVLNGSHAMMDLLVELCLQNHLNPSHHALEIRSSETQQPLSFKPNTLIGTLNVHTVFLKEKVPEEKVKPGPPKVPEKSVRLVVNYLRTQKAVVRVSPEVPLQNILPVICAKCEVSPEHVVLLRDNIAGEELELSKSLNELGIKELYAWDNRRETFRKSSLGNDETDKEKKKFLGFFKVNKRSNSKGCLTTPNSPSMHSRSLTLGPSLSLGSISGVSVKSEMKKRRAPPPPGSGPPVQDKASEKVSLGSQIDLQKKKRRAPAPPPPQPPPPSPLIPNRTEDKEENRKSTMVYGAAEAVIRLLSLLLNTTAPGTAKPRTLWMSEGRSSLHNPEIKCSCFSSSSPFPQSLLSLLLGLSSICECMCTLRHTHAHTHNPSCVLPTSEILAFGRQSLIS

SEQ ID NO: 26574 - protein, 379 aa, Homo sapiens
  REGION 1..379: note = ENSP00000399500
MDAPRASAAKPPTGRKMKARAPPPPGKAATLHVHSDQKPPHDGALGSQQNLVRMKEALRASTMDVTVVLPSGLEKRSVLNGSHAMMDLLVELCLQNHLNPSHHALEIRSSETQQPLSFKPNTLIGTLNVHTVFLKEKVPEEKVKPGPPKVPEKSVRLVVNYLRTQKAVVRVSPEVPLQNILPVICAKCEVSPEHVVLLRDNIAGEELELSKSLNELGIKELYAWDNRRETFRKSSLGNDETDKEKKKFLGFFKVNKRSNSKGCLTTPNSPSMHSRSLTLGPSLSLGSISGVSVKSEMKKRRAPPPPGSGPPVQDKASEKVSLGSQIDLQKKKRRAPAPPPPQPPPPSPLIPNRTEDKEENRKSTMVYCCASFPTQAKRF

SEQ ID NO: 26575 - protein, 394 aa, Homo sapiens
  REGION 1..394: note = ENSP00000488001
MDAPRASAAKPPTGRKMKARAPPPPGKAATLHVHSDQKPPHDGALGSQQNLVRMKEALRASTMDVTVVLPSGLEKRSVLNGSHAMMDLLVELCLQNHLNPSHHALEIRSSETQQPLSFKPNTLIGTLNVHTVFLKEKVPEEKVKPGPPKVPEKSVRLVVNYLRTQKAVVRVSPEVPLQNILPVICAKCEVSPEHVVLLRDNIAGEELELSKSLNELGIKELYAWDNRRVRLSKTQSEPSLSCQETFRKSSLGNDETDKEKKKFLGFFKVNKRSNSKGCLTTPNSPSMHSRSLTLGPSLSLGSISGVSVKSEMKKRRAPPPPGSGPPVQDKASEKVSLGSQIDLQKKKRRAPAPPPPQPPPPSPLIPNRTEDKEENRKSTMVYCCASFPTQAKRF

SEQ ID NO: 26576 - protein, 163 aa, Homo sapiens
  REGION 1..163: note = ENSP00000391864
MKARAPPPPGKAATLHVHSDQKPPHDGALGSQQNLVRMKEALRASTMDVTVVLPSGLEKRSVLNGSHAMMDLLVELCLQNHLNPSHHALEIRSSETQQPLSFKPNTLIGTLNVHTVFLKEKVPEEKVKPGPPKVPEKSVRLVVNYLRTQKAVVRVSPEVPLQN

SEQ ID NO: 26577 - protein, 1271 aa, Homo sapiens
  REGION 1..1271: note = ENSP00000378912
MDAPRASAAKPPTGRKMKARAPPPPGKAATLHVHSDQKPPHDGALGSQQNLVRMKEALRASTMDVTVVLPSGLEKRSVLNGSHAMMDLLVELCLQNHLNPSHHALEIRSSETQQPLSFKPNTLIGTLNVHTVFLKEKVPEEKVKPGPPKVPEKSVRLVVNYLRTQKAVVRVSPEVPLQNILPVICAKCEVSPEHVVLLRDNIAGEELELSKSLNELGIKELYAWDNRRETFRKSSLGNDETDKEKKKFLGFFKVNKRSNSKGCLTTPNSPSMHSRSLTLGPSLSLGSISGVSVKSEMKKRRAPPPPGSGPPVQDKASEKVSLGSQIDLQKKKRRAPAPPPPQPPPPSPLIPNRTEDKEENRKSTMGGGRQVPQKPPRGTARGPPQLVLPPPPPYPPPDTDVVEPLSFPGEGAGSEASDPIPKLSLPLGSGSHCSPDGAPQVLSEAEETVSVGSCFASEDTTEDSGVMSSPSDIVSLDSQQDSMKYKDKWATDQEDCSDQDLAGTPDLGPQKSPLWEKNGSENSHLRTEKAVTASNDEEDLLIAGEFRKTLAELDEDLEEMEDSYETDTSSLTSSIHGASNHCPQDAMIPHGDTDAIPVTFIGEVSDDPVDSGLFSNRNNNAGSFDSEGVASRRDSLAPLQAEHSQPHEKAREEVPALHPASHDVGKGIRVALSNISKDGNLMETAPRVTSFASNLHTDNLNAKVKDKVYGCADGERTQATERVNSQPVNEKDSNDKNAALAPTSWHQRGQNPGKSYRLKHGLTTYKIIPPKSEMRCYDRDVSLSTGAIKIDELGNLVSPHATGIRIISLSSSVPEAESQPIGKVREFWRCNSVEKHLGRPSESSARGPPSTPVPTQTQNPESRLQADPKPISPQQKSAHHEGRNPLGEGRNQPPTMGMGHVRVPAAHTTEVTFLKPQRRTSSQYVASAIAKRIGAPKVHADVVRPHGYAEKGYAGKAPVLAAPPVTVKDDRTSSPHSETQGWKDGAQWPCVTPPNNHGEDLAVGAPPRGEVIGPHRKLSTQDRPAAIHRSSCFSLVQSSQRDRVSVGQSCGFSGKQSTSSQEASSASEPRRAPDGTDPPPPHTSDTQACSRELVNGSVRAPGHGEPSHPPGGSGTESHILLEREEKPSVFSTDGNETDSIWPPSIFGPKKKFKPVVQRPVPKDTSLHSALMEAIHSAGGKDRLRKTAEHTGEGRPAKLSYTEAEGERSALLAAIRGHSGTCSLRKALSAPRTASRFSTGTLSNTADARQALMDAIRSGTGAARLRKVPLLV

SEQ ID NO: 26578 - protein, 1806 aa, Homo sapiens
  REGION 1..1806: note = ENSP00000359114
MEPWSSRWKTKRWLWDFTVTTLALTFLFQAREVRGAAPVDVLKALDFHNSPEGISKTTGFCTNRKNSKGSDTAYRVSKQAQLSAPTKQLFPGGTFPEDFSILFTVKPKKGIQSFLLSIYNEHGIQQIGVEVGRSPVFLFEDHTGKPAPEDYPLFRTVNIADGKWHRVAISVEKKTVTMIVDCKKKTTKPLDRSERAIVDTNGITVFGTRILDEEVFEGDIQQFLITGDPKAAYDYCEHYSPDCDSSAPKAAQAQEPQIDEYAPEDIIEYDYEYGEAEYKEAESVTEGPTVTEETIAQTEANIVDDFQEYNYGTMESYQTEAPRHVSGTNEPNPVEEIFTEEYLTGEDYDSQRKNSEDTLYENKEIDGRDSDLLVDGDLGEYDFYEYKEYEDKPTSPPNEEFGPGVPAETDITETSINGHGAYGEKGQKGEPAVVEPGMLVEGPPGPAGPAGIMGPPGLQGPTGPPGDPGDRGPPGRPGLPGADGLPGPPGTMLMLPFRYGGDGSKGPTISAQEAQAQAILQQARIALRGPPGPMGLTGRPGPVGGPGSSGAKGESGDPGPQGPRGVQGPPGPTGKPGKRGRPGADGGRGMPGEPGAKGDRGFDGLPGLPGDKGHRGERGPQGPPGPPGDDGMRGEDGEIGPRGLPGEAGPRGLLGPRGTPGAPGQPGMAGVDGPPGPKGNMGPQGEPGPPGQQGNPGPQGLPGPQGPIGPPGEKGPQGKPGLAGLPGADGPPGHPGKEGQSGEKGALGPPGPQGPIGYPGPRGVKGADGVRGLKGSKGEKGEDGFPGFKGDMGLKGDRGEVGQIGPRGEDGPEGPKGRAGPTGDPGPSGQAGEKGKLGVPGLPGYPGRQGPKGSTGFPGFPGANGEKGARGVAGKPGPRGQRGPTGPRGSRGARGPTGKPGPKGTSGGDGPPGPPGERGPQGPQGPVGFPGPKGPPGPPGKDGLPGHPGQRGETGFQGKTGPPGPGGVVGPQGPTGETGPIGERGHPGPPGPPGEQGLPGAAGKEGAKGDPGPQGISGKDGPAGLRGFPGERGLPGAQGAPGLKGGEGPQGPPGPVGSPGERGSAGTAGPIGLPGRPGPQGPPGPAGEKGAPGEKGPQGPAGRDGVQGPVGLPGPAGPAGSPGEDGDKGEIGEPGQKGSKGDKGENGPPGPPGLQGPVGAPGIAGGDGEPGPRGQQGMFGQKGDEGARGFPGPPGPIGLQGLPGPPGEKGENGDVGPMGPPGPPGPRGPQGPNGADGPQGPPGSVGSVGGVGEKGEPGEAGNPGPPGEAGVGGPKGERGEKGEAGPPGAAGPPGAKGPPGDDGPKGNPGPVGFPGDPGPPGEPGPAGQDGVGGDKGEDGDPGQPGPPGPSGEAGPPGPPGKRGPPGAAGAEGRQGEKGAKGEAGAEGPPGKTGPVGPQGPAGKPGPEGLRGIPGPVGEQGLPGAAGQDGPPGPMGPPGLPGLKGDPGSKGEKGHPGLIGLIGPPGEQGEKGDRGLPGTQGSPGAKGDGGIPGPAGPLGPPGPPGLPGPQGPKGNKGSTGPAGQKGDSGLPGPPGSPGPPGEVIQPLPILSSKKTRRHTEGMQADADDNILDYSDGMEEIFGSLNSLKQDIEHMKFPMGTQTNPARTCKDLQLSHPDFPDGEYWIDPNQGCSGDSFKVYCNFTSGGETCIYPDKKSEGVRISSWPKEKPGSWFSEFKRGKLLSYLDVEGNSINMVQMTFLKLLTASARQNFTYHCHQSAAWYDVSSGSYDKALRFLGSNDEEMSYDNNPFIKTLYDGCASRKGYEKTVIEINTPKIDQVPIVDVMINDFGDQNQKFGFEVGPVCFLG

SEQ ID NO: 26579 - protein, 694 aa, Homo sapiens
  REGION 1..694: note = ENSP00000489428
  VARIANT 1: note = Any amino acid
XPKAAYDYCEHYSPDCDSSAPKAAQAQEPQIDEYAPEDIIEYDYEYGEAEYKEAESVTEGPTVTEETIAQTEANIVDDFQEYNYGTMESYQTEAPRHVSGTNEPNPVEEIFTEEYLTGEDYDSQRKNSEDTLYENKEIDGRDSDLLVDGDLGEYDFYEYKEYEDKPTSPPNEEFGPGVPAETDITETSINGHGAYGEKGQKGEPAVVEPGMLVEGPPGPAGPAGIMGPPGLQGPTGPPGDPGDRGPPGRPGLPGADGLPGPPGTMLMLPFRYGGDGSKGPTISAQEAQAQAILQQARIALRGPPGPMGLTGRPGPVGGPGSSGAKGESGDPGPQGPRGVQGPPGPTGKPGKRGRPGADGGRGMPGEPGAKGDRGFDGLPGLPGDKGHRGERGPQGPPGPPGDDGMRGEDGEIGPRGLPGEAGPRGLLGPRGTPGAPGQPGMAGVDGPPGPKGNMGPQGEPGPPGQQGNPGPQGLPGPQGPIGPPGEKGPQGKPGLAGLPGADGPPGHPGKEGQSGEKGALGPPGPQGPIGYPGPRGVKGADGVRGLKGSKGEKGEDGFPGFKGDMGLKGDRGEVGQIGPRGEDGPEGPKGRAGPTGDPGPSGQAGEKGKLGVPGLPGYPGRQGPKDFRCHWFHWIPWVSRCQWRERCTGSSWQTRPSGSAWSNGSSRFKRCKRSHWETWAKGHFRWRWPSWPSR

SEQ ID NO: 26580 - protein, 1690 aa, Homo sapiens
  REGION 1..1690: note = ENSP00000426533
MEPWSSRWKTKRWLWDFTVTTLALTFLFQAREVRGAAPVDVLKALDFHNSPEGISKTTGFCTNRKNSKGSDTAYRVSKQAQLSAPTKQLFPGGTFPEDFSILFTVKPKKGIQSFLLSIYNEHGIQQIGVEVGRSPVFLFEDHTGKPAPEDYPLFRTVNIADGKWHRVAISVEKKTVTMIVDCKKKTTKPLDRSERAIVDTNGITVFGTRILDEEVFEGDIQQFLITGDPKAAYDYCEHYSPDCDSSAPKAAQAQEPQIDEYAPEDIIEYDYEYGEAEYKEAESVTEGPTVTEETIAQTEINGHGAYGEKGQKGEPAVVEPGMLVEGPPGPAGPAGIMGPPGLQGPTGPPGDPGDRGPPGRPGLPGADGLPGPPGTMLMLPFRYGGDGSKGPTISAQEAQAQAILQQARIALRGPPGPMGLTGRPGPVGGPGSSGAKGESGDPGPQGPRGVQGPPGPTGKPGKRGRPGADGGRGMPGEPGAKGDRGFDGLPGLPGDKGHRGERGPQGPPGPPGDDGMRGEDGEIGPRGLPGEAGPRGLLGPRGTPGAPGQPGMAGVDGPPGPKGNMGPQGEPGPPGQQGNPGPQGLPGPQGPIGPPGEKGPQGKPGLAGLPGADGPPGHPGKEGQSGEKGALGPPGPQGPIGYPGPRGVKGADGVRGLKGSKGEKGEDGFPGFKGDMGLKGDRGEVGQIGPRGEDGPEGPKGRAGPTGDPGPSGQAGEKGKLGVPGLPGYPGRQGPKGSTGFPGFPGANGEKGARGVAGKPGPRGQRGPTGPRGSRGARGPTGKPGPKGTSGGDGPPGPPGERGPQGPQGPVGFPGPKGPPGPPGKDGLPGHPGQRGETGFQGKTGPPGPGGVVGPQGPTGETGPIGERGHPGPPGPPGEQGLPGAAGKEGAKGDPGPQGISGKDGPAGLRGFPGERGLPGAQGAPGLKGGEGPQGPPGPVGSPGERGSAGTAGPIGLPGRPGPQGPPGPAGEKGAPGEKGPQGPAGRDGVQGPVGLPGPAGPAGSPGEDGDKGEIGEPGQKGSKGDKGENGPPGPPGLQGPVGAPGIAGGDGEPGPRGQQGMFGQKGDEGARGFPGPPGPIGLQGLPGPPGEKGENGDVGPMGPPGPPGPRGPQGPNGADGPQGPPGSVGSVGGVGEKGEPGEAGNPGPPGEAGVGGPKGERGEKGEAGPPGAAGPPGAKGPPGDDGPKGNPGPVGFPGDPGPPGEPGPAGQDGVGGDKGEDGDPGQPGPPGPSGEAGPPGPPGKRGPPGAAGAEGRQGEKGAKGEAGAEGPPGKTGPVGPQGPAGKPGPEGLRGIPGPVGEQGLPGAAGQDGPPGPMGPPGLPGLKGDPGSKGEKGHPGLIGLIGPPGEQGEKGDRGLPGTQGSPGAKGDGGIPGPAGPLGPPGPPGLPGPQGPKGNKGSTGPAGQKGDSGLPGPPGSPGPPGEVIQPLPILSSKKTRRHTEGMQADADDNILDYSDGMEEIFGSLNSLKQDIEHMKFPMGTQTNPARTCKDLQLSHPDFPDGEYWIDPNQGCSGDSFKVYCNFTSGGETCIYPDKKSEGVRISSWPKEKPGSWFSEFKRGKLLSYLDVEGNSINMVQMTFLKLLTASARQNFTYHCHQSAAWYDVSSGSYDKALRFLGSNDEEMSYDNNPFIKTLYDGCASRKGYEKTVIEINTPKIDQVPIVDVMINDFGDQNQKFGFEVGPVCFLG

SEQ ID NO: 26581 - protein, 569 aa, Homo sapiens
  REGION 1..569: note = ENSP00000408640
MEPWSSRWKTKRWLWDFTVTTLALTFLFQAREVRGAAPVDVLKALDFHNSPEGISKTTGFCTNRKNSKGSDTAYRVSKQAQLSAPTKQLFPGGTFPEDFSILFTVKPKKGIQSFLLSIYNEHGIQQIGVEVGRSPVFLFEDHTGKPAPEDYPLFRTVNIADGKWHRVAISVEKKTVTMIVDCKKKTTKPLDRSERAIVDTNGITVFGTRILDEEVFEGDIQQFLITGDPKAAYDYCEHYSPDCDSSAPKAAQAQEPQIDEKKKSNFKKKMRTVATKSKEKSKKFTPPKSEKFSSKKKKSYQASAKAKLGVKANIVDDFQEYNYGTMESYQTEAPRHVSGTNEPNPVEEIFTEEYLTGEDYDSQRKNSEDTLYENKEIDGRDSDLLVDGDLGEYDFYEYKEYEDKPTSPPNEEFGPGVPAETDITETSINGHGAYGEKGQKGEPAVVEPGMLVEGPPGPAGPAGIMGPPGLQGPTGPPGDPGDRGPPGRPGLPGADGLPGPPGTMLMLPFRYGGDGSKGPTISAQEAQAQAILQQARIALRGPPGPMGLTGRPGPVGGPGSSGAKGESGD

SEQ ID NO: 26582 - protein, 200 aa, Homo sapiens
  REGION 1..200: note = ENSP00000410177
YRVSKQAQLSAPTKQLFPGGTFPEDFSILFTVKPKKGIQSFLLSIYNEHGIQQIGVEVGRSPVFLFEDHTGKPAPEDYPLFRTVNIADGKWHRVAISVEKKTVTMIVDCKKKTTKPLDRSERAIVDTNGITVFGTRILDEEVFEGDIQQFLITGDPKAAYDYCEHYSPDCDSSAPKAAQAQEPQIDEVRSTRPEKVFVFQ

SEQ ID NO: 26583 - protein, 1767 aa, Homo sapiens
  REGION 1..1767: note = ENSP00000302551
MEPWSSRWKTKRWLWDFTVTTLALTFLFQAREVRGAAPVDVLKALDFHNSPEGISKTTGFCTNRKNSKGSDTAYRVSKQAQLSAPTKQLFPGGTFPEDFSILFTVKPKKGIQSFLLSIYNEHGIQQIGVEVGRSPVFLFEDHTGKPAPEDYPLFRTVNIADGKWHRVAISVEKKTVTMIVDCKKKTTKPLDRSERAIVDTNGITVFGTRILDEEVFEGDIQQFLITGDPKAAYDYCEHYSPDCDSSAPKAAQAQEPQIDEANIVDDFQEYNYGTMESYQTEAPRHVSGTNEPNPVEEIFTEEYLTGEDYDSQRKNSEDTLYENKEIDGRDSDLLVDGDLGEYDFYEYKEYEDKPTSPPNEEFGPGVPAETDITETSINGHGAYGEKGQKGEPAVVEPGMLVEGPPGPAGPAGIMGPPGLQGPTGPPGDPGDRGPPGRPGLPGADGLPGPPGTMLMLPFRYGGDGSKGPTISAQEAQAQAILQQARIALRGPPGPMGLTGRPGPVGGPGSSGAKGESGDPGPQGPRGVQGPPGPTGKPGKRGRPGADGGRGMPGEPGAKGDRGFDGLPGLPGDKGHRGERGPQGPPGPPGDDGMRGEDGEIGPRGLPGEAGPRGLLGPRGTPGAPGQPGMAGVDGPPGPKGNMGPQGEPGPPGQQGNPGPQGLPGPQGPIGPPGEKGPQGKPGLAGLPGADGPPGHPGKEGQSGEKGALGPPGPQGPIGYPGPRGVKGADGVRGLKGSKGEKGEDGFPGFKGDMGLKGDRGEVGQIGPRGEDGPEGPKGRAGPTGDPGPSGQAGEKGKLGVPGLPGYPGRQGPKGSTGFPGFPGANGEKGARGVAGKPGPRGQRGPTGPRGSRGARGPTGKPGPKGTSGGDGPPGPPGERGPQGPQGPVGFPGPKGPPGPPGKDGLPGHPGQRGETGFQGKTGPPGPGGVVGPQGPTGETGPIGERGHPGPPGPPGEQGLPGAAGKEGAKGDPGPQGISGKDGPAGLRGFPGERGLPGAQGAPGLKGGEGPQGPPGPVGSPGERGSAGTAGPIGLPGRPGPQGPPGPAGEKGAPGEKGPQGPAGRDGVQGPVGLPGPAGPAGSPGEDGDKGEIGEPGQKGSKGDKGENGPPGPPGLQGPVGAPGIAGGDGEPGPRGQQGMFGQKGDEGARGFPGPPGPIGLQGLPGPPGEKGENGDVGPMGPPGPPGPRGPQGPNGADGPQGPPGSVGSVGGVGEKGEPGEAGNPGPPGEAGVGGPKGERGEKGEAGPPGAAGPPGAKGPPGDDGPKGNPGPVGFPGDPGPPGEPGPAGQDGVGGDKGEDGDPGQPGPPGPSGEAGPPGPPGKRGPPGAAGAEGRQGEKGAKGEAGAEGPPGKTGPVGPQGPAGKPGPEGLRGIPGPVGEQGLPGAAGQDGPPGPMGPPGLPGLKGDPGSKGEKGHPGLIGLIGPPGEQGEKGDRGLPGTQGSPGAKGDGGIPGPAGPLGPPGPPGLPGPQGPKGNKGSTGPAGQKGDSGLPGPPGSPGPPGEVIQPLPILSSKKTRRHTEGMQADADDNILDYSDGMEEIFGSLNSLKQDIEHMKFPMGTQTNPARTCKDLQLSHPDFPDGEYWIDPNQGCSGDSFKVYCNFTSGGETCIYPDKKSEGVRISSWPKEKPGSWFSEFKRGKLLSYLDVEGNSINMVQMTFLKLLTASARQNFTYHCHQSAAWYDVSSGSYDKALRFLGSNDEEMSYDNNPFIKTLYDGCASRKGYEKTVIEINTPKIDQVPIVDVMINDFGDQNQKFGFEVGPVCFLG

SEQ ID NO: 26584 - protein, 1818 aa, Homo sapiens
  REGION 1..1818: note = ENSP00000351163
MEPWSSRWKTKRWLWDFTVTTLALTFLFQAREVRGAAPVDVLKALDFHNSPEGISKTTGFCTNRKNSKGSDTAYRVSKQAQLSAPTKQLFPGGTFPEDFSILFTVKPKKGIQSFLLSIYNEHGIQQIGVEVGRSPVFLFEDHTGKPAPEDYPLFRTVNIADGKWHRVAISVEKKTVTMIVDCKKKTTKPLDRSERAIVDTNGITVFGTRILDEEVFEGDIQQFLITGDPKAAYDYCEHYSPDCDSSAPKAAQAQEPQIDEKKKSNFKKKMRTVATKSKEKSKKFTPPKSEKFSSKKKKSYQASAKAKLGVKANIVDDFQEYNYGTMESYQTEAPRHVSGTNEPNPVEEIFTEEYLTGEDYDSQRKNSEDTLYENKEIDGRDSDLLVDGDLGEYDFYEYKEYEDKPTSPPNEEFGPGVPAETDITETSINGHGAYGEKGQKGEPAVVEPGMLVEGPPGPAGPAGIMGPPGLQGPTGPPGDPGDRGPPGRPGLPGADGLPGPPGTMLMLPFRYGGDGSKGPTISAQEAQAQAILQQARIALRGPPGPMGLTGRPGPVGGPGSSGAKGESGDPGPQGPRGVQGPPGPTGKPGKRGRPGADGGRGMPGEPGAKGDRGFDGLPGLPGDKGHRGERGPQGPPGPPGDDGMRGEDGEIGPRGLPGEAGPRGLLGPRGTPGAPGQPGMAGVDGPPGPKGNMGPQGEPGPPGQQGNPGPQGLPGPQGPIGPPGEKGPQGKPGLAGLPGADGPPGHPGKEGQSGEKGALGPPGPQGPIGYPGPRGVKGADGVRGLKGSKGEKGEDGFPGFKGDMGLKGDRGEVGQIGPRGEDGPEGPKGRAGPTGDPGPSGQAGEKGKLGVPGLPGYPGRQGPKGSTGFPGFPGANGEKGARGVAGKPGPRGQRGPTGPRGSRGARGPTGKPGPKGTSGGDGPPGPPGERGPQGPQGPVGFPGPKGPPGPPGKDGLPGHPGQRGETGFQGKTGPPGPGGVVGPQGPTGETGPIGERGHPGPPGPPGEQGLPGAAGKEGAKGDPGPQGISGKDGPAGLRGFPGERGLPGAQGAPGLKGGEGPQGPPGPVGSPGERGSAGTAGPIGLPGRPGPQGPPGPAGEKGAPGEKGPQGPAGRDGVQGPVGLPGPAGPAGSPGEDGDKGEIGEPGQKGSKGDKGENGPPGPPGLQGPVGAPGIAGGDGEPGPRGQQGMFGQKGDEGARGFPGPPGPIGLQGLPGPPGEKGENGDVGPMGPPGPPGPRGPQGPNGADGPQGPPGSVGSVGGVGEKGEPGEAGNPGPPGEAGVGGPKGERGEKGEAGPPGAAGPPGAKGPPGDDGPKGNPGPVGFPGDPGPPGEPGPAGQDGVGGDKGEDGDPGQPGPPGPSGEAGPPGPPGKRGPPGAAGAEGRQGEKGAKGEAGAEGPPGKTGPVGPQGPAGKPGPEGLRGIPGPVGEQGLPGAAGQDGPPGPMGPPGLPGLKGDPGSKGEKGHPGLIGLIGPPGEQGEKGDRGLPGTQGSPGAKGDGGIPGPAGPLGPPGPPGLPGPQGPKGNKGSTGPAGQKGDSGLPGPPGSPGPPGEVIQPLPILSSKKTRRHTEGMQADADDNILDYSDGMEEIFGSLNSLKQDIEHMKFPMGTQTNPARTCKDLQLSHPDFPDGEYWIDPNQGCSGDSFKVYCNFTSGGETCIYPDKKSEGVRISSWPKEKPGSWFSEFKRGKLLSYLDVEGNSINMVQMTFLKLLTASARQNFTYHCHQSAAWYDVSSGSYDKALRFLGSNDEEMSYDNNPFIKTLYDGCASRKGYEKTVIEINTPKIDQVPIVDVMINDFGDQNQKFGFEVGPVCFLG

SEQ ID NO: 26585 - protein, 1650 aa, Homo sapiens
  REGION 1..1650: note = ENSP00000408123
MERCSRCHRLLLLLPLVLGLSAAPGWAGAPPVDVLRALRFPSLPDGVRRAKGICPADVAYRVARPAQLSAPTRQLFPGGFPKDFSLLTVVRTRPGLQAPLLTLYSAQGVRQLGLELGPPVRFLYEDQTGRPQPPSQPVFRGLSLADGKWHRVAVAVKGQSVTLIVDCKKRVTRPLPRSARPVLDTHGVIIFGARILDEEVFEGDVQELAIVPGVQAAYESCEQKELECEGGQRERPQNQQPHRAQRSPQQQPSRLHRPQNQEPQSQDPTPGEEEEILESSLLPPLEEAAHGPRGLKGEKGEPAVLEPGMLVEGPPGPEGPAGLIGPPGIQGNPGPVGDPGERGPPGRAGLPGSDGAPGPPGTSLMLPFRFGSGGGDKGPVVAAQEAQAQAILQQARLALRGPPGPMGYTGRPGPLGQPGSPGLKGESGDLGPQGPRGPQGLTGPPGKAGRRGRAGADGARGMPGDPGVKGDRGFDGLPGLPGEKGHRGDTGAQGLPGPPGEDGERGDDGEIGPRGLPGESGPRGLLGPKGPPGIPGPPGVRGMDGPQGPKGSLGPQGEPGPPGQQGTPGTQGLPGPQGAIGPHGEKGPQGKPGLPGMPGSDGPPGHPGKEGPPGTKGNQGPSGPQGPLGYPGPRGVKGVDGIRGLKGHKGEKGEDGFPGFKGDIGVKGDRGEVGVPGSRGEDGPEGPKGRTGPTGDPGPPGLMGEKGKLGVPGLPGYPGRQGPKGSLGFPGFPGASGEKGARGLSGKSGPRGERGPTGPRGQRGPRGATGKSGAKGTSGGDGPHGPPGERGLPGPQGPNGFPGPKGPPGPPGKDGLPGHPGQRGEVGFQGKTGPPGPPGVVGPQGAAGETGPMGERGHPGPPGPPGEQGLPGTAGKEGTKGDPGPPGAPGKDGPAGLRGFPGERGLPGTAGGPGLKGNEGPSGPPGPAGSPGERGAAGSGGPIGPPGRPGPQGPPGAAGEKGVPGEKGPIGPTGRDGVQGPVGLPGPAGPPGVAGEDGDKGEVGDPGQKGTKGNKGEHGPPGPPGPIGPVGQPGAAGADGEPGARGPQGHFGAKGDEGTRGFNGPPGPIGLQGLPGPSGEKGETGDVGPMGPPGPPGPRGPAGPNGADGPQGPPGGVGNLGPPGEKGEPGESGSPGIQGEPGVKGPRGERGEKGESGQPGEPGPPGPKGPTGDDGPKGNPGPVGFPGDPGPPGEGGPRGQDGAKGDRGEDGEPGQPGSPGPTGENGPPGPLGKRGPAGSPGSEGRQGGKGAKGDPGAIGAPGKTGPVGPAGPAGKPGPDGLRGLPGSVGQQGRPGATGQAGPPGPVGPPGLPGLRGDAGAKGEKGHPGLIGLIGPPGEQGEKGDRGLPGPQGSPGQKGEMGIPGASGPIGPGGPPGLPGPAGPKGAKGATGPGGPKGEKGVQGPPGHPGPPGEVIQPLPIQMPKKTRRSVDGSRLMQEDEAIPTGGAPGSPGGLEEIFGSLDSLREEIEQMRRPTGTQDSPARTCQDLKLCHPELPDGEYWVDPNQGCARDAFRVFCNFTAGGETCVTPRDDVTQFSYVDSEGSPVGVVQLTFLRLLSVSAHQDVSYPCSGAARDGPLRLRGANEDELSPETSPYVKEFRDGCQTQQGRTVLEVRTPVLEQLPVLDASFSDLGAPPRRGGVLLGPVCFMG

SEQ ID NO: 26586 - protein, 624 aa, Homo sapiens
  REGION 1..624: note = ENSP00000416619
MERCSRCHRLLLLLPLVLGLSAAPGWAGAPPVDVLRALRFPSLPDGVRRAKGICPADVAYRVARPAQLSAPTRQLFPGGFPKDFSLLTVVRTRPGLQAPLLTLYSAQGVRQLGLELGPPVRFLYEDQTGRPQPPSQPVFRGLSLADGKWHRVAVAVKGQSVTLIVDCKKRVTRPLPRSARPVLDTHGVIIFGARILDEEVFEGDVQELAIVPGVQAAYESCEQKELECEGGQRERPQNQQPHRAQRSPQQQPSRLHRPQNQEPQSQPTESLYYDYKPPYYDVMTTGTTPDYQDPTPGEEEEILESSLLPPLEEEQTDLQVPPTADRFQAEEYGEGGTDPPEGPYDYTYGYGDDYREETELGPALSAETAHSGAAAHGPRGLKGEKGEPAVLEPGMLVEGPPGPEGPAGLIGPPGIQGNPGPVGDPGERGPPGRAGLPGSDGAPGPPGTSLMLPFRFGSGGGDKGPVVAAQEAQAQAILQQARLALRGPPGPMGYTGRPGPLGQPGSPGLKGESGDLGPQGPRGPQGLTGPPGKAGRRGRAGADGARGMPGDPGVKGDRGFDGLPGLPGEKGHRGDTGAQGLPGPPGEDGERGDDGEIGPRGLPGESGPRGLLGPKGPPGIPGPP

SEQ ID NO: 26587 - protein, 290 aa, Homo sapiens
  REGION 1..290: note = ENSP00000396587
MERCSRCHRLLLLLPLVLGLSAAPGWAGAPPVDVLRALRFPSLPDGVRRAKGICPADVAYRVARPAQLSAPTRQLFPGGFPKDFSLLTVVRTRPGLQAPLLTLYSAQGVRQLGLELGPPVRFLYEDQTGRPQPPSQPVFRGLSLADGKWHRVAVAVKGQSVTLIVDCKKRVTRPLPRSARPVLDTHGVIIFGARILDEEVFEGDVQELAIVPGVQAAYESCEQKELECEGGQRERPQNQQPHRAQRSPQQQPSRLHRPQNQEPQSQVRELGEPPSAAHPREGRHPGISPP

SEQ ID NO: 26588 - protein, 1629 aa, Homo sapiens
  REGION 1..1629: note = ENSP00000449320
MERCSRCHRLLLLLPLVLGLSAAPGWAGAPPVDVLRALRFPSLPDGVRRAKGICPADVAYRVARPAQLSAPTRQLFPGGFPKDFSLLTVVRTRPGLQAPLLTLYSAQGVRQLGLELGPPVRFLYEDQTGRPQPPSQPVFRGLSLADGKWHRVAVAVKGQSVTLIVDCKKRVTRPLPRSARPVLDTHGVIIFGARILDEEVFEGDVQELAIVPGVQAAYESCEQKELECEGGQRERPQNQQPHRAQRSPQQQPSRLHRPQNQEPQSQAAHGPRGLKGEKGEPAVLEPGMLVEGPPGPEGPAGLIGPPGIQGNPGPVGDPGERGPPGRAGLPGSDGAPGPPGTSLMLPFRFGSGGGDKGPVVAAQEAQAQAILQQARLALRGPPGPMGYTGRPGPLGQPGSPGLKGESGDLGPQGPRGPQGLTGPPGKAGRRGRAGADGARGMPGDPGVKGDRGFDGLPGLPGEKGHRGDTGAQGLPGPPGEDGERGDDGEIGPRGLPGESGPRGLLGPKGPPGIPGPPGVRGMDGPQGPKGSLGPQGEPGPPGQQGTPGTQGLPGPQGAIGPHGEKGPQGKPGLPGMPGSDGPPGHPGKEGPPGTKGNQGPSGPQGPLGYPGPRGVKGVDGIRGLKGHKGEKGEDGFPGFKGDIGVKGDRGEVGVPGSRGEDGPEGPKGRTGPTGDPGPPGLMGEKGKLGVPGLPGYPGRQGPKGSLGFPGFPGASGEKGARGLSGKSGPRGERGPTGPRGQRGPRGATGKSGAKGTSGGDGPHGPPGERGLPGPQGPNGFPGPKGPPGPPGKDGLPGHPGQRGEVGFQGKTGPPGPPGVVGPQGAAGETGPMGERGHPGPPGPPGEQGLPGTAGKEGTKGDPGPPGAPGKDGPAGLRGFPGERGLPGTAGGPGLKGNEGPSGPPGPAGSPGERGAAGSGGPIGPPGRPGPQGPPGAAGEKGVPGEKGPIGPTGRDGVQGPVGLPGPAGPPGVAGEDGDKGEVGDPGQKGTKGNKGEHGPPGPPGPIGPVGQPGAAGADGEPGARGPQGHFGAKGDEGTRGFNGPPGPIGLQGLPGPSGEKGETGDVGPMGPPGPPGPRGPAGPNGADGPQGPPGGVGNLGPPGEKGEPGESGSPGIQGEPGVKGPRGERGEKGESGQPGEPGPPGPKGPTGDDGPKGNPGPVGFPGDPGPPGEGGPRGQDGAKGDRGEDGEPGQPGSPGPTGENGPPGPLGKRGPAGSPGSEGRQGGKGAKGDPGAIGAPGKTGPVGPAGPAGKPGPDGLRGLPGSVGQQGRPGATGQAGPPGPVGPPGLPGLRGDAGAKGEKGHPGLIGLIGPPGEQGEKGDRGLPGPQGSPGQKGEMGIPGASGPIGPGGPPGLPGPAGPKGAKGATGPGGPKGEKGVQGPPGHPGPPGEVIQPLPIQMPKKTRRSVDGSRLMQEDEAIPTGGAPGSPGGLEEIFGSLDSLREEIEQMRRPTGTQDSPARTCQDLKLCHPELPDGEYWVDPNQGCARDAFRVFCNFTAGGETCVTPRDDVTQFSYVDSEGSPVGVVQLTFLRLLSVSAHQDVSYPCSGAARDGPLRLRGANEDELSPETSPYVKEFRDGCQTQQGRTVLEVRTPVLEQLPVLDASFSDLGAPPRRGGVLLGPVCFMG

SEQ ID NO: 26589 - protein, 1736 aa, Homo sapiens
  REGION 1..1736: note = ENSP00000448715
MERCSRCHRLLLLLPLVLGLSAAPGWAGAPPVDVLRALRFPSLPDGVRRAKGICPADVAYRVARPAQLSAPTRQLFPGGFPKDFSLLTVVRTRPGLQAPLLTLYSAQGVRQLGLELGPPVRFLYEDQTGRPQPPSQPVFRGLSLADGKWHRVAVAVKGQSVTLIVDCKKRVTRPLPRSARPVLDTHGVIIFGARILDEEVFEGDVQELAIVPGVQAAYESCEQKELECEGGQRERPQNQQPHRAQRSPQQQPSRLHRPQNQEPQSQPTESLYYDYKPPYYDVMTTGTTPDYQDPTPGEEEEILESSLLPPLEEEQTDLQVPPTADRFQAEEYGEGGTDPPEGPYDYTYGYGDDYREETELGPALSAETAHSGAAAHGPRGLKGEKGEPAVLEPGMLVEGPPGPEGPAGLIGPPGIQGNPGPVGDPGERGPPGRAGLPGSDGAPGPPGTSLMLPFRFGSGGGDKGPVVAAQEAQAQAILQQARLALRGPPGPMGYTGRPGPLGQPGSPGLKGESGDLGPQGPRGPQGLTGPPGKAGRRGRAGADGARGMPGDPGVKGDRGFDGLPGLPGEKGHRGDTGAQGLPGPPGEDGERGDDGEIGPRGLPGESGPRGLLGPKGPPGIPGPPGVRGMDGPQGPKGSLGPQGEPGPPGQQGTPGTQGLPGPQGAIGPHGEKGPQGKPGLPGMPGSDGPPGHPGKEGPPGTKGNQGPSGPQGPLGYPGPRGVKGVDGIRGLKGHKGEKGEDGFPGFKGDIGVKGDRGEVGVPGSRGEDGPEGPKGRTGPTGDPGPPGLMGEKGKLGVPGLPGYPGRQGPKGSLGFPGFPGASGEKGARGLSGKSGPRGERGPTGPRGQRGPRGATGKSGAKGTSGGDGPHGPPGERGLPGPQGPNGFPGPKGPPGPPGKDGLPGHPGQRGEVGFQGKTGPPGPPGVVGPQGAAGETGPMGERGHPGPPGPPGEQGLPGTAGKEGTKGDPGPPGAPGKDGPAGLRGFPGERGLPGTAGGPGLKGNEGPSGPPGPAGSPGERGAAGSGGPIGPPGRPGPQGPPGAAGEKGVPGEKGPIGPTGRDGVQGPVGLPGPAGPPGVAGEDGDKGEVGDPGQKGTKGNKGEHGPPGPPGPIGPVGQPGAAGADGEPGARGPQGHFGAKGDEGTRGFNGPPGPIGLQGLPGPSGEKGETGDVGPMGPPGPPGPRGPAGPNGADGPQGPPGGVGNLGPPGEKGEPGESGSPGIQGEPGVKGPRGERGEKGESGQPGEPGPPGPKGPTGDDGPKGNPGPVGFPGDPGPPGEGGPRGQDGAKGDRGEDGEPGQPGSPGPTGENGPPGPLGKRGPAGSPGSEGRQGGKGAKGDPGAIGAPGKTGPVGPAGPAGKPGPDGLRGLPGSVGQQGRPGATGQAGPPGPVGPPGLPGLRGDAGAKGEKGHPGLIGLIGPPGEQGEKGDRGLPGPQGSPGQKGEMGIPGASGPIGPGGPPGLPGPAGPKGAKGATGPGGPKGEKGVQGPPGHPGPPGEVIQPLPIQMPKKTRRSVDGSRLMQEDEAIPTGGAPGSPGGLEEIFGSLDSLREEIEQMRRPTGTQDSPARTCQDLKLCHPELPDGEYWVDPNQGCARDAFRVFCNFTAGGETCVTPRDDVTQFSYVDSEGSPVGVVQLTFLRLLSVSAHQDVSYPCSGAARDGPLRLRGANEDELSPETSPYVKEFRDGCQTQQGRTVLEVRTPVLEQLPVLDASFSDLGAPPRRGGVLLGPVCFMG

SEQ ID NO: 26590 - protein, 1650 aa, Homo sapiens
  REGION 1..1650: note = ENSP00000388309
MERCSRCHRLLLLLPLVLGLSAAPGWAGAPPVDVLRALRFPSLPDGVRRAKGICPADVAYRVARPAQLSAPTRQLFPGGFPKDFSLLTVVRTRPGLQAPLLTLYSAQGVRQLGLELGRPVRFLYEDQTGRPQPPSQPVFRGLSLADGKWHRVAVAVKGQSVTLIVDCKKRVTRPLPRSARPVLDTHGVIIFGARILDEEVFEGDVQELAIVPGVQAAYESCEQKELECEGGQRERPQNQQPHRAQRSPQQQPSRLHRPQNQEPQSQDPTPGEEEEILESSLLPPLEEAAHGPRGLKGEKGEPAVLEPGMLVEGPPGPEGPAGLIGPPGIQGNPGPVGDPGERGPPGRAGLPGSDGAPGPPGTSLMLPFRFGSGGGDKGPVVAAQEAQAQAILQQARLALRGPPGPMGYTGRPGPLGQPGSPGLKGESGDLGPQGPRGPQGLTGPPGKAGRRGRAGADGARGMPGDPGVKGDRGFDGLPGLPGEKGHRGDTGAQGLPGPPGEDGERGDDGEIGPRGLPGESGPRGLLGPKGPPGIPGPPGVRGMDGPQGPKGSLGPQGEPGPPGQQGTPGTQGLPGPQGAIGPHGEKGPQGKPGLPGMPGSDGPPGHPGKEGPPGTKGNQGPSGPQGPLGYPGPRGVKGVDGIRGLKGHKGEKGEDGFPGFKGDIGVKGDRGEVGVPGSRGEDGPEGPKGRTGPTGDPGPPGLMGEKGKLGVPGLPGYPGRQGPKGSLGFPGFPGASGEKGARGLSGKSGPRGERGPTGPRGQRGPRGATGKSGAKGTSGGDGPHGPPGERGLPGPQGPNGFPGPKGPPGPPGKDGLPGHPGQRGEVGFQGKTGPPGPPGVVGPQGAAGETGPMGERGHPGPPGPPGEQGLPGTAGKEGTKGDPGPPGAPGKDGPAGLRGFPGERGLPGTAGGPGLKGNEGPSGPPGPAGSPGERGAAGSGGPIGPPGRPGPQGPPGAAGEKGVPGEKGPIGPTGRDGVQGPVGLPGPAGPPGVAGEDGDKGEVGDPGQKGTKGNKGEHGPPGPPGPIGPVGQPGAAGADGEPGARGPQGHFGAKGDEGTRGFNGPPGPIGLQGLPGPSGEKGETGDVGPMGPPGPPGPRGPAGPNGADGPQGPPGGVGNLGPPGEKGEPGESGSPGIQGEPGVKGPRGERGEKGESGQPGEPGPPGPKGPTGDDGPKGNPGPVGFPGDPGPPGEGGPRGQDGAKGDRGEDGEPGQPGSPGPTGENGPPGPLGKRGPAGSPGSEGRQGGKGAKGDPGAIGAPGKTGPVGPAGPAGKPGPDGLRGLPGSVGQQGRPGATGQAGPPGPVGPPGLPGLRGDAGAKGEKGHPGLIGLIGPPGEQGEKGDRGLPGPQGSPGQKGEMGIPGASGPIGPGGPPGLPGPAGPKGAKGATGPGGPKGEKGVQGPPGHPGPPGEVIQPLPIQMPKKTRRSVDGSRLMQEDEAIPTGGAPGSPGGLEEIFGSLDSLREEIEQMRRPTGTQDSPARTCQDLKLCHPELPDGEYWVDPNQGCARDAFRVFCNFTAGGETCVTPRDDVTQFSYVDSEGSPVGVVQLTFLRLLSVSAHQDVSYPCSGAARDGPLRLRGANEDELSPETSPYVKEFRDGCQTQQGRTVLEVRTPVLEQLPVLDASFSDLGAPPRRGGVLLGPVCFMG

SEQ ID NO: 26591 - protein, 624 aa, Homo sapiens
  REGION 1..624: note = ENSP00000388775
MERCSRCHRLLLLLPLVLGLSAAPGWAGAPPVDVLRALRFPSLPDGVRRAKGICPADVAYRVARPAQLSAPTRQLFPGGFPKDFSLLTVVRTRPGLQAPLLTLYSAQGVRQLGLELGRPVRFLYEDQTGRPQPPSQPVFRGLSLADGKWHRVAVAVKGQSVTLIVDCKKRVTRPLPRSARPVLDTHGVIIFGARILDEEVFEGDVQELAIVPGVQAAYESCEQKELECEGGQRERPQNQQPHRAQRSPQQQPSRLHRPQNQEPQSQPTESLYYDYKPPYYDVMTTGTTPDYQDPTPGEEEEILESSLLPPLEEEQTDLQVPPTADRFQAEEYGEGGTDPPEGPYDYTYGYGDDYREETELGPALSAETAHSGAAAHGPRGLKGEKGEPAVLEPGMLVEGPPGPEGPAGLIGPPGIQGNPGPVGDPGERGPPGRAGLPGSDGAPGPPGTSLMLPFRFGSGGGDKGPVVAAQEAQAQAILQQARLALRGPPGPMGYTGRPGPLGQPGSPGLKGESGDLGPQGPRGPQGLTGPPGKAGRRGRAGADGARGMPGDPGVKGDRGFDGLPGLPGEKGHRGDTGAQGLPGPPGEDGERGDDGEIGPRGLPGESGPRGLLGPKGPPGIPGPP

SEQ ID NO: 26592 - protein, 290 aa, Homo sapiens
  REGION 1..290: note = ENSP00000400813
MERCSRCHRLLLLLPLVLGLSAAPGWAGAPPVDVLRALRFPSLPDGVRRAKGICPADVAYRVARPAQLSAPTRQLFPGGFPKDFSLLTVVRTRPGLQAPLLTLYSAQGVRQLGLELGRPVRFLYEDQTGRPQPPSQPVFRGLSLADGKWHRVAVAVKGQSVTLIVDCKKRVTRPLPRSARPVLDTHGVIIFGARILDEEVFEGDVQELAIVPGVQAAYESCEQKELECEGGQRERPQNQQPHRAQRSPQQQPSRLHRPQNQEPQSQVRELGEPPSAAHPREGRHPGISPP

SEQ ID NO: 26593 - protein, 1629 aa, Homo sapiens
  REGION 1..1629: note = ENSP00000446870
MERCSRCHRLLLLLPLVLGLSAAPGWAGAPPVDVLRALRFPSLPDGVRRAKGICPADVAYRVARPAQLSAPTRQLFPGGFPKDFSLLTVVRTRPGLQAPLLTLYSAQGVRQLGLELGRPVRFLYEDQTGRPQPPSQPVFRGLSLADGKWHRVAVAVKGQSVTLIVDCKKRVTRPLPRSARPVLDTHGVIIFGARILDEEVFEGDVQELAIVPGVQAAYESCEQKELECEGGQRERPQNQQPHRAQRSPQQQPSRLHRPQNQEPQSQAAHGPRGLKGEKGEPAVLEPGMLVEGPPGPEGPAGLIGPPGIQGNPGPVGDPGERGPPGRAGLPGSDGAPGPPGTSLMLPFRFGSGGGDKGPVVAAQEAQAQAILQQARLALRGPPGPMGYTGRPGPLGQPGSPGLKGESGDLGPQGPRGPQGLTGPPGKAGRRGRAGADGARGMPGDPGVKGDRGFDGLPGLPGEKGHRGDTGAQGLPGPPGEDGERGDDGEIGPRGLPGESGPRGLLGPKGPPGIPGPPGVRGMDGPQGPKGSLGPQGEPGPPGQQGTPGTQGLPGPQGAIGPHGEKGPQGKPGLPGMPGSDGPPGHPGKEGPPGTKGNQGPSGPQGPLGYPGPRGVKGVDGIRGLKGHKGEKGEDGFPGFKGDIGVKGDRGEVGVPGSRGEDGPEGPKGRTGPTGDPGPPGLMGEKGKLGVPGLPGYPGRQGPKGSLGFPGFPGASGEKGARGLSGKSGPRGERGPTGPRGQRGPRGATGKSGAKGTSGGDGPHGPPGERGLPGPQGPNGFPGPKGPPGPPGKDGLPGHPGQRGEVGFQGKTGPPGPPGVVGPQGAAGETGPMGERGHPGPPGPPGEQGLPGTAGKEGTKGDPGPPGAPGKDGPAGLRGFPGERGLPGTAGGPGLKGNEGPSGPPGPAGSPGERGAAGSGGPIGPPGRPGPQGPPGAAGEKGVPGEKGPIGPTGRDGVQGPVGLPGPAGPPGVAGEDGDKGEVGDPGQKGTKGNKGEHGPPGPPGPIGPVGQPGAAGADGEPGARGPQGHFGAKGDEGTRGFNGPPGPIGLQGLPGPSGEKGETGDVGPMGPPGPPGPRGPAGPNGADGPQGPPGGVGNLGPPGEKGEPGESGSPGIQGEPGVKGPRGERGEKGESGQPGEPGPPGPKGPTGDDGPKGNPGPVGFPGDPGPPGEGGPRGQDGAKGDRGEDGEPGQPGSPGPTGENGPPGPLGKRGPAGSPGSEGRQGGKGAKGDPGAIGAPGKTGPVGPAGPAGKPGPDGLRGLPGSVGQQGRPGATGQAGPPGPVGPPGLPGLRGDAGAKGEKGHPGLIGLIGPPGEQGEKGDRGLPGPQGSPGQKGEMGIPGASGPIGPGGPPGLPGPAGPKGAKGATGPGGPKGEKGVQGPPGHPGPPGEVIQPLPIQMPKKTRRSVDGSRLMQEDEAIPTGGAPGSPGGLEEIFGSLDSLREEIEQMRRPTGTQDSPARTCQDLKLCHPELPDGEYWVDPNQGCARDAFRVFCNFTAGGETCVTPRDDVTQFSYVDSEGSPVGVVQLTFLRLLSVSAHQDVSYPCSGAARDGPLRLRGANEDELSPETSPYVKEFRDGCQTQQGRTVLEVRTPVLEQLPVLDASFSDLGAPPRRGGVLLGPVCFMG

SEQ ID NO: 26594 - protein, 1736 aa, Homo sapiens
  REGION 1..1736: note = ENSP00000448931
MERCSRCHRLLLLLPLVLGLSAAPGWAGAPPVDVLRALRFPSLPDGVRRAKGICPADVAYRVARPAQLSAPTRQLFPGGFPKDFSLLTVVRTRPGLQAPLLTLYSAQGVRQLGLELGRPVRFLYEDQTGRPQPPSQPVFRGLSLADGKWHRVAVAVKGQSVTLIVDCKKRVTRPLPRSARPVLDTHGVIIFGARILDEEVFEGDVQELAIVPGVQAAYESCEQKELECEGGQRERPQNQQPHRAQRSPQQQPSRLHRPQNQEPQSQPTESLYYDYKPPYYDVMTTGTTPDYQDPTPGEEEEILESSLLPPLEEEQTDLQVPPTADRFQAEEYGEGGTDPPEGPYDYTYGYGDDYREETELGPALSAETAHSGAAAHGPRGLKGEKGEPAVLEPGMLVEGPPGPEGPAGLIGPPGIQGNPGPVGDPGERGPPGRAGLPGSDGAPGPPGTSLMLPFRFGSGGGDKGPVVAAQEAQAQAILQQARLALRGPPGPMGYTGRPGPLGQPGSPGLKGESGDLGPQGPRGPQGLTGPPGKAGRRGRAGADGARGMPGDPGVKGDRGFDGLPGLPGEKGHRGDTGAQGLPGPPGEDGERGDDGEIGPRGLPGESGPRGLLGPKGPPGIPGPPGVRGMDGPQGPKGSLGPQGEPGPPGQQGTPGTQGLPGPQGAIGPHGEKGPQGKPGLPGMPGSDGPPGHPGKEGPPGTKGNQGPSGPQGPLGYPGPRGVKGVDGIRGLKGHKGEKGEDGFPGFKGDIGVKGDRGEVGVPGSRGEDGPEGPKGRTGPTGDPGPPGLMGEKGKLGVPGLPGYPGRQGPKGSLGFPGFPGASGEKGARGLSGKSGPRGERGPTGPRGQRGPRGATGKSGAKGTSGGDGPHGPPGERGLPGPQGPNGFPGPKGPPGPPGKDGLPGHPGQRGEVGFQGKTGPPGPPGVVGPQGAAGETGPMGERGHPGPPGPPGEQGLPGTAGKEGTKGDPGPPGAPGKDGPAGLRGFPGERGLPGTAGGPGLKGNEGPSGPPGPAGSPGERGAAGSGGPIGPPGRPGPQGPPGAAGEKGVPGEKGPIGPTGRDGVQGPVGLPGPAGPPGVAGEDGDKGEVGDPGQKGTKGNKGEHGPPGPPGPIGPVGQPGAAGADGEPGARGPQGHFGAKGDEGTRGFNGPPGPIGLQGLPGPSGEKGETGDVGPMGPPGPPGPRGPAGPNGADGPQGPPGGVGNLGPPGEKGEPGESGSPGIQGEPGVKGPRGERGEKGESGQPGEPGPPGPKGPTGDDGPKGNPGPVGFPGDPGPPGEGGPRGQDGAKGDRGEDGEPGQPGSPGPTGENGPPGPLGKRGPAGSPGSEGRQGGKGAKGDPGAIGAPGKTGPVGPAGPAGKPGPDGLRGLPGSVGQQGRPGATGQAGPPGPVGPPGLPGLRGDAGAKGEKGHPGLIGLIGPPGEQGEKGDRGLPGPQGSPGQKGEMGIPGASGPIGPGGPPGLPGPAGPKGAKGATGPGGPKGEKGVQGPPGHPGPPGEVIQPLPIQMPKKTRRSVDGSRLMQEDEAIPTGGAPGSPGGLEEIFGSLDSLREEIEQMRRPTGTQDSPARTCQDLKLCHPELPDGEYWVDPNQGCARDAFRVFCNFTAGGETCVTPRDDVTQFSYVDSEGSPVGVVQLTFLRLLSVSAHQDVSYPCSGAARDGPLRLRGANEDELSPETSPYVKEFRDGCQTQQGRTVLEVRTPVLEQLPVLDASFSDLGAPPRRGGVLLGPVCFMG

SEQ ID NO: 26595 - protein, 1650 aa, Homo sapiens; identical to SEQ ID NO: 26590
  REGION 1..1650: note = ENSP00000372706

SEQ ID NO: 26596 - protein, 624 aa, Homo sapiens; identical to SEQ ID NO: 26591
  REGION 1..624: note = ENSP00000394196

SEQ ID NO: 26597 - protein, 290 aa, Homo sapiens; identical to SEQ ID NO: 26592
  REGION 1..290: note = ENSP00000372566

SEQ ID NO: 26598 - protein, 333 aa, Homo sapiens
  REGION 1..333: note = ENSP00000388108
  VARIANT 1: note = Any amino acid
XNQSPQAHRSTVPHTAGLGQLCLLGFGMDWRASEAWMVPRAPKGAWDPRESQDLLDNRAPLGPRVFPGPRVPSALMERRVLKGSQGSPACLGPPGEVIQPLPIQMPKKTRRSVDGSRLMQEDEAIPTGGAPGSPGGLEEIFGSLDSLREEIEQMRRPTGTQDSPARTCQDLKLCHPELPDGEYWVDPNQGCARDAFRVFCNFTAGGETCVTPRDDVTQFSYVDSEGSPVGVVQLTFLRLLSVSAHQDVSYPCSGAARDGPLRLRGANEDELSPETSPYVKEFRDGCQTQQGRTVLEVRTPVLEQLPVLDASFSDLGAPPRRGGVLLGPVCFMG

SEQ ID NO: 26599 - protein, 1736 aa, Homo sapiens; identical to SEQ ID NO: 26594
  REGION 1..1736: note = ENSP00000448701

SEQ ID NO: 26600 - protein, 1629 aa, Homo sapiens; identical to SEQ ID NO: 26593
  REGION 1..1629: note = ENSP00000450084

SEQ ID NO: 26601 - protein, 1623 aa, Homo sapiens
  REGION 1..1623: note = ENSP00000404513
  VARIANT 1: note = Any amino acid
XAPPVDVLRALRFPSLPDGVRRAKGICPADVAYRVARPAQLSAPTRQLFPGGFPKDFSLLTVVRTRPGLQAPLLTLYSAQGVRQLGLELGRPVRFLYEDQTGRPQPPSQPVFRGLSLADGKWHRVAVAVKGQSVTLIVDCKKRVTRPLPRSARPVLDTHGVIIFGARILDEEVFEGDVQELAIVPGVQAAYESCEQKELECEGGQRERPQNQQPHRAQRSPQQQPSRLHRPQNQEPQSQDPTPGEEEEILESSLLPPLEEAAHGPRGLKGEKGEPAVLEPGMLVEGPPGPEGPAGLIGPPGIQGNPGPVGDPGERGPPGRAGLPGSDGAPGPPGTSLMLPFRFGSGGGDKGPVVAAQEAQAQAILQQARLALRGPPGPMGYTGRPGPLGQPGSPGLKGESGDLGPQGPRGPQGLTGPPGKAGRRGRAGADGARGMPGDPGVKGDRGFDGLPGLPGEKGHRGDTGAQGLPGPPGEDGERGDDGEIGPRGLPGESGPRGLLGPKGPPGIPGPPGVRGMDGPQGPKGSLGPQGEPGPPGQQGTPGTQGLPGPQGAIGPHGEKGPQGKPGLPGMPGSDGPPGHPGKEGPPGTKGNQGPSGPQGPLGYPGPRGVKGVDGIRGLKGHKGEKGEDGFPGFKGDIGVKGDRGEVGVPGSRGEDGPEGPKGRTGPTGDPGPPGLMGEKGKLGVPGLPGYPGRQGPKGSLGFPGFPGASGEKGARGLSGKSGPRGERGPTGPRGQRGPRGATGKSGAKGTSGGDGPHGPPGERGLPGPQGPNGFPGPKGPPGPPGKDGLPGHPGQRGEVGFQGKTGPPGPPGVVGPQGAAGETGPMGERGHPGPPGPPGEQGLPGTAGKEGTKGDPGPPGAPGKDGPAGLRGFPGERGLPGTAGGPGLKGNEGPSGPPGPAGSPGERGAAGSGGPIGPPGRPGPQGPPGAAGEKGVPGEKGPIGPTGRDGVQGPVGLPGPAGPPGVAGEDGDKGEVGDPGQKGTKGNKGEHGPPGPPGPIGPVGQPGAAGADGEPGARGPQGHFGAKGDEGTRGFNGPPGPIGLQGLPGPSGEKGETGDVGPMGPPGPPGPRGPAGPNGADGPQGPPGGVGNLGPPGEKGEPGESGSPGIQGEPGVKGPRGERGEKGESGQPGEPGPPGPKGPTGDDGPKGNPGPVGFPGDPGPPGEGGPRGQDGAKGDRGEDGEPGQPGSPGPTGENGPPGPLGKRGPAGSPGSEGRQGGKGAKGDPGAIGAPGKTGPVGPAGPAGKPGPDGLRGLPGSVGQQGRPGATGQAGPPGPVGPPGLPGLRGDAGAKGEKGHPGLIGLIGPPGEQGEKGDRGLPGPQGSPGQKGEMGIPGASGPIGPGGPPGLPGPAGPKGAKGATGPGGPKGEKGVQGPPGHPGPPGEVIQPLPIQMPKKTRRSVDGSRLMQEDEAIPTGGAPGSPGGLEEIFGSLDSLREEIEQMRRPTGTQDSPARTCQDLKLCHPELPDGEYWVDPNQGCARDAFRVFCNFTAGGETCVTPRDDVTQFSYVDSEGSPVGVVQLTFLRLLSVSAHQDVSYPCSGAARDGPLRLRGANEDELSPETSPYVKEFRDGCQTQQGRTVLEVRTPVLEQLPVLDASFSDLGAPPRRGGVLLGPVCFMG

SEQ ID NO: 26602 - protein, 597 aa, Homo sapiens
  REGION 1..597: note = ENSP00000415296
  VARIANT 1: note = Any amino acid
XAPPVDVLRALRFPSLPDGVRRAKGICPADVAYRVARPAQLSAPTRQLFPGGFPKDFSLLTVVRTRPGLQAPLLTLYSAQGVRQLGLELGRPVRFLYEDQTGRPQPPSQPVFRGLSLADGKWHRVAVAVKGQSVTLIVDCKKRVTRPLPRSARPVLDTHGVIIFGARILDEEVFEGDVQELAIVPGVQAAYESCEQKELECEGGQRERPQNQQPHRAQRSPQQQPSRLHRPQNQEPQSQPTESLYYDYKPPYYDVMTTGTTPDYQDPTPGEEEEILESSLLPPLEEEQTDLQVPPTADRFQAEEYGEGGTDPPEGPYDYTYGYGDDYREETELGPALSAETAHSGAAAHGPRGLKGEKGEPAVLEPGMLVEGPPGPEGPAGLIGPPGIQGNPGPVGDPGERGPPGRAGLPGSDGAPGPPGTSLMLPFRFGSGGGDKGPVVAAQEAQAQAILQQARLALRGPPGPMGYTGRPGPLGQPGSPGLKGESGDLGPQGPRGPQGLTGPPGKAGRRGRAGADGARGMPGDPGVKGDRGFDGLPGLPGEKGHRGDTGAQGLPGPPGEDGERGDDGEIGPRGLPGESGPRGLLGPKGPPGIPGPP

SEQ ID NO: 26603 - protein, 263 aa, Homo sapiens
  REGION 1..263: note = ENSP00000408523
  VARIANT 1: note = Any amino acid
XAPPVDVLRALRFPSLPDGVRRAKGICPADVAYRVARPAQLSAPTRQLFPGGFPKDFSLLTVVRTRPGLQAPLLTLYSAQGVRQLGLELGRPVRFLYEDQTGRPQPPSQPVFRGLSLADGKWHRVAVAVKGQSVTLIVDCKKRVTRPLPRSARPVLDTHGVIIFGARILDEEVFEGDVQELAIVPGVQAAYESCEQKELECEGGQRERPQNQQPHRAQRSPQQQPSRLHRPQNQEPQSQVRELGEPPSAAHPREGRHPGISPP

SEQ ID NO: 26604 - protein, 1650 aa, Homo sapiens
  REGION 1..1650: note = ENSP00000372565
MERCSRCHRLLLLLPLVLGLSAAPGWAGAPPVDVLRALRFPSLPDGVRRAKGICPADVAYRVARPAQLSAPTRQLFPGGFPKDFSLLTVVRTRPGLQAPLLTLYSAQGVRQLGLELGRPVRFLYEDQTGRPQPPSQPVFRGLSLADGKWHRVAVAVKGQSVTLIVDCKKRVTRPLPRSARPVLDTHGVIIFGARILDEEVFEGDVQELAIVPGVQAAYESCEQKELECEGGQRERPQNQQPHRAQRSPQQQPSRLHRPQNQEPQSQDPTPGEEEEILESSLLPPLEEAAHGPRGLKGEKGEPAVLEPGMLVEGPPGPEGPAGLIGPPGIQGNPGPVGDPGERGPPGRAGLPGSDGAPGPPGTSLMLPFRFGSGGGDKGPVVAAQEAQAQAILQQARLALRGPPGPMGYTGRPGPLGQPGSPGLKGESGDLGPQGPRGPQGLTGPPGKAGRRGRAGADGARGMPGDPGVKGDRGFDGLPGLPGEKGHRGDTGAQGLPGPPGEDGERGDDGEIGPRGLPGESGPRGLLGPKGPPGIPGPPGVRGMDGPQGPKGSLGPQGEPGPPGQQGTPGTQGLPGPQGAIGPHGEKGPQGKPGLPGMPGSDGPPGHPGKEGPPGTKGNQGPSGPQGPLGYPGPRGVKGVDGIRGLKGHKGEKGEDGFPGFKGDIGVKGDRGEVGVPGSRGEDGPEGPKGRTGPTGDPGPPGLMGEKGKLGVPGLPGYPGRQGPKGSLGFPGFPGASGEKGARGLSGKSGPRGERGPTGPRGQRGPRGATGKSGAKGTSGGDGPHGPPGERGLPGPQGPNGFPGPKGPLGPPGKDGLPGHPGQRGEVGFQGKTGPPGPPGVVGPQGAAGETGPMGERGHPGPPGPPGEQGLPGTAGKEGTKGDPGPPGAPGKDGPAGLRGFPGERGLPGTAGGPGLKGNEGPSGPPGPAGSPGERGAAGSGGPIGPPGRPGPQGPPGAAGEKGVPGEKGPIGPTGRDGVQGPVGLPGPAGPPGVAGEDGDKGEVGDPGQKGTKGNKGEHGPPGPPGPIGPVGQPGAAGADGEPGARGPQGHFGAKGDEGTRGFNGPPGPIGLQGLPGPSGEKGETGDVGPMGPPGPPGPRGPAGPNGADGPQGPPGGVGNLGPPGEKGEPGESGSPGIQGEPGVKGPRGERGEKGESGQPGEPGPPGPKGPTGDDGPKGNPGPVGFPGDPGPPGEGGPRGQDGAKGDRGEDGEPGQPGSPGPTGENGPPGPLGKRGPAGSPGSEGRQGGKGAKGDPGAIGAPGKTGPVGPAGPAGKPGPDGLRGLPGSVGQQGRPGATGQAGPPGPVGPPGLPGLRGDAGAKGEKGHPGLIGLIGPPGEQGEKGDRGLPGPQGSPGQKGEMGIPGASGPIGPGGPPGLPGPAGPKGAKGATGPGGPKGEKGVQGPPGHPGPPGEVIQPLPIQMPKKTRRSVDGSRLMQEDEAIPTGGAPGSPGGLEEIFGSLDSLREEIEQMRRPTGTQDSPARTCQDLKLCHPELPDGEYWVDPNQGCARDAFRVFCNFTAGGETCVTPRDDVTQFSYVDSEGSPVGVVQLTFLRLLSVSAHQDVSYPCSGAARDGPLRLRGANEDELSPETSPYVKEFRDGCQTQQGRTVLEVRTPVLEQLPVLDASFSDLGAPPRRGGVLLGPVCFMG

SEQ ID NO: 26605 - protein, 333 aa, Homo sapiens; identical to SEQ ID NO: 26598
  REGION 1..333: note = ENSP00000402987
  VARIANT 1: note = Any amino acid

SEQ ID NO: 26606 - protein, 624 aa, Homo sapiens
  REGION 1..624: note = ENSP00000398170
MERCSRCHRLLLLLPLVLGLSAAPGWAGAPPVDVLRALRFPSLPDGVRRAKGICPADVAYRVARPAQLSAPTRQLFPGGFPKDFSLLTVVRTRPGLQAPLLTLYSAQGVRQLGLELGRPVRFLYEDQTGRPQPPSQPVFRGLSLADGKWHRVAVAVKGQSVTLIVDCKKRVTRPLPRSARPVLDTHGVIIFGARILDEEVFEGDVQELAIVPGVQAAYESCEQKELECEGGQRERPQNQQPHRAQRSPQQQPSRLHRPQNQEPQSQPTESLYYDYEPPYYDVMTTGTTPDYQDPTPGEEEEILESSLLPPLEEEQTDLQVPPTADRFQAEEYGEGGTDPPEGPYDYTYGYGDDYREETELGPALSAETAHSGAAAHGPRGLKGEKGEPAVLEPGMLVEGPPGPEGPAGLIGPPGIQGNPGPVGDPGERGPPGRAGLPGSDGAPGPPGTSLMLPFRFGSGGGDKGPVVAAQEAQAQAILQQARLALRGPPGPMGYTGRPGPLGQPGSPGLKGESGDLGPQGPRGPQGLTGPPGKAGRRGRAGADGARGMPGDPGVKGDRGFDGLPGLPGEKGHRGDTGAQGLPGPPGEDGERGDDGEIGPRGLPGESGPRGLLGPKGPPGIPGPP

SEQ ID NO: 26607 - protein, 290 aa, Homo sapiens; identical to SEQ ID NO: 26592
  REGION 1..290: note = ENSP00000410284

SEQ ID NO: 26608 - protein, 1736 aa, Homo sapiens
  REGION 1..1736: note = ENSP00000449275
MERCSRCHRLLLLLPLVLGLSAAPGWAGAPPVDVLRALRFPSLPDGVRRAKGICPADVAYRVARPAQLSAPTRQLFPGGFPKDFSLLTVVRTRPGLQAPLLTLYSAQGVRQLGLELGRPVRFLYEDQTGRPQPPSQPVFRGLSLADGKWHRVAVAVKGQSVTLIVDCKKRVTRPLPRSARPVLDTHGVIIFGARILDEEVFEGDVQELAIVPGVQAAYESCEQKELECEGGQRERPQNQQPHRAQRSPQQQPSRLHRPQNQEPQSQPTESLYYDYEPPYYDVMTTGTTPDYQDPTPGEEEEILESSLLPPLEEEQTDLQVPPTADRFQAEEYGEGGTDPPEGPYDYTYGYGDDYREETELGPALSAETAHSGAAAHGPRGLKGEKGEPAVLEPGMLVEGPPGPEGPAGLIGPPGIQGNPGPVGDPGERGPPGRAGLPGSDGAPGPPGTSLMLPFRFGSGGGDKGPVVAAQEAQAQAILQQARLALRGPPGPMGYTGRPGPLGQPGSPGLKGESGDLGPQGPRGPQGLTGPPGKAGRRGRAGADGARGMPGDPGVKGDRGFDGLPGLPGEKGHRGDTGAQGLPGPPGEDGERGDDGEIGPRGLPGESGPRGLLGPKGPPGIPGPPGVRGMDGPQGPKGSLGPQGEPGPPGQQGTPGTQGLPGPQGAIGPHGEKGPQGKPGLPGMPGSDGPPGHPGKEGPPGTKGNQGPSGPQGPLGYPGPRGVKGVDGIRGLKGHKGEKGEDGFPGFKGDIGVKGDRGEVGVPGSRGEDGPEGPKGRTGPTGDPGPPGLMGEKGKLGVPGLPGYPGRQGPKGSLGFPGFPGASGEKGARGLSGKSGPRGERGPTGPRGQRGPRGATGKSGAKGTSGGDGPHGPPGERGLPGPQGPNGFPGPKGPLGPPGKDGLPGHPGQRGEVGFQGKTGPPGPPGVVGPQGAAGETGPMGERGHPGPPGPPGEQGLPGTAGKEGTKGDPGPPGAPGKDGPAGLRGFPGERGLPGTAGGPGLKGNEGPSGPPGPAGSPGERGAAGSGGPIGPPGRPGPQGPPGAAGEKGVPGEKGPIGPTGRDGVQGPVGLPGPAGPPGVAGEDGDKGEVGDPGQKGTKGNKGEHGPPGPPGPIGPVGQPGAAGADGEPGARGPQGHFGAKGDEGTRGFNGPPGPIGLQGLPGPSGEKGETGDVGPMGPPGPPGPRGPAGPNGADGPQGPPGGVGNLGPPGEKGEPGESGSPGIQGEPGVKGPRGERGEKGESGQPGEPGPPGPKGPTGDDGPKGNPGPVGFPGDPGPPGEGGPRGQDGAKGDRGEDGEPGQPGSPGPTGENGPPGPLGKRGPAGSPGSEGRQGGKGAKGDPGAIGAPGKTGPVGPAGPAGKPGPDGLRGLPGSVGQQGRPGATGQAGPPGPVGPPGLPGLRGDAGAKGEKGHPGLIGLIGPPGEQGEKGDRGLPGPQGSPGQKGEMGIPGASGPIGPGGPPGLPGPAGPKGAKGATGPGGPKGEKGVQGPPGHPGPPGEVIQPLPIQMPKKTRRSVDGSRLMQEDEAIPTGGAPGSPGGLEEIFGSLDSLREEIEQMRRPTGTQDSPARTCQDLKLCHPELPDGEYWVDPNQGCARDAFRVFCNFTAGGETCVTPRDDVTQFSYVDSEGSPVGVVQLTFLRLLSVSAHQDVSYPCSGAARDGPLRLRGANEDELSPETSPYVKEFRDGCQTQQGRTVLEVRTPVLEQLPVLDASFSDLGAPPRRGGVLLGPVCFMG

SEQ ID NO: 26609 - protein, 1629 aa, Homo sapiens
  REGION 1..1629: note = ENSP00000447864
MERCSRCHRLLLLLPLVLGLSAAPGWAGAPPVDVLRALRFPSLPDGVRRAKGICPADVAYRVARPAQLSAPTRQLFPGGFPKDFSLLTVVRTRPGLQAPLLTLYSAQGVRQLGLELGRPVRFLYEDQTGRPQPPSQPVFRGLSLADGKWHRVAVAVKGQSVTLIVDCKKRVTRPLPRSARPVLDTHGVIIFGARILDEEVFEGDVQELAIVPGVQAAYESCEQKELECEGGQRERPQNQQPHRAQRSPQQQPSRLHRPQNQEPQSQAAHGPRGLKGEKGEPAVLEPGMLVEGPPGPEGPAGLIGPPGIQGNPGPVGDPGERGPPGRAGLPGSDGAPGPPGTSLMLPFRFGSGGGDKGPVVAAQEAQAQAILQQARLALRGPPGPMGYTGRPGPLGQPGSPGLKGESGDLGPQGPRGPQGLTGPPGKAGRRGRAGADGARGMPGDPGVKGDRGFDGLPGLPGEKGHRGDTGAQGLPGPPGEDGERGDDGEIGPRGLPGESGPRGLLGPKGPPGIPGPPGVRGMDGPQGPKGSLGPQGEPGPPGQQGTPGTQGLPGPQGAIGPHGEKGPQGKPGLPGMPGSDGPPGHPGKEGPPGTKGNQGPSGPQGPLGYPGPRGVKGVDGIRGLKGHKGEKGEDGFPGFKGDIGVKGDRGEVGVPGSRGEDGPEGPKGRTGPTGDPGPPGLMGEKGKLGVPGLPGYPGRQGPKGSLGFPGFPGASGEKGARGLSGKSGPRGERGPTGPRGQRGPRGATGKSGAKGTSGGDGPHGPPGERGLPGPQGPNGFPGPKGPLGPPGKDGLPGHPGQRGEVGFQGKTGPPGPPGVVGPQGAAGETGPMGERGHPGPPGPPGEQGLPGTAGKEGTKGDPGPPGAPGKDGPAGLRGFPGERGLPGTAGGPGLKGNEGPSGPPGPAGSPGERGAAGSGGPIGPPGRPGPQGPPGAAGEKGVPGEKGPIGPTGRDGVQGPVGLPGPAGPPGVAGEDGDKGEVGDPGQKGTKGNKGEHGPPGPPGPIGPVGQPGAAGADGEPGARGPQGHFGAKGDEGTRGFNGPPGPIGLQGLPGPSGEKGETGDVGPMGPPGPPGPRGPAGPNGADGPQGPPGGVGNLGPPGEKGEPGESGSPGIQGEPGVKGPRGERGEKGESGQPGEPGPPGPKGPTGDDGPKGNPGPVGFPGDPGPPGEGGPRGQDGAKGDRGEDGEPGQPGSPGPTGENGPPGPLGKRGPAGSPGSEGRQGGKGAKGDPGAIGAPGKTGPVGPAGPAGKPGPDGLRGLPGSVGQQGRPGATGQAGPPGPVGPPGLPGLRGDAGAKGEKGHPGLIGLIGPPGEQGEKGDRGLPGPQGSPGQKGEMGIPGASGPIGPGGPPGLPGPAGPKGAKGATGPGGPKGEKGVQGPPGHPGPPGEVIQPLPIQMPKKTRRSVDGSRLMQEDEAIPTGGAPGSPGGLEEIFGSLDSLREEIEQMRRPTGTQDSPARTCQDLKLCHPELPDGEYWVDPNQGCARDAFRVFCNFTAGGETCVTPRDDVTQFSYVDSEGSPVGVVQLTFLRLLSVSAHQDVSYPCSGAARDGPLRLRGANEDELSPETSPYVKEFRDGCQTQQGRTVLEVRTPVLEQLPVLDASFSDLGAPPRRGGVLLGPVCFMG

SEQ ID NO: 26610 - protein, 1650 aa, Homo sapiens; identical to SEQ ID NO: 26590
  REGION 1..1650: note = ENSP00000363840

SEQ ID NO: 26611 - protein, 624 aa, Homo sapiens; identical to SEQ ID NO: 26606
  REGION 1..624: note = ENSP00000405520

SEQ ID NO: 26612 - protein, 290 aa, Homo sapiens; identical to SEQ ID NO: 26592
  REGION 1..290: note = ENSP00000378620

SEQ ID NO: 26613 - protein, 1736 aa, Homo sapiens
  REGION 1..1736: note = ENSP00000339915
MERCSRCHRLLLLLPLVLGLSAAPGWAGAPPVDVLRALRFPSLPDGVRRAKGICPADVAYRVARPAQLSAPTRQLFPGGFPKDFSLLTVVRTRPGLQAPLLTLYSAQGVRQLGLELGRPVRFLYEDQTGRPQPPSQPVFRGLSLADGKWHRVAVAVKGQSVTLIVDCKKRVTRPLPRSARPVLDTHGVIIFGARILDEEVFEGDVQELAIVPGVQAAYESCEQKELECEGGQRERPQNQQPHRAQRSPQQQPSRLHRPQNQEPQSQPTESLYYDYEPPYYDVMTTGTTPDYQDPTPGEEEEILESSLLPPLEEEQTDLQVPPTADRFQAEEYGEGGTDPPEGPYDYTYGYGDDYREETELGPALSAETAHSGAAAHGPRGLKGEKGEPAVLEPGMLVEGPPGPEGPAGLIGPPGIQGNPGPVGDPGERGPPGRAGLPGSDGAPGPPGTSLMLPFRFGSGGGDKGPVVAAQEAQAQAILQQARLALRGPPGPMGYTGRPGPLGQPGSPGLKGESGDLGPQGPRGPQGLTGPPGKAGRRGRAGADGARGMPGDPGVKGDRGFDGLPGLPGEKGHRGDTGAQGLPGPPGEDGERGDDGEIGPRGLPGESGPRGLLGPKGPPGIPGPPGVRGMDGPQGPKGSLGPQGEPGPPGQQGTPGTQGLPGPQGAIGPHGEKGPQGKPGLPGMPGSDGPPGHPGKEGPPGTKGNQGPSGPQGPLGYPGPRGVKGVDGIRGLKGHKGEKGEDGFPGFKGDIGVKGDRGEVGVPGSRGEDGPEGPKGRTGPTGDPGPPGLMGEKGKLGVPGLPGYPGRQGPKGSLGFPGFPGASGEKGARGLSGKSGPRGERGPTGPRGQRGPRGATGKSGAKGTSGGDGPHGPPGERGLPGPQGPNGFPGPKGPPGPPGKDGLPGHPGQRGEVGFQGKTGPPGPPGVVGPQGAAGETGPMGERGHPGPPGPPGEQGLPGTAGKEGTKGDPGPPGAPGKDGPAGLRGFPGERGLPGTAGGPGLKGNEGPSGPPGPAGSPGERGAAGSGGPIGPPGRPGPQGPPGAAGEKGVPGEKGPIGPTGRDGVQGPVGLPGPAGPPGVAGEDGDKGEVGDPGQKGTKGNKGEHGPPGPPGPIGPVGQPGAAGADGEPGARGPQGHFGAKGDEGTRGFNGPPGPIGLQGLPGPSGEKGETGDVGPMGPPGPPGPRGPAGPNGADGPQGPPGGVGNLGPPGEKGEPGESGSPGIQGEPGVKGPRGERGEKGESGQPGEPGPPGPKGPTGDDGPKGNPGPVGFPGDPGPPGEGGPRGQDGAKGDRGEDGEPGQPGSPGPTGENGPPGPLGKRGPAGSPGSEGRQGGKGAKGDPGAIGAPGKTGPVGPAGPAGKPGPDGLRGLPGSVGQQGRPGATGQAGPPGPVGPPGLPGLRGDAGAKGEKGHPGLIGLIGPPGEQGEKGDRGLPGPQGSPGQKGEMGIPGASGPIGPGGPPGLPGPAGPKGAKGATGPGGPKGEKGVQGPPGHPGPPGEVIQPLPIQMPKKTRRSVDGSRLMQEDEAIPTGGAPGSPGGLEEIFGSLDSLREEIEQMRRPTGTQDSPARTCQDLKLCHPELPDGEYWVDPNQGCARDAFRVFCNFTAGGETCVTPRDDVTQFSYVDSEGSPVGVVQLTFLRLLSVSAHQDVSYPCSGAARDGPLRLRGANEDELSPETSPYVKEFRDGCQTQQGRTVLEVRTPVLEQLPVLDASFSDLGAPPRRGGVLLGPVCFMG

SEQ ID NO: 26614 - protein, 1629 aa, Homo sapiens; identical to SEQ ID NO: 26593
  REGION 1..1629: note = ENSP00000355123

SEQ ID NO: 26615 - protein, 1650 aa, Homo sapiens; identical to SEQ ID NO: 26590
  REGION 1..1650: note = ENSP00000408627

SEQ ID NO: 26616 - protein, 624 aa, Homo sapiens; identical to SEQ ID NO: 26606
  REGION 1..624: note = ENSP00000398256

SEQ ID NO: 26617 - protein, 290 aa, Homo sapiens; identical to SEQ ID NO: 26592
  REGION 1..290: note = ENSP00000406347

SEQ ID NO: 26618 - protein, 1736 aa, Homo sapiens; identical to SEQ ID NO: 26613
  REGION 1..1736: note = ENSP00000447062

SEQ ID NO: 26619 - protein, 1629 aa, Homo sapiens; identical to SEQ ID NO: 26593
  REGION 1..1629: note = ENSP00000450046

SEQ ID NO: 26620 - protein, 756 aa, Homo sapiens
  REGION 1..756: note = ENSP00000399812
VSFVQYSDEVKSEFKLNTYNDKALALGALQNIRYRGGNTRTGKALTFIKEKVLTWESGMRKNVPKVLVVVTDGRSQDEVKKAALVIQQSGFSVFVVGVADVDYNELANIASKPSERHVFIVDDFESFEKIEDNLITFVCETATSSCPLIYLDGYTSPGFKMLEAYNLTEKNFASVQGVSLESGSFPSYSAYRIQKNAFVNQPTADLHPNGLPPSYTIILLFRLLPETPSDPFAIWQITDRDYKPQVGVIADPSSKTLSFFNKDTRGEVQTVTFDTEEVKTLFYGSFHKVHIVVTSKSVKIYIDCYEIIEKDIKEAGNITTDGYEILGKLLKGERKSAAFQIQSFDIVCSPVWTSRDRCCDIPSRRDEGKCPAFPNSCTCTQDSVGPPGPPGPAGGPGAKGPRGERGISGAIGPPGPRGDIGPPGPQGPPGPQGPNGLSIPGEQGRQGMKGDAGEPGLPGRTGTPGLPGPPGPMGPPGDRGFTGKDGAMGPRGPPGPPGSPGSPGVTGPSGKPGKPGDHGRPGPSGLKGEKGDRGDIASQNMMRAVARQVCEQLISGQMNRFNQMLNQIPNDYQSSRNQPGPPGPPGPPGSAGARGEPGPGGRPGFPGTPGMQGPPGERGLPGEKGERGTGSSGPRGLPGPPGPQGESRTGPPGSTGSRGPPGPPGRPGNSGIRGPPGPPGYCDSSQCASIPYNGQGYPEPYVPEGGAYLPEREPFIVPVEPERTAEYEDYGADEPAEEPPEPHRRWRRALPHGPGQ

SEQ ID NO: 26621 - protein, 3063 aa, Homo sapiens
  REGION 1..3063: note = ENSP00000325146
MRSRLPPALAALGAALLLSSIEAEVDPPSDLNFKIIDENTVHMSWAKPVDPIVGYRITVDPTTDGPTKEFTLSASTTETLLSELVPETEYVVTITSYDEVEESVPVIGQLTIQTGSSTKPVEKKPGKTEIQKCSVSAWTDLVFLVDGSWSVGRNNFKYILDFIAALVSAFDIGEEKTRVGVVQYSSDTRTEFNLNQYYQRDELLAAIKKIPYKGGNTMTGDAIDYLVKNTFTESAGARVGFPKVAIIITDGKSQDEVEIPARELRNVGVEVFSLGIKAADAKELKQIASTPSLNHVFNVANFDAIVDIQNEIISQVCSGVDEQLGELVSGEEVVEPPSNLIAMEVSSKYVKLNWNPSPSPVTGYKVILTPMTAGSRQHALSVGPQTTTLSVRDLSADTEYQISVSAMKGMTSSEPISIMEKTQPMKVQVECSRGVDIKADIVFLVDGSYSIGIANFVKVRAFLEVLVKSFEISPNRVQISLVQYSRDPHTEFTLKKFTKVEDIIEAINTFPYRGGSTNTGKAMTYVREKIFVPSKGSRSNVPKVMILITDGKSSDAFRDPAIKLRNSDVEIFAVGVKDAVRSELEAIASPPAETHVFTVEDFDAFQRISFELTQSICLRIEQELAAIKKKAYVPPKDLSFSEVTSYGFKTNWSPAGENVFSYHITYKEAAGDDEVTVVEPASSTSVVLSSLKPETLYLVNVTAEYEDGFSIPLAGEETTEEVKGAPRNLKVTDETTDSFKITWTQAPGRVLRYRIIYRPVAGGESREVTTPPNQRRRTLENLIPDTKYEVSVIPEYFSGPGTPLTGNAATEEVRGNPRDLRVSDPTTSTMKLSWSGAPGKVKQYLVTYTPVAGGETQEVTVRGDTTNTVLQGLKEGTQYALSVTALYASGAGDALFGEGTTLEERGSPQDLVTKDITDTSIGAYWTSAPGMVRGYRVSWKSLYDDVDTGEKNLPEDAIHTMIENLQPETKYRISVFATYSSGEGEPLTGDATTELSQDSKTLKVDEETENTMRVTWKPAPGKVVNYRVVYRPHGRGKQMVAKVPPTVTSTVLKRLQPQTTYDITVLPIYKMGEGKLRQGSGTTASRFKSPRNLKTSDPTMSSFRVTWEPAPGEVKGYKVTFHPTGDDRRLGELVVGPYDNTVVLEELRAGTTYKVNVFGMFDGGESSPLVGQEMTTLSDTTVMPILSSGMECLTRAEADIVLLVDGSWSIGRANFRTVRSFISRIVEVFDIGPKRVQIALAQYSGDPRTEWQLNAHRDKKSLLQAVANLPYKGGNTLTGMALNFIRQQNFRTQAGMRPRARKIGVLITDGKSQDDVEAPSKKLKDEGVELFAIGIKNADEVELKMIATDPDDTHAYNVADFESLSRIVDDLTINLCNSVKGPGDLEAPSNLVISERTHRSFRVSWTPPSDSVDRYKVEYYPVSGGKRQEFYVSRMETSTVLKDLKPETEYVVNVYSVVEDEYSEPLKGTEKTLPVPVVSLNIYDVGPTTMHVQWQPVGGATGYILSYKPVKDTEPTRPKEVRLGPTVNDMQLTDLVPNTEYAVTVQAVLHDLTSEPVTVREVTLPLPRPQDLKLRDVTHSTMNVFWEPVPGKVRKYIVRYKTPEEDVKEVEVDRSETSTSLKDLFSQTLYTVSVSAVHDEGESPPVTAQETTRPVPAPTNLKITEVTSEGFRGTWDHGASDVSLYRITWAPFGSSDKMETILNGDENTLVFENLNPNTIYEVSITAIYPDESESDDLIGSERTLPILTTQAPKSGPRNLQVYNATSNSLTVKWDPASGRVQKYRITYQPSTGEGNEQTTTIGGRQNSVVLQKLKPDTPYTITVSSLYPDGEGGRMTGRGKTKPLNTVRNLRVYDPSTSTLNVRWDHAEGNPRQYKLFYAPAAGGPEELVPIPGNTNYAILRNLQPDTSYTVTVVPVYTEGDGGRTSDTGRTLMRGLARNVQVYNPTPNSLDVRWDPAPGPVLQYRVVYSPVDGTRPSESIVVPGNTRMVHLERLIPDTLYSVNLVALYSDGEGNPSPAQGRTLPRSGPRNLRVFGETTNSLSVAWDHADGPVQQYRIIYSPTVGDPIDEYTTVPGRRNNVILQPLQPDTPYKITVIAVYEDGDGGHLTGNGRTVGLLPPQNIHISDEWYTRFRVSWDPSPSPVLGYKIVYKPVGSNEPMEAFVGEMTSYTLHNLNPSTTYDVNVYAQYDSGLSVPLTDQGTTLYLNVTDLKTYQIGWDTFCVKWSPHRAATSYRLKLSPADGTRGQEITVRGSETSHCFTGLSPDTDYGVTVFVQTPNLEGPGVSVKEHTTVKPTEAPTEPPTPPPPPTIPPARDVCKGAKADIVFLTDASWSIGDDNFNKVVKFIFNTVGGFDEISPAGIQVSFVQYSDEVKSEFKLNTYNDKALALGALQNIRYRGGNTRTGKALTFIKEKVLTWESGMRKNVPKVLVVVTDGRSQDEVKKAALVIQQSGFSVFVVGVADVDYNELANIASKPSERHVFIVDDFESFEKIEDNLITFVCETATSSCPLIYLDGYTSPGFKMLEAYNLTEKNFASVQGVSLESGSFPSYSAYRIQKNAFVNQPTADLHPNGLPPSYTIILLFRLLPETPSDPFAIWQITDRDYKPQVGVIADPSSKTLSFFNKDTRGEVQTVTFDTEEVKTLFYGSFHKVHIVVTSKSVKIYIDCYEIIEKDIKEAGNITTDGYEILGKLLKGERKSAAFQIQSFDIVCSPVWTSRDRCCDIPSRRDEGKCPAFPNSCTCTQDSVGPPGPPGPAGGPGAKGPRGERGISGAIGPPGPRGDIGPPGPQGPPGPQGPNGLSIPGEQGRQGMKGDAGEPGLPGRTGTPGLPGPPGPMGPPGDRGFTGKDGAMGPRGPPGPPGSPGSPGVTGPSGKPGKPGDHGRPGPSGLKGEKGDRGDIASQNMMRAVARQVCEQLISGQMNRFNQMLNQIPNDYQSSRNQPGPPGPPGPPGSAGARGEPGPGGRPGFPGTPGMQGPPGERGLPGEKGERGTGSSGPRGLPGPPGPQGESRTGPPGSTGSRGPPGPPGRPGNSGIRGPPGPPGYCDSSQCASIPYNGQGYPGSG

SEQ ID NO: 26622 - protein, 1899 aa, Homo sapiens
  REGION 1..1899: note = ENSP00000305147
MRSRLPPALAALGAALLLSSIEAEGMECLTRAEADIVLLVDGSWSIGRANFRTVRSFISRIVEVFDIGPKRVQIALAQYSGDPRTEWQLNAHRDKKSLLQAVANLPYKGGNTLTGMALNFIRQQNFRTQAGMRPRARKIGVLITDGKSQDDVEAPSKKLKDEGVELFAIGIKNADEVELKMIATDPDDTHAYNVADFESLSRIVDDLTINLCNSVKGPGDLEAPSNLVISERTHRSFRVSWTPPSDSVDRYKVEYYPVSGGKRQEFYVSRMETSTVLKDLKPETEYVVNVYSVVEDEYSEPLKGTEKTLPVPVVSLNIYDVGPTTMHVQWQPVGGATGYILSYKPVKDTEPTRPKEVRLGPTVNDMQLTDLVPNTEYAVTVQAVLHDLTSEPVTVREVTLPLPRPQDLKLRDVTHSTMNVFWEPVPGKVRKYIVRYKTPEEDVKEVEVDRSETSTSLKDLFSQTLYTVSVSAVHDEGESPPVTAQETTRPVPAPTNLKITEVTSEGFRGTWDHGASDVSLYRITWAPFGSSDKMETILNGDENTLVFENLNPNTIYEVSITAIYPDESESDDLIGSERTLPILTTQAPKSGPRNLQVYNATSNSLTVKWDPASGRVQKYRITYQPSTGEGNEQTTTIGGRQNSVVLQKLKPDTPYTITVSSLYPDGEGGRMTGRGKTKPLNTVRNLRVYDPSTSTLNVRWDHAEGNPRQYKLFYAPAAGGPEELVPIPGNTNYAILRNLQPDTSYTVTVVPVYTEGDGGRTSDTGRTLMRGLARNVQVYNPTPNSLDVRWDPAPGPVLQYRVVYSPVDGTRPSESIVVPGNTRMVHLERLIPDTLYSVNLVALYSDGEGNPSPAQGRTLPRSGPRNLRVFGETTNSLSVAWDHADGPVQQYRIIYSPTVGDPIDEYTTVPGRRNNVILQPLQPDTPYKITVIAVYEDGDGGHLTGNGRTVGLLPPQNIHISDEWYTRFRVSWDPSPSPVLGYKIVYKPVGSNEPMEAFVGEMTSYTLHNLNPSTTYDVNVYAQYDSGLSVPLTDQGTTLYLNVTDLKTYQIGWDTFCVKWSPHRAATSYRLKLSPADGTRGQEITVRGSETSHCFTGLSPDTDYGVTVFVQTPNLEGPGVSVKEHTTVKPTEAPTEPPTPPPPPTIPPARDVCKGAKADIVFLTDASWSIGDDNFNKVVKFIFNTVGGFDEISPAGIQVSFVQYSDEVKSEFKLNTYNDKALALGALQNIRYRGGNTRTGKALTFIKEKVLTWESGMRKNVPKVLVVVTDGRSQDEVKKAALVIQQSGFSVFVVGVADVDYNELANIASKPSERHVFIVDDFESFEKIEDNLITFVCETATSSCPLIYLDGYTSPGFKMLEAYNLTEKNFASVQGVSLESGSFPSYSAYRIQKNAFVNQPTADLHPNGLPPSYTIILLFRLLPETPSDPFAIWQITDRDYKPQVGVIADPSSKTLSFFNKDTRGEVQTVTFDTEEVKTLFYGSFHKVHIVVTSKSVKIYIDCYEIIEKDIKEAGNITTDGYEILGKLLKGERKSAAFQIQSFDIVCSPVWTSRDRCCDIPSRRDEGKCPAFPNSCTCTQDSVGPPGPPGPAGGPGAKGPRGERGISGAIGPPGPRGDIGPPGPQGPPGPQGPNGLSIPGEQGRQGMKGDAGEPGLPGRTGTPGLPGPPGPMGPPGDRGFTGKDGAMGPRGPPGPPGSPGSPGVTGPSGKPGKPGDHGRPGPSGLKGEKGDRGDIASQNMMRAVARQVCEQLISGQMNRFNQMLNQIPNDYQSSRNQPGPPGPPGPPGSAGARGEPGPGGRPGFPGTPGMQGPPGERGLPGEKGERGTGSSGPRGLPGPPGPQGESRTGPPGSTGSRGPPGPPGRPGNSGIRGPPGPPGYCDSSQCASIPYNGQGYPGSG

SEQ ID NO: 26623 - protein, 2987 aa, Homo sapiens
  REGION 1..2987: note = ENSP00000412864
MRSRLPPALAALGAALLLSSIEAEVDPPSDLNFKIIDENTVHMSWAKPVDPIVGYRITVDPTTDGPTKEFTLSASTTETLLSELVPETEYVVTITSYDEVEESVPVIGQLTIQTGSSTKPVEKKPGKTEIQKCSVSAWTDLVFLVDGSWSVGRNNFKYILDFIAALVSAFDIGEEKTRVGVVQYSSDTRTEFNLNQYYQRDELLAAIKKIPYKGGNTMTGDAIDYLVKNTFTESAGARVGFPKVAIIITDGKSQDEVEIPARELRNVGVEVFSLGIKAADAKELKQIASTPSLNHVFNVANFDAIVDIQNEIISQVCSGVDEQLGELVSGEEVVEPPSNLIAMEVSSKYVKLNWNPSPSPVTGYKVILTPMTAGSRQHALSVGPQTTTLSVRDLSADTEYQISVSAMKGMTSSEPISIMEKTQPMKVQVECSRGVDIKADIVFLVDGSYSIGIANFVKVRAFLEVLVKSFEISPNRVQISLVQYSRDPHTEFTLKKFTKVEDIIEAINTFPYRGGSTNTGKAMTYVREKIFVPSKGSRSNVPKVMILITDGKSSDAFRDPAIKLRNSDVEIFAVGVKDAVRSELEAIASPPAETHVFTVEDFDAFQRISFELTQSICLRIEQELAAIKKKAYVPPKDLSFSEVTSYGFKTNWSPAGENVFSYHITYKEAAGDDEVTVVEPASSTSVVLSSLKPETLYLVNVTAEYEDGFSIPLAGEETTEEVKGAPRNLKVTDETTDSFKITWTQAPGRVLRYRIIYRPVAGGESREVTTPPNQRRRTLENLIPDTKYEVSVIPEYFSGPGTPLTGNAATEEVRGNPRDLRVSDPTTSTMKLSWSGAPGKVKQYLVTYTPVAGGETQEVTVRGDTTNTVLQGLKEGTQYALSVTALYASGAGDALFGEGTTLEERGSPQDLVTKDITDTSIGAYWTSAPGMVRGYRVSWKSLYDDVDTGEKNLPEDAIHTMIENLQPETKYRISVFATYSSGEGEPLTGDATTELSQDSKTLKVDEETENTMRVTWKPAPGKVVNYRVVYRPHGRGKQMVAKVPPTVTSTVLKRLQPQTTYDITVLPIYKMGEGKLRQGSGTTASRFKSPRNLKTSDPTMSSFRVTWEPAPGEVKGYKVTFHPTGDDRRLGELVVGPYDNTVVLEELRAGTTYKVNVFGMFDGGESSPLVGQEMTTLSDTTVMPILSSGMECLTRAEADIVLLVDGSWSIGRANFRTVRSFISRIVEVFDIGPKRVQIALAQYSGDPRTEWQLNAHRDKKSLLQAVANLPYKGGNTLTGMALNFIRQQNFRTQAGMRPRARKIGVLITDGKSQDDVEAPSKKLKDEGVELFAIGIKNADEVELKMIATDPDDTHAYNVADFESLSRIVDDLTINLCNSVKGPGDLEAPSNLVISERTHRSFRVSWTPPSDSVDRYKVEYYPVSGGKRQEFYVSRMETSTVLKDLKPETEYVVNVYSVVEDEYSEPLKGTEKTLPVPVVSLNIYDVGPTTMHVQWQPVGGATGYILSYKPVKDTEPTRPKEVRLGPTVNDMQLTDLVPNTEYAVTVQAVLHDLTSEPVTVREVTLPLPRPQDLKLRDVTHSTMNVFWEPVPGKVRKYIVRYKTPEEDVKEVEVDRSETSTSLKDLFSQTLYTVSVSAVHDEGESPPVTAQETTRPVPAPTNLKITEVTSEGFRGTWDHGASDVSLYRITWAPFGSSDKMETILNGDENTLVFENLNPNTIYEVSITAIYPDESESDDLIGSERTLPILTTQAPKSGPRNLQVYNATSNSLTVKWDPASGRVQKYRITYQPSTGEGNEQTTTIGGRQNSVVLQKLKPDTPYTITVSSLYPDGEGGRMTGRGKTKPLNTVRNLRVYDPSTSTLNVRWDHAEGNPRQYKLFYAPAAGGPEELVPIPGNTNYAILRNLQPDTSYTVTVVPVYTEGDGGRTSDTGRTLMRGLARNVQVYNPTPNSLDVRWDPAPGPVLQYRVVYSPVDGTRPSESIVVPGNTRMVHLERLIPDTLYSVNLVALYSDGEGNPSPAQGRTLPRSGPRNLRVFGETTNSLSVAWDHADGPVQQYRIIYSPTVGDPIDEYTTVPGRRNNVILQPLQPDTPYKITVIAVYEDGDGGHLTGNGRTVGLLPPQNIHISDEWYTRFRVSWDPSPSPVLGYKIVYKPVGSNEPMEAFVGEMTSYTLHNLNPSTTYDVNVYAQYDSGLSVPLTDQGTTLYLNVTDLKTYQIGWDTFCVKWSPHRAATSYRLKLSPADGTRGQEITVRGSETSHCFTGLSPDTDYGVTVFVQTPNLEGPGVSVKEHTTVKPTEAPTEPPTPPPPPTIPPARDVCKGAKADIVFLTDASWSIGDDNFNKVVKFIFNTVGGFDEISPAGIQVSFVQYSDEVKSEFKLNTYNDKALALGALQNIRYRGGNTRTGKALTFIKEKVLTWESGMRKNVPKVLVVVTDGRSQDEVKKAALVIQQSGFSVFVVGVADVDYNELANIASKPSERHVFIVDDFESFEKIEDNLITFVCETATSSCPLIYLDGYTSPGFKMLEAYNLTEKNFASVQGVSLESGSFPSYSAYRIQKNAFVNQPTADLHPNGLPPSYTIILLFRLLPETPSDPFAIWQITDRDYKPQVGVIADPSSKTLSFFNKDTRGEVQTVTFDTEEVKTLFYGSFHKRDEGKCPAFPNSCTCTQDSVGPPGPPGPAGGPGAKGPRGERGISGAIGPPGPRGDIGPPGPQGPPGPQGPNGLSIPGEQGRQGMKGDAGEPGLPGRTGTPGLPGPPGPMGPPGDRGFTGKDGAMGPRGPPGPPGSPGSPGVTGPSGKPGKPGDHGRPGPSGLKGEKGDRGDIASQNMMRAVARQVCEQLISGQMNRFNQMLNQIPNDYQSSRNQPGPPGPPGPPGSAGARGEPGPGGRPGFPGTPGMQGPPGERGLPGEKGERGTGSSGPRGLPGPPGPQGESRTGPPGSTGSRGPPGPPGRPGNSGIRGPPGPPGYCDSSQCASIPYNGQGYPGSG

SEQ ID NO: 26624 - protein, 3062 aa, Homo sapiens
  REGION 1..3062: note = ENSP00000421216
MRSRLPPALAALGAALLLSSIEAEVDPPSDLNFKIIDENTVHMSWAKPVDPIVGYRITVDPTTDGPTKEFTLSASTTETLLSELVPETEYVVTITSYDEVEESVPVIGQLTIQTGSSTKPVEKKPGKTEIQKCSVSAWTDLVFLVDGSWSVGRNNFKYILDFIAALVSAFDIGEEKTRVGVVQYSSDTRTEFNLNQYYQRDELLAAIKKIPYKGGNTMTGDAIDYLVKNTFTESAGARVGFPKVAIIITDGKSQDEVEIPARELRNVGVEVFSLGIKAADAKELKQIASTPSLNHVFNVANFDAIVDIQNEIISQVCSGVDEQLGELVSGEEVVEPPSNLIAMEVSSKYVKLNWNPSPSPVTGYKVILTPMTAGSRQHALSVGPQTTTLSVRDLSADTEYQISVSAMKGMTSSEPISIMEKTQPMKVQVECSRGVDIKADIVFLVDGSYSIGIANFVKVRAFLEVLVKSFEISPNRVQISLVQYSRDPHTEFTLKKFTKVEDIIEAINTFPYRGGSTNTGKAMTYVREKIFVPSKGSRSNVPKVMILITDGKSSDAFRDPAIKLRNSDVEIFAVGVKDAVRSELEAIASPPAETHVFTVEDFDAFQRISFELTQSICLRIEQELAAIKKKAYVPPKDLSFSEVTSYGFKTNWSPAGENVFSYHITYKEAAGDDEVTVVEPASSTSVVLSSLKPETLYLVNVTAEYEDGFSIPLAGEETTEEVKGAPRNLKVTDETTDSFKITWTQAPGRVLRYRIIYRPVAGGESREVTTPPNQRRRTLENLIPDTKYEVSVIPEYFSGPGTPLTGNAATEEVRGNPRDLRVSDPTTSTMKLSWSGAPGKVKQYLVTYTPVAGGETQEVTVRGDTTNTVLQGLKEGTQYALSVTALYASGAGDALFGEGTTLEERGSPQDLVTKDITDTSIGAYWTSAPGMVRGYRVSWKSLYDDVDTGEKNLPEDAIHTMIENLQPETKYRISVFATYSSGEGEPLTGDATTELSQDSKTLKVDEETENTMRVTWKPAPGKVVNYRVVYRPHGRGKQMVAKVPPTVTSTVLKRLQPQTTYDITVLPIYKMGEGKLRQGSGTTASRFKSPRNLKTSDPTMSSFRVTWEPAPGEVKGYKVTFHPTGDDRRLGELVVGPYDNTVVLEELRAGTTYKVNVFGMFDGGESSPLVGQEMTTLSDTTVMPILSSGMECLTRAEADIVLLVDGSWSIGRANFRTVRSFISRIVEVFDIGPKRVQIALAQYSGDPRTEWQLNAHRDKKSLLQAVANLPYKGGNTLTGMALNFIRQQNFRTQAGMRPRARKIGVLITDGKSQDDVEAPSKKLKDEGVELFAIGIKNADEVELKMIATDPDDTHAYNVADFESLSRIVDDLTINLCNSVKGPGDLEAPSNLVISERTHRSFRVSWTPPSDSVDRYKVEYYPVSGGKRQEFYVSRMETSTVLKDLKPETEYVVNVYSVVEDEYSEPLKGTEKTLPVPVVSLNIYDVGPTTMHVQWQPVGGATGYILSYKPVKDTEPTRPKEVRLGPTVNDMQLTDLVPNTEYAVTVQAVLHDLTSEPVTVREVTLPLPRPQDLKLRDVTHSTMNVFWEPVPGKVRKYIVRYKTPEEDVKEVEVDRSETSTSLKDLFSQTLYTVSVSAVHDEGESPPVTAQETTRPVPAPTNLKITEVTSEGFRGTWDHGASDVSLYRITWAPFGSSDKMETILNGDENTLVFENLNPNTIYEVSITAIYPDESESDDLIGSERTLPILTTQAPKSGPRNLQVYNATSNSLTVKWDPASGRVQKYRITYQPSTGEGNEQTTTIGGRQNSVVLQKLKPDTPYTITVSSLYPDGEGGRMTGRGKTKPLNTVRNLRVYDPSTSTLNVRWDHAEGNPRQYKLFYAPAAGGPEELVPIPGNTNYAILRNLQPDTSYTVTVVPVYTEGDGGRTSDTGRTLMRGLARNVQVYNPTPNSLDVRWDPAPGPVLQYRVVYSPVDGTRPSESIVVPGNTRMVHLERLIPDTLYSVNLVALYSDGEGNPSPAQGRTLPRSGPRNLRVFGETTNSLSVAWDHADGPVQQYRIIYSPTVGDPIDEYTTVPGRRNNVILQPLQPDTPYKITVIAVYEDGDGGHLTGNGRTVGLLPPQNIHISDEWYTRFRVSWDPSPSPVLGYKIVYKPVGSNEPMEAFVGEMTSYTLHNLNPSTTYDVNVYAQYDSGLSVPLTDQGTTLYLNVTDLKTYQIGWDTFCVKWSPHRAATSYRLKLSPADGTRGQEITVRGSETSHCFTGLSPDTDYGVTVFVQTPNLEGPGVSVKEHTTVKPTEAPTEPPTPPPPPTIPPARDVCKGAKADIVFLTDASWSIGDDNFNKVVKFIFNTVGGFDEISPAGIQVSFVQYSDEVKSEFKLNTYNDKALALGALQNIRYRGGNTRTGKALTFIKEKVLTWESGMRKNVPKVLVVVTDGRSQDEVKKAALVIQQSGFSVFVVGVADVDYNELANIASKPSERHVFIVDDFESFEKIEDNLITFVCETATSSCPLIYLDGYTSPGFKMLEAYNLTEKNFASVQGVSLESGSFPSYSAYRIQKNAFVNQPTADLHPNGLPPSYTIILLFRLLPETPSDPFAIWQITDRDYKPQVGVIADPSSKTLSFFNKDTRGEVQTVTFDTEEVKTLFYGSFHKVHIVVTSKSVKIYIDCYEIIEKDIKEAGNITTDGYEILGKLLKGERKSAAFQIQSFDIVCSPVWTSRDRCCDIPSRRDEGKCPAFPNSCTCTQDSVGPPGPPGPAGGPGAKGPRGERGISGAIGPPGPRGDIGPPGPQGPPGPQGPNGLSIPGEQGRQGMKGDAGEPGLPGRTGTPGLPGPPGPMGPPGDRGFTGKDGAMGPRGPPGPGSPGVTGPSGKPGKPGDHGRPGPSGLKGEKGDRGDIASQNMMRAVARQVCEQLISGQMNRFNQMLNQIPNDYQSSRNQPGPPGPPGPPGSAGARGEPGPGGRPGFPGTPGMQGPPGERGLPGEKGERGTGSSGPRGLPGPPGPQGESRTGPPGSTGSRGPPGPPGRPGNSGIRGPPGPPGYCDSSQCASIPYNGQGYPGTLLPL

SEQ ID NO: 26625 - protein, 207 aa, Homo sapiens
  REGION 1..207: note = ENSP00000423423
VIQQSGFSVFVVGVADVDYNELANIASKPSERHVFIVDDFESFEKIEDNLITFVCETATSSCPLIYLDGYTSPGFKMLEAYNLTEKNFASVQGVSLESGSFPSYSAYRIQKNAFVNQPTADLHPNGLPPSYTIILLFRLLPETPSDPFAIWQITDRDYKPQVGVIADPSSKTLSFFNKDTRGEVQTVTFDTEEVKTLFYGSFHKVKT

SEQ ID NO: 26626 - protein, 638 aa, Homo sapiens
  REGION 1..638: note = ENSP00000393217
  VARIANT 1: note = Any amino acid
XKSLLQAVANLPYKGGNTLTGMALNFIRQQNFRTQAGMRPRARKIGVLITDGKSQDDVEAPSKKLKDEGVELFAIGIKNADEVELKMIATDPDDTHAYNVADFESLSRIVDDLTINLCNSVKGPGDLEAPSNLVISERTHRSFRVSWTPPSDSVDRYKVEYYPVSGGKRQEFYVSRMETSTVLKDLKPETEYVVNVYSVVEDEYSEPLKGTEKTLPVPVVSLNIYDVGPTTMHVQWQPVGGATGYILSYKPVKDTEPTRPKEVRLGPTVNDMQLTDLVPNTEYAVTVQAVLHDLTSEPVTVREVTLPLPRPQDLKLRDVTHSTMNVFWEPVPGKVRKYIVRYKTPEEDVKEVEVDRSETSTSLKDLFSQTLYTVSVSAVHDEGESPPVTAQETTRPVPAPTNLKITEVTSEGFRGTWDHGASDVSLYRITWAPFGSSDKMETILNGDENTLVFENLNPNTIYEVSITAIYPDESESDDLIGSERTPPKSGPRNLQVYNATSNSLTVKWDPASGRVQKYRITYQPSTGEGNEQTTTIGGRQNSVVLQKLKPDTPYTITVSSLYPDGEGGRMTGRGKTKPLNTVRNLRVYDPSTSTLNVRWDHAEGNPRQYKLFYAPAAGGPEELVPIPGNTNYAILRNL

SEQ ID NO: 26627 - protein, 1874 aa, Homo sapiens
  REGION 1..1874: note = ENSP00000483232
MECLTRAEADIVLLVDGSWSIGRANFRTVRSFISRIVEVFDIGPKRVQIALAQYSGDPRTEWQLNAHRDKKSLLQAVANLPYKGGNTLTGMALNFIRQQNFRTQAGMRPRARKIGVLITDGKSQDDVEAPSKKLKDEGVELFAIGIKNADEVELKMIATDPDDTHAYNVADFESLSRIVDDLTINLCNSVKGPGDLEAPSNLVISERTHRSFRVSWTPPSDSVDRYKVEYYPVSGGKRQEFYVSRMETSTVLKDLKPETEYVVNVYSVVEDEYSEPLKGTEKTLPVPVVSLNIYDVGPTTMHVQWQPVGGATGYILSYKPVKDTEPTRPKEVRLGPTVNDMQLTDLVPNTEYAVTVQAVLHDLTSEPVTVREVTLPLPRPQDLKLRDVTHSTMNVFWEPVPGKVRKYIVRYKTPEEDVKEVEVDRSETSTSLKDLFSQTLYTVSVSAVHDEGESPPVTAQETTRPVPAPTNLKITEVTSEGFRGTWDHGASDVSLYRITWAPFGSSDKMETILNGDENTLVFENLNPNTIYEVSITAIYPDESESDDLIGSERTLPILTTQAPKSGPRNLQVYNATSNSLTVKWDPASGRVQKYRITYQPSTGEGNEQTTTIGGRQNSVVLQKLKPDTPYTITVSSLYPDGEGGRMTGRGKTKPLNTVRNLRVYDPSTSTLNVRWDHAEGNPRQYKLFYAPAAGGPEELVPIPGNTNYAILRNLQPDTSYTVTVVPVYTEGDGGRTSDTGRTLMRGLARNVQVYNPTPNSLDVRWDPAPGPVLQYRVVYSPVDGTRPSESIVVPGNTRMVHLERLIPDTLYSVNLVALYSDGEGNPSPAQGRTLPRSGPRNLRVFGETTNSLSVAWDHADGPVQQYRIIYSPTVGDPIDEYTTVPGRRNNVILQPLQPDTPYKITVIAVYEDGDGGHLTGNGRTVGLLPPQNIHISDEWYTRFRVSWDPSPSPVLGYKIVYKPVGSNEPMEAFVGEMTSYTLHNLNPSTTYDVNVYAQYDSGLSVPLTDQGTTLYLNVTDLKTYQIGWDTFCVKWSPHRAATSYRLKLSPADGTRGQEITVRGSETSHCFTGLSPDTDYGVTVFVQTPNLEGPGVSVKEHTTVKPTEAPTEPPTPPPPPTIPPARDVCKGAKADIVFLTDASWSIGDDNFNKVVKFIFNTVGGFDEISPAGIQVSFVQYSDEVKSEFKLNTYNDKALALGALQNIRYRGGNTRTGKALTFIKEKVLTWESGMRKNVPKVLVVVTDGRSQDEVKKAALVIQHSRFSVFVVGVADVDYNELANIASKPSERHVFIVDDFESFEKIEDNLITFVCETATSSCPLIYLDGYTSPGFKMLEAYNLTEKNFASVQGVSLESGSFPSYSAYRIQKNAFVNQPTADLHPNGLPPSYTIILLFRLLPETPSDPFAIWQITDRDYKPQVGVIADPSSKTLSFFNKDTRGEVQTVTFDTEEVKTLFYGSFHKVHIVVTSKSVKIYIDCYEIIEKDIKEAGNITTDGYEILGKLLKGERKSAAFQIQSFDIVCSPVWTSRDRCCDIPSRRDEGKCPAFPNSCTCTQDSVGPPGPPGPAGGPGAKGPRGERGISGAIGPPGPRGDIGPPGPQGPPGPQGPNGLSIPGEQGRQGMKGDAGEPGLPGRTGTPGLPGPPGPMGPPGDRGFTGKDGAMGPRGPPGPPGSPGSPGVTGPSGKPGKPGDHGRPGPSGLKGEKGDRGDIASQNMMRAVARQVCEQLISGQMNRFNQMLNQIPNDYQSSRNQPGPPGPPGPPGSAGARGEPGPGGRPGFPGTPGMQGPPGERGLPGEKGERGTGSSGPRGLPGPPGPQGESRTGPPGSTGSRGPPGPPGRPGNSGIRGPPGPPGYCDSSQCASIPYNGQGYPGSG

SEQ ID NO: 26628 - protein, 582 aa, Homo sapiens
  REGION 1..582: note = ENSP00000430089
MVAERTHKAAATGARGPGELGAPGTVALVAARAERGARLPSPGSCGLLTLALCSLALSLLAHFRTAELQARVLRLEAERGEQQMETAILGRVNQLLDEKWKLHSRRRREAPKTSPGCNCPPGPPGPTGRPGLPGDKGAIGMPGRVGVKGQPGEKGSPGDAGLSIIGPRGPPGQPGTRGFPGFPGPIGLDGKPGHPGPKGDMGLTGPPGQPGPQGQKGEKGQCGEYPHRECLSSMPAALRSSQIIALKLLPLLNSVRLAPPPVIKRRTFQGEQSQASIQGPPGPPGPPGPSGPLGHPGLPGPMGPPGLPGPPGPKGDPGIQGYHGRKGERGMPGMPGKHGAKGAPGIAVAGMKGEPGIPGTKGEKGAEGSPGLPGLLGQKGEKGDAGNSIGGGRGEPGPPGLPGPPGPKGEAGVDGQVGPPGQPGDKGERGAAGEQGPDGPKGSKGEPGKGEMVDYNGNINEALQEIRTLALMGPPGLPGQIGPPGAPGIPGQKGEIGLPGPPGHDGEKGPRGKPGDMGPPGPQGPPGKDGPPGVKGENGHPGSPGEKGEKGETGQAGSPGLDGPTGERRTWWPEQTQSGRIA

SEQ ID NO: 26629 - protein, 717 aa, Homo sapiens
  REGION 1..717: note = ENSP00000381949
MVAERTHKAAATGARGPGELGAPGTVALVAARAERGARLPSPGSCGLLTLALCSLALSLLAHFRTAELQARVLRLEAERGEQQMETAILGRVNQLLDEKWKLHSRRRREAPKTSPGCNCPPGPPGPTGRPGLPGDKGAIGMPGRVGSPGDAGLSIIGPRGPPGQPGTRGFPGFPGPIGLDGKPGHPGPKGDMGLTGPPGQPGPQGQKGEKGQCGEYPHRECLSSMPAALRSSQIIALKLLPLLNSVRLAPPPVIKRRTFQGEQSQASIQGPPGPPGPPGPSGPLGHPGLPGPMGPPGLPGPPGPKGDPGIQGYHGRKGERGMPGMPGKHGAKGAPGIAVAGMKGEPGIPGTKGEKGAEGSPGLPGLLGQKGEKGDAGNSIGGGRGEPGPPGLPGPPGPKGEAGVDGQVGPPGQPGDKGERGAAGEQGPDGPKGSKGEPGKGEMVDYNGNINEALQEIRTLALMGPPGLPGQIGPPGAPGIPGQKGEIGLPGPPGHDGEKGPRGKPGDMGPPGPQGPPGKDGPPGVKGENGHPGSPGEKGEKGETGQAGSPGEKGEAGEKGNPGAEVPGLPGPEGPPGPPGLQGVPGPKGEAGLDGAKGEKGFQGEKGDRGPLGLPGASGLDGRPGPPGTPGPIGVPGPAGPKGERGSKGDPGMTGPTGAAGLPGLHGPPGDKGNRGERGKKGSRGPKGDKGDQGAPGLDAPCPLGEDGLPVQGCWNK

SEQ ID NO: 26630 - protein, 695 aa, Homo sapiens
  REGION 1..695: note = ENSP00000346553
MVAERTHKAAATGARGPGELGAPGTVALVAARAERGARLPSPGSCGLLTLALCSLALSLLAHFRTAELQARVLRLEAERGEQQMETAILGRVNQLLDEKWKLHSRRRREAPKTSPGCNCPPGPPGPTGRPGLPGDKGAIGMPGRVGSPGDAGLSIIGPRGPPGQPGTRGFPGFPGPIGLDGKPGHPGPKGDMGLTGPPGQPGPQGQKGEKGQCGEYPHRECLSSMPAALRSSQIIALKGEQSQASIQGPPGPPGPPGPSGPLGHPGLPGPMGPPGLPGPPGPKGDPGIQGYHGRKGERGMPGMPGKHGAKGAPGIAVAGMKGEPGIPGTKGEKGAEGSPGLPGLLGQKGEKGDAGNSIGGGRGEPGPPGLPGPPGPKGEAGVDGQVGPPGQPGDKGERGAAGEQGPDGPKGSKGEPGKGEMVDYNGNINEALQEIRTLALMGPPGLPGQIGPPGAPGIPGQKGEIGLPGPPGHDGEKGPRGKPGDMGPPGPQGPPGKDGPPGVKGENGHPGSPGEKGEKGETGQAGSPGEKGEAGEKGNPGAEVPGLPGPEGPPGPPGLQGVPGPKGEAGLDGAKGEKGFQGEKGDRGPLGLPGASGLDGRPGPPGTPGPIGVPGPAGPKGERGSKGDPGMTGPTGAAGLPGLHGPPGDKGNRGERGKKGSRGPKGDKGDQGAPGLDAPCPLGEDGLPVQGCWNK

SEQ ID NO: 26631 - protein, 683 aa, Homo sapiens
  REGION 1..683: note = ENSP00000350463
MVAERTHKAAATGARGPGELGAPGTVALVAARAERGARLPSPGSCGLLTLALCSLALSLLAHFRTAELQARVLRLEAERGEQQMETAILGRVNQLLDEKWKLHSRRRREAPKTSPGCNCPPGPPGPTGRPGLPGDKGAIGMPGRVGSPGDAGLSIIGPRGPPGQPGTRGFPGFPGPIGLDGKPGHPGPKGDMGLTGPPGQPGPQGQKGEKGQCGEYPHRECLSSMPAALRSSQIIALKGEQSQASIQGPPGPPGPPGPSGPLGHPGLPGPMGPPGLPGPPGPKGDPGIQGYHGRKGERGMPGMPGKHGAKGAPGIAVAGMKGEPGIPGTKGEKGAEGSPGLPGLLGQKGEKGDAGNSIGGGRGEPGPPGLPGPPGPKGEAGVDGQVGPPGQPGDKGERGAAGEQGPDGPKGSKGEPGKGEMVDYNGNINEALQEIRTLALMGPPGLPGQIGPPGAPGIPGQKGEIGLPGPPGHDGEKGPRGKPGDMGPPGPQGPPGKDGPPGVKGENGHPGSPGEKGEKGETGQAGSPGEKGEAGEKGNPGAEVPGLPGPEGPPGPPGLQGVPGPKGEAGLDGAKGEKGFQGEKGDRGPLGLPGTPGPIGVPGPAGPKGERGSKGDPGMTGPTGAAGLPGLHGPPGDKGNRGERGKKGSRGPKGDKGDQGAPGLDAPCPLGEDGLPVQGCWNK

SEQ ID NO: 26632 - protein, 645 aa, Homo sapiens
  REGION 1..645: note = ENSP00000428057
MVAERTHKAAATGARGPGELGAPGTVALVAARAERGARLPSPGSCGLLTLALCSLALSLLAHFRTAELQARVLRLEAERGEQQMETAILGRVNQLLDEKWKLHSRRRREAPKTSPGCNCPPGPPGQPGTRGFPGFPGPIGLDGKPGHPGPKGDMGLTGPPGQPGPQGQKGEKGQCGEYPHRLLPLLNSVRLAPPPVIKRRTFQGEQSQASIQGPPGPPGPPGPSGPLGHPGLPGPMGPPGLPGPPGPKGDPGIQGYHGRKGERGMPGMPGKHGAKGAPGIAVAGMKGEPGIPGTKGEKGAEGSPGLPGLLGQKGEKGDAGNSIGGGRGEPGPPGLPGPPGPKGEAGVDGQVGPPGQPGDKGERGAAGEQGPDGPKGSKGEPGKGEMVDYNGNINEALQEIRTLALMGPPGLPGQIGPPGAPGIPGQKGEIGLPGPPGHDGEKGPRGKPGDMGPPGPQGPPGKDGPPGVKGENGHPGSPGEKGEKGETGQAGSPVPGLPGPEGPPGPPGLQGVPGPKGEAGLDGAKGEKGFQGEKGDRGPLGLPGASGLDGRPGPPGTPGPIGVPGPAGPKGERGSKGDPGMTGPTGAAGLPGLHGPPGDKGNRGERGKKGSRGPKGDKGDQGAPGLDAPCPLGEDGLPVQGCWNK

SEQ ID NO: 26633 - protein, 668 aa, Homo sapiens
  REGION 1..668: note = ENSP00000430061
MVAERTHKAAATGARGPGELGAPGTVALVAARAERGARLPSPGSCGLLTLALCSLALSLLAHFRTAELQARVLRLEAERGEQQMETAILGRVNQLLDEKWKLHSRRRREAPKTSPGCNCPPGPPGPTGRPGLPGDKGAIGMPGRVGSPGDAGLSIIGPRGPPGQPGTRGFPGFPGPIGLDGKPGHPGPKGDMGLTGPPGQPGPQGQKGEKGQCGEYPHRECLSSMPAALRSSQIIALKGEQSQASIQGPPGPPGPPGPSGPLGHPGLPGPMGPPGLPGPPGPKGDPGIQGYHGRKGERGMPGMPGKHGAKGAPGIAVAGMKGEPGIPGTKGEKGAEGSPGLPGLLGQKGEKGDAGNSIGGGRGEPGPPGLPGPPGPKGEAGVDGQVGPPGQPGDKGERGAAGEQGPDGPKGSKGEPGKGEMVDYNGNINEALQEIRTLALMGPPGLPGQIGPPGAPGIPGQKGEIGLPGPPGHDGEKGPRGKPGDMGPPGPQGPPGKDGPPGVKGENGHPGSPGEKGEKGETGQAGSPVPGLPGPEGPPGPPGLQGVPGPKGEAGLDGAKGEKGFQGEKGDRGPLGLPGTPGPIGVPGPAGPKGERGSKGDPGMTGPTGAAGLPGLHGPPGDKGNRGERGKKGSRGPKGDKGDQGAPGLDAPCPLGEDGLPVQGCWNK

SEQ ID NO: 26634 - protein, 686 aa, Homo sapiens
  REGION 1..686: note = ENSP00000428342
MVAERTHKAAATGARGPGELGAPGTVALVAARAERGARLPSPGSCGLLTLALCSLALSLLAHFRTAELQARVLRLEAERGEQQMETAILGRVNQLLDEKWKLHSRRRREAPKTSPGCNCPPGPPGPTGRPGLPGDKGAIGMPGRVGSPGDAGLSIIGPRGPPGQPGTRGFPGFPGPIGLDGKPGHPGPKGDMGLTGPPGQPGPQGQKGEKGQCGEYPHRLLPLLNSVRLAPPPVIKRRTFQGEQSQASIQGPPGPPGPPGPSGPLGHPGLPGPMGPPGLPGPPGPKGDPGIQGYHGRKGERGMPGMPGKHGAKGAPGIAVAGMKGEPGIPGTKGEKGAEGSPGLPGLLGQKGEKGDAGNSIGGGRGEPGPPGLPGPPGPKGEAGVDGQVGPPGQPGDKGERGAAGEQGPDGPKGSKGEPGKGEMVDYNGNINEALQEIRTLALMGPPGLPGQIGPPGAPGIPGQKGEIGLPGPPGHDGEKGPRGKPGDMGPPGPQGPPGKDGPPGVKGENGHPGSPGEKGEKGETGQAGSPGEKGEAGEKGNPGAEVPGLPGPEGPPGPPGLQGVPGPKGEAGLDGAKGEKGFQGEKGDRGPLGLPGTPGPIGVPGPAGPKGERGSKGDPGMTGPTGAAGLPGLHGPPGDKGNRGERGKKGSRGPKGDKGDQGAPGLDAPCPLGEDGLPVQGCWNK

SEQ ID NO: 26635 - protein, 610 aa, Homo sapiens
  REGION 1..610: note = ENSP00000430173
MVAERTHKAAATGARGPGELGAPGTVALVAARAERGARLPSPGSCGLLTLALCSLALSLLAHFRTAELQARVLRLEAERGEQQMETAILGRVNQLLDEKWKLHSRRRREAPKTSPGCNCPPGPPGPTGRPGLPGQPGTRGFPGFPGPIGLDGKPGHPGPKGDMGLTGPPGQPGPQGQKGEKGQCGEYPHRECLSSMPAALRSSQIIALKGEQSQASIQGPPGPPGPPGPSGPLGHPGLPGPMGPPGLPGPPGPKGDPGIQGYHGRKGERGMPGMPGKHGAKGAPGIAVAGMKGEPGIPGTKGEKGAEGSPGLPGLLGQKGEKGDAGNSIGGGRGEPGPPGLPGPPGPKGEAGVDGQVGPPGQPGDKGERGAAGEQGPDGPKGSKGEPGKGEMVDYNGNINEALQEIRTLALMGPPGLPGQIGPPGAPGIPGQKGEIGLPGPPGHDGEKGPRGKPGDMGPPGPQGPPGKDGPPGVKGENGHPGSPGEKGEKGETGQAGSPVPGLPGPEGPPGPPGLQGVPGPKGEAGLDGAKGEKGFQGEKGDRGPLGLPGTPGPIGVPGPAGPKGERGSKGDPGMTGPTGAAGLPGLHGPPGDKGNRGEDGLPVQGCWNK

SEQ ID NO: 26636 - protein, 247 aa, Homo sapiens
  REGION 1..247: note = ENSP00000381947
  VARIANT 1: note = Any amino acid
XIRTLALMGPPGLPGQIGPPGAPGIPGQKGEIGLPGPPGHDGEKGPRGKPGDMGPPGPQGPPGKDGPPGVKGENGHPGSPGEKGEKGETGQAGSPVPGLPGPEGPPGPPGLQGVPGPKGEAGLDGAKGEKGFQGEKGDRGPLGLPGASGLDGRPGPPGTPGPIGVPGPAGPKGERGSKGDPGMTGPTGAAGLPGLHGPPGDKGNRGERGKKGSRGPKGDKGDQGAPGLDAPCPLGEDGLPVQGCWNK

SEQ ID NO: 26637 - protein, 174 aa, Homo sapiens
  REGION 1..174: note = ENSP00000388774
  VARIANT 1: note = Any amino acid
XGKDGPPGVKGENGHPGSPGEKGEKGETGQAGSPVPGLPGPEGPPGPPGLQGVPGPKGEAGLDGAKGEKGFQGEKGDRGPLGLPGTPGPIGVPGPAGPKGERGSKGDPGMTGPTGAAGLPGLHGPPGDKGNRGERGKKGSRGPKGDKGDQGAPGLDAPCPLGEDGLPVQGCWNK

SEQ ID NO: 26638 - protein, 642 aa, Homo sapiens [sequence omitted]

SEQ ID NO: 26639 - protein, 1388 aa, Homo sapiens
  REGION 1..1388: note = ENSP00000364140
MAPRRNNGQCWCLLMLLSVSTPLPAVTQTRGATETASQGHLDLTQLIGVPLPSSVSFVTGYGGFPAYSFGPGANVGRPARTLIPSTFFRDFAISVVVKPSSTRGGVLFAITDAFQKVIYLGLRLSGVEDGHQRIILYYTEPGSHVSQEAAAFSVPVMTHRWNRFAMIVQGEEVTLLVNCEEHSRIPFQRSSQALAFESSAGIFMGNAGATGLERFTGSLQQLTVHPDPRTPEELCDPEESSASGETSGLQEADGVAEILEAVTYTQASPKEAKVEPINTPPTPSSPFEDMELSGEPVPEGTLETTNMSIIQHSSPKQGSGEILNDTLEGVHSVDGDPITDSGSGAGAFLDIAEEKNLAATAAGLAEVPISTAGEAEASSVPTGGPTLSMSTENPEEGVTPGPDNEERLAATAAGEAEALASMPGEVEASGVAPGELDLSMSAQSLGEEATVGPSSEDSLTTAAAATEVSLSTFEDEEASGVPTDGLAPLTATMAPERAVTSGPGDEEDLAAATTEEPLITAGGEESGSPPPDGPPLPLPTVAPERWITPAQREHVGMKGQAGPKGEKGDAGEELPGPPEPSGPVGPTAGAEAEGSGLGWGSDVGSGSGDLVGSEQLLRGPPGPPGPPGLPGIPGKPGTDVFMGPPGSPGEDGPAGEPGPPGPEGQPGVDGATGLPGMKGEKGARGPNGSVGEKGDPGNRGLPGPPGKKGQAGPPGVMGPPGPPGPPGPPGPGCTMGLGFEDTEGSGSTQLLNEPKLSRPTAAIGLKGEKGDRGPKGERGMDGASIVGPPGPRGPPGHIKVLSNSLINITHGFMNFSDIPELVGPPGPDGLPGLPGFPGPRGPKGDTGLPGFPGLKGEQGEKGEPGAILTEDIPLERLMGKKGEPGMHGAPGPMGPKGPPGHKGEFGLPGRPGRPGLNGLKGTKGDPGVIMQGPPGLPGPPGPPGPPGAVINIKGAIFPIPVRPHCKMPVDTAHPGSPELITFHGVKGEKGSWGLPGSKGEKGDQGAQGPPGPPLDLAYLRHFLNNLKGENGDKGFKGEKGEKGDINGSFLMSGPPGLPGNPGPAGQKGETVVGPQGPPGAPGLPGPPGFGRPGDPGPPGPPGPPGPPAILGAAVALPGPPGPPGQPGLPGSRNLVTAFSNMDDMLQKAHLVIEGTFIYLRDSTEFFIRVRDGWKKLQLGELIPIPADSPPPPALSSNPHQLLPPPNPISSANYEKPALHLAALNMPFSGDIRADFQCFKQARAAGLLSTYRAFLSSHLQDLSTIVRKAERYSLPIVNLKGQVLFNNWDSIFSGHGGQFNMHIPIYSFDGRDIMTDPSWPQKVIWHGSSPHGVRLVDNYCEAWRTADTAVTGLASPLSTGKILDQKAYSCANRLIVLCIENSFMTDARK

SEQ ID NO: 26640 - protein, 1374 aa, Homo sapiens
  REGION 1..1374: note = ENSP00000483455
MLLSVSTPLPAVTQTRGATETASQGHLDLTQLIGVPLPSSVSFVTGYGGFPAYSFGPGANVGRPARTLIPSTFFRDFAISVVVKPSSTRGGVLFAITDAFQKVIYLGLRLSGVEDGHQRIILYYTEPGSHVSQEAAAFSVPVMTHRWNRFAMIVQGEEVTLLVNCEEHSRIPFQRSSQALAFESSAGIFMGNAGATGLERFTGSLQQLTVHPDPRTPEELCDPEESSASGETSGLQEADGVAEILEAVTYTQASPKEAKVEPINTPPTPSSPFEDMELSGEPVPEGTLETTNMSIIQHSSPKQGKGAILNDTLEGVHSVDGDPITDSGSGAGAFLDIAEEKNLAATAAGLAEVPISTAGEAEASSVPTGGPTLSMSTENPEEGVTPGPDNEERLAATAAGEAEALASMPGEVEASGVAPGELDLSMSAQSLGEEATVGPSSEDSLTTAAAATEVSLSTFEDEEASGVPTDGLAPLTATMAPERAVTSGPGDEEDLAAATTEEPLITAGGEESGSPPPDGPPLPLPTVAPERWITPAQREHVGMKGQAGPKGEKGDAGEELPGPPEPSGPVGPTAGAEAEGSGLGWGSDVGSGSGDLVGSEQLLRGPPGPPGPPGLPGIPGKPGTDVFMGPPGSPGEDGPAGEPGPPGPEGQPGVDGATGLPGMKGEKGARGPNGSVGEKGDPGNRGLPGPPGKKGQAGPPGVMGPPGPPGPPGPPGPGCTMGLGFEDTEGSGSTQLLNEPKLSRPTAAIGLKGEKGDRGPKGERGMDGASIVGPPGPRGPPGHIKVLSNSLINITHGFMNFSDIPELVGPPGPDGLPGLPGFPGPRGPKGDTGLPGFPGLKGEQGEKGEPGAILTEDIPLERLMGKKGEPGMHGAPGPMGPKGPPGHKGEFGLPGRPGRPGLNGLKGTKGDPGVIMQGPPGLPGPPGPPGPPGAVINIKGAIFPIPVRPHCKMPVDTAHPGSPELITFHGVKGEKGSWGLPGSKGEKGDQGAQGPPGPPLDLAYLRHFLNNLKGENGDKGFKGEKGEKGDINGSFLMSGPPGLPGNPGPAGQKGETVVGPQGPPGAPGLPGPPGFGRPGDPGPPGPPGPPGPPAILGAAVALPGPPGPPGQPGLPGSRNLVTAFSNMDDMLQKAHLVIEGTFIYLRDSTEFFIRVRDGWKKLQLGELIPIPADSPPPPALSSNPHQLLPPPNPISSANYEKPALHLAALNMPFSGDIRADFQCFKQARAAGLLSTYRAFLSSHLQDLSTIVRKAERYSLPIVNLKGQVLFNNWDSIFSGHGGQFNMHIPIYSFDGRDIMTDPSWPQKVIWHGSSPHGVRLVDNYCEAWRTADTAVTGLASPLSTGKILDQKAYSCANRLIVLCIENSFMTDARK

SEQ ID NO: 26641 - protein, 1339 aa, Homo sapiens
  REGION 1..1339: note = ENSP00000383191
MAPRCPWPWPRRRRLLDVLAPLVLLLGVRAASAEPERISEEVGLLQLLGDPPPQQVTQTDDPDVGLAYVFGPDANSGQVARYHFPSLFFRDFSLLFHIRPATEGPGVLFAITDSAQAMVLLGVKLSGVQDGHQDISLLYTEPGAGQTHTAASFRLPAFVGQWTHLALSVAGGFVALYVDCEEFQRMPLARSSRGLELEPGAGLFVAQAGGADPDKFQGVIAELKVRRDPQVSPMHCLDEEGDDSDGASGDSGSGLGDARELLREETGAALKPRLPAPPPVTTPPLAGGSSTEDSRSEEVEEQTTVASLGAQTLPGSDSVSTWDGSVRTPGGRVKEGGLKGQKGEPGVPGPPGRAGPPGSPCLPGPPGLPCPVSPLGPAGPALQTVPGPQGPPGPPGRDGTPGRDGEPGDPGEDGKPGDTGPQGFPGTPGDVGPKGDKGDPGVGERGPPGPQGPPGPPGPSFRHDKLTFIDMEGSGFGGDLEALRGPRGFPGPPGPPGVPGLPGEPGRFGVNSSDVPGPAGLPGVPGREGPPGFPGLPGPPGPPGREGPPGRTGQKGSLGEAGAPGHKGSKGAPGPAGARGESGLAGAPGPAGPPGPPGPPGPPGPGLPAGFDDMEGSGGPFWSTARSADGPQGPPGLPGLKGDPGVPGLPGAKGEVGADGVPGFPGLPGREGIAGPQGPKGDRGSRGEKGDPGKDGVGQPGLPGPPGPPGPVVYVSEQDGSVLSVPGPEGRPGFAGFPGPAGPKGNLGSKGERGSPGPKGEKGEPGSIFSPDGGALGPAQKGAKGEPGFRGPPGPYGRPGYKGEIGFPGRPGRPGMNGLKGEKGEPGDASLGFGMRGMPGPPGPPGPPGPPGTPVYDSNVFAESSRPGPPGLPGNQGPPGPKGAKGEVGPPGPPGQFPFDFLQLEAEMKGEKGDRGDAGQKGERGEPGGGGFFGSSLPGPPGPPGPPGPRGYPGIPGPKGESIRGQPGPPGPQGPPGIGYEGRQGPPGPPGPPGPPSFPGPHRQTISVPGPPGPPGPPGPPGTMGASSGVRLWATRQAMLGQVHEVPEGWLIFVAEQEELYVRVQNGFRKVQLEARTPLPRGTDNEVAALQPPVVQLHDSNPYPRREHPHPTARPWRADDILASPPRLPEPQPYPGAPHHSSYVHLRPARPTSPPAHSHRDFQPVLHLVALNSPLSGGMRGIRGADFQCFQQARAVGLAGTFRAFLSSRLQDLYSIVRRADRAAVPIVNLKDELLFPSWEALFSGSEGPLKPGARIFSFDGKDVLRHPTWPQKSVWHGSDPNGRRLTESYCETWRTEAPSATGQASSLLGGRLLGQSAASCHHAYIVLCIENSFMTASK

SEQ ID NO: 26642 - protein, 1519 aa, Homo sapiens
  REGION 1..1519: note = ENSP00000347665
MAPYPCGCHILLLLFCCLAAARANLLNLNWLWFNNEDTSHAATTIPEPQGPLPVQPTADTTTHVTPRNGSTEPATAPGSPEPPSELLEDGQDTPTSAESPDAPEENIAGVGAEILNVAKGIRSFVQLWNDTVPTESLARAETLVLETPVGPLALAGPSSTPQENGTTLWPSRGIPSSPGAHTTEAGTLPAPTPSPPSLGRPWAPLTGPSVPPPSSERISEEVGLLQLLGDPPPQQVTQTDDPDVGLAYVFGPDANSGQVARYHFPSLFFRDFSLLFHIRPATEGPGVLFAITDSAQAMVLLGVKLSGVQDGHQDISLLYTEPGAGQTHTAASFRLPAFVGQWTHLALSVAGGFVALYVDCEEFQRMPLARSSRGLELEPGAGLFVAQAGGADPDKFQGVIAELKVRRDPQVSPMHCLDEEGDDSDGASGDSGSGLGDARELLREETGAALKPRLPAPPPVTTPPLAGGSSTEDSRSEEVEEQTTVASLGAQTLPGSDSVSTWDGSVRTPGGRVKEGGLKGQKGEPGVPGPPGRAGPPGSPCLPGPPGLPCPVSPLGPAGPALQTVPGPQGPPGPPGRDGTPGRDGEPGDPGEDGKPGDTGPQGFPGTPGDVGPKGDKGDPGVGERGPPGPQGPPGPPGPSFRHDKLTFIDMEGSGFGGDLEALRGPRGFPGPPGPPGVPGLPGEPGRFGVNSSDVPGPAGLPGVPGREGPPGFPGLPGPPGPPGREGPPGRTGQKGSLGEAGAPGHKGSKGAPGPAGARGESGLAGAPGPAGPPGPPGPPGPPGPGLPAGFDDMEGSGGPFWSTARSADGPQGPPGLPGLKGDPGVPGLPGAKGEVGADGVPGFPGLPGREGIAGPQGPKGDRGSRGEKGDPGKDGVGQPGLPGPPGPPGPVVYVSEQDGSVLSVPGPEGRPGFAGFPGPAGPKGNLGSKGERGSPGPKGEKGEPGSIFSPDGGALGPAQKGAKGEPGFRGPPGPYGRPGYKGEIGFPGRPGRPGMNGLKGEKGEPGDASLGFGMRGMPGPPGPPGPPGPPGTPVYDSNVFAESSRPGPPGLPGNQGPPGPKGAKGEVGPPGPPGQFPFDFLQLEAEMKGEKGDRGDAGQKGERGEPGGGGFFGSSLPGPPGPPGPPGPRGYPGIPGPKGESIRGQPGPPGPQGPPGIGYEGRQGPPGPPGPPGPPSFPGPHRQTISVPGPPGPPGPPGPPGTMGASSGVRLWATRQAMLGQVHEVPEGWLIFVAEQEELYVRVQNGFRKVQLEARTPLPRGTDNEVAALQPPVVQLHDSNPYPRREHPHPTARPWRADDILASPPRLPEPQPYPGAPHHSSYVHLRPARPTSPPAHSHRDFQPVLHLVALNSPLSGGMRGIRGADFQCFQQARAVGLAGTFRAFLSSRLQDLYSIVRRADRAAVPIVNLKDELLFPSWEALFSGSEGPLKPGARIFSFDGKDVLRHPTWPQKSVWHGSDPNGRRLTESYCETWRTEAPSATGQASSLLGGRLLGQSAASCHHAYIVLCIENSFMTASK

SEQ ID NO: 26643 - protein, 687 aa, Homo sapiens
  REGION 1..687: note = ENSP00000339118
GEVGADGVPGFPGLPGREGIAGPQGPKGDRGSRGEKGDPGKDGVGQPGLPGPPGPPGPVVYVSEQDGSVLSVPGPEGRPGFAGFPGPAGPKGNLGSKGERGSPGPKGEKGEPGSIFSPDGGALGPAQKGAKGEPGFRGPPGPYGRPGYKGEIGFPGRPGRPGMNGLKGEKGEPGDASLGFGMRGMPGPPGPPGPPGPPGTPVYDSNVFAESSRPGPPGLPGNQGPPGPKGAKGEVGPPGPPGQFPFDFLQLEAEMKGEKGDRGDAGQKGERGEPGGGGFFGSSLPGPPGPPGPPGPRGYPGIPGPKGESIRGQPGPPGPQGPPGIGYEGRQGPPGPPGPPGPPSFPGPHRQTISVPGPPGPPGPPGPPGTMGASSGQVRLWATRQAMLGQVHEVPEGWLIFVAEQEELYVRVQNGFRKVQLEARTPLPRGTDNEVAALQPPVVQLHDSNPYPRREHPHPTARPWRADDILASPPRLPEPQPYPGAPHHSSYVHLRPARPTSPPAHSHRDFQPVLHLVALNSPLSGGMRGIRGADFQCFQQARAVGLAGTFRAFLSSRLQDLYSIVRRADRAAVPIVNLKDELLFPSWEALFSGSEGPLKPGARIFSFDGKDVLRHPTWPQKSVWHGSDPNGRRLTESYCETWRTEAPSATGQASSLLGGRLLGQSAASCHHAYIVLCIENSFMTASK

SEQ ID NO: 26644 - protein, 280 aa, Homo sapiens
  REGION 1..280: note = ENSP00000415692
  VARIANT 1: note = Any amino acid
XISVPGPPGPPGPPGPPGTMGASSGVRLWATRQAMLGQVHEVPEGWLIFVAEQEELYVRVQNGFRKVQDNEVAALQPPVVQLHDSNPYPRREHPHPTARPWRADDILASPPRLPEPQPYPGAPHHSSYVHLRPARPTSPPAHSHRDFQPVLHLVALNSPLSGGMRGIRGADFQCFQQARAVGLAGTFRAFLSSRLQDLYSIVRRADRAAVPIVNLKDELLFPSWEALFSGSEGPLKPGARIFSFDGKDVLRHPTWPQKSVWHGSDPNGRRLTESYCETWR

SEQ ID NO: 26645 - protein, 1754 aa, Homo sapiens
  REGION 1..1754: note = ENSP00000352798
MAPYPCGCHILLLLFCCLAAARANLLNLNWLWFNNEDTSHAATTIPEPQGPLPVQPTADTTTHVTPRNGSTEPATAPGSPEPPSELLEDGQDTPTSAESPDAPEENIAGVGAEILNVAKGIRSFVQLWNDTVPTESLARAETLVLETPVGPLALAGPSSTPQENGTTLWPSRGIPSSPGAHTTEAGTLPAPTPSPPSLGRPWAPLTGPSVPPPSSGRASLSSLLGGAPPWGSLQDPDSQGLSPAAAAPSQQLQRPDVRLRTPLLHPLVMGSLGKHAAPSAFSSGLPGALSQVAVTTLTRDSGAWVSHVANSVGPGLANNSALLGADPEAPAGRCLPLPPSLPVCGHLGISRFWLPNHLHHESGEQVRAGARAWGGLLQTHCHPFLAWFFCLLLVPPCGSVPPPAPPPCCQFCEALQDACWSRLGGGRLPVACASLPTQEDGYCVLIGPAAERISEEVGLLQLLGDPPPQQVTQTDDPDVGLAYVFGPDANSGQVARYHFPSLFFRDFSLLFHIRPATEGPGVLFAITDSAQAMVLLGVKLSGVQDGHQDISLLYTEPGAGQTHTAASFRLPAFVGQWTHLALSVAGGFVALYVDCEEFQRMPLARSSRGLELEPGAGLFVAQAGGADPDKFQGVIAELKVRRDPQVSPMHCLDEEGDDSDGASGDSGSGLGDARELLREETGAALKPRLPAPPPVTTPPLAGGSSTEDSRSEEVEEQTTVASLGAQTLPGSDSVSTWDGSVRTPGGRVKEGGLKGQKGEPGVPGPPGRAGPPGSPCLPGPPGLPCPVSPLGPAGPALQTVPGPQGPPGPPGRDGTPGRDGEPGDPGEDGKPGDTGPQGFPGTPGDVGPKGDKGDPGVGERGPPGPQGPPGPPGPSFRHDKLTFIDMEGSGFGGDLEALRGPRGFPGPPGPPGVPGLPGEPGRFGVNSSDVPGPAGLPGVPGREGPPGFPGLPGPPGPPGREGPPGRTGQKGSLGEAGAPGHKGSKGAPGPAGARGESGLAGAPGPAGPPGPPGPPGPPGPGLPAGFDDMEGSGGPFWSTARSADGPQGPPGLPGLKGDPGVPGLPGAKGEVGADGVPGFPGLPGREGIAGPQGPKGDRGSRGEKGDPGKDGVGQPGLPGPPGPPGPVVYVSEQDGSVLSVPGPEGRPGFAGFPGPAGPKGNLGSKGERGSPGPKGEKGEPGSIFSPDGGALGPAQKGAKGEPGFRGPPGPYGRPGYKGEIGFPGRPGRPGMNGLKGEKGEPGDASLGFGMRGMPGPPGPPGPPGPPGTPVYDSNVFAESSRPGPPGLPGNQGPPGPKGAKGEVGPPGPPGQFPFDFLQLEAEMKGEKGDRGDAGQKGERGEPGGGGFFGSSLPGPPGPPGPPGPRGYPGIPGPKGESIRGQPGPPGPQGPPGIGYEGRQGPPGPPGPPGPPSFPGPHRQTISVPGPPGPPGPPGPPGTMGASSGVRLWATRQAMLGQVHEVPEGWLIFVAEQEELYVRVQNGFRKVQLEARTPLPRGTDNEVAALQPPVVQLHDSNPYPRREHPHPTARPWRADDILASPPRLPEPQPYPGAPHHSSYVHLRPARPTSPPAHSHRDFQPVLHLVALNSPLSGGMRGIRGADFQCFQQARAVGLAGTFRAFLSSRLQDLYSIVRRADRAAVPIVNLKDELLFPSWEALFSGSEGPLKPGARIFSFDGKDVLRHPTWPQKSVWHGSDPNGRRLTESYCETWRTEAPSATGQASSLLGGRLLGQSAASCHHAYIVLCIENSFMTASK

SEQ ID NO: 26646 - protein, 1464 aa, Homo sapiens
  REGION 1..1464: note = ENSP00000225964
MFSFVDLRLLLLLAATALLTHGQEEGQVEGQDEDIPPITCVQNGLRYHDRDVWKPEPCRICVCDNGKVLCDDVICDETKNCPGAEVPEGECCPVCPDGSESPTDQETTGVEGPKGDTGPRGPRGPAGPPGRDGIPGQPGLPGPPGPPGPPGPPGLGGNFAPQLSYGYDEKSTGGISVPGPMGPSGPRGLPGPPGAPGPQGFQGPPGEPGEPGASGPMGPRGPPGPPGKNGDDGEAGKPGRPGERGPPGPQGARGLPGTAGLPGMKGHRGFSGLDGAKGDAGPAGPKGEPGSPGENGAPGQMGPRGLPGERGRPGAPGPAGARGNDGATGAAGPPGPTGPAGPPGFPGAVGAKGEAGPQGPRGSEGPQGVRGEPGPPGPAGAAGPAGNPGADGQPGAKGANGAPGIAGAPGFPGARGPSGPQGPGGPPGPKGNSGEPGAPGSKGDTGAKGEPGPVGVQGPPGPAGEEGKRGARGEPGPTGLPGPPGERGGPGSRGFPGADGVAGPKGPAGERGSPGPAGPKGSPGEAGRPGEAGLPGAKGLTGSPGSPGPDGKTGPPGPAGQDGRPGPPGPPGARGQAGVMGFPGPKGAAGEPGKAGERGVPGPPGAVGPAGKDGEAGAQGPPGPAGPAGERGEQGPAGSPGFQGLPGPAGPPGEAGKPGEQGVPGDLGAPGPSGARGERGFPGERGVQGPPGPAGPRGANGAPGNDGAKGDAGAPGAPGSQGAPGLQGMPGERGAAGLPGPKGDRGDAGPKGADGSPGKDGVRGLTGPIGPPGPAGAPGDKGESGPSGPAGPTGARGAPGDRGEPGPPGPAGFAGPPGADGQPGAKGEPGDAGAKGDAGPPGPAGPAGPPGPIGNVGAPGAKGARGSAGPPGATGFPGAAGRVGPPGPSGNAGPPGPPGPAGKEGGKGPRGETGPAGRPGEVGPPGPPGPAGEKGSPGADGPAGAPGTPGPQGIAGQRGVVGLPGQRGERGFPGLPGPSGEPGKQGPSGASGERGPPGPMGPPGLAGPPGESGREGAPGAEGSPGRDGSPGAKGDRGETGPAGPPGAPGAPGAPGPVGPAGKSGDRGETGPAGPAGPVGPVGARGPAGPQGPRGDKGETGEQGDRGIKGHRGFSGLQGPPGPPGSPGEQGPSGASGPAGPRGPPGSAGAPGKDGLNGLPGPIGPPGPRGRTGDAGPVGPPGPPGPPGPPGPPSAGFDFSFLPQPPQEKAHDGGRYYRADDANVVRDRDLEVDTTLKSLSQQIENIRSPEGSRKNPARTCRDLKMCHSDWKSGEYWIDPNQGCNLDAIKVFCNMETGETCVYPTQPSVAQKNWYISKNPKDKRHVWFGESMTDGFQFEYGGQGSDPADVAIQLTFLRLMSTEASQNITYHCKNSVAYMDQQTGNLKKALLLQGSNEIEIRAEGNSRFTYSVTVDGCTSHTGAWGKTVIEYKTTKTSRLPIIDVAPLDVGAPDQEFGFDVGPVCFL

SEQ ID NO: 26647 - protein, 154 aa, Homo sapiens
  REGION 1..154: note = ENSP00000460459
MRSRRAFKDLRKEERGEGREVKNPSVPLRPGGKVVKLGVAVTTDNAPLPPVPVPPITCVQNGLRYHDRDVWKPEPCRICVCDNGKVLCDDVICDETKNCPGAEVPEGECCPVCPDGSESPTDQETTGVEGPKGDTGPRGPRGPAGPPGRDGIPG

SEQ ID NO: 26648 - protein, 1366 aa, Homo sapiens
  REGION 1..1366: note = ENSP00000297268
MLSFVDTRTLLLLAVTLCLATCQSLQEETVRKGPAGDRGPRGERGPPGPPGRDGEDGPTGPPGPPGPPGPPGLGGNFAAQYDGKGVGLGPGPMGLMGPRGPPGAAGAPGPQGFQGPAGEPGEPGQTGPAGARGPAGPPGKAGEDGHPGKPGRPGERGVVGPQGARGFPGTPGLPGFKGIRGHNGLDGLKGQPGAPGVKGEPGAPGENGTPGQTGARGLPGERGRVGAPGPAGARGSDGSVGPVGPAGPIGSAGPPGFPGAPGPKGEIGAVGNAGPAGPAGPRGEVGLPGLSGPVGPPGNPGANGLTGAKGAAGLPGVAGAPGLPGPRGIPGPVGAAGATGARGLVGEPGPAGSKGESGNKGEPGSAGPQGPPGPSGEEGKRGPNGEAGSAGPPGPPGLRGSPGSRGLPGADGRAGVMGPPGSRGASGPAGVRGPNGDAGRPGEPGLMGPRGLPGSPGNIGPAGKEGPVGLPGIDGRPGPIGPAGARGEPGNIGFPGPKGPTGDPGKNGDKGHAGLAGARGAPGPDGNNGAQGPPGPQGVQGGKGEQGPPGPPGFQGLPGPSGPAGEVGKPGERGLHGEFGLPGPAGPRGERGPPGESGAAGPTGPIGSRGPSGPPGPDGNKGEPGVVGAVGTAGPSGPSGLPGERGAAGIPGGKGEKGEPGLRGEIGNPGRDGARGAPGAVGAPGPAGATGDRGEAGAAGPAGPAGPRGSPGERGEVGPAGPNGFAGPAGAAGQPGAKGERGAKGPKGENGVVGPTGPVGAAGPAGPNGPPGPAGSRGDGGPPGMTGFPGAAGRTGPPGPSGISGPPGPPGPAGKEGLRGPRGDQGPVGRTGEVGAVGPPGFAGEKGPSGEAGTAGPPGTPGPQGLLGAPGILGLPGSRGERGLPGVAGAVGEPGPLGIAGPPGARGPPGAVGSPGVNGAPGEAGRDGNPGNDGPPGRDGQPGHKGERGYPGNIGPVGAAGAPGPHGPVGPAGKHGNRGETGPSGPVGPAGAVGPRGPSGPQGIRGDKGEPGEKGPRGLPGLKGHNGLQGLPGIAGHHGDQGAPGSVGPAGPRGPAGPSGPAGKDGRTGHPGTVGPAGIRGPQGHQGPAGPPGPPGPPGPPGVSGGGYDFGYDGDFYRADQPRSAPSLRPKDYEVDATLKSLNNQIETLLTPEGSRKNPARTCRDLRLSHPEWSSGYYWIDPNQGCTMDAIKVYCDFSTGETCIRAQPENIPAKNWYRSSKDKKHVWLGETINAGSQFEYNVEGVTSKEMATQLAFMRLLANYASQNITYHCKNSIAYMDEETGNLKKAVILQGSNDVELVAEGNSRFTYTVLVDGCSKKTNEWGKTIIEYKTNKPSRLPFLDIAPLDIGGADQEFFVDIGPVCFK

SEQ ID NO: 26649 - protein, 1364 aa, Homo sapiens
  REGION 1..1364: note = ENSP00000477719
MLSFVDTRTLLLLAVTLCLATCQFFETVRKGPAGDRGPRGERGPPGPPGRDGEDGPTGPPGPPGPPGPPGLGGNFAAQYDGKGVGLGPGPMGLMGPRGPPGAAGAPGPQGFQGPAGEPGEPGQTGPAGARGPAGPPGKAGEDGHPGKPGRPGERGVVGPQGARGFPGTPGLPGFKGIRGHNGLDGLKGQPGAPGVKGEPGAPGENGTPGQTGARGLPGERGRVGAPGPAGARGSDGSVGPVGPAGPIGSAGPPGFPGAPGPKGEIGAVGNAGPAGPAGPRGEVGLPGLSGPVGPPGNPGANGLTGAKGAAGLPGVAGAPGLPGPRGIPGPVGAAGATGARGLVGEPGPAGSKGESGNKGEPGSAGPQGPPGPSGEEGKRGPNGEAGSAGPPGPPGLRGSPGSRGLPGADGRAGVMGPPGSRGASGPAGVRGPNGDAGRPGEPGLMGPRGLPGSPGNIGPAGKEGPVGLPGIDGRPGPIGPAGARGEPGNIGFPGPKGPTGDPGKNGDKGHAGLAGARGAPGPDGNNGAQGPPGPQGVQGGKGEQGPPGPPGFQGLPGPSGPAGEVGKPGERGLHGEFGLPGPAGPRGERGPPGESGAAGPTGPIGSRGPSGPPGPDGNKGEPGVVGAVGTAGPSGPSGLPGERGAAGIPGGKGEKGEPGLRGEIGNPGRDGARGAPGAVGAPGPAGATGDRGEAGAAGPAGPAGPRGSPGERGEVGPAGPNGFAGPAGAAGQPGAKGERGAKGPKGENGVVGPTGPVGAAGPAGPNGPPGPAGSRGDGGPPGMTGFPGAAGRTGPPGPSGISGPPGPPGPAGKEGLRGPRGDQGPVGRTGEVGAVGPPGFAGEKGPSGEAGTAGPPGTPGPQGLLGAPGILGLPGSRGERGLPGVAGAVGEPGPLGIAGPPGARGPPGAVGSPGVNGAPGEAGRDGNPGNDGPPGRDGQPGHKGERGYPGNIGPVGAAGAPGPHGPVGPAGKHGNRGETGPSGPVGPAGAVGPRGPSGPQGIRGDKGEPGEKGPRGLPGLKGHNGLQGLPGIAGHHGDQGAPGSVGPAGPRGPAGPSGPAGKDGRTGHPGTVGPAGIRGPQGHQGPAGPPGPPGPPGPPGVSGGGYDFGYDGDFYRADQPRSAPSLRPKDYEVDATLKSLNNQIETLLTPEGSRKNPARTCRDLRLSHPEWSSGYYWIDPNQGCTMDAIKVYCDFSTGETCIRAQPENIPAKNWYRSSKDKKHVWLGETINAGSQFEYNVEGVTSKEMATQLAFMRLLANYASQNITYHCKNSIAYMDEETGNLKKAVILQGSNDVELVAEGNSRFTYTVLVDGCSKKTNEWGKTIIEYKTNKPSRLPFLDIAPLDIGGADQEFFVDIGPVCFK

SEQ ID NO: 26650 - protein, 1284 aa, Homo sapiens
  REGION 1..1284: note = ENSP00000351767
MSSGDPAHLGLCLWLWLGATLGREQVQASGLLRLAVLPEDRLQMKWRESEGSGLGYLVQVKPMAGDSEQEVILTTKTPKATVGGLSPSKGYTLQIFELTGSGRFLLARREFVIEDLKSSSLDRSSQRPLGSGAPEPTPSHTGSPDPEQASEPQVAFTPSQDPRTPAGPQFRCLPPVPADMVFLVDGSWSIGHSHFQQVKDFLASVIAPFEIGPDKVQVGLTQYSGDAQTEWDLNSLSTKEQVLAAVRRLRYKGGNTFTGLALTHVLGQNLQPAAGLRPEAAKVVILVTDGKSQDDVHTAARVLKDLGVNVFAVGVKNADEAELRLLASPPRDITVHSVLDFLQLGALAGLLSRLICQRLQGGSPRQGPAAAPALDTLPAPTSLVLSQVTSSSIRLSWTPAPRHPLKYLIVWRASRGGTPREVVVEGPAASTELHNLASRTEYLVSVFPIYEGGVGEGLRGLVTTAPLPPPRALTLAAVTPRTVHLTWQPSAGATHYLVRCSPASPKGEEEEREVQVGRPEVLLDGLEPGRDYEVSVQSLRGPEGSEARGIRARTPTLAPPRHLGFSDVSHDAARVFWEGAPRPVRLVRVTYVSSEGGHSGQTEAPGNATSATLGPLSSSTTYTVRVTCLYPGGGSSTLTGRVTTKKAPSPSQLSMTELPGDAVQLAWVAAAPSGVLVYQITWTPLGEGKAHEISVPGNLGTAVLPGLGRHTEYDVTILAYYRDGARSDPVSLRYTPSTVSRSPPSNLALASETPDSLQVSWTPPLGRVLHYWLTYAPASGLGPEKSVSVPGARSHVTLPDLQAATKYRVLVSAIYAAGRSEAVSATGQTACPALRPDGSLPGFDLMVAFSLVEKAYASIRGVAMEPSAFGGTPTFTLFKDAQLTRRVSDVYPAPLPPEHTIVFLVRLLPETPREAFALWQMTAEDFQPLLGVLLDAGKKSLTYFHRDPRAALQEATFDPQEVRKIFFGSFHKVHVAVGRSKVRLYVDCRKVAERPLGEMGSPPAAGFVTLGRLAKARGPRSSSAAFQLQMLQIVCSDTWADEDRCCELPASRDGETCPAFVSACSCSSETPGPPGPQGPPGLPGRNGTPGEQGFPGPRGPPGVKGEKGDHGLPGLQGHPGHQGIPGRVGLQGPKGMRGLEGTAGLPGPPGPRGFQGMAGARGTSGERGPPGTVGPTGLPGPKGERGEKGEPQSLATLYQLVSQASHVSKFDSFHENTRPPMPILEQKLEPGTEPLGSPGTRSKALVPGEWGRGGRHLEGRGEPGAVGQMGSPGQQGASTQGLWE

SEQ ID NO: 26651 - protein, 1297 aa, Homo sapiens
  REGION 1..1297: note = ENSP00000414753
MSSGDPAHLGLCLWLWLGATLGREQVQASGLLRLAVLPEDRLQMKWRESEGSGLGYLVQVKPMAGDSEQEVILTTKTPKATVGGLSPSKGYTLQIFELTGSGRFLLARREFVIEDLKSSSLDRSSQRPLGSGAPEPTPSHTGSPDPEQASEPQVAFTPSQDPRTPGGSEWRETGPQFRCLPPVPADMVFLVDGSWSIGHSHFQQVKDFLASVIAPFEIGPDKVQVGLTQYSGDAQTEWDLNSLSTKEQVLAAVRRLRYKGGNTFTGLALTHVLGQNLQPAAGLRPEAAKVVILVTDGKSQDDVHTAARVLKDLGVNVFAVGVKNADEAELRLLASPPRDITVHSVLDFLQLGALAGLLSRLICQRLQGGSPRQGPAAAPALDTLPAPTSLVLSQVTSSSIRLSWTPAPRHPLKYLIVWRASRGGTPREVVVEGPAASTELHNLASRTEYLVSVFPIYEGGVGEGLRGLVTTAPLPPPRALTLAAVTPRTVHLTWQPSAGATHYLVRCSPASPKGEEEEREVQVGRPEVLLDGLEPGRDYEVSVQSLRGPEGSEARGIRARTPTLAPPRHLGFSDVSHDAARVFWEGAPRPVRLVRVTYVSSEGGHSGQTEAPGNATSATLGPLSSSTTYTVRVTCLYPGGGSSTLTGRVTTKKAPSPSQLSMTELPGDAVQLAWVAAAPSGVLVYQITWTPLGEGKAHEISVPGNLGTAVLPGLGRHTEYDVTILAYYRDGARSDPVSLRYTPSTVSRSPPSNLALASETPDSLQVSWTPPLGRVLHYWLTYAPASGLGPEKSVSVPGARSHVTLPDLQAATKYRVLVSAIYAAGRSEAVSATGQTACPALRPDGSLPGFDLMVAFSLVEKAYASIRGVAMEPSAFGGTPTFTLFKDAQLTRRVSDVYPAPLPPEHTIVFLVRLLPETPREAFALWQMTAEDFQPLLGVLLDAGKKSLTYFHRDPRAALQEATFDPQEVRKIFFGSFHKVHVAVGRSKVRLYVDCRKVAERPLGEMGSPPAAGFVTLGRLAKARGPRSSSAAFQLQMLQIVCSDTWADEDRCCELPASRDGETCPAFVSACSCSSETPGPPGPQGPPGLPGRNGTPGEQGFPGPRGPPGVKGEKGDHGLPGLQGHPGHQGIPGRVGLQGPKGMRGLEGTAGLPGPPGPRGFQGMAGARGTSGERGPPGTVGPTGLPGPKGERGEKGEPQSLATLYQLVSQACESAIQTHVSKFDSFHENTRPPMPILEQKLEPGTEPLGSPGTRSKALVPGEWGRGGRHLEGRGEPGAVGQMGSPGQQGASTQGLWE

SEQ ID NO: 26652 - protein, 401 aa, Homo sapiens
  REGION 1..401: note = ENSP00000410799
EHTIVFLVRLLPETPREAFALWQMTAEDFQPLLGVLLDAGKKSLTYFHRDPRAALQEATFDPQEVRKIFFGSFHKVHVAVGRSKVRLYVDCRKVAERPLGEMGSPPAAGFVTLGRLAKARGPRSSSAAFQLQMLQIVCSDTWADEDRCCELPASRDGETCPAFVSACSCSSETPGPPGPQGPPGLPGRNGTPGEQGFPGPRGEPGPPGQMGPEGPGGQQGSPGTQGRAVQGPVGPPGVKGEKGDHGLPGLQGHPGHQGIPGRVGLQGPKGMRGLEGTAGLPGPPGPRGFQGMAGARGTSGERGPPGTVGPTGLPGPKGERGEKGEPQSLATLYQLVSQACESAIQTHVSKFDSFHENTRPPMPILEQKLEPGTEPLGSPGTRSKALVPGEWGRGGRHLEGR

SEQ ID NO: 26653 - protein, 250 aa, Homo sapiens
  REGION 1..250: note = ENSP00000406345
ERPLGEMGSPPAAGFVTLGRLAKARGPRSSSAAFQLQMLQIVCSDTWADEDRCCELPASRDGETCPAFVSACSCSSETPGPPGPQGPPGPPGVKGEKGDHGLPGLQGHPGHQGIPGRVGLQGPKGMRGLEGTAGLPGPPGPRGFQGMAGARGTSGERGPPGTVGPTGLPGPKGERGEKGEPQSLATLYQLVSQACESAIQTHVSKFDSFHENTRPPMPILEQKLEPGTEPLGSPGTRSKALVPGEWGRGG

SEQ ID NO: 26654 - protein, 1626 aa, Homo sapiens
  REGION 1..1626: note = ENSP00000303153
MAGLRGNAVAGLLWMLLLWSGGGGCQAQRAGCKSVHYDLVFLLDTSSSVGKEDFEKVRQWVANLVDTFEVGPDRTRVGVVRYSDRPTTAFELGLFGSQEEVKAAARRLAYHGGNTNTGDALRYITARSFSPHAGGRPRDRAYKQVAILLTDGRSQDLVLDAAAAAHRAGIRIFAVGVGEALKEELEEIASEPKSAHVFHVSDFNAIDKIRGKLRRRLCENVLCPSVRVEGDRFKHTNGGTKEITGFDLMDLFSVKEILGKRENGAQSSYVRMGSFPVVQSTEDVFPQGLPDEYAFVTTFRFRKTSRKEDWYIWQVIDQYSIPQVSIRLDGENKAVEYNAVGAMKDAVRVVFRGSRVNDLFDRDWHKMALSIQAQNVSLHIDCALVQTLPIEERENIDIQGKTVIGKRLYDSVPIDFDLQRIVIYCDSRHAELETCCDIPSGPCQVTVVTEPPPPPPPQRPPTPGSEQIGFLKTINCSCPAGEKGEMGVAGPMGLPGPKGDIGAIGPVGAPGPKGEKGDVGIGPFGQGEKGEKGSLGLPGPPGRDGSKGMRGEPGELGEPGLPGEVGMRGPQGPPGLPGPPGRVGAPGLQGERGEKGTRGEKGERGLDGFPGKPGDTGQQGRPGPSGVAGPQGEKGDVGPAGPPGVPGSVVQQEGLKGEQGAPGPRGHQGAPGPPGARGPIGPEGRDGPPGLQGLRGKKGDMGPPGIPGLLGLQGPPGPPGVPGPPGPGGSPGLPGEIGFPGKPGPPGPTGPPGKDGPNGPPGPPGTKGEPGERGEDGLPGKPGLRGEIGEQGLAGRPGEKGEAGLPGAPGFPGVRGEKGDQGEKGELGLPGLKGDRGEKGEAGPAGPPGLPGTTSLFTPHPRMPGEQGPKGEKGDPGLPGEPGLQGRPGELGPQGPTGPPGAKGQEGAHGAPGAAGNPGAPGHVGAPGPSGPPGSVGAPGLRGTPGKDGERGEKGAAGEEGSPGPVGPRGDPGAPGLPGPPGKGKDGEPGLRGSPGLPGPLGTKAACGKVRGSENCALGGQCVKGDRGAPGIPGSPGSRGDPGIGVAGPPGPSGPPGDKGSPGSRGLPGFPGPQGPAGRDGAPGNPGERGPPGKPGLSSLLSPGDINLLAKDVCNDCPPGPPGLPGLPGFKGDKGVPGKPGREGTEGKKGEAGPPGLPGPPGIAGPQGSQGERGADGEVGQKGDQGHPGVPGFMGPPGNPGPPGADGIAGAAGPPGIQGSPGKEGPPGPQGPSGLPGIPGEEGKEGRDGKPGPPGEPGKAGEPGLPGPEGARGPPGFKGHTGDSGAPGPRGESGAMGLPGQEGLPGKDGDTGPTGPQGPQGPRGPPGKNGSPGSPGEPGPSGTPGQKGSKGENGSPGLPGFLGPRGPPGEPGEKGVPGKEGVPGKPGEPGFKGERGDPGIKGDKGPPGGKGQPGDPGIPGHKGHTGLMGPQGLPGENGPVGPPGPPGQPGFPGLRGESPSMETLRRLIQEELGKQLETRLAYLLAQMPPAYMKSSQGRPGPPGPPGKDGLPGRAGPMGEPGRPGQGGLEGPSGPIGPKGERGAKGDPGAPGVGLRGEMGPPGIPGQPGEPGYAKDGLPGIPGPQGETGPAGHPGLPGPPGPPGQCDPSQCAYFASLAARPGNVKGP

SEQ ID NO: 26655 - protein, 65 aa, Homo sapiens
  REGION 1..65: note = ENSP00000428244
GEPGELGEPGLPGEVGMRGPQGPPGLPGPPGRVGAPVSEGTCLGRGSTPSPGIKNQVLASSSTCI

SEQ ID NO: 26656 - protein, 1319 aa, Homo sapiens
  REGION 1..1319: note = ENSP00000387655
MAGLRGNAVAGLLWMLLLWSGGGGCQAQRAGCKSVHYDLVFLLDTSSSVGKEDFEKVRQWVANLVDTFEVGPDRTRVGVVRYSDRPTTAFELGLFGSQEEVKAAARRLAYHGGNTNTGDALRYITARSFSPHAGGRPRDRAYKQVAILLTDGRSQDLVLDAAAAAHRAGIRIFAVGVGEALKEELEEIASEPKSAHVFHVSDFNAIDKIRGKLRRRLCENVLCPSVRVEGDRFKHTNGGTKEITGFDLMDLFSVKEILGKRENGAQSSYVRMGSFPVVQSTEDVFPQGLPDEYAFVTTFRFRKTSRKEDWYIWQVIDQYSIPQVSIRLDGENKAVEYNAVAGPQGEKGDVGPAGPPGVPGSVVQQEGLKGEQGAPGPRGHQGAPGPPGARGPIGPEGRDGPPGLQGLRGKKGDMGPPGIPGLLGLQGPPGPPGVPGPPGPGGSPGLPGEIGFPGKPGPPGPTGPPGKDGPNGPPGPPGTKGEPGERGEDGLPGKPGLRGEIGEQGLAGRPGEKGEAGLPGAPGFPGVRGEKGDQGEKGELGLPGLKGDRGEKGEAGPAGPPGLPGTTSLFTPHPRMPGEQGPKGEKGDPGLPGEPGLQGRPGELGPQGPTGPPGAKGQEGAHGAPGAAGNPGAPGHVGAPGPSGPPGSVGAPGLRGTPGKDGERGEKGAAGEEGSPGPVGPRGDPGAPGLPGPPGKGKDGEPGLRGSPGLPGPLGTKGDRGAPGIPGSPGSRGDPGIGVAGPPGPSGPPGDKGSPGSRGLPGFPGPQGPAGRDGAPGNPGERGPPGKPGLSSLLSPGDINLLAKDVCNDCPPGPPGLPGLPGFKGDKGVPGKPGREGTEGKKGEAGPPGLPGPPGIAGPQGSQGERGADGEVGQKGDQGHPGVPGFMGPPGNPGPPGADGIAGAAGPPGIQGSPGKEGPPGPQGPSGLPGIPGEEGKEGRDGKPGPPGEPGKAGEPGLPGPEGARGPPGFKGHTGDSGAPGPRGESGAMGLPGQEGLPGKDGDTGPTGPQGPQGPRGPPGKNGSPGSPGEPGPSGTPGQKGSKGENGSPGLPGFLGPRGPPGEPGEKGVPGKEGVPGKPGEPGFKGERGDPGIKGDKGPPGGKGQPGDPGIPGHKGHTGLMGPQGLPGENGPVGPPGPPGQPGFPGLRGESPSMETLRRLIQEELGKQLETRLAYLLAQMPPAYMKSSQGRPGPPGPPGKDGLPGRAGPMGEPGRPGQGGLEGPSGPIGPKGERGAKGDPGAPGVGLRGEMGPPGIPGQPGEPGYAKDGLPGIPGPQGETGPAGHPGLPGPPGPPGQCDPSQCAYFASLAARPGNVKGP

SEQ ID NO: 26657 - protein, 540 aa, Homo sapiens
  REGION 1..540: note = ENSP00000375069
MGPGERAGGGGDAGKGNAAGGGGGGRSATTAGSRAVSALCLLLSVGSAAACLLLGVQAAALQGRVAALEEERELLRRAGPPGALDAWAEPHLERLLREKLDGLAKIRTAREAPSECVCPPGPPGRRGKPGRRGDPGPPGQSGRDGYPGPLGLDGKPGLPGPKGEKGAPGDFGPRGDQGQDGAAGPPGPPGPPGARGPPGDTGKDGPRGAQGPAGPKGEPGQDGEMGPKGPPGPKGEPGVPGKKGDDGTPSQPGPPGPKGEPGSMGPRGENGVDGAPGPKGEPGHRGTDGAAGPRGAPGLKGEQGDTVVIDYDGRILDALKGPPGPQGPPGPPGIPGAKGELGLPGAPGIDGEKGPKGQKGDPGEPGPAGLKGEAGEMGLSGLPGADGLKGEKGESASDSLQESLAQLIVEPGPPGPPGPPGPMGLQGIQGPKGLDGAKGEKGASGERGPSGLPGPVGPPGLIGLPGTKGEKGRPGEPGLDGFPGPRGEKGDRSERGEKGERGVPGRKGVKGQKGEPGPPGLDQPCPVGPDGLPVPGCWHK

SEQ ID NO: 26658 - protein, 393 aa, Homo sapiens [sequence omitted]

SEQ ID NO: 26659 - protein, 496 aa, Homo sapiens
  REGION 1..496: note = ENSP00000437131
MLLKKHAGKGGGREPRSEDPTPAEQHCARTMPPCAVLAALLSVVAVVSCLYLGVKTNDLQARIAALESAKGAPSIHLLPDTLDHLKTMVQEKVERLLAQKSYEHMAKIRIAREAPSECNCPAGPPGKRGKRGRRGESGPPGQPGPQGPPGPKGDKGEQGDQGPRGPLGPPGQKGSIGAPGIPGMNGQKGEPGLPGAVGQNGIPGPKGEPGEQGEKGDAGENGPKGDTGEKGDPGSSAAGIKGEPGESGRPGQKGEPGLPGLPGLPGIKGEPGFIGPQGEPGLPGLPGTKGERGEAGPPGRGERGEPGAPGPKGKQGESGTRGPKGSKGDRGEKGDSGAQGPRGPPGQKGDQGATEIIDYNGNLHEALQRITTLTVTGPPGPPGPQGLQGPKGEQGSPGIPGMDGEQGLKGSKGDMGDPGSQWNERRKRRFWNAGSTGSFYHRPTRPTRSPWPTWPHGTSWTSWTKGSIWLRRKARIPGYRWSYGTPWPCRSQRRKR

SEQ ID NO: 26660 - protein, 29 aa, Homo sapiens
  REGION 1..29: note = ENSP00000426841
  VARIANT 1: note = Any amino acid
XGPRGEKGDLGEKGEKGPDGLPMPGCWQK

SEQ ID NO: 26661 - protein, 654 aa, Homo sapiens
  REGION 1..654: note = ENSP00000382083
MLLKKHAGKGGGREPRSEDPTPAEQHCARTMPPCAVLAALLSVVAVVSCLYLGVKTNDLQARIAALESAKGAPSIHLLPDTLDHLKTMVQEKVERLLAQKSYEHMAKIRIAREAPSECNCPAGPPGKRGKRGRRGESGPPGQPGPQGPPGPKGDKGEQGDQGPRMVFPKINHGFLSADQQLIKRRLIKGDQGQAGPPGPPGPPGPRGPPGDTGKDGPRGMPGVPGEPGKPGEQGLMGPLGPPGQKGSIGAPGIPGMNGQKGEPGLPGAVGQNGIPGPKGEPGEQGEKGDAGENGPKGDTGEKGDPGSSAAGIKGEPGESGRPGQKGEPGLPGLPGLPGIKGEPGFIGPQGEPGLPGLPGTKGERGEAGPPGRGERGEPGAPGPKGKQGESGTRGPKGSKGDRGEKGDSGAQGPRGPPGQKGDQGATEIIDYNGNLHEALQRITTLTVTGPPGPPGPQGLQGPKGEQGSPGIPGMDGEQGLKGSKGDMGDPGMTGEKGGIGLPGLPGANGMKGEKGDSGMPGPQGPSIIGPPGPPGPHGPPGPMGPHGLPGPKGTDGPMGPHGPAGPKGERGEKGAMGEPGPRGPYGLPGKDGEPGLDGFPGPRGEKGDLGEKGEKGFRGVKGEKGEPGQPGLDGLDAPCQLGPDGLPMPGCWQK

SEQ ID NO: 26662 - protein, 645 aa, Homo sapiens
  REGION 1..645: note = ENSP00000382078
MLLKKHAGKGGGREPRSEDPTPAEQHCARTMPPCAVLAALLSVVAVVSCLYLGVKTNDLQARIAALESAKGAPSIHLLPDTLDHLKTMVQEKVERLLAQKSYEHMAKIRIAREAPSECNCPAGPPGKRGKRGRRGESGPPGQPGPQGPPGPKGDKGEQGDQGPRGLPGFPTVAALHSNQILTVKGDQGQAGPPGPPGPPGPRGPPGDTGKDGPRGMPGVPGEPGKPGEQGLMGPLGPPGQKGSIGAPGIPGMNGQKGEPGLPGAVGQNGIPGPKGEPGEQGEKGDAGENGPKGDTGEKGDPGSSAAGIKGEPGESGRPGQKGEPGLPGLPGLPGIKGEPGFIGPQGEPGLPGLPGTKGERGEAGPPGRGERGEPGAPGPKGDRGEKGDSGAQGPRGPPGQKGDQGATEIIDYNGNLHEALQGPPGPPGPQGLQGPKGEQGSPGIPGMDGEQGLKGSKGDMGDPGMTGEKGGIGLPGLPGANGMKGEKGDSGMPGPQGPSIIGPPGPPGPHGPPGPMGPHGLPGPKGEPGLNGVKGLKGEPGQKGDRGPLGLPGASGLDGKPGSRGTDGPMGPHGPAGPKGERGEKGAMGEPGPRGPYGLPGFPGPRGEKGDLGEKGEKVTSPSQHVPCLILLLLSALLFSLCDSI

SEQ ID NO: 26663 - protein, 642 aa, Homo sapiens
  REGION 1..642: note = ENSP00000382077
MLLKKHAGKGGGREPRSEDPTPAEQHCARTMPPCAVLAALLSVVAVVSCLYLGVKTNDLQARIAALESAKGAPSIHLLPDTLDHLKTMVQEKVERLLAQKSYEHMAKIRIAREAPSECNCPAGPPGKRGKRGRRGESGPPGQPGPQGPPGPKGDKGEQGDQGPRMVFPKINHGFLSADQQLIKRRLIKGDQGQAGPPGPPGPPGPRGPPGDTGKDGPRGMPGVPGEPGKPGEQGLMGPLGPPGQKGSIGAPGIPGMNGQKGEPGLPGAVGQNGIPGPKGEPGEQGEKGDAGENGPKGDTGEKGDPGSSAAGIKGEPGESGRPGQKGEPGLPGLPGLPGIKGEPGFIGPQGEPGLPGLPGTKGERGEAGPPGRGERGEPGAPGPKGKQGESGTRGPKGSKGDRGEKGDSGAQGPRGPPGQKGDQGATEIIDYNGNLHEALQRITTLTVTGPPGPPGPQGLQGPKGEQGSPGIPGMDGEQGLKGSKGDMGDPGMTGEKGGIGLPGLPGANGMKGEKGDSGMPGPQGPSIIGPPGPPGPHGPPGPMGPHGLPGPKGTDGPMGPHGPAGPKGERGEKGAMGEPGPRGPYGLPGKDGEPGLDGFPGPRGEKGDLGEKGEKVTSPSQHVPCLILLLLSALLFSLCDSI

SEQ ID NO: 26664 - protein, 70 aa, Homo sapiens
  REGION 1..70: note = ENSP00000422266
MLLKKHAGKGGGREPRSEDPTPAEQHCARTMPPCAVLAALLSVVAVVSCLYLGVKTNDLQARIAALESAK

SEQ ID NO: 26665 - protein, 333 aa, Homo sapiens [sequence omitted]

SEQ ID NO: 26666 - protein, 494 aa, Homo sapiens [sequence omitted]

SEQ ID NO: 26667 - protein, 1669 aa, Homo sapiens
  REGION 1..1669: note = ENSP00000364979
MGPRLSVWLLLLPAALLLHEEHSRAAAKGGCAGSGCGKCDCHGVKGQKGERGLPGLQGVIGFPGMQGPEGPQGPPGQKGDTGEPGLPGTKGTRGPPGASGYPGNPGLPGIPGQDGPPGPPGIPGCNGTKGERGPLGPPGLPGFAGNPGPPGLPGMKGDPGEILGHVPGMLLKGERGFPGIPGTPGPPGLPGLQGPVGPPGFTGPPGPPGPPGPPGEKGQMGLSFQGPKGDKGDQGVSGPPGVPGQAQVQEKGDFATKGEKGQKGEPGFQGMPGVGEKGEPGKPGPRGKPGKDGDKGEKGSPGFPGEPGYPGLIGRQGPQGEKGEAGPPGPPGIVIGTGPLGEKGERGYPGTPGPRGEPGPKGFPGLPGQPGPPGLPVPGQAGAPGFPGERGEKGDRGFPGTSLPGPSGRDGLPGPPGSPGPPGQPGYTNGIVECQPGPPGDQGPPGIPGQPGFIGEIGEKGQKGESCLICDIDGYRGPPGPQGPPGEIGFPGQPGAKGDRGLPGRDGVAGVPGPQGTPGLIGQPGAKGEPGEFYFDLRLKGDKGDPGFPGQPGMPGRAGSPGRDGHPGLPGPKGSPGSVGLKGERGPPGGVGFPGSRGDTGPPGPPGYGPAGPIGDKGQAGFPGGPGSPGLPGPKGEPGKIVPLPGPPGAEGLPGSPGFPGPQGDRGFPGTPGRPGLPGEKGAVGQPGIGFPGPPGPKGVDGLPGDMGPPGTPGRPGFNGLPGNPGVQGQKGEPGVGLPGLKGLPGLPGIPGTPGEKGSIGVPGVPGEHGAIGPPGLQGIRGEPGPPGLPGSVGSPGVPGIGPPGARGPPGGQGPPGLSGPPGIKGEKGFPGFPGLDMPGPKGDKGAQGLPGITGQSGLPGLPGQQGAPGIPGFPGSKGEMGVMGTPGQPGSPGPVGAPGLPGEKGDHGFPGSSGPRGDPGLKGDKGDVGLPGKPGSMDKVDMGSMKGQKGDQGEKGQIGPIGEKGSRGDPGTPGVPGKDGQAGQPGQPGPKGDPGISGTPGAPGLPGPKGSVGGMGLPGTPGEKGVPGIPGPQGSPGLPGDKGAKGEKGQAGPPGIGIPGLRGEKGDQGIAGFPGSPGEKGEKGSIGIPGMPGSPGLKGSPGSVGYPGSPGLPGEKGDKGLPGLDGIPGVKGEAGLPGTPGPTGPAGQKGEPGSDGIPGSAGEKGEPGLPGRGFPGFPGAKGDKGSKGEVGFPGLAGSPGIPGSKGEQGFMGPPGPQGQPGLPGSPGHATEGPKGDRGPQGQPGLPGLPGPMGPPGLPGIDGVKGDKGNPGWPGAPGVPGPKGDPGFQGMPGIGGSPGITGSKGDMGPPGVPGFQGPKGLPGLQGIKGDQGDQGVPGAKGLPGPPGPPGPYDIIKGEPGLPGPEGPPGLKGLQGLPGPKGQQGVTGLVGIPGPPGIPGFDGAPGQKGEMGPAGPTGPRGFPGPPGPDGLPGSMGPPGTPSVDHGFLVTRHSQTIDDPQCPSGTKILYHGYSLLYVQGNERAHGQDLGTAGSCLRKFSTMPFLFCNINNVCNFASRNDYSYWLSTPEPMPMSMAPITGENIRPFISRCAVCEAPAMVMAVHSQTIQIPPCPSGWSSLWIGYSFVMHTSAGAEGSGQALASPGSCLEEFRSAPFIECHGRGTCNYYANAYSFWLATIERSEMFKKPTPSTLKAGELRTHVSRCQVCMRRT

SEQ ID NO: 26668 - protein, 519 aa, Homo sapiens
  REGION 1..519: note = ENSP00000443348
MGPRLSVWLLLLPAALLLHEEHSRAAAKGGCAGSGCGKCDCHGVKGQKGERGLPGLQGVIGFPGMQGPEGPQGPPGQKGDTGEPGLPGTKGTRGPPGASGYPGNPGLPGIPGQDGPPGPPGIPGCNGTKGERGPLGPPGLPGFAGNPGPPGLPGMKGDPGEILGHVPGMLLKGERGFPGIPGTPGPPGLPGLQGPVGPPGFTGPPGPPGPPGPPGEKGQMGLSFQGPKGDKGDQGVSGPPGVPGQAQVQEKGDFATKGEKGQKGEPGFQGMPGVGEKGEPGKPGPRGKPGKDGDKGEKGSPGFPGEPGYPGLIGRQGPQGEKGEAGPPGPPGIVIGTGPLGEKGERGYPGTPGPRGEPGPKGFPGLPGQPGPPGLPVPGQAGAPGFPGERGEKGDRGFPGTSLPGPSGRDGLPGPPGSPGPPGQPGYTNGIVECQPGPPGDQGPPGIPGQPGFIGEIGEKGQKGESCLICDIDGYRGPPGPQGPPGEIGFPGQPGAKGDRGLPGRDGVAGVPLLFQIHK

SEQ ID NO: 26669 - protein, 223 aa, Homo sapiens
  REGION 1..223: note = ENSP00000478222
MQGPEGPQGPPGQKGDTGEPGLPGTKGTRGPPGASGYPGNPGLPGIPGQDGPPGPPGIPGCNGTKGERGPLGPPGLPGFAGNPGPPGLPGMKGDPGEILGHVPGMLLKGERGFPGIPGTPGPPGLPGLQGPVGPPGFTGPPGPPGPPGPPGEKGQMGLSFQGPKGDKGDQGVSGPPGVPGQAQVQEKGDFATKGEKGQKGEPGFQGMPGVGEKGEPGKPGPRV

SEQ ID NO: 26670 - protein, 1691 aa, Homo sapiens
  REGION 1..1691: note = ENSP00000331902
MKLRGVSLAAGLFLLALSLWGQPAEAAACYGCSPGSKCDCSGIKGEKGERGFPGLEGHPGLPGFPGPEGPPGPRGQKGDDGIPGPPGPKGIRGPPGLPGFPGTPGLPGMPGHDGAPGPQGIPGCNGTKGERGFPGSPGFPGLQGPPGPPGIPGMKGEPGSIIMSSLPGPKGNPGYPGPPGIQGLPGPTGIPGPIGPPGPPGLMGPPGPPGLPGPKGNMGLNFQGPKGEKGEQGLQGPPGPPGQISEQKRPIDVEFQKGDQGLPGDRGPPGPPGIRGPPGPPGGEKGEKGEQGEPGKRGKPGKDGENGQPGIPGLPGDPGYPGEPGRDGEKGQKGDTGPPGPPGLVIPRPGTGITIGEKGNIGLPGLPGEKGERGFPGIQGPPGLPGPPGAAVMGPPGPPGFPGERGQKGDEGPPGISIPGPPGLDGQPGAPGLPGPPGPAGPHIPPSDEICEPGPPGPPGSPGDKGLQGEQGVKGDKGDTCFNCIGTGISGPPGQPGLPGLPGPPGSLGFPGQKGEKGQAGATGPKGLPGIPGAPGAPGFPGSKGEPGDILTFPGMKGDKGELGSPGAPGLPGLPGTPGQDGLPGLPGPKGEPGGITFKGERGPPGNPGLPGLPGNIGPMGPPGFGPPGPVGEKGIQGVAGNPGQPGIPGPKGDPGQTITQPGKPGLPGNPGRDGDVGLPGDPGLPGQPGLPGIPGSKGEPGIPGIGLPGPPGPKGFPGIPGPPGAPGTPGRIGLEGPPGPPGFPGPKGEPGFALPGPPGPPGLPGFKGALGPKGDRGFPGPPGPPGRTGLDGLPGPKGDVGPNGQPGPMGPPGLPGIGVQGPPGPPGIPGPIGQPGLHGIPGEKGDPGPPGLDVPGPPGERGSPGIPGAPGPIGPPGSPGLPGKAGASGFPGTKGEMGMMGPPGPPGPLGIPGRSGVPGLKGDDGLQGQPGLPGPTGEKGSKGEPGLPGPPGPMDPNLLGSKGEKGEPGLPGIPGVSGPKGYQGLPGDPGQPGLSGQPGLPGPPGPKGNPGLPGQPGLIGPPGLKGTIGDMGFPGPQGVEGPPGPSGVPGQPGSPGLPGQKGDKGDPGISSIGLPGLPGPKGEPGLPGYPGNPGIKGSVGDPGLPGLPGTPGAKGQPGLPGFPGTPGPPGPKGISGPPGNPGLPGEPGPVGGGGHPGQPGPPGEKGKPGQDGIPGPAGQKGEPGQPGFGNPGPPGLPGLSGQKGDGGLPGIPGNPGLPGPKGEPGFHGFPGVQGPPGPPGSPGPALEGPKGNPGPQGPPGRPGPTGFQGLPGPEGPPGLPGNGGIKGEKGNPGQPGLPGLPGLKGDQGPPGLQGNPGRPGLNGMKGDPGLPGVPGFPGMKGPSGVPGSAGPEGEPGLIGPPGPPGLPGPSGQSIIIKGDAGPPGIPGQPGLKGLPGPQGPQGLPGPTGPPGDPGRNGLPGFDGAGGRKGDPGLPGQPGTRGLDGPPGPDGLQGPPGPPGTSSVAHGFLITRHSQTTDAPQCPQGTLQVYEGFSLLYVQGNKRAHGQDLGTAGSCLRRFSTMPFMFCNINNVCNFASRNDYSYWLSTPEPMPMSMQPLKGQSIQPFISRCAVCEAPAVVIAVHSQTIQIPHCPQGWDSLWIGYSFMMHTSAGAEGSGQALASPGSCLEEFRSAPFIECHGRGTCNYYANSYSFWLATVDVSDMFSKPQSETLKAGDLRTRISRCQVCMKRT

SEQ ID NO: 26671 - protein, 1685 aa, Homo sapiens
  REGION 1..1685: note = ENSP00000354505
MKLRGVSLAAGLFLLALSLWGQPAEAAACYGCSPGSKCDCSGIKGEKGERGFPGLEGHPGLPGFPGPEGPPGPRGQKGDDGIPGPPGPKGIRGPPGLPGFPGTPGLPGMPGHDGAPGPQGIPGCNGTKGERGFPGSPGFPGLQGPPGPPGIPGMKGEPGSIIMSSLPGPKGNPGYPGPPGIQGLPGPTGIPGPIGPPGPPGLMGPPGPPGLPGPKGNMGLNFQGPKGEKGEQGLQGPPGPPGQISEQKRPIDVEFQKGDQGLPGDRGPPGPPGIRGPPGPPGGEKGEKGEQGEPGKRGKPGKDGENGQPGIPGLPGDPGYPGEPGRDGEKGQKGDTGPPGPPGLVIPRPGTGITIGEKGNIGLPGLPGEKGERGFPGIQGPPGLPGPPGAAVMGPPGPPGFPGERGQKGDEGPPGISIPGPPGLDGQPGAPGLPGPPGPAGPHIPPSDEICEPGPPGPPGSPGDKGLQGEQGVKGDKGDTCFNCIGTGISGPPGQPGLPGLPGPPGSLGFPGQKGEKGQAGATGPKGLPGIPGAPGAPGFPGSKGEPGDILTFPGMKGDKGELGSPGAPGLPGLPGTPGQDGLPGLPGPKGEPGGITFKGERGPPGNPGLPGLPGNIGPMGPPGFGPPGPVGEKGIQGVAGNPGQPGIPGPKGDPGQTITQPGKPGLPGNPGRDGDVGLPGDPGLPGQPGLPGIPGSKGEPGIPGIGLPGPPGPKGFPGIPGPPGAPGTPGRIGLEGPPGPPGFPGPKGEPGFALPGPPGPPGLPGFKGALGPKGDRGFPGPPGPPGRTGLDGLPGPKGDVGPNGQPGPMGPPGLPGIGVQGPPGPPGIPGPIGQPGLHGIPGEKGDPGPPGLDVPGPPGERGSPGIPGAPGPIGPPGSPGLPGKAGASGFPGTKGEMGMMGPPGPPGPLGIPGRSGVPGLKGDDGLQGQPGLPGPTGEKGSKGEPGLPGPPGPMDPNLLGSKGEKGEPGLPGIPGVSGPKGYQGLPGDPGQPGLSGQPGLPGPPGPKGNPGLPGQPGLIGPPGLKGTIGDMGFPGPQGVEGPPGPSGVPGQPGSPGLPGQKGDKGDPGISSIGLPGLPGPKGEPGLPGYPGNPGIKGSVGDPGLPGLPGTPGAKGQPGLPGFPGTPGPPGPKGISGPPGNPGLPGEPGPVGGGGHPGQPGPPGEKGKPGQDGIPGPAGQKGEPGQPGFGNPGPPGLPGLSGQKGDGGLPGIPGNPGLPGPKGEPGFHGFPGVQGPPGPPGSPGPALEGPKGNPGPQGPPGRPGLPGPEGPPGLPGNGGIKGEKGNPGQPGLPGLPGLKGDQGPPGLQGNPGRPGLNGMKGDPGLPGVPGFPGMKGPSGVPGSAGPEGEPGLIGPPGPPGLPGPSGQSIIIKGDAGPPGIPGQPGLKGLPGPQGPQGLPGPTGPPGDPGRNGLPGFDGAGGRKGDPGLPGQPGTRGLDGPPGPDGLQGPPGPPGTSSVAHGFLITRHSQTTDAPQCPQGTLQVYEGFSLLYVQGNKRAHGQDLGTAGSCLRRFSTMPFMFCNINNVCNFASRNDYSYWLSTPEPMPMSMQPLKGQSIQPFISRCAVCEAPAVVIAVHSQTIQIPHCPQGWDSLWIGYSFMMHTSAGAEGSGQALASPGSCLEEFRSAPFIECHGRGTCNYYANSYSFWLATVDVSDMFSKPQSETLKAGDLRTRISRCQVCMKRT

SEQ ID NO: 26672 - protein, 174 aa, Homo sapiens
  REGION 1..174: note = ENSP00000424137
  VARIANT 1: note = Any amino acid
XDDGLQGQPGLPGPTGEKGSKGEPGLPGPPGPMDPNLLGSKGEKGEPGLPGIPGVSGPKGYQGLPGDPGQPGLSGQPGLPGPPGPKGNPGLPGQPGLIGPPGLKGTIGDMGFPGPQGVEGPPGPSGVPGQPGSPGLPGQKGDKGDPGISSIGLPGLPGPKMIRRYVLGFVASPK

SEQ ID NO: 26673 - protein, 115 aa, Homo sapiens
  REGION 1..115: note = ENSP00000423520
  VARIANT 1: note = Any amino acid
XGLPGPTGPPGDPGRNGLPGFDGAGGRKGDPGLPGQPGTRGLDGPPGPDGLQGPPGPPGTSSVAHGFLITRHSQTTDAPQCPQGTLQVYEGFSLLYVQGNKRAHGQDLVNLSQKR

SEQ ID NO: 26674 - protein, 73 aa, Homo sapiens
  REGION 1..73: note = ENSP00000424845
FASRNDYSYWLSTPEPMPMSMQPLKGQSIQPFISRCAVCEAPAVVIAVHSQTIQIPHCPQGWDSLWIGYSFMM

SEQ ID NO: 26675 - protein, 1838 aa, Homo sapiens
  REGION 1..1838: note = ENSP00000360882
MDVHTRWKARSALRPGAPLLPPLLLLLLWAPPPSRAAQPADLLKVLDFHNLPDGITKTTGFCATRRSSKGPDVAYRVTKDAQLSAPTKQLYPASAFPEDFSILTTVKAKKGSQAFLVSIYNEQGIQQIGLELGRSPVFLYEDHTGKPGPEDYPLFRGINLSDGKWHRIALSVHKKNVTLILDCKKKTTKFLDRSDHPMIDINGIIVFGTRILDEEVFEGDIQQLLFVSDHRAAYDYCEHYSPDCDTAVPDTPQSQDPNPDEYYTEGDGEGETYYYEYPYYEDPEDLGKEPTPSKKPVEAAKETTEVPEELTPTPTEAAPMPETSEGAGKEEDVGIGDYDYVPSEDYYTPSPYDDLTYGEGEENPDQPTDPGAGAEIPTSTADTSNSSNPAPPPGEGADDLEGEFTEETIRNLDENYYDPYYDPTSSPSEIGPGMPANQDTIYEGIGGPRGEKGQKGEPAIIEPGMLIEGPPGPEGPAGLPGPPGTMGPTGQVGDPGERGPPGRPGLPGADGLPGPPGTMLMLPFRFGGGGDAGSKGPMVSAQESQAQAILQQARLALRGPAGPMGLTGRPGPVGPPGSGGLKGEPGDVGPQGPRGVQGPPGPAGKPGRRGRAGSDGARGMPGQTGPKGDRGFDGLAGLPGEKGHRGDPGPSGPPGPPGDDGERGDDGEVGPRGLPGEPGPRGLLGPKGPPGPPGPPGVTGMDGQPGPKGNVGPQGEPGPPGQQGNPGAQGLPGPQGAIGPPGEKGPLGKPGLPGMPGADGPPGHPGKEGPPGEKGGQGPPGPQGPIGYPGPRGVKGADGIRGLKGTKGEKGEDGFPGFKGDMGIKGDRGEIGPPGPRGEDGPEGPKGRGGPNGDPGPLGPPGEKGKLGVPGLPGYPGRQGPKGSIGFPGFPGANGEKGGRGTPGKPGPRGQRGPTGPRGERGPRGITGKPGPKGNSGGDGPAGPPGERGPNGPQGPTGFPGPKGPPGPPGKDGLPGHPGQRGETGFQGKTGPPGPPGVVGPQGPTGETGPMGERGHPGPPGPPGEQGLPGLAGKEGTKGDPGPAGLPGKDGPPGLRGFPGDRGLPGPVGALGLKGNEGPPGPPGPAGSPGERGPAGAAGPIGIPGRPGPQGPPGPAGEKGAPGEKGPQGPAGRDGLQGPVGLPGPAGPVGPPGEDGDKGEIGEPGQKGSKGDKGEQGPPGPTGPQGPIGQPGPSGADGEPGPRGQQGLFGQKGDEGPRGFPGPPGPVGLQGLPGPPGEKGETGDVGQMGPPGPPGPRGPSGAPGADGPQGPPGGIGNPGAVGEKGEPGEAGEPGLPGEGGPPGPKGERGEKGESGPSGAAGPPGPKGPPGDDGPKGSPGPVGFPGDPGPPGEPGPAGQDGPPGDKGDDGEPGQTGSPGPTGEPGPSGPPGKRGPPGPAGPEGRQGEKGAKGEAGLEGPPGKTGPIGPQGAPGKPGPDGLRGIPGPVGEQGLPGSPGPDGPPGPMGPPGLPGLKGDSGPKGEKGHPGLIGLIGPPGEQGEKGDRGLPGPQGSSGPKGEQGITGPSGPIGPPGPPGLPGPPGPKGAKGSSGPTGPKGEAGHPGPPGPPGPPGEVIQPLPIQASRTRRNIDASQLLDDGNGENYVDYADGMEEIFGSLNSLKLEIEQMKRPLGTQQNPARTCKDLQLCHPDFPDGEYWVDPNQGCSRDSFKVYCNFTAGGSTCVFPDKKSEGARITSWPKENPGSWFSEFKRGKLLSYVDAEGNPVGVVQMTFLRLLSASAHQNVTYHCYQSVAWQDAATGSYDKALRFLGSNDEEMSYDNNPYIRALVDGCATKKGYQKTVLEIDTPKVEQVPIVDIMFNDFGEASQKFGFEVGPACFMG

SEQ ID NO: 26676 - protein, 210 aa, Homo sapiens
  REGION 1..210: note = ENSP00000360885
  VARIANT 1: note = Any amino acid
XRTRRNIDASQLLDDGNGENYVDYADGMEEIFGSLNSLKLEIEQMKRPLGTQQNPARTCKDLQLCHPDFPDGEYWVDPNQGCSRDSFKVYCNFTAGGSTCVFPDKKSEGSKMARWPKEQPSTWYSQYKRGSLLSYVDAEGNPVGVVQMTFLRLLSASAHQNVTYHCYQSVAWQDAATGSYDKALRFLGSNDEEMSYDNNPYIRALVDGCA

SEQ ID NO: 26677 - protein, 1838 aa, Homo sapiens
  REGION 1..1838: note = ENSP00000481360
MDVHTRWKARSALRPGAPLLPPLLLLLLWAPPPSRAAQPADLLKVLDFHNLPDGITKTTGFCATRRSSKGPDVAYRVTKDAQLSAPTKQLYPASAFPEDFSILTTVKAKKGSQAFLVSIYNEQGIQQIGLELGRSPVFLYEDHTGKPGPEDYPLFRGINLSDGKWHRIALSVHKKNVTLILDCKKKTTKFLDRSDHPMIDINGIIVFGTRILDEEVFEGDIQQLLFVSDHRAAYDYCEHYSPDCDTAVPDTPQSQDPNPDEYYTEGDGEGETYYYEYPYYEDPEDLGKEPTPSKKPVEAAKETTEVPEELTPTPTEAAPMPETSEGAGKEEDVGIGDYDYVPSEDYYTPSPYDDLTYGEGEENPDQPTDPGAGAEIPTSTADTSNSSNPAPPPGEGADDLEGEFTEETIRNLDENYYDPYYDPTSSPSEIGPGMPANQDTIYEGIGGPRGEKGQKGEPAIIEPGMLIEGPPGPEGPAGLPGPPGTMGPTGQVGDPGERGPPGRPGLPGADGLPGPPGTMLMLPFRFGGGGDAGSKGPMVSAQESQAQAILQQARLALRGPAGPMGLTGRPGPVGPPGSGGLKGEPGDVGPQGPRGVQGPPGPAGKPGRRGRAGSDGARGMPGQTGPKGDRGFDGLAGLPGEKGHRGDPGPSGPPGPPGDDGERGDDGEVGPRGLPGEPGPRGLLGPKGPPGPPGPPGVTGMDGQPGPKGNVGPQGEPGPPGQQGNPGAQGLPGPQGAIGPPGEKGPLGKPGLPGMPGADGPPGHPGKEGPPGEKGGQGPPGPQGPIGYPGPRGVKGADGIRGLKGTKGEKGEDGFPGFKGDMGIKGDRGEIGPPGPRGEDGPEGPKGRGGPNGDPGPLGPPGEKGKLGVPGLPGYPGRQGPKGSIGFPGFPGANGEKGGRGTPGKPGPRGQRGPTGPRGERGPRGITGKPGPKGNSGGDGPAGPPGERGPNGPQGPTGFPGPKGPPGPPGKDGLPGHPGQRGETGFQGKTGPPGPPGVVGPQGPTGETGPMGERGHPGPPGPPGEQGLPGLAGKEGTKGDPGPAGLPGKDGPPGLRGFPGDRGLPGPVGALGLKGNEGPPGPPGPAGSPGERGPAGAAGPIGIPGRPGPQGPPGPAGEKGAPGEKGPQGPAGRDGLQGPVGLPGPAGPVGPPGEDGDKGEIGEPGQKGSKGDKGEQGPPGPTGPQGPIGQPGPSGADGEPGPRGQQGLFGQKGDEGPRGFPGPPGPVGLQGLPGPPGEKGETGDVGQMGPPGPPGPRGPSGAPGADGPQGPPGGIGNPGAVGEKGEPGEAGEPGLPGEGGPPGPKGERGEKGESGPSGAAGPPGPKGPPGDDGPKGSPGPVGFPGDPGPPGEPGPAGQDGPPGDKGDDGEPGQTGSPGPTGEPGPSGPPGKRGPPGPAGPEGRQGEKGAKGEAGLEGPPGKTGPIGPQGAPGKPGPDGLRGIPGPVGEQGLPGSPGPDGPPGPMGPPGLPGLKGDSGPKGEKGHPGLIGLIGPPGEQGEKGDRGLPGPQGSSGPKGEQGITGPSGPIGPPGPPGLPGPPGPKGAKGSSGPTGPKGEAGHPGPPGPPGPPGEVIQPLPIQASRTRRNIDASQLLDDGNGENYVDYADGMEEIFGSLNSLKLEIEQMKRPLGTQQNPARTCKDLQLCHPDFPDGEYWVDPNQGCSRDSFKVYCNFTAGGSTCVFPDKKSEGSKMARWPKEQPSTWYSQYKRGSLLSYVDAEGNPVGVVQMTFLRLLSASAHQNVTYHCYQSVAWQDAATGSYDKALRFLGSNDEEMSYDNNPYIRALVDGCATKKGYQKTVLEIDTPKVEQVPIVDIMFNDFGEASQKFGFEVGPACFMG

SEQ ID NO: 26678 - protein, 1745 aa, Homo sapiens
  REGION 1..1745: note = ENSP00000264828
MGNRRDLGQPRAGLCLLLAALQLLPGTQADPVDVLKALGVQGGQAGVPEGPGFCPQRTPEGDRAFRIGQASTLGIPTWELFPEGHFPENFSLLITLRGQPANQSVLLSIYDERGARQLGLALGPALGLLGDPFRPLPQQVNLTDGRWHRVAVSIDGEMVTLVADCEAQPPVLGHGPRFISIAGLTVLGTQDLGEKTFEGDIQELLISPDPQAAFQACERYLPDCDNLAPAATVAPQGEPETPRPRRKGKGKGRKKGRGRKGKGRKKNKEIWTSSPPPDSAENQTSTDIPKTETPAPNLPPTPTPLVVTSTVTTGLNATILERSLDPDSGTELGTLETKAAREDEEGDDSTMGPDFRAAEYPSRTQFQIFPGAGEKGAKGEPAVIEKGQQFEGPPGAPGPQGVVGPSGPPGPPGFPGDPGPPGPAGLPGIPGIDGIRGPPGTVIMMPFQFAGGSFKGPPVSFQQAQAQAVLQQTQLSMKGPPGPVGLTGRPGPVGLPGHPGLKGEEGAEGPQGPRGLQGPHGPPGRVGKMGRPGADGARGLPGDTGPKGDRGFDGLPGLPGEKGQRGDFGHVGQPGPPGEDGERGAEGPPGPTGQAGEPGPRGLLGPRGSPGPTGRPGVTGIDGAPGAKGNVGPPGEPGPPGQQGNHGSQGLPGPQGLIGTPGEKGPPGNPGIPGLPGSDGPLGHPGHEGPTGEKGAQGPPGSAGPPGYPGPRGVKGTSGNRGLQGEKGEKGEDGFPGFKGDVGLKGDQGKPGAPGPRGEDGPEGPKGQAGQAGEEGPPGSAGEKGKLGVPGLPGYPGRPGPKGSIGFPGPLGPIGEKGKSGKTGQPGLEGERGPPGSRGERGQPGATGQPGPKGDVGQDGAPGIPGEKGLPGLQGPPGFPGPKGPPGHQGKDGRPGHPGQRGELGFQGQTGPPGPAGVLGPQGKTGEVGPLGERGPPGPPGPPGEQGLPGLEGREGAKGELGPPGPLGKEGPAGLRGFPGPKGGPGDPGPTGLKGDKGPPGPVGANGSPGERGPLGPAGGIGLPGQSGSEGPVGPAGKKGSRGERGPPGPTGKDGIPGPLGPLGPPGAAGPSGEEGDKGDVGAPGHKGSKGDKGDAGPPGQPGIRGPAGHPGPPGADGAQGRRGPPGLFGQKGDDGVRGFVGVIGPPGLQGLPGPPGEKGEVGDVGSMGPHGAPGPRGPQGPTGSEGTPGLPGGVGQPGAVGEKGERGDAGDPGPPGAPGIPGPKGDIGEKGDSGPSGAAGPPGKKGPPGEDGAKGSVGPTGLPGDLGPPGDPGVSGIDGSPGEKGDPGDVGGPGPPGASGEPGAPGPPGKRGPSGHMGREGREGEKGAKGEPGPDGPPGRTGPMGARGPPGRVGPEGLRGIPGPVGEPGLLGAPGQMGPPGPLGPSGLPGLKGDTGPKGEKGHIGLIGLIGPPGEAGEKGDQGLPGVQGPPGPKGDPGPPGPIGSLGHPGPPGVAGPLGQKGSKGSPGSMGPRGDTGPAGPPGPPGAPAELHGLRRRRRFVPVPLPVVEGGLEEVLASLTSLSLELEQLRRPPGTAERPGLVCHELHRNHPHLPDGEYWIDPNQGCARDSFRVFCNFTAGGETCLYPDKKFEIVKLASWSKEKPGGWYSTFRRGKKFSYVDADGSPVNVVQLNFLKLLSATARQNFTYSCQNAAAWLDEATGDYSHSARFLGTNGEELSFNQTTAATVSVPQDGCRLRKGQTKTLFEFSSSRAGFLPLWDVAATDFGQTNQKFGFELGPVCFSS

SEQ ID NO: 26679 - protein, 1028 aa, Homo sapiens
  REGION 1..1028: note = ENSP00000355180
MRAARALLPLLLQACWTAAQDEPETPRAVAFQDCPVDLFFVLDTSESVALRLKPYGALVDKVKSFTKRFIDNLRDRYYRCDRNLVWNAGALHYSDEVEIIQGLTRMPGGRDALKSSVDAVKYFGKGTYTDCAIKKGLEQLLVGGSHLKENKYLIVVTDGHPLEGYKEPCGGLEDAVNEAKHLGVKVFSVAITPDHLEPRLSIIATDHTYRRNFTAADWGQSRDAEEAISQTIDTIVDMIKNNVEQVCCSFECQPARGPPGLRGDPGFEGERGKPGLPGEKGEAGDPGRPGDLGPVGYQGMKGEKGSRGEKGSRGPKGYKGEKGKRGIDGVDGVKGEMGYPGLPGCKGSPGFDGIQGPPGPKGDPGAFGLKGEKGEPGADGEAGRPGSSGPSGDEGQPGEPGPPGEKGEAGDEGNPGPDGAPGERGGPGERGPRGTPGTRGPRGDPGEAGPQGDQGREGPVGVPGDPGEAGPIGPKGYRGDEGPPGSEGARGAPGPAGPPGDPGLMGERGEDGPAGNGTEGFPGFPGYPGNRGAPGINGTKGYPGLKGDEGEAGDPGDDNNDIAPRGVKGAKGYRGPEGPQGPPGHQGPPGPDECEILDIIMKMCSCCECKCGPIDLLFVLDSSESIGLQNFEIAKDFVVKVIDRLSRDELVKFEPGQSYAGVVQYSHSQMQEHVSLRSPSIRNVQELKEAIKSLQWMAGGTFTGEALQYTRDQLLPPSPNNRIALVITDGRSDTQRDTTPLNVLCSPGIQVVSVGIKDVFDFIPGSDQLNVISCQGLAPSQGRPGLSLVKENYAELLEDAFLKNVTAQICIDKKCPDYTCPITFSSPADITILLDGSASVGSHNFDTTKRFAKRLAERFLTAGRTDPAHDVRVAVVQYSGTGQQRPERASLQFLQNYTALASAVDAMDFINDATDVNDALGYVTRFYREASSGAAKKRLLLFSDGNSQGATPAAIEKAVQEAQRAGIEIFVVVVGRQVNEPHIRVLVTGKTAEYDVAYGESHLFRVPSYQALLRGVFHQTVSRKVALG

SEQ ID NO: 26680 - protein, 1026 aa, Homo sapiens [sequence omitted]

SEQ ID NO: 26681 - protein, 921 aa, Homo sapiens
  REGION 1..921: note = ENSP00000349790
MKTCWKIPVFFFVCSFLEPWASAAVKRRPRFPVNSNSNGGNELCPKIRIGQDDLPGFDLISQFQVDKAASRRAIQRVVGSATLQVAYKLGNNVDFRIPTRNLYPSGLPEEYSFLTTFRMTGSTLKKNWNIWQIQDSSGKEQVGIKINGQTQSVVFSYKGLDGSLQTAAFSNLSSLFDSQWHKIMIGVERSSATLFVDCNRIESLPIKPRGPIDIDGFAVLGKLADNPQVSVPFELQWMLIHCDPLRPRRETCHELPARITPSQTTDERGPPGEQGPPGPPGPPGVPGIDGIDGDRGPKGPPGPPGPAGEPGKPGAPGKPGTPGADGLTGPDGSPGSIGSKGQKGEPGVPGSRGFPGRGIPGPPGPPGTAGLPGELGRVGPVGDPGRRGPPGPPGPPGPRGTIGFHDGDPLCPNACPPGRSGYPGLPGMRGHKGAKGEIGEPGRQGHKGEEGDQGELGEVGAQGPPGAQGLRGITGIVGDKGEKGARGLDGEPGPQGLPGAPGDQGQRGPPGEAGPKGDRGAEGARGIPGLPGPKGDTGLPGVDGRDGIPGMPGTKGEPGKPGPPGDAGLQGLPGVPGIPGAKGVAGEKGSTGAPGKPGQMGNSGKPGQQGPPGEVGPRGPQGLPGSRGELGPVGSPGLPGKLGSLGSPGLPGLPGPPGLPGMKGDRGVVGEPGPKGEQGASGEEGEAGERGELGDIGLPGPKGSAGNPGEPGLRGPEGSRGLPGVEGPRGPPGPRGVQGEQGATGLPGVQGPPGRAPTDQHIKQVCMRVIQEHFAEMAASLKRPDSGATGLPGRPGPPGPPGPPGENGFPGQMGIRGLPGIKGPPGALGLRGPKGDLGEKGERGPPGRGPNGLPGAIGLPGDPGPASYGRNGRDGERGPPGVAGIPGVPGPPGPPGLPGFCEPASCTMQAGQRAFNKGPDP

SEQ ID NO: 26682 - protein, 678 aa, Homo sapiens
  REGION 1..678: note = ENSP00000315252
MAWTARDRGALGLLLLGLCLCAAQRGPPGEQGPPGPPGPPGVPGIDGIDGDRGPKGPPGPPGPAGEPGKPGAPGKPGTPGADGLTGPDGSPGSIGSKGQKGEPGVPGSRGFPGRGIPGPPGPPGTAGLPGELGRVGPVGDPGRRGPPGPPGPPGPRGTIGFHDGDPLCPNACPPGRSGYPGLPGMRGHKGAKGEIGEPGRQGHKGEEGDQGELGEVGAQGPPGAQGLRGITGIVGDKGEKGARGLDGEPGPQGLPGAPGDQGQRGPPGEAGPKGDRGAEGARGIPGLPGPKGDTGLPGVDGRDGIPGMPGTKGEPGKPGPPGDAGLQGLPGVPGIPGAKGVAGEKGSTGAPGKPGQMGNSGKPGQQGPPGEVGPRGPQGLPGSRGELGPVGSPGLPGKLGSLGSPGLPGLPGPPGLPGMKGDRGVVGEPGPKGEQGASGEEGEAGERGELGDIGLPGPKGSAGNPGEPGLRGPEGSRGLPGVEGPRGPPGPRGVQGEQGATGLPGVQGPPGRAPTDQHIKQVCMRVIQEHFAEMAASLKRPDSGATGLPGRPGPPGPPGPPGENGFPGQMGIRGLPGIKGPPGALGLRGPKGDLGEKGERGPPGRGPNGLPGAIGLPGDPGPASYGRNGRDGERGPPGVAGIPGVPGPPGPPGLPGFCEPASCTMQAGQRAFNKGPDP

SEQ ID NO: 26683 - protein, 328 aa, Homo sapiens
  REGION 1..328: note = ENSP00000359527
MKTCWKIPVFFFVCSFLEPWASAAVKRRPRFPVNSNSNGGNELCPKIRIGQDDLPGFDLISQFQVDKAASRRAIQRVVGSATLQVAYKLGNNVDFRIPTRNLYPSGLPEEYSFLTTFRMTGSTLKKNWNIWQIQDSSGKEQVGIKINGQTQSVVFSYKGLDGSLQTAAFSNLSSLFDSQWHKIMIGVERSSATLFVDCNRIESLPIKPRGPIDIDGFAVLGKLADNPQVSVPFELQWMLIHCDPLRPRRETCHELPARITPSQTTDERGPPGEQGPPGPPGPPGVPGIDGIDGDRGPKGPPGPPGPAGEPGKPGAPGKPGTPGADTSP

SEQ ID NO: 26684 - protein, 742 aa, Homo sapiens
  REGION 1..742: note = ENSP00000383115
MKDDFAEEEEVQSFGYKRFGIQEGTQCTKCKNNWALKFSIILLYILCALLTITVAILGYKVVEKMDNVTGGMETSRQTYDDKLTAVESDLKKLGDQTGKKAISTNSELSTFRSDILDLRQQLREITEKTSKNKDTLEKLQASGDALVDRQSQLKETLENNSFLITTVNKTLQAYNGYVTNLQQDTSVLQGNLQNQMYSHNVVIMNLNNLNLTQVQQRNLITNLQRSVDDTSQAIQRIKNDFQNLQQVFLQAKKDTDWLKEKVQSLQTLAANNSALAKANNDTLEDMNSQLNSFTGQMENITTISQANEQNLKDLQDLHKDAENRTAIKFNQLEERFQLFETDIVNIISNISYTAHHLRTLTSNLNEVRTTCTDTLTKHTDDLTSLNNTLANIRLDSVSLRMQQDLMRSRLDTEVANLSVIMEEMKLVDSKHGQLIKNFTILQGPPGPRGPRGDRGSQGPPGPTGNKGQKGEKGEPGPPGPAGERGPIGPAGPPGERGGKGSKGSQGPKGSRGSPGKPGPQGSSGDPGPPGPPGKEGLPGPQGPPGFQGLQGTVGEPGVPGPRGLPGLPGVPGMPGPKGPPGPPGPSGAVVPLALQNEPTPAPEDNGCPPHWKNFTDKCYYFSVEKEIFEDAKLFCEDKSSHLVFINTREEQQWIKKQMVGRESHWIGLTDSERENEWKWLDGTSPDYKNWKAGQPDNWGHGHGPGEDCAGLIYAGQWNDFQCEDVNNFICEKDRETVLSSAL

SEQ ID NO: 26685 - protein, 234 aa, Homo sapiens
  REGION 1..234: note = ENSP00000356491
MLPGYRDPYSSRPLTRGEIGCFLSHYSVWKEVIDRELEKTLVIEDDVRFEHQFKKKLMKLMDNIDQAQLDWELIYIGRKRMQVKEPEKAVPNVANLVEADYSYWTLGYVISLEGAQKLVGANPFGKMLPVDEFLPVMYNKHPVAEYKEYYESRDLKAFSAEPLLIYPTHYTGQPGYLSDTETSTIWDNETVATDWDRTHAWKSRKQSRIYSNAKNTEALPPPTSLDTVPSRDEL

SEQ ID NO: 26686 - protein, 626 aa, Homo sapiens
  REGION 1..626: note = ENSP00000354960
MAARPAATLAWSLLLLSSALLREGCRARFVAERDSEDDGEEPVVFPESPLQSPTVLVAVLARNAAHTLPHFLGCLERLDYPKSRMAIWAATDHNVDNTTEIFREWLKNVQRLYHYVEWRPMDEPESYPDEIGPKHWPTSRFAHVMKLRQAALRTAREKWSDYILFIDVDNFLTNPQTLNLLIAENKTIVAPMLESRGLYSNFWCGITPKGFYKRTPDYVQIREWKRTGCFPVPMVHSTFLIDLRKEASDKLTFYPPHQDYTWTFDDIIVFAFSSRQAGIQMYLCNREHYGYLPIPLKPHQTLQEDIENLIHVQIEAMIDRPPMEPSQYVSVVPKYPDKMGFDEIFMINLKRRKDRRDRMLRTLYEQEIEVKIVEAVDGKALNTSQLKALNIEMLPGYRDPYSSRPLTRGEIGCFLSHYSVWKEVIDRELEKTLVIEDDVRFEHQFKKKLMKLMDNIDQAQLDWELIYIGRKRMQVKEPEKAVPNVANLVEADYSYWTLGYVISLEGAQKLVGANPFGKMLPVDEFLPVMYNKHPVAEYKEYYESRDLKAFSAEPLLIYPTHYTGQPGYLSDTETSTIWDNETVATDWDRTHAWKSRKQSRIYSNAKNTEALPPPTSLDTVPSRDEL

SEQ ID NO: 26687 - protein, 363 aa, Homo sapiens
  REGION 1..363: note = ENSP00000356490
MFSDCWLCPSLGSSGIQMYLCNREHYGYLPIPLKPHQTLQEDIENLIHVQIEAMIDRPPMEPSQYVSVVPKYPDKMGFDEIFMINLKRRKDRRDRMLRTLYEQEIEVKIVEAVDGKALNTSQLKALNIEMLPGYRDPYSSRPLTRGEIGCFLSHYSVWKEVIDRELEKTLVIEDDVRFEHQFKKKLMKLMDNIDQAQLDWELIYIGRKRMQVKEPEKAVPNVANLVEADYSYWTLGYVISLEGAQKLVGANPFGKMLPVDEFLPVMYNKHPVAEYKEYYESRDLKAFSAEPLLIYPTHYTGQPGYLSDTETSTIWDNETVATDWDRTHAWKSRKQSRIYSNAKNTEALPPPTSLDTVPSRDEL

SEQ ID NO: 26688 - protein, 234 aa, Homo sapiens; identical to SEQ ID NO: 26685
  REGION 1..234: note = ENSP00000356491

SEQ ID NO: 26689 - protein, 626 aa, Homo sapiens; identical to SEQ ID NO: 26686
  REGION 1..626: note = ENSP00000354960

SEQ ID NO: 26690 - protein, 363 aa, Homo sapiens; identical to SEQ ID NO: 26687
  REGION 1..363: note = ENSP00000356490

SEQ ID NO: 26691 - protein, 238 aa, Homo sapiens
  REGION 1..238: note = ENSP00000263960
MAARTGHTALRRVVSGCRPKSATAAGAQAPVRNGRYLASCGILMSRTLPLHTSILPKEICARTFFKITAPLINKRKEYSERRILGYSMQEMYDVVSGVEDYKHFVPWCKKSDVISKRSGYCKTRLEIGFPPVLERYTSVVTLVKPHLVKASCTDGRLFNHLETIWRFSPGLPGYPRTCTLDFSISFEFRSLLHSQLATLFFDEVVKQMVAAFERRACKLYGPETNIPRELMLHEVHHT

SEQ ID NO: 26692 - protein, 188 aa, Homo sapiens
  REGION 1..188: note = ENSP00000386785
MAARTGHTALRRVVSGCRPKSATAAGAQAPVRNGRYSMQEMYDVVSGVEDYKHFVPWCKKSDVISKRSGYCKTRLEIGFPPVLERYTSVVTLVKPHLVKASCTDGRLFNHLETIWRFSPGLPGYPRTCTLDFSISFEFRSLLHSQLATLFFDEVVKQMVAAFERRACKLYGPETNIPRELMLHEVHHT

SEQ ID NO: 26693 - protein, 210 aa, Homo sapiens
  REGION 1..210: note = ENSP00000387223
MGVCVWRYLASCGILMSRTLPLHTSILPKEICARTFFKITAPLINKRKEYSERRILGYSMQEMYDVVSGVEDYKHFVPWCKKSDVISKRSGYCKTRLEIGFPPVLERYTSVVTLVKPHLVKASCTDGRLFNHLETIWRFSPGLPGYPRTCTLDFSISFEFRSLLHSQLATLFFDEVVKQMVAAFERRACKLYGPETNIPRELMLHEVHHT

SEQ ID NO: 26694 - protein, 1042 aa, Homo sapiens
  REGION 1..1042: note = ENSP00000273857
MKQSPALAPEERCRRAGSPKPVLRADDNNMGNGCSQKLATANLLRFLLLVLIPCICALVLLLVILLSYVGTLQKVYFKSNGSEPLVTDGEIQGSDVILTNTIYNQSTVVSTAHPDQHVPAWTTDASLPGDQSHRNTSACMNITHSQCQMLPYHATLTPLLSVVRNMEMEKFLKFFTYLHRLSCYQHIMLFGCTLAFPECIIDGDDSHGLLPCRSFCEAAKEGCESVLGMVNYSWPDFLRCSQFRNQTESSNVSRICFSPQQENGKQLLCGRGENFLCASGICIPGKLQCNGYNDCDDWSDEAHCNCSENLFHCHTGKCLNYSLVCDGYDDCGDLSDEQNCDCNPTTEHRCGDGRCIAMEWVCDGDHDCVDKSDEVNCSCHSQGLVECRNGQCIPSTFQCDGDEDCKDGSDEENCSVIQTSCQEGDQRCLYNPCLDSCGGSSLCDPNNSLNNCSQCEPITLELCMNLPYNSTSYPNYFGHRTQKEASISWESSLFPALVQTNCYKYLMFFSCTILVPKCDVNTGEHIPPCRALCEHSKERCESVLGIVGLQWPEDTDCSQFPEENSDNQTCLMPDEYVEECSPSHFKCRSGQCVLASRRCDGQADCDDDSDEENCGCKERDLWECPSNKQCLKHTVICDGFPDCPDYMDEKNCSFCQDDELECANHACVSRDLWCDGEADCSDSSDEWDCVTLSINVNSSSFLMVHRAATEHHVCADGWQEILSQLACKQMGLGEPSVTKLIQEQEKEPRWLTLHSNWESLNGTTLHELLVNGQSCESRSKISLLCTKQDCGRRPAARMNKRILGGRTSRPGRWPWQCSLQSEPSGHICGCVLIAKKWVLTVAHCFEGRENAAVWKVVLGINNLDHPSVFMQTRFVKTIILHPRYSRAVVDYDISIVELSEDISETGYVRPVCLPNPEQWLEPDTYCYITGWGHMGNKMPFKLQEGEVRIISLEHCQSYFDMKTITTRMICAGYESGTVDSCMGDSGGPLVCEKPGGRWTLFGLTSWGSVCFSKVLGPGVYSNVSYFVEWIKRQIYIQTFLLN

SEQ ID NO: 26695 - protein, 903 aa, Homo sapiens
  REGION 1..903: note = ENSP00000425597
MNITHSQCQMLPYHATLTPLLSVVRNMEMEKFLKFFTYLHRLSCYQHIMLFGCTLAFPECIIDGDDSHGLLPCRSFCEAAKEGCESVLGMVNYSWPDFLRCSQFRNQTESSNVSRICFSPQQENGKQLLCGRGENFLCASGICIPGKLQCNGYNDCDDWSDEAHCNCSENLFHCHTGKCLNYSLVCDGYDDCGDLSDEQNCDCNPTTEHRCGDGRCIAMEWVCDGDHDCVDKSDEVNCSCHSQGLVECRNGQCIPSTFQCDGDEDCKDGSDEENCSVIQTSCQEGDQRCLYNPCLDSCGGSSLCDPNNSLNNCSQCEPITLELCMNLPYNSTSYPNYFGHRTQKEASISWESSLFPALVQTNCYKYLMFFSCTILVPKCDVNTGEHIPPCRALCEHSKERCESVLGIVGLQWPEDTDCSQFPEENSDNQTCLMPDEYVEECSPSHFKCRSGQCVLASRRCDGQADCDDDSDEENCGCKERDLWECPSNKQCLKHTVICDGFPDCPDYMDEKNCSFCQDDELECANHACVSRDLWCDGEADCSDSSDEWDCVTLSINVNSSSFLMVHRAATEHHVCADGWQEILSQLACKQMGLGEPSVTKLIQEQEKEPRWLTLHSNWESLNGTTLHELLVNGQSCESRSKISLLCTKQDCGRRPAARMNKRILGGRTSRPGRWPWQCSLQSEPSGHICGCVLIAKKWVLTVAHCFEGRENAAVWKVVLGINNLDHPSVFMQTRFVKTIILHPRYSRAVVDYDISIVELSEDISETGYVRPVCLPNPEQWLEPDTYCYITGWGHMGNKMPFKLQEGEVRIISLEHCQSYFDMKTITTRMICAGYESGTVDSCMGDSGGPLVCEKPGGRWTLFGLTSWGSVCFSKVLGPGVYSNVSYFVEWIKRQIYIQTFLLN

SEQ ID NO: 26696 - protein, 975 aa, Homo sapiens
  REGION 1..975: note = ENSP00000424212
MKQSPALAPEERCRRAGSPKPVLRADDNNMGNGCSQKLATANLLRFLLLVLIPCICALVLLLVILLSYVGACMNITHSQCQMLPYHATLTPLLSVVRNMEMEKFLKFFTYLHRLSCYQHIMLFGCTLAFPECIIDGDDSHGLLPCRSFCEAAKEGCESVLGMVNYSWPDFLRCSQFRNQTESSNVSRICFSPQQENGKQLLCGRGENFLCASGICIPGKLQCNGYNDCDDWSDEAHCNCSENLFHCHTGKCLNYSLVCDGYDDCGDLSDEQNCDCNPTTEHRCGDGRCIAMEWVCDGDHDCVDKSDEVNCSCHSQGLVECRNGQCIPSTFQCDGDEDCKDGSDEENCSVIQTSCQEGDQRCLYNPCLDSCGGSSLCDPNNSLNNCSQCEPITLELCMNLPYNSTSYPNYFGHRTQKEASISWESSLFPALVQTNCYKYLMFFSCTILVPKCDVNTGEHIPPCRALCEHSKERCESVLGIVGLQWPEDTDCSQFPEENSDNQTCLMPDEYVEECSPSHFKCRSGQCVLASRRCDGQADCDDDSDEENCGCKERDLWECPSNKQCLKHTVICDGFPDCPDYMDEKNCSFCQDDELECANHACVSRDLWCDGEADCSDSSDEWDCVTLSINVNSSSFLMVHRAATEHHVCADGWQEILSQLACKQMGLGEPSVTKLIQEQEKEPRWLTLHSNWESLNGTTLHELLVNGQSCESRSKISLLCTKQDCGRRPAARMNKRILGGRTSRPGRWPWQCSLQSEPSGHICGCVLIAKKWVLTVAHCFEGRENAAVWKVVLGINNLDHPSVFMQTRFVKTIILHPRYSRAVVDYDISIVELSEDISETGYVRPVCLPNPEQWLEPDTYCYITGWGHMGNKMPFKLQEGEVRIISLEHCQSYFDMKTITTRMICAGYESGTVDSCMGDSGGPLVCEKPGGRWTLFGLTSWGSVCFSKVLGPGVYSNVSYFVEWIKRQIYIQTFLLN

SEQ ID NO: 26697 - protein, 1005 aa, Homo sapiens
  REGION 1..1005: note = ENSP00000425401
MKQSPALAPEERCRRAGSPKPVLRADDNNMGNGCSQKLATANLLRFLLLVLIPCICALVLLLVILLSYVGTLQKVYFKSNGSEPLVTDGEIQGSDVILTNTIYNQSTVVSTAHPDQHVPAWTTDASLPGDQSHRNTSACMNITHSQCQMLPYHATLTPLLSVVRNMEMEKFLKFFTYLHRLSCYQHIMLFGCTLAFPECIIDGDDSHGLLPCRSFCEAAKEGCESVLGMVNYSWPDFLRCSQFRNQTESSNVSRICFSPQQENGKQLLCGRGENFLCASGICIPGKLQCNGYNDCDDWSDEAHCNCSENLFHCHTGKCLNYSLVCDGYDDCGDLSDEQNCACHSQGLVECRNGQCIPSTFQCDGDEDCKDGSDEENCSVIQTSCQEGDQRCLYNPCLDSCGGSSLCDPNNSLNNCSQCEPITLELCMNLPYNSTSYPNYFGHRTQKEASISWESSLFPALVQTNCYKYLMFFSCTILVPKCDVNTGEHIPPCRALCEHSKERCESVLGIVGLQWPEDTDCSQFPEENSDNQTCLMPDEYVEECSPSHFKCRSGQCVLASRRCDGQADCDDDSDEENCGCKERDLWECPSNKQCLKHTVICDGFPDCPDYMDEKNCSFCQDDELECANHACVSRDLWCDGEADCSDSSDEWDCVTLSINVNSSSFLMVHRAATEHHVCADGWQEILSQLACKQMGLGEPSVTKLIQEQEKEPRWLTLHSNWESLNGTTLHELLVNGQSCESRSKISLLCTKQDCGRRPAARMNKRILGGRTSRPGRWPWQCSLQSEPSGHICGCVLIAKKWVLTVAHCFEGRENAAVWKVVLGINNLDHPSVFMQTRFVKTIILHPRYSRAVVDYDISIVELSEDISETGYVRPVCLPNPEQWLEPDTYCYITGWGHMGNKMPFKLQEGEVRIISLEHCQSYFDMKTITTRMICAGYESGTVDSCMGDSGGPLVCEKPGGRWTLFGLTSWGSVCFSKVLGPGVYSNVSYFVEWIKRQIYIQTFLLN

SEQ ID NO: 26698 - protein, 734 aa, Homo sapiens
  REGION 1..734: note = ENSP00000423216
MKQSPALAPEERCRRAGSPKPVLRADDNNMGNGCSQKLATANLLRFLLLVLIPCICALVLLLVILLSYVGTLQKVYFKSNGSEPLVTDGEIQGSDVILTNTIYNQSTVVSTAHPDQHVPAWTTDASLPGDQSHRNTSACMNITHSQCQMLPYHATLTPLLSVVRNMEMEKFLKFFTYLHRLSCYQHIMLFGCTLAFPECIIDGDDSHGLLPCRSFCEAAKEGCESVLGMVNYSWPDFLRCSQFRNQTESSNVSRICFSPQQENGKQLLCGRGENFLCASGICIPGKLQCNGYNDCDDWSDEAHCNCSENLFHCHTGKCLNYSLVCDGYDDCGDLSDEQNCACHSQGLVECRNGQCIPSTFQCDGDEDCKDGSDEENCSVIQTSCQEGDQRCLYNPCLDSCGGSSLCDPNNSLNNCSQCEPITLELCMNLPYNSTSYPNYFGHRTQKEASISWESSLFPALVQTNCYKYLMFFSCTILVPKCDVNTGEHIPPCRALCEHSKERCESVLGIVGLQWPEDTDCSQFPEENSDNQTCLMPDEYVEECSPSHFKCRSGQCVLASRRCDGQADCDDDSDEENCGCKERDLWECPSNKQCLKHTVICDGFPDCPDYMDEKNCSFCQDDELECANHACVSRDLWCDGEADCSDSSDEWDCGELLVSAICCTLSCLSATEAEWILNYFLDFTDQVHLFCFTVIKADSADLCVLFPTHRKFPHEATSLFEISILYGKTFGFKML

SEQ ID NO: 26699 - protein, 938 aa, Homo sapiens
  REGION 1..938: note = ENSP00000484087
MKQSPALAPEERCRRAGSPKPVLRADDNNMGNGCSQKLATANLLRFLLLVLIPCICALVLLLVILLSYVGACMNITHSQCQMLPYHATLTPLLSVVRNMEMEKFLKFFTYLHRLSCYQHIMLFGCTLAFPECIIDGDDSHGLLPCRSFCEAAKEGCESVLGMVNYSWPDFLRCSQFRNQTESSNVSRICFSPQQENGKQLLCGRGENFLCASGICIPGKLQCNGYNDCDDWSDEAHCNCSENLFHCHTGKCLNYSLVCDGYDDCGDLSDEQNCACHSQGLVECRNGQCIPSTFQCDGDEDCKDGSDEENCSVIQTSCQEGDQRCLYNPCLDSCGGSSLCDPNNSLNNCSQCEPITLELCMNLPYNSTSYPNYFGHRTQKEASISWESSLFPALVQTNCYKYLMFFSCTILVPKCDVNTGEHIPPCRALCEHSKERCESVLGIVGLQWPEDTDCSQFPEENSDNQTCLMPDEYVEECSPSHFKCRSGQCVLASRRCDGQADCDDDSDEENCGCKERDLWECPSNKQCLKHTVICDGFPDCPDYMDEKNCSFCQDDELECANHACVSRDLWCDGEADCSDSSDEWDCVTLSINVNSSSFLMVHRAATEHHVCADGWQEILSQLACKQMGLGEPSVTKLIQEQEKEPRWLTLHSNWESLNGTTLHELLVNGQSCESRSKISLLCTKQDCGRRPAARMNKRILGGRTSRPGRWPWQCSLQSEPSGHICGCVLIAKKWVLTVAHCFEGRENAAVWKVVLGINNLDHPSVFMQTRFVKTIILHPRYSRAVVDYDISIVELSEDISETGYVRPVCLPNPEQWLEPDTYCYITGWGHMGNKMPFKLQEGEVRIISLEHCQSYFDMKTITTRMICAGYESGTVDSCMGDSGGPLVCEKPGGRWTLFGLTSWGSVCFSKVLGPGVYSNVSYFVEWIKRQIYIQTFLLN

SEQ ID NO: 26700 - protein, 474 aa, Homo sapiens
  REGION 1..474: note = ENSP00000261401
MRRVVRQSKFRHVFGQAVKNDQCYDDIRVSRVTWDSSFCAVNPRFVAIIIEASGGGAFLVLPLHKTGRIDKSYPTVCGHTGPVLDIDWCPHNDQVIASGSEDCTVMVWQIPENGLTLSLTEPVVILEGHSKRVGIVAWHPTARNVLLSAGCDNAIIIWNVGTGEALINLDDMHSDMIYNVSWNRNGSLICTASKDKKVRVIDPRKQEIVAEKEKAHEGARPMRAIFLADGNVFTTGFSRMSERQLALWNPKNMQEPIALHEMDTSNGVLLPFYDPDTSIIYLCGKGDSSIRYFEITDESPYVHYLNTFSSKEPQRGMGYMPKRGLDVNKCEIARFFKLHERKCEPIIMTVPRKSDLFQDDLYPDTAGPEAALEAEEWFEGKNADPILISLKHGYIPGKNRDLKVVKKNILDSKPTANKKCDLISIPKKTTDTASVQNEAKLDEILKEIKSIKDTICNQDERISKLEQQMAKIAA

SEQ ID NO: 26701 - protein, 474 aa, Homo sapiens; identical to SEQ ID NO: 26700
  REGION 1..474: note = ENSP00000438341

SEQ ID NO: 26702 - protein, 165 aa, Homo sapiens
  REGION 1..165: note = ENSP00000447337
SKEPQRGMGYMPKRGLDVNKCEIARFFKLHERKCEPIIMTVPRKSDLFQDDLYPDTAGPEAALEAEEWFEGKNADPILISLKHGYIPGKNRDLKVVKKNILDSKPTANKKCDLISIPKKTTDTASVQNEAKLDEILKEIKSIKDTICNQDERISKLEQQMAKIAA

SEQ ID NO: 26703 - protein, 369 aa, Homo sapiens
  REGION 1..369: note = ENSP00000415554
MVWQIPENGLTLSLTEPVVILEGHSKRVGIVAWHPTARNVLLSAGCDNAIIIWNVGTGEALINLDDMHSDMIYNVSWNRNGSLICTASKDKKVRVIDPRKQEIVAEKEKAHEGARPMRAIFLADGNVFTTGFSRMSERQLALWNPKNMQEPIALHEMDTSNGVLLPFYDPDTSIIYLCGKGDSSIRYFEITDESPYVHYLNTFSSKEPQRGMGYMPKRGLDVNKCEIARFFKLHERKCEPIIMTVPRKSDLFQDDLYPDTAGPEAALEAEEWFEGKNADPILISLKHGYIPGKNRDLKVVKKNILDSKPTANKKCDLISIPKKTTDTASVQNEAKLDEILKEIKSIKDTICNQDERISKLEQQMAKIAA

SEQ ID NO: 26704 - protein, 159 aa, Homo sapiens
  REGION 1..159: note = ENSP00000448130
MRRVVRQSKFRHVFGQAVKNDQCYDDIRVSRVTWDSSFCAVNPRFVAIIIEASGGGAFLVLPLHKTGRIDKSYPTVCGHTGPVLDIDWCPHNDQVIASGSEDCTVMVWQIPENGLTLSLTEPVVILEGHSKRVGIVAWHPTARNVLLSAEKYAGTNCSS

SEQ ID NO: 26705 - protein, 480 aa, Homo sapiens
  REGION 1..480: note = ENSP00000447534
MRWKDTMRRVVRQSKFRHVFGQAVKNDQCYDDIRVSRVTWDSSFCAVNPRFVAIIIEASGGGAFLVLPLHKTGRIDKSYPTVCGHTGPVLDIDWCPHNDQVIASGSEDCTVMVWQIPENGLTLSLTEPVVILEGHSKRVGIVAWHPTARNVLLSAGCDNAIIIWNVGTGEALINLDDMHSDMIYNVSWNRNGSLICTASKDKKVRVIDPRKQEIVAEKEKAHEGARPMRAIFLADGNVFTTGFSRMSERQLALWNPKNMQEPIALHEMDTSNGVLLPFYDPDTSIIYLCGKGDSSIRYFEITDESPYVHYLNTFSSKEPQRGMGYMPKRGLDVNKCEIARFFKLHERKCEPIIMTVPRKSDLFQDDLYPDTAGPEAALEAEEWFEGKNADPILISLKHGYIPGKNRDLKVVKKNILDSKPTANKKCDLISIPKKTTDTASVQNEAKLDEILKEIKSIKDTICNQDERISKLEQQMAKIAA

SEQ ID NO: 26706 - protein, 125 aa, Homo sapiens
  REGION 1..125: note = ENSP00000449658
MVWQIPENGLTLSLTEPVVILEGHSKRVGIVAWHPTARNVLLSAGCDNAIIIWNVGTGEALINLDDMHSDMIYNVSWNRNGSLICTASKDKKVRVIDPRKQEIVAEKEKAHEGARPMRAIFLADG

SEQ ID NO: 26707 - protein, 181 aa, Homo sapiens
  REGION 1..181: note = ENSP00000449330
MRRVVRQSKFRHVFGQAVKNDQCYDDIRVSRVTWDSSFCAVNPRFVAIIIEASGGGAFLVLPLHKTGRIDKSYPTVCGHTGPVLDIDWCPHNDQVIASGSEDCTVMVWQIPENGLTLSLTEPVVILEGHSKRVGIVAWHPTARNVLLSAGCDNAIIIWNVGTGEALINLDDMHSDMIYNVS

SEQ ID NO: 26708 - protein, 169 aa, Homo sapiens
  REGION 1..169: note = ENSP00000447989
MRRVVRQSKFRHVFGQAVKNDQCYDDIRVSRVTWDSSFCAVNPRFVAIIIEASGGGAFLVLPLHKTGRIDKSYPTVCGHTGPVLDIDWCPHNDQVIASGSEDCTVMVWQIPENGLTLSLTEPVVILEGHSKRVGIVAWHPTARNVLLSAGCDNAIIIWNVGTGEALINL

SEQ ID NO: 26709 - protein, 163 aa, Homo sapiens
  REGION 1..163: note = ENSP00000448527
MRRVVRQSKFRHVFGQAVKNDQCYDDIRVSRVTWDSSFCAVNPRFVAIIIEASGGGAFLVLPLHKTGRIDKSYPTVCGHTGPVLDIDWCPHNDQVIASGSEDCTVMVWQIPENGLTLSLTEPVVILEGHSKRVGIVAWHPTARNVLLSAGCDNAIIIWNVGTG

SEQ ID NO: 26710 - protein, 162 aa, Homo sapiens
  REGION 1..162: note = ENSP00000448195
MRRVVRQSKFRHVFGQAVKNDQCYDDIRVSRVTWDSSFCAVNPRFVAIIIEASGGGAFLVLPLHKTGRIDKSYPTVCGHTGPVLDIDWCPHNDQVIASGSEDCTVMVWQIPENGLTLSLTEPVVILEGHSKRVGIVAWHPTARNVLLSAGCDNAIIIWNVGT

SEQ ID NO: 26711 - protein, 151 aa, Homo sapiens
  REGION 1..151: note = ENSP00000447049
MRRVVRQSKFRHVFGQAVKNDQCYDDIRVSRVTWDSSFCAVNPRFVAIIIEASGGGAFLVLPLHKTGRIDKSYPTVCGHTGPVLDIDWCPHNDQVIASGSEDCTVMVWQIPENGLTLSLTEPVVILEGHSKRVGIVAWHPTARNVLLSAGG

SEQ ID NO: 26712 - protein, 527 aa, Homo sapiens
  REGION 1..527: note = ENSP00000394496
MYGPGSQLGKSGNNSWAKERGCSIACQGSLTSARLHAPSIGERPLSHMRWKDTMRRVVRQSKFRHVFGQAVKNDQCYDDIRVSRVTWDSSFCAVNPRFVAIIIEASGGGAFLVLPLHKTGRIDKSYPTVCGHTGPVLDIDWCPHNDQVIASGSEDCTVMVWQIPENGLTLSLTEPVVILEGHSKRVGIVAWHPTARNVLLSAGCDNAIIIWNVGTGEALINLDDMHSDMIYNVSWNRNGSLICTASKDKKVRVIDPRKQEIVAEKEKAHEGARPMRAIFLADGNVFTTGFSRMSERQLALWNPKNMQEPIALHEMDTSNGVLLPFYDPDTSIIYLCGKGDSSIRYFEITDESPYVHYLNTFSSKEPQRGMGYMPKRGLDVNKCEIARFFKLHERKCEPIIMTVPRKSDLFQDDLYPDTAGPEAALEAEEWFEGKNADPILISLKHGYIPGKNRDLKVVKKNILDSKPTANKKCDLISIPKKTTDTASVQNEAKLDEILKEIKSIKDTICNQDERISKLEQQMAKIAA

SEQ ID NO: 26713 - protein, 525 aa, Homo sapiens
  REGION 1..525: note = ENSP00000343746
MSWHPQYRSSKFRHVFGKPASKENCYDSVPITRSVHDNHFCAVNPHFIAVVTECAGGGAFLVIPLHQTGKLDPHYPKVCGHRGNVLDVKWNPFDDFEIASCSEDATIKIWSIPKQLLTRNLTAYRKELVGHARRVGLVEWHPTAANILFSAGYDYKVMIWNLDTKESVITSPMSTISCHQDVILSMSFNTNGSLLATTCKDRKIRVIDPRAGTVLQEASYKGHRASKVLFLGNLKKLMSTGTSRWNNRQVALWDQDNLSVPLMEEDLDGSSGVLFPFYDADTSMLYVVGKGDGNIRYYEVSADKPHLSYLTEYRSYNPQKGIGVMPKRGLDVSSCEIFRFYKLITTKSLIEPISMIVPRRSESYQEDIYPPTAGAQPSLTAQEWLSGMNRDPILVSLRPGSELLRPHPLPAERPIFNSMAPASPRLLNQTEKLAAEDGWRSSSLLEEKMPRWAAEHRLEEKKTWLTNGFDVFECPPPKTENELLQMFYRQQEEIRRLRELLTQREVQAKQLELEIKNLRMGSEQL

SEQ ID NO: 26714 - protein, 525 aa, Homo sapiens; identical to SEQ ID NO: 26713
  REGION 1..525: note = ENSP00000364218

SEQ ID NO: 26715 - protein, 475 aa, Homo sapiens
  REGION 1..475: note = ENSP00000261861
MSWRPQYRSSKFRNVYGKVANREHCFDGIPITKNVHDNHFCAVNTRFLAIVTESAGGGSFLVIPLEQTGRIEPNYPKVCGHQGNVLDIKWNPFIDNIIASCSEDTSVRIWEIPEGGLKRNMTEALLELHGHSRRVGLVEWHPTTNNILFSAGYDYKVLIWNLDVGEPVKMIDCHTDVILCMSFNTDGSLLTTTCKDKKLRVIEPRSGRVLQEANCKNHRVNRVVFLGNMKRLLTTGVSRWNTRQIALWDQEDLSMPLIEEEIDGLSGLLFPFYDADTHMLYLAGKGDGNIRYYEISTEKPYLSYLMEFRSPAPQKGLGVMPKHGLDVSACEVFRFYKLVTLKGLIEPISMIVPRRSDSYQEDIYPMTPGTEPALTPDEWLGGINRDPVLMSLKEGYKKSSKMVFKAPIKEKKSVVVNGIDLLENVPPRTENELLRMFFRQQDEIRRLKEELAQKDIRIRQLQLELKNLRNSPKNC

SEQ ID NO: 26716 - protein, 480 aa, Homo sapiens
  REGION 1..480: note = ENSP00000454783
MTVTKMSWRPQYRSSKFRNVYGKVANREHCFDGIPITKNVHDNHFCAVNTRFLAIVTESAGGGSFLVIPLEQTGRIEPNYPKVCGHQGNVLDIKWNPFIDNIIASCSEDTSVRIWEIPEGGLKRNMTEALLELHGHSRRVGLVEWHPTTNNILFSAGYDYKVLIWNLDVGEPVKMIDCHTDVILCMSFNTDGSLLTTTCKDKKLRVIEPRSGRVLQEANCKNHRVNRVVFLGNMKRLLTTGVSRWNTRQIALWDQEDLSMPLIEEEIDGLSGLLFPFYDADTHMLYLAGKGDGNIRYYEISTEKPYLSYLMEFRSPAPQKGLGVMPKHGLDVSACEVFRFYKLVTLKGLIEPISMIVPRRSDSYQEDIYPMTPGTEPALTPDEWLGGINRDPVLMSLKEGYKKSSKMVFKAPIKEKKSVVVNGIDLLENVPPRTENELLRMFFRQQDEIRRLKEELAQKDIRIRQLQLELKNLRNSPKNC

SEQ ID NO: 26717 - protein, 475 aa, Homo sapiens; identical to SEQ ID NO: 26715
  REGION 1..475: note = ENSP00000446250

SEQ ID NO: 26718 - protein, 475 aa, Homo sapiens; identical to SEQ ID NO: 26715
  REGION 1..475: note = ENSP00000443819

SEQ ID NO: 26719 - protein, 472 aa, Homo sapiens
  REGION 1..472: note = ENSP00000344562
MSRRVVRQSKFRHVFGQAAKADQAYEDIRVSKVTWDSSFCAVNPKFLAIIVEAGGGGAFIVLPLAKTGRVDKNYPLVTGHTAPVLDIDWCPHNDNVIASASDDTTIMVWQIPDYTPMRNITEPIITLEGHSKRVGILSWHPTARNVLLSAGGDNVIIIWNVGTGEVLLSLDDMHPDVIHSVCWNSNGSLLATTCKDKTLRIIDPRKGQVVAERFAAHEGMRPMRAVFTRQGHIFTTGFTRMSQRELGLWDPNNFEEPVALQEMDTSNGVLLPFYDPDSSIVYLCGKGDSSIRYFEITDEPPFVHYLNTFSSKEPQRGMGFMPKRGLDVSKCEIARFYKLHERKCEPIIMTVPRKSDLFQDDLYPDTPGPEPALEADEWLSGQDAEPVLISLRDGYVPPKHRELRVTKRNILDVRPPSGPRRSQSASDAPLSQQHTLETLLEEIKALRERVQAQEQRITALENMLCELVDGTD

SEQ ID NO: 26720 - protein, 432 aa, Homo sapiens
  REGION 1..432: note = ENSP00000463723
MSRRVVRQSKFRHVFGQAAKADQAYEDIRVSKVTWDSSFCAVNPKFLAIIVEAGGGGAFIVLPLAKTGRVDKNYPLVTGHTAPVLDIDWCPHNDNVIASASDDTTIMVWQIPDYTPMRNITEPIITLEGHSKRVGILSWHPTARNVLLSAGGDNVIIIWNVGTGEVLLSLDDMHPDVIHSVCWNSNGSLLATTCKDKTLRIIDPRKGQVVANNFEEPVALQEMDTSNGVLLPFYDPDSSIVYLCGKGDSSIRYFEITDEPPFVHYLNTFSSKEPQRGMGFMPKRGLDVSKCEIARFYKLHERKCEPIIMTVPRKSDLFQDDLYPDTPGPEPALEADEWLSGQDAEPVLISLRDGYVPPKHRELRVTKRNILDVRPPSGPRRSQSASDAPLSQQHTLETLLEEIKALRERVQAQEQRITALENMLCELVDGTD

SEQ ID NO: 26721 - protein, 29 aa, Homo sapiens
  REGION 1..29: note = ENSP00000464621
  VARIANT 1: note = Any amino acid
XADGKLLSTGFSRMSERQLALWDPFCCVA

SEQ ID NO: 26722 - protein, 471 aa, Homo sapiens
  REGION 1..471: note = ENSP00000462627
MSRRVVRQSKFRHVFGQAAKADQAYEDIRVSKVTWDSSFCAVNPKFLAIIVEAGGGGAFIVLPLAKTGRVDKNYPLVTGHTAPVLDIDWCPHNDNVIASASDDTTIMVWQIPDYTPMRNITEPIITLEGHSKRVGILSWHPTARNVLLSAGGDNVIIIWNVGTGEVLLSLDDMHPDVIHSVCWNSNGSLLATTCKDKTLRIIDPRKGQVVAEQARPHEGARPLRAVFTADGKLLSTGFSRMSERQLALWDPNNFEEPVALQEMDTSNGVLLPFYDPDSSIVYLCGKGDSSIRYFEITDEPPFVHYLNTFSSKEPQRGMGFMPKRGLDVSKCEIARFYKLHERKCEPIIMTVPRKSDLFQDDLYPDTPGPEPALEADEWLSGQDAEPVLISLRDGYVPPKHRELRVTKRNILDVRPPSGPRRSQSASDAPLSQHTLETLLEEIKALRERVQAQEQRITALENMLCELVDGTD

SEQ ID NO: 26723 - protein, 198 aa, Homo sapiens
  REGION 1..198: note = ENSP00000464396
MSRRVVRQSKFRHVFGQAAKADQAYEDIRVSKVTWDSSFCAVNPKFLAIIVEAGGGGAFIVLPLAKTGRVDKNYPLVTGHTAPVLDIDWCPHNDNVIASASDDTTIMVWQIPDYTPMRNITEPIITLEGHSKRVGILSWHPTARNVLLSAGGDNVIIIWNVGTGEVLLSLDDMHPDVIHSVCWNSNGSLLATTCKDKT

SEQ ID NO: 26724 - protein, 74 aa, Homo sapiens
  REGION 1..74: note = ENSP00000468235
MVWQIPDYTPMRNITEPIITLEGHSKRVGILSWHPTARNVLLSAGGDNVIIIWNVGTGEVLLSLDDMHPDVIHS

SEQ ID NO: 26725 - protein, 472 aa, Homo sapiens; identical to SEQ ID NO: 26719
  REGION 1..472: note = ENSP00000373419

SEQ ID NO: 26726 - protein, 142 aa, Homo sapiens
  REGION 1..142: note = ENSP00000262428
MATKIDKEACRAAYNLVRDDGSAVIWVTFKYDGSTIVPGEQGAEYQHFIQQCTDDVRLFAFVRFTTGDAMSKRSKFALITWIGENVSGLQRAKTGTDKTLVKEVVQNFAKEFVISDRKELEEDFIKSELKKAGGANYDAQTE

SEQ ID NO: 26727 - protein, 73 aa, Homo sapiens
  REGION 1..73: note = ENSP00000457033
MSKRSKFALITWIGENVSGLQRAKTGTDKTLVKEVVQNFAKEFVISDRKELEEDFIKSELKKAGGANYDAQTE

SEQ ID NO: 26728 - protein, 48 aa, Homo sapiens
  REGION 1..48: note = ENSP00000480117
  VARIANT 1: note = Any amino acid
XTIVPGEQGAEYQHFIQQCTGWSAVVQSQLTATSVSRVQEILLPQPPE

SEQ ID NO: 26729 - protein, 88 aa, Homo sapiens
  REGION 1..88: note = ENSP00000467959
MLDVEAQEPPKGKWSTPPFDPRFPSQNQIRNCYQNFLDYHRCLKTRTRRGKSTQPCEYYFRVYHSLCPISWVESWNEQIKNGIFAGKI

SEQ ID NO: 26730 - protein, 88 aa, Homo sapiens; identical to SEQ ID NO: 26729
  REGION 1..88: note = ENSP00000320672

SEQ ID NO: 26731 - protein, 88 aa, Homo sapiens; identical to SEQ ID NO: 26729
  REGION 1..88: note = ENSP00000467266

SEQ ID NO: 26732 - protein, 88 aa, Homo sapiens; identical to SEQ ID NO: 26729
  REGION 1..88: note = ENSP00000467128

SEQ ID NO: 26733 - protein, 88 aa, Homo sapiens; identical to SEQ ID NO: 26729
  REGION 1..88: note = ENSP00000476768

SEQ ID NO: 26734 - protein, 139 aa, Homo sapiens
  REGION 1..139: note = ENSP00000424830
MHGNEAVGRELLIFLAQYLCNEYQKGNETIVNLIHSTRIHIMPSLNPDGFEKAASQPGELKDWFVGRSNAQGIDLNRNFPDLDRIVYVNEKEGGPNNHLLKNMKKIVDQNTKLAPETKAVIHWIMDIPFVLSANLHGGD

SEQ ID NO: 26735 - protein, 476 aa, Homo sapiens
  REGION 1..476: note = ENSP00000386104
MAGRGGSALLALCGALAACGWLLGAEAQEPGAPAAGMRRRRRLQQEDGISFEYHRYPELREALVSVWLQCTAISRIYTVGRSFEGRELLVIELSDNPGVHEPGEPEFKYIGNMHGNEAVGRELLIFLAQYLCNEYQKGNETIVNLIHSTRIHIMPSLNPDGFEKAASQPGELKDWFVGRSNAQGIDLNRNFPDLDRIVYVNEKEGGPNNHLLKNMKKIVDQNTKLAPETKAVIHWIMDIPFVLSANLHGGDLVANYPYDETRSGSAHEYSSSPDDAIFQSLARAYSSFNPAMSDPNRPPCRKNDDDSSFVDGTTNGGAWYSVPGGMQDFNYLSSNCFEITVELSCEKFPPEETLKTYWEDNKNSLISYLEQIHRGVKGFVRDLQGNPIANATISVEGIDHDVTSAKDGDYWRLLIPGNYKLTASAPGYLAITKKVAVPYSPAAGVDFELESFSERKEEEKEELMEWWKMMSETLNF

SEQ ID NO: 26736 - protein, 108 aa, Homo sapiens
  REGION 1..108: note = ENSP00000427629
  VARIANT 1: note = Any amino acid
XLGAEAQEPGAPAAGMRRRRRLQQEDGISFEYHRYPELREALVSVWLQCTAISRIYTVGRSFEGRELLVIELSDNPGVHEPDCKLYEVGTLIPAPSSCLAHSGLEYTL

SEQ ID NO: 26737 - protein, 147 aa, Homo sapiens
  REGION 1..147: note = ENSP00000416601
MHGNEAVGRELLIFLAQYLCNEYQKGNETIVNLIHSTRIHIMPSLNPDGFEKAASQPGELKDWFVGRSNAQGIDLNRNFPDLDRIVYVNEKEGGPNNHLLKNMKKIVDQNTKLAPETKAVIHWIMDIPFVLSANLHGGDLVANYPYD

SEQ ID NO: 26738 - protein, 157 aa, Homo sapiens
  REGION 1..157: note = ENSP00000423699
MHGNEAVGRELLIFLAQYLCNEYQKGNETIVNLIHSTRIHIMPSLNPDGFEKAASQPGELKDWFVGRSNAQGIDLNRNFPDLDRIVYVNEKEGGPNNHLLKNMKKIVDQNTKLAPETKAVIHWIMDIPFVLSANLHGGDLVANYPYDETRSGSAHEY

SEQ ID NO: 26739 - protein, 134 aa, Homo sapiens
  REGION 1..134: note = ENSP00000352544
MDFVMKQALGGATKDMGKMLGGEEEKDPDAQKKEEERQEALRQQEEERKAKHARMEAEREKVRQQIRDKYGLKKKEEKEAEEKAALEQPCEGSLTRPKKAIPAGCGDEEEEEEESILDTVLKYLPGPLQDMFKK

SEQ ID NO: 26740 - protein, 6 aa, Homo sapiens
  REGION 1..6: note = ENSP00000423564
MDFVMK

SEQ ID NO: 26741 - protein, 111 aa, Homo sapiens
  REGION 1..111: note = ENSP00000421106
MDFVMKQALGGATKDMGKMLGGEEEKDPDAQKKEEERQEALRQQEEERKAKHARMEAEREKVRQQIRDKYGLKKKEEKEAEEKAALEQPCEGSLTRPKKAIPAGCGDEEEE

SEQ ID NO: 26742 - protein, 134 aa, Homo sapiens; identical to SEQ ID NO: 26739
  REGION 1..134: note = ENSP00000377346

SEQ ID NO: 26743 - protein, 70 aa, Homo sapiens
  REGION 1..70: note = ENSP00000425973
MDFVMKQALGGATKDMGKMLGGEEEKDPDAQKKEEERQEALRQQEEERKAKHARMEAEREKVRQQIRDKD

SEQ ID NO: 26744 - protein, 119 aa, Homo sapiens
  REGION 1..119: note = ENSP00000423612
MDFVMKQALGGATKDMGKMLGGEEEKDPDAQKKEEERQEALRQQEEERKAKHARMEAEREKVRQQIRDKYGLKKKEEKEAEEKAALEQPCEGSLTRPKKAIPAGCGDEEEEEEESILDT

SEQ ID NO: 26745 - protein, 77 aa, Homo sapiens
  REGION 1..77: note = ENSP00000424305
MDFVMKQALGGATKDMGKMLGGEEEKDPDAQKKEEERQEALRQQEEERKAKHARMEAEREKVRQQIRDKYGLKKKEE

SEQ ID NO: 26746 - protein, 37 aa, Homo sapiens
  REGION 1..37: note = ENSP00000425284
MDFVMKQALGGATKDMGKMLGGEEEKDPDAQKKEEER

SEQ ID NO: 26747 - protein, 134 aa, Homo sapiens; identical to SEQ ID NO: 26739
  REGION 1..134: note = ENSP00000421825

SEQ ID NO: 26748 - protein, 158 aa, Homo sapiens
  REGION 1..158: note = ENSP00000378464
MAFMVKTMVGGQLKNLTGSLGGGEDKGDGDKSAAEAQGMSREEYEEYQKQLVEEKMERDAQFTQRKAERATLRSHFRDKYRLPKNETDESQIQMAGGDVELPRELAKMIEEDTEEEEEKASVLGQLASLPGLNLGSLKDKAQATLGDLKQSAEKCHVM

SEQ ID NO: 26749 - protein, 35 aa, Homo sapiens
  REGION 1..35: note = ENSP00000447051
SCPMIPLYRNLPDHSAATKPSLFLFLVSLLHIFFK

SEQ ID NO: 26750 - protein, 198 aa, Homo sapiens
  REGION 1..198: note = ENSP00000447455
  VARIANT 1: note = Any amino acid
XPFDNGVQATGALYSRSLTPDDDVFQYLAHTYASRNPNMKKGDECKNKMNFPNGVTNGYSWYPLQGGMQDYNYIWAQCFEITLELSCCKYPREEKLPSFWNNNKASLIEYIKQVHLGVKGQVFDQNGNPLPNVIVEVQDRKHICPYRTNKYGEYYLLLLPGSYIINVTVPGHDPHITKLRSFACNRGQDEFCLTSLMS

SEQ ID NO: 26751 - protein, 443 aa, Homo sapiens
  REGION 1..443: note = ENSP00000448517
MDFPCLWLGLLLPLVAALDFNYHRQEGMEAFLKTVAQNYSSVTHLHSIGKSVKGRNLWVLVVGRFPKEHRIGIPEFKYVANMHGDETVGRELLLHLIDYLVTSDGKDPEITNLINSTRIHIMPSMNPDGFEAVKKPDCYYSIGRENYNQYDLNRNFPDAFEYNNVSRQPETVAVMKWLKTETFVLSANLHGGALVASYPFDNGVQATGALYSRSLTPDDDVFQYLAHTYASRNPNMKKGDECKNKMNFPNGVTNGYSWYPLQGGMQDYNYIWAQCFEITLELSCCKYPREEKLPSFWNNNKASLIEYIKQVHLGVKGQVFDQNGNPLPNVIVEVQDRKHICPYRTNKYGEYYLLLLPGSYIINVTVPGHDPHITKVIIPEKSQNFSALKKDILLPFQGQLDSIPVSNPSCPMIPLYRNLPDHSAATKPSLFLFLVSLLHIFFK

SEQ ID NO: 26752 - protein, 443 aa, Homo sapiens; identical to SEQ ID NO: 26751
  REGION 1..443: note = ENSP00000447255

SEQ ID NO: 26753 - protein, 249 aa, Homo sapiens
  REGION 1..249: note = ENSP00000446799
MDFPCLWLGLLLPLVAALDFNYHRQEGMEAFLKTVAQNYSSVTHLHSIGKSVKGRNLWVLVVGRFPKEHRIGIPEFKYVANMHGDETVGRELLLHLIDYLVTSDGKDPEITNLINSTRIHIMPSMNPDGFEAVKKPDCYYSIGRENYNQYDLNRNFPDAFEYNNVSRQPETVAVMKWLKTETFVLSANLHGGALVASYPFDNGVQATGALYSRSLTPDDDVFQYLAHTYASRNPNMKKGDECKNKMNFP

SEQ ID NO: 26754 - protein, 64 aa, Homo sapiens
  REGION 1..64: note = ENSP00000446573
MDFPCLWLGLLLPLVAALDFNYHRQEGMEAFLKTVAQNYSSVTHLHSIGKSVKDCWAGAAAPSD

SEQ ID NO: 26755 - protein, 64 aa, Homo sapiens; identical to SEQ ID NO: 26754
  REGION 1..64: note = ENSP00000450400

SEQ ID NO: 26756 - protein, 136 aa, Homo sapiens
  REGION 1..136: note = ENSP00000449911
MDFPCLWLGLLLPLVAALDFNYHRQEGMEAFLKTVAQNYSSVTHLHSIGKSVKGRNLWVLVVGRFPKEHRIGIPEFKYVANMHGDETVGRELLLHLIDYLVTSDGKDPEITNLINSTRIHIMPSMNPDGFEAVKKP

SEQ ID NO: 26757 - protein, 72 aa, Homo sapiens
  REGION 1..72: note = ENSP00000448078
MDFPCLWLGLLLPLVAALDFNYHRQEGMEAFLKTVAQNYSSVTHLHSIGKSVKETCGFLLWGGFQRNTELGF

SEQ ID NO: 26758 - protein, 443 aa, Homo sapiens; identical to SEQ ID NO: 26751
  REGION 1..443: note = ENSP00000339157

SEQ ID NO: 26759 - protein, 575 aa, Homo sapiens
  REGION 1..575: note = ENSP00000478878
MAVEPSSSESIKRRAGRRMKKMSNIYESAANTLGIFNSPCLTKVELRVACKGISDRDALSKPDPCVILKMQSHGQWFEVDRTEVIRTCINPVYSKLFTVDFYFEEVQRLRFEVHDISSNHNGLKEADFLGGMECTLGQIVSQRKLSKSLLKHGNTAGKSSITVIAEELSGNDDYVELAFNARKLDDKDFFSKSDPFLEIFRMNDDATQQLVHRTEVVMNNLSPAWKSFKVSVNSLCSGDPDRRLKCIVWDWDSNGKHDFIGEFTSTFKEMRGAMEGKQVQWECINPKYKAKKKNYKNSGTVILNLCKIHKMHSFLDYIMGGCQIQFTVAIDFTASNGDPRNSCSLHYIHPYQPNEYLKALVAVGEICQDYDSDKMFPAFGFGARIPPEYTVSHDFAINFNEDNPECAGIQGVVEAYQSCLPKLQLYGPTNIAPIIQKVAKSASEETNTKEASQYFILLILTDGVITDMADTREAIVHASHLPMSVIIVGVGNADFSDMQMLDGDDGILRSPKGEPVLRDIVQFVPFRNFKHASPAALAKSVLAEVPNQVVDYYNGKGIKPKCSSEMYESSRTLAP

SEQ ID NO: 26760 - protein, 557 aa, Homo sapiens
  REGION 1..557: note = ENSP00000411904
MKKMSNIYESAANTLGIFNSPCLTKVELRVACKGISDRDALSKPDPCVILKMQSHGQWFEVDRTEVIRTCINPVYSKLFTVDFYFEEVQRLRFEVHDISSNHNGLKEADFLGGMECTLGQIVSQRKLSKSLLKHGNTAGKSSITVIAEELSGNDDYVELAFNARKLDDKDFFSKSDPFLEIFRMNDDATQQLVHRTEVVMNNLSPAWKSFKVSVNSLCSGDPDRRLKCIVWDWDSNGKHDFIGEFTSTFKEMRGAMEGKQVQWECINPKYKAKKKNYKNSGTVILNLCKIHKMHSFLDYIMGGCQIQFTVAIDFTASNGDPRNSCSLHYIHPYQPNEYLKALVAVGEICQDYDSDKMFPAFGFGARIPPEYTVSHDFAINFNEDNPECAGIQGVVEAYQSCLPKLQLYGPTNIAPIIQKVAKSASEETNTKEASQYFILLILTDGVITDMADTREAIVHASHLPMSVIIVGVGNADFSDMQMLDGDDGILRSPKGEPVLRDIVQFVPFRNFKHASPAALAKSVLAEVPNQVVDYYNGKGIKPKCSSEMYESSRTLAP

SEQ ID NO: 26761 - protein, 169 aa, Homo sapiens
  REGION 1..169: note = ENSP00000425506
MKKMSNIYESAANTLGIFNSPCLTKVELRVACKGISDRDALSKPDPCVILKMQSHGQWFEVDRTEVIRTCINPVYSKLFTVDFYFEEVQRLRFEVHDISSNHNGLKEADFLGGMECTLGQIVSQRKLSKSLLKHGNTAGKSSITVIAEELSGNDDYVELAFNARKLDDK

SEQ ID NO: 26762 - protein, 557 aa, Homo sapiens; identical to SEQ ID NO: 26760
  REGION 1..557: note = ENSP00000423811

SEQ ID NO: 26763 - protein, 575 aa, Homo sapiens; identical to SEQ ID NO: 26759
  REGION 1..575: note = ENSP00000424853

SEQ ID NO: 26764 - protein, 73 aa, Homo sapiens
  REGION 1..73: note = ENSP00000421394
MKKMSNIYESAANTLGIFNSPCLTKVELRVACKGISDRDALSKPDPCVILKMQSHGQWFEVDRTEVIRTCINP

SEQ ID NO: 26765 - protein, 82 aa, Homo sapiens
  REGION 1..82: note = ENSP00000427561
MKKMSNIYESAANTLGIFNSPCLTKVELRVACKGISDRDALSKPDPCVILKMQSHGQWFEVDRTEVIRTCINPVYSKLFTVD

SEQ ID NO: 26766 - protein, 575 aa, Homo sapiens; identical to SEQ ID NO: 26759
  REGION 1..575: note = ENSP00000421646

SEQ ID NO: 26767 - protein, 557 aa, Homo sapiens; identical to SEQ ID NO: 26760
  REGION 1..557: note = ENSP00000421705

SEQ ID NO: 26768 - protein, 633 aa, Homo sapiens
  REGION 1..633: note = ENSP00000268720
MSAGSERGAAATPGGLPAPCASKVELRLSCRHLLDRDPLTKSDPSVALLQQAQGQWVQVGRTEVVRSSLHPVFSKVFTVDYYFEEVQRLRFEVYDTHGPSGFSCQEDDFLGGMECTLGQPAQKWLLQVVMRVSVDVLGPAGHCAKHFLCCTESSHLARTGPSFLLRYDDLCLPWATAGAVRWWTCRGGHTQGWQIVAQKKVTRPLLLKFGRNAGKSTITVIAEDISGNNGYVELSFRARKLDDKDLFSKSDPFLELYRVNDDQGLQLVYRTEVVKNNLNPVWEAFKVSLSSLCSCEETRPLKCLVWDYDSRGKHDFIGEFSTTFEEMQKAFEEGQAQWDCVNPKYKQKRRSYKNSGVVVLADLKFHRVYSFLDYIMGGCQIHFTVAIDFTASNGDPRNSCSLHYINPYQPNEYLKALVSVGEICQDYDSDKRFSALGFGARIPPKYEVSHDFAINFNPEDDECEGIQGVVEAYQNCLPRVQLYGPTNVAPIISKVARVAAAEESTGKASQYYILLILTDGVVTDMADTREAIVRASRLPMSIIIVGVGNADFTDMQVLDGDDGVLRSPRGEPALRDIVQFVPFRELKNASPAALAKCVLAEVPKQVVEYYSHRGLPPRSLGVPAGEASPGCTP

SEQ ID NO: 26769 - protein, 120 aa, Homo sapiens
  REGION 1..120: note = ENSP00000431863
MSAGSERGAAATPGGLPAPCASKVELRLSCRHLLDRDPLTKSDPSVALLQQAQGQWVQVGRTEVVRSSLHPVFSKVFTVDYYFEEVQRLRFEVYDTHGPSGFSCQEDDFLGGMECTLGQV

SEQ ID NO: 26770 - protein, 558 aa, Homo sapiens
  REGION 1..558: note = ENSP00000317374
MSAGSERGAAATPGGLPAPCASKVELRLSCRHLLDRDPLTKSDPSVALLQQAQGQWVQVGRTEVVRSSLHPVFSKVFTVDYYFEEVQRLRFEVYDTHGPSGFSCQEDDFLGGMECTLGQIVAQKKVTRPLLLKFGRNAGKSTITVIAEDISGNNGYVELSFRARKLDDKDLFSKSDPFLELYRVNDDQGLQLVYRTEVVKNNLNPVWEAFKVSLSSLCSCEETRPLKCLVWDYDSRGKHDFIGEFSTTFEEMQKAFEEGQAQWDCVNPKYKQKRRSYKNSGVVVLADLKFHRVYSFLDYIMGGCQIHFTVAIDFTASNGDPRNSCSLHYINPYQPNEYLKALVSVGEICQDYDSDKRFSALGFGARIPPKYEVSHDFAINFNPEDDECEGIQGVVEAYQNCLPRVQLYGPTNVAPIISKVARVAAAEESTGKASQYYILLILTDGVVTDMADTREAIVRASRLPMSIIIVGVGNADFTDMQVLDGDDGVLRSPRGEPALRDIVQFVPFRELKNASPAALAKCVLAEVPKQVVEYYSHRGLPPRSLGVPAGEASPGCTP

SEQ ID NO: 26771 - protein, 173 aa, Homo sapiens
  REGION 1..173: note = ENSP00000435876
FHRVYSFLDYIMGGCQIHFTTKRERGETGVAIDFTASNGDPRNSCSLHYINPYQPNEYLKALVSVGEICQDYDSDKRFSALGFGARIPPKYEVSHDFAINFNPEDDECEGIQGVVEAYQNCLPRVQLYGPTNVAPIISKVARVAAAEESTGKASQYYILLILTDGVVTDMADT

SEQ ID NO: 26772 - protein, 98 aa, Homo sapiens
  REGION 1..98: note = ENSP00000455086
DSDKRFSALGFGARIPPKYEVSHDFAINFNPEDDECEAILHPADPDGRRGDRHGRHTGGHCACLTPAHVHHHRGRGQRRLHRHAGPGRRRRRPALPTG

SEQ ID NO: 26773 - protein, 92 aa, Homo sapiens
  REGION 1..92: note = ENSP00000434886
  VARIANT 1: note = Any amino acid
XFVPFRELKNQRTAQGAPGIHHAASPVAANLCDPARHAQHTRIPCGAGQVRAGRGPEAGGGVLQPQRPAPEKPGCPCRRGQPRLHTVKMWRA

SEQ ID NO: 26774 - protein, 564 aa, Homo sapiens
  REGION 1..564: note = ENSP00000329748
MDSRYNSTAGIGDLNQLSAAIPATRVEVSVSCRNLLDRDTFSKSDPICVLYVQGVGNKEWREFGRTEVIDNTLNPDFVRKFILDYFFEERENLRFDLYDVDSKSPNLSKHDFLGQVFCTLGEIVGSQGSRLEKPIVGIPGKKCGTIILTAEELNCCRDAVLMQFCANKLDKKDFFGKSDPFLVFYRSNEDGSFTICHKTEVVKNTLNPVWQAFKISVRALCNGDYDRTIKVEVYDWDRDGSHDFIGEFTTSYRELSRGQSQFNVYEVVNPKKKGKKKKYTNSGTVTLLSFLVETEVSFLDYIKGGTQINFTVAIDFTASNGNPAQPTSLHYMNPYQLNAYGMALKAVGEIVQDYDSDKMFPALGFGAKLPPDGRISHEFALNGNPQNPYCDGIEGVMEAYYRSLKSVQLYGPTNFAPVINHVARYASSVKDGSQYFVLLIVTDGVISDMAQTKESIVNASKLPMSIIIVGVGPAEFDAMVELDGDDVRVSSRGKYAERDIVQFVPFRDYIDRSGNHILSMARLAKDVLAEIPEQFLSYMRARGIKPSPAPPPYTPPTHVLQTQI

SEQ ID NO: 26775 - protein, 233 aa, Homo sapiens
  REGION 1..233: note = ENSP00000439237
MNPYQLNAYGMALKAVGEIVQDYDSDKMFPALGFGAKLPPDGRISHEFALNGNPQNPYCDGIEGVMEAYYRSLKSVQLYGPTNFAPVINHVARYASSVKDGSQYFVLLIVTDGVISDMAQTKESIVNASKLPMSIIIVGVGPAEFDAMVELDGDDVRVSSRGKYAERDIVQFVPFRDYIDRSGNHILSMARLAKDVLAEIPEQFLSYMRARGIKPSPAPPPYTPPTHVLQTQI

SEQ ID NO: 26776 - protein, 552 aa, Homo sapiens
  REGION 1..552: note = ENSP00000353633
MHFKCSSLYMLYLTEVETNWINLLDRDTFSKSDPICVLYVQGVGNKEWREFGRTEVIDNTLNPDFVRKFILDYFFEERENLRFDLYDVDSKSPNLSKHDFLGQVFCTLGEIVGSQGSRLEKPIVGIPGKKCGTIILTAEELNCCRDAVLMQFCANKLDKKDFFGKSDPFLVFYRSNEDGSFTICHKTEVVKNTLNPVWQAFKISVRALCNGDYDRTIKVEVYDWDRDGSHDFIGEFTTSYRELSRGQSQFNVYEVVNPKKKGKKKKYTNSGTVTLLSFLVETEVSFLDYIKGGTQINFTVAIDFTASNGNPAQPTSLHYMNPYQLNAYGMALKAVGEIVQDYDSDKMFPALGFGAKLPPDGRISHEFALNGNPQNPYCDGIEGVMEAYYRSLKSVQLYGPTNFAPVINHVARYASSVKDGSQYFVLLIVTDGVISDMAQTKESIVNASKLPMSIIIVGVGPAEFDAMVELDGDDVRVSSRGKYAERDIVQFVPFRDYIDRSGNHILSMARLAKDVLAEIPEQFLSYMRARGIKPSPAPPPYTPPTHVLQTQI

SEQ ID NO: 26777 - protein, 12 aa, Homo sapiens
  REGION 1..12: note = ENSP00000447761
MQFCANKLDKKD

SEQ ID NO: 26778 - protein, 553 aa, Homo sapiens
  REGION 1..553: note = ENSP00000373343
MSLGGASERSVPATKIEITVSCRNLLDLDTFSKSDPMVVLYTQSRASQEWREFGRTEVIDNTLNPDFVRKFVLDYFFEEKQNLRFDVYNVDSKTNISKPKDFLGQAFLALGEVIGGQGSRVERTLTGVPGKKCGTILLTAEELSNCRDIATMQLCANKLDKKDFFGKSDPFLVFYRSNEDGTFTICHKTEVVKNTLNPVWQPFSIPVRALCNGDYDRTVKIDVYDWDRDGSHDFIGEFTTSYRELSKAQNQFTVYEVLNPRKKCKKKKYVNSGTVTLLSFSVDSEFTFVDYIKGGTQLNFTVAIDFTASNGNPLQPTSLHYMSPYQLSAYAMALKAVGEIIQDYDSDKLFPAYGFGAKLPPEGRISHQFPLNNNDEDPNCAGIEGVLESYFQSLRTVQLYGPTYFAPVINQVARAAAKISDGSQYYVLLIITDGVISDMTQTKEAIVSASSLPMSIIIVGVGPAMFEAMEELDGDDVRVSSRGRYAERDIVQFVPFRDYVDRSGNQVLSMARLAKDVLAEIPEQLLSYMRTRDIQPRPPPPANPSPIPAPEQP

SEQ ID NO: 26779 - protein, 503 aa, Homo sapiens
  REGION 1..503: note = ENSP00000373342
MSLGGASERSVPATKIEITVSCRNLLDLDTFSKSDPMVVLYTQSRASQEWREFGRTEVIDNTLNPDFVRKFVLDYFFEEKQNLRFDVYNVDSKTNISKPKDFLGQAFLALGEVIGGQGSRVERTLTGVPGKKCGTILLTAEELSNCRDIATMQLCANKLDKKDFFGKSDPFLVFYRSNEDGTFTICHKTEVVKNTLNPVWQPFSIPVRALCNGDYDRTVKIDVYDWDRDGSHDFIGEFTTSYRELSKAQNQFTVYEVLNPRKKCKKKKYVNSGTVTLLSFSVDSEFTFVDYIKGGTQLNFTVAIDFTASNGNPLQPTSLHYMSPYQLSAYAMALKAVGEIIQDYDSDKLFPAYGFGAKLPPEGRISHQFPLNNNDEDPNCAGIEGVLESYFQSLRTVQLYGPTYFAPVINQVARAAAKISDGSQYYVLLIITDGVISDMTQTKEAIVSASSLPMSIIIVGVGPAMFEAMEELDGDDVRVSSRGRYAERDIVQEGCCSLGTSVV

SEQ ID NO: 26780 - protein, 196 aa, Homo sapiens
  REGION 1..196: note = ENSP00000273027
  VARIANT 1: note = Any amino acid
XRTSSQYMRFLTLGRNVRRRNMSTQELTQLNFTVAIDFTASNGNPLQPTSLHYMSPYQLSAYAMALKAVGEIIQDYDSDKLFPAYGFGAKLPPEGRISHQFPLNNNDEDPNCAGIEGVLESYFQSLRTVQLYGPTYFAPVINQVARAAAKISDGSQYYVLLIITDGVISDMTQTKEAIVSASSLPMSIIIVGVGPA

SEQ ID NO: 26781 - protein, 503 aa, Homo sapiens [sequence omitted]

SEQ ID NO: 26782 - protein, 476 aa, Homo sapiens
  REGION 1..476: note = ENSP00000265394
MVGAMWKVIVSLVLLMPGPCDGLFRSLYRSVSMPPKGDSGQPLFLTPYIEAGKIQKGRELSLVGPFPGLNMKSYAGFLTVNKTYNSNLFFWFFPAQIQPEDAPVVLWLQGGPGGSSMFGLFVEHGPYVVTSNMTLRDRDFPWTTTLSMLYIDNPVGTGFSFTDDTHGYAVNEDDVARDLYSALIQFFQIFPEYKNNDFYVTGESYAGKYVPAIAHLIHSLNPVREVKINLNGIAIGDGYSDPESIIGGYAEFLYQIGLLDEKQKKYFQKQCHECIEHIRKQNWFEAFEILDKLLDGDLTSDPSYFQNVTGCSNYYNFLRCTEPEDQLYYVKFLSLPEVRQAIHVGNQTFNDGTIVEKYLREDTVQSVKPWLTEIMNNYKVLIYNGQLDIIVAAALTERSLMGMDWKGSQEYKKAEKKVWKIFKSDSEVAGYIRQAGDFHQVIIRGGGHILPYDQPLRAFDMINRFIYGKGWDPYVG

SEQ ID NO: 26783 - protein, 476 aa, Homo sapiens; identical to SEQ ID NO: 26782
  REGION 1..476: note = ENSP00000379572

SEQ ID NO: 26784 - protein, 180 aa, Homo sapiens
  REGION 1..180: note = ENSP00000397327
  VARIANT 1: note = Any amino acid
XKYFQKQCHECIEHIRKQNWFEAFEEPEDQLYYVKFLSLPEVRQAIHVGNQTFNDGTIVEKYLREDTVQSVKPWLTEIMNNYKVLIYNGQLDIIVAAALTERSLMGMDWKGSQEYKKAEKKVWKIFKSDSEVAGYIRQAGDFHQVIIRGGGHILPYDQPLRAFDMINRFIYGKGWDPYVG

SEQ ID NO: 26785 - protein, 141 aa, Homo sapiens
  REGION 1..141: note = ENSP00000403580
IIGGYAEFLYQIGLLDEKQKKYFQKQCHECIEHIRKQNWFEAFEVLIYNGQLDIIVAAALTERSLMGMDWKGSQEYKKAEKKVWKIFKSDSEVAGYIRQAGDFHQVIIRGGGHILPYDQPLRAFDMINRFIYGKGWDPYVG

SEQ ID NO: 26786 - protein, 476 aa, Homo sapiens; identical to SEQ ID NO: 26782
  REGION 1..476: note = ENSP00000387164

SEQ ID NO: 26787 - protein, 244 aa, Homo sapiens
  REGION 1..244: note = ENSP00000409036
MKSYAGFLTVNKTYNSNLFFWFFPAQIQPEDAPVVLWLQGGPGGSSMFGLFVEHGPYVVTSNMTLRDRDFPWTTTLSMLYIDNPVGTGFSFTDDTHGYAVNEDDVARDLYSALIQFFQIFPEYKNNDFYVTGESYAGKYVPAIAHLIHSLNPVREVKINLNGIAIGDGYSDPESIIGGYAEFLYQIGLLDEKQKKYFQKQCHECIEHIRKQNWFEAFEILDKLLDGDLTSDPSYFQNVTGCSNY

SEQ ID NO: 26788 - protein, 100 aa, Homo sapiens
  REGION 1..100: note = ENSP00000417015
MFGLFVEHGPYVVTSNMTLRDRDFPWTTTLSMLYIDNPVGTGFSFTDDTHGYAVNEDDVARDLYSALIQFFQIFPEYKNNDFYVTGESYAGKYVPAIAHL

SEQ ID NO: 26789 - protein, 141 aa, Homo sapiens
  REGION 1..141: note = ENSP00000395690
MKSYAGFLTVNKTYNSNLFFWFFPAQIQPEDAPVVLWLQGGPGGSSMFGLFVEHGPYVVTSNMTLRDRDFPWTTTLSMLYIDNPVGTGFSFTDDTHGYAVNEDDVARDLYSALIQFFQIFPEYKNNDFYVTGESYAGKYVP

SEQ ID NO: 26790 - protein, 52 aa, Homo sapiens
  REGION 1..52: note = ENSP00000413287
MVGAMWKVIVSLVLLMPGPCDGLFRSLYRSVSMPPKGDSGQPLFLTPYIEAG

SEQ ID NO: 26791 - protein, 43 aa, Homo sapiens
  REGION 1..43: note = ENSP00000412857
MVGAMWKVIVSLVLLMPGPCDGLFRSLYRSVSMPPKGDSGQPL

SEQ ID NO: 26792 - protein, 6 aa, Homo sapiens
  REGION 1..6: note = ENSP00000416555
MVGAMW

SEQ ID NO: 26793 - protein, 519 aa, Homo sapiens
  REGION 1..519: note = ENSP00000481956
MDAVLEPFPADRLFPGSSFLDLGDLNESDFLNNAHFPEHLDHFTENMEDFSNDLFSSFFDDPVLDEKSPLLDMELDSPTPGIQAEHSYSLSGDSAPQSPLVPIKMEDTTQDAEHGAWALGHKLCSIMVKQEQSPELPVDPLAAPSAMAAAAAMATTPLLGLSPLSRLPIPHQAPGEMTQLPVIKAEPLEVNQFLKVTPEDLVQMPPTPPSSHGSDSDGSQSPRSLPPSSPVRPMARSSTAISTSPLLTAPHKLQGTSGPLLLTEEEKRTLIAEGYPIPTKLPLTKAEEKALKRVRRKIKNKISAQESRRKKKEYVECLEKKVETFTSENNELWKKVETLENANRTLLQQLQKLQTLVTNKISRPYKMAATQTGTCLMVAALCFVLVLGSLVPCLPEFSSGSQTVKEDPLAADGVYTASQMPSRSLLFYDDGAGLWEDGRSTLLPMEPPDGWEINPGGPAEQRPRDHLQHDHLDSTHETTKYLSEAWPKDGGNGTSPDFSHSKEWFHDRDLGPNTTIKLS

SEQ ID NO: 26794 - protein, 105 aa, Homo sapiens
  REGION 1..105: note = ENSP00000431677
MEDFSNDLFSSFFDDPVLDEKSPLLDMELDSPTPGIQAEHSYSLSGDSAPQSPLVPIKMEDTTQDAEHGAWALGHKLCSIMVKQEQSPELPVDPLAAPSAMAAAA

SEQ ID NO: 26795 - protein, 123 aa, Homo sapiens
  REGION 1..123: note = ENSP00000436574
ISTSPLLTAPHKLQGTSGPLLLTEEEKRTLIAEGYPIPTKLPLTKAEEKALKRVRRKIKNKISAQESRRKKKEYVECLEKKVETFTSENNELWKKVETLENANSFSSGIQPLLCSLIGLENPT

SEQ ID NO: 26796 - protein, 520 aa, Homo sapiens
  REGION 1..520: note = ENSP00000329140
MEVLESGEQGVLQWDRKLSELSEPGDGEALMYHTHFSELLDEFSQNVLGQLLNDPFLSEKSVSMEVEPSPTSPAPLIQAEHSYSLCEEPRAQSPFTHITTSDSFNDDEVESEKWYLSTDFPSTSIKTEPVTDEPPPGLVPSVTLTITAISTPLEKEEPPLEMNTGVDSSCQTIIPKIKLEPHEVDQFLNFSPKEAPVDHLHLPPTPPSSHGSDSEGSLSPNPRLHPFSLPQTHSPSRAAPRAPSALSSSPLLTAPHKLQGSGPLVLTEEEKRTLIAEGYPIPTKLPLSKSEEKALKKIRRKIKNKISAQESRRKKKEYMDSLEKKVESCSTENLELRKKVEVLENTNRTLLQQLQKLQTLVMGKVSRTCKLAGTQTGTCLMVVVLCFAVAFGSFFQGYGPYPSATKMALPSQHSLQEPYTASVVRSRNLLIYEEHSPPEESSSPGSAGELGGWDRGSSLLRVSGLESRPDVDLPHFIISNETSLEKSVLLELQQHLVSAKLEGNETLKVVELDRRVNTTF

SEQ ID NO: 26797 - protein, 460 aa, Homo sapiens
  REGION 1..460: note = ENSP00000403550
MEVLESGEQGVLQWDRKLSELSEPGDGEALMYHTHFSELLDEFSQNVLGQLLNDPFLSEKSVSMEVEPSPTSPAPLIQAEHSYSLCEEPRAQSPFTHITTSDSFNDDEVESEKWYLSTDFPSTSIKTEPVTDEPPPGLVPSVTLTITAISTPLEKEEPPLEMNTGVDSSCQTIIPKIKLEPHEVDQFLNFSPKEAPVDHLHLPPTPPSSHGSDSEGSLSPNPRLHPFSLPQTHSPSRAAPRAPSALSSSPLLTAPHKLQGSGPLVLTEEEKRTLIAEGYPIPTKLPLSKSEEKALKKIRRKIKNKISAQESRRKKKEYMDSLEKKVESCSTENLELRKKVEVLENTNRTLLQQLQKLQTLVMGKVSRTCKLAGTQTGTCLMVVVLCFAVAFGSFFQGYGPYPSATKMALPSQHSLQEPYTASVGKTACGKLGRVLFYFPRAGFLSLPKGIFCESPMFKKW

SEQ ID NO: 26798 - protein, 248 aa, Homo sapiens
  REGION 1..248: note = ENSP00000410314
MEVLESGEQGVLQWDRKLSELSEPGDGEALMYHTHFSELLDEFSQNVLGQLLNDPFLSEKSVSMEVEPSPTSPAPLIQAEHSYSLCEEPRAQSPFTHITTSDSFNDDEVESEKWYLSTDFPSTSIKTEPVTDEPPPGLVPSVTLTITAISTPLEKEEPPLEMNTGVDSSCQTIIPKIKLEPHEVDQFLNFSPKEGLSALPVSLWVMDMVSGSTEREYGERAGMSLYHRCCSWLYEIALFLKNKNFASK

SEQ ID NO: 26799 - protein, 185 aa, Homo sapiens
  REGION 1..185: note = ENSP00000388917
MEVEPSPTSPAPLIQAEHSYSLCEEPRAQSPFTHITTSDSFNDDEVESEKWYLSTDFPSTSIKTEPVTDEPPPGLVPSVTLTITAISTPLEKEEPPLEMNTGVDSSCQTIIPKIKLEPHEVDQFLNFSPKEGLSALPVSLWVMDMVSGSTEREYGERAGMSLYHRCCSWLYEIALFLKNKNFASK

SEQ ID NO: 26800 - protein, 239 aa, Homo sapiens
  REGION 1..239: note = ENSP00000402889
NLPRRPRRLSSRLSTATPCARSLGPSRPSPTLPPVTASMTICYINSKWMYGPPSLCLGFASYEYCIFNPRLFEKNLLVSGPAWFKTRVVQGPTAYVFFSYEVESEKWYLSTDFPSTSIKTEPVTDEPPPGLVPSVTLTITAISTPLEKEEPPLEMNTGVDSSCQTIIPKIKLEPHEVDQFLNFSPKEGLSALPVSLWVMDMVSGSTEREYGERAGMSLYHRCCSWLYEIALFLKNKNFA

SEQ ID NO: 26801 - protein, 150 aa, Homo sapiens
  REGION 1..150: note = ENSP00000478432
MEVLESGEQGVLQWDRKLSELSEPGDGEALMYHTHFSELLDEFSQNVLGQLLNDPFLSEKSVSMEVEPSPTSPAPLIQAEHSYSLCEEPRAQSPFTHITTSDSFNDDEVESEKWYLSTDFPSTSICHSDHHSHLHPVGKGGTSSGNEHWG

SEQ ID NO: 26802 - protein, 175 aa, Homo sapiens [sequence omitted]

SEQ ID NO: 26803 - protein, 1036 aa, Homo sapiens
  REGION 1..1036: note = ENSP00000280527
MYLVAGDRGLAGCGHLLVSLLGLLLLLARSGTRALVCLPCDESKCEEPRNCPGSIVQGVCGCCYTCASQRNESCGGTFGIYGTCDRGLRCVIRPPLNGDSLTEYEAGVCEDENWTDDQLLGFKPCNENLIAGCNIINGKCECNTIRTCSNPFEFPSQDMCLSALKRIEEEKPDCSKARCEVQFSPRCPEDSVLIEGYAPPGECCPLPSRCVCNPAGCLRKVCQPGNLNILVSKASGKPGECCDLYECKPVFGVDCRTVECPPVQQTACPPDSYETQVRLTADGCCTLPTRCECLSGLCGFPVCEVGSTPRIVSRGDGTPGKCCDVFECVNDTKPACVFNNVEYYDGDMFRMDNCRFCRCQGGVAICFTAQCGEINCERYYVPEGECCPVCEDPVYPFNNPAGCYANGLILAHGDRWREDDCTFCQCVNGERHCVATVCGQTCTNPVKVPGECCPVCEEPTIITVDPPACGELSNCTLTGKDCINGFKRDHNGCRTCQCINTEELCSERKQGCTLNCPFGFLTDAQNCEICECRPRPKKCRPIICDKYCPLGLLKNKHGCDICRCKKCPELSCSKICPLGFQQDSHGCLICKCREASASAGPPILSGTCLTVDGHHHKNEESWHDGCRECYCLNGREMCALITCPVPACGNPTIHPGQCCPSCADDFVVQKPELSTPSICHAPGGEYFVEGETWNIDSCTQCTCHSGRVLCETEVCPPLLCQNPSRTQDSCCPQCTDQPFRPSLSRNNSVPNYCKNDEGDIFLAAESWKPDVCTSCICIDSVISCFSESCPSVSCERPVLRKGQCCPYCIEDTIPKKVVCHFSGKAYADEERWDLDSCTHCYCLQGQTLCSTVSCPPLPCVEPINVEGSCCPMCPEMYVPEPTNIPIEKTNHRGEVDLEVPLWPTPSENDIVHLPRDMGHLQVDYRDNRLHPSEDSSLDSIASVVVPIIICLSIIIAFLFINQKKQWIPLLCWYRTPTKPSSLNNQLVSVDCKKGTRVQVDSSQRMLRIAEPDARFSGFYSMQKQNHLQADNFYQTV

SEQ ID NO: 26804 - protein, 222 aa, Homo sapiens
  REGION 1..222: note = ENSP00000407636
CPGSIVQGVCGCCYTCASQRNESCGGTFGIYGTCDRGLRCVIRPPLNGDSLTEYEAGVCEEEKPDCSKARCEVQFSPRCPEDSVLIEGYAPPGECCPLPSRCVCNPAGCLRKVCQPGNLNILVSKASGKPGECCDLYECKPVFGVDCRTVECPPVQQTACPPDSYETQVRLTADGCCTLPTRCECLSGLCGFPVCEVGSTPRIVSRGDGTPGKCCDVFECVN

SEQ ID NO: 26805 - protein, 55 aa, Homo sapiens
  REGION 1..55: note = ENSP00000415706
  VARIANT 1: note = Any amino acid
XGCCYTCASQRNESCGGTFGIYGTCDRGLRCVIRPPLNGDSLTEYEAGVCEAAGY

SEQ ID NO: 26806 - protein, 175 aa, Homo sapiens
  REGION 1..175: note = ENSP00000403120
ALITCPVPACGNPTIHPGQCCPSCADDFVVQKPELSTPSICHAPGGEYFVEGETWNIDSCTQCTCHSGRVLCETEVCPPLLCQNPSRTQDSCCPQCTDQPFRPSLSRNNSVPNYCKNDEGDIFLAAESWKPDVCTSCICIDSVISCFSESCPSVSCERPVLRKGQCCPYCIGGQT

SEQ ID NO: 26807 - protein, 51 aa, Homo sapiens
  REGION 1..51: note = ENSP00000480938
  VARIANT 1: note = Any amino acid
XGCCYTCASQRNESCGGTFGIYGTCDRGLRCVIRPPLNGDSLTEYEAGVCE

SEQ ID NO: 26808 - protein, 60 aa, Homo sapiens
  REGION 1..60: note = ENSP00000480932
CPGSIVQGVCGCCYTCASQRNESCGGTFGIYGTCDRGLRCVIRPPLNGDSLTEYEAGVCE

SEQ ID NO: 26809 - protein, 110 aa, Homo sapiens
  REGION 1..110: note = ENSP00000478123
MYLVAGDRGLAGCGHLLVSLLGLLLLLARSGTRALVCLPCDESKCEEPRNCPGSIVQGVCGCCYTCASQRNESCGGTFGIYGTCDRGLRCVIRPPLNGDSLTEYEAGVCE

SEQ ID NO: 26810 - protein, 101 aa, Homo sapiens
  REGION 1..101: note = ENSP00000238892
MVCEKCEKKLGTVITPDTWKDGARNTTESGGRKLNENKALTSKKARFDPYGKNKFSTCRICKSSVHQPGSHYCQGCAYKKGICAMCGKKVLDTKNYKQTSV

SEQ ID NO: 26811 - protein, 500 aa, Homo sapiens
  REGION 1..500: note = ENSP00000262207
MKCTAREWLRVTTVLFMARAIPAMVVPNATLLEKLLEKYMDEDGEWWIAKQRGKRAITDNDMQSILDLHNKLRSQVYPTASNMEYMTWDVELERSAESWAESCLWEHGPASLLPSIGQNLGAHWGRYRPPTFHVQSWYDEVKDFSYPYEHECNPYCPFRCSGPVCTHYTQVVWATSNRIGCAINLCHNMNIWGQIWPKAVYLVCNYSPKGNWWGHAPYKHGRPCSACPPSFGGGCRENLCYKEGSDRYYPPREEETNEIERQQSQVHDTHVRTRSDDSSRNEVISAQQMSQIVSCEVRLRDQCKGTTCNRYECPAGCLDSKAKVIGSVHYEMQSSICRAAIHYGIIDNDGGWVDITRQGRKHYFIKSNRNGIQTIGKYQSANSFTVSKVTVQAVTCETTVEQLCPFHKPASHCPRVYCPRNCMQANPHYARVIGTRVYSDLSSICRAAVHAGVVRNHGGYVDVMPVDKRKTYIASFQNGIFSESLQNPPGGKAFRVFAVV

SEQ ID NO: 26812 - protein, 105 aa, Homo sapiens
  REGION 1..105: note = ENSP00000430504
MKCTAREWLRVTTVLFMARAIPAMVVPNATLLEKLLEKYMDEDGEWWIAKQRGKRAITDNDMQSILDLHNKLRSQVYPTASNMEYMTWDVELERSAESWAESCLW

SEQ ID NO: 26813 - protein, 312 aa, Homo sapiens
  REGION 1..312: note = ENSP00000430105
MNIWGQIWPKAVYLVCNYSPKGNWWGHAPYKHGRPCSACPPSFGGGCRENLCYKEGSDRYYPPREEETNEIERQQSQVHDTHVRTRSDDSSRNEVISAQQMSQIVSCEVRLRDQCKGTTCNRYECPAGCLDSKAKVIGSVHYEMQSSICRAAIHYGIIDNDGGWVDITRQGRKHYFIKSNRNGIQTIGKYQSANSFTVSKVTVQAVTCETTVEQLCPFHKPASHCPRVYCPRNCMQANPHYARVIGTRVYSDLSSICRAAVHAGVVRNHGGYVDVMPVDKRKTYIASFQNGIFSESLQNPPGGKAFRVFAVV

SEQ ID NO: 26814 - protein, 314 aa, Homo sapiens
  REGION 1..314: note = ENSP00000429746
MNMNATHIVHSGVLALYVHIIHRGNWWGHAPYKHGRPCSACPPSFGGGCRENLCYKEGSDRYYPPREEETNEIERQQSQVHDTHVRTRSDDSSRNEVISAQQMSQIVSCEVRLRDQCKGTTCNRYECPAGCLDSKAKVIGSVHYEMQSSICRAAIHYGIIDNDGGWVDITRQGRKHYFIKSNRNGIQTIGKYQSANSFTVSKVTVQAVTCETTVEQLCPFHKPASHCPRVYCPRNCMQANPHYARVIGTRVYSDLSSICRAAVHAGVVRNHGGYVDVMPVDKRKTYIASFQNGIFSESLQNPPGGKAFRVFAVV

SEQ ID NO: 26815 - protein, 497 aa, Homo sapiens
  REGION 1..497: note = ENSP00000262424
MSCVLGGVIPLGLLFLVCGSQGYLLPNVTLLEELLSKYQHNESHSRVRRAIPREDKEEILMLHNKLRGQVQPQASNMEYMTWDDELEKSAAAWASQCIWEHGPTSLLVSIGQNLGAHWGRYRSPGFHVQSWYDEVKDYTYPYPSECNPWCPERCSGPMCTHYTQIVWATTNKIGCAVNTCRKMTVWGEVWENAVYFVCNYSPKGNWIGEAPYKNGRPCSECPPSYGGSCRNNLCYREETYTPKPETDEMNEVETAPIPEENHVWLQPRVMRPTKPKKTSAVNYMTQVVRCDTKMKDRCKGSTCNRYQCPAGCLNHKAKIFGTLFYESSSSICRAAIHYGILDDKGGLVDITRNGKVPFFVKSERHGVQSLSKYKPSSSFMVSKVKVQDLDCYTTVAQLCPFEKPATHCPRIHCPAHCKDEPSYWAPVFGTNIYADTSSICKTAVHAGVISNESGGDVDVMPVDKKKTYVGSLRNGVQSESLGTPRDGKAFRIFAVRQ

SEQ ID NO: 26816 - protein, 18 aa, Homo sapiens
  REGION 1..18: note = ENSP00000456554
MSCVLGGVIPLGLLFLVC

SEQ ID NO: 26817 - protein, 496 aa, Homo sapiens
  REGION 1..496: note = ENSP00000457183
MSCVLGGVIPLGLLFLVCGSQGYLLPNVTLLEELLSKYQHNESHSRVRRAIPREDKEEILMLHNKLRGQVQPQASNMEYMTWDDELEKSAAAWASQCIWEHGPTSLLVSIGQNLGAHWGRYRSPGFHVQSWYDEVKDYTYPYPSECNPWCPERCSGPMCTHYTQIVWATTNKIGCAVNTCRKMTVWGEVWENAVYFVCNYSPKGNWIGEAPYKNGRPCSECPPSYGGSCRNNLCYRETYTPKPETDEMNEVETAPIPEENHVWLQPRVMRPTKPKKTSAVNYMTQVVRCDTKMKDRCKGSTCNRYQCPAGCLNHKAKIFGTLFYESSSSICRAAIHYGILDDKGGLVDITRNGKVPFFVKSERHGVQSLSKYKPSSSFMVSKVKVQDLDCYTTVAQLCPFEKPATHCPRIHCPAHCKDEPSYWAPVFGTNIYADTSSICKTAVHAGVISNESGGDVDVMPVDKKKTYVGSLRNGVQSESLGTPRDGKAFRIFAVRQ

SEQ ID NO: 26818 - protein, 449 aa, Homo sapiens
  REGION 1..449: note = ENSP00000457655
MSCVLGGVIPLGLLFLVCGSQGYLLPNVTLLEELLSKYQHNESHSRVRRAIPREDKEEILMLHNKLRGQVQPQASNMEYMTWDDELEKSAAAWASQCIWEHGPTSLLVSIGQNLGAHWGRYRSPGFHVQSWYDEVKDYTYPYPSECNPWCPERCSGPMCTHYTQIVWATTNKIGCAVNTCRKMTVWGEVWENAVYFVCNYSPKGNWIGEAPYKNGRPCSECPPSYGGSCRNNLCYREETYTPKPETDEMNEVETAPIPEENHVWLQPRVMRPTKPKKTSAVNYMTQVVRCDTKMKDRCKGSTCNRYQCPAGCLNHKAKIFGTLFYESSSSICRAAIHYGILDDKGGLVDITRNGKVPFFVKSERHGVQSLSKYKPSSSFMVSKVKVQDLDCYTTVAQLCPFEKPATHCPRIHCPAHCKDEPSYWAPVFGTNIYADVSRMHFQQLSRKAC

SEQ ID NO: 26819 - protein, 120 aa, Homo sapiens
  REGION 1..120: note = ENSP00000454858
MSCVLGGVIPLGLLFLVCGSQGYLLPNVTLLEELLSKYQHNESHSRVRRAIPREDKEEILMLHNKLRGQVQPQASNMEYMTWDDELEKSAAAWASQCIWEHGPTSLLVSIGQNLGAHWGR

SEQ ID NO: 26820 - protein, 209 aa, Homo sapiens
  REGION 1..209: note = ENSP00000456952
MCTHYTQIVWATTNKIGCAVNTCRKMTVWGEVWENAVYFVCNYSPKGNWIGEAPYKNGRPCSECPPSYGGSCRNNLCYREETYTPKPETDEMNEVETAPIPEENHVWLQPRVMRPTKPKKTSAVNYMTQVVRCDTKMKDRCKGSTCNRYQCPAGCLNHKAKIFGTLFYESSSSICRAAIHYGILDDKGGLVDITRNGKVPFFVKSERHG

SEQ ID NO: 26821 - protein, 111 aa, Homo sapiens
  REGION 1..111: note = ENSP00000457259
MCTHYTQIVWATTNKIGCAVNTCRKMTVWGEVWENAVYFVCNYSPKGNWIGEAPYKNGRPCSECPPSYGGSCRNNLCYREETYTPKPETDEMNEVETAPIPEENHVWLQPR

SEQ ID NO: 26822 - protein, 43 aa, Homo sapiens
  REGION 1..43: note = ENSP00000463171
  VARIANT 1: note = Any amino acid
XKTAVHAGVISNESGGDVDVMPVDKKKTYVGSLRNGVQSERNM

SEQ ID NO: 26823 - protein, 422 aa, Homo sapiens
  REGION 1..422: note = ENSP00000376188
MPAGRRGPAAQSARRPPPLLPLLLLLCVLGAPRAGSGAHTAVISPQDPTLLIGSSLLATCSVHGDPPGATAEGLYWTLNGRRLPPELSRVLNASTLALALANLNGSRQRSGDNLVCHARDGSILAGSCLYVGLPPEKPVNISCWSKNMKDLTCRWTPGAHGETFLHTNYSLKYKLRWYGQDNTCEEYHTVGPHSCHIPKDLALFTPYEIWVEATNRLGSARSDVLTLDILDVVTTDPPPDVHVSRVGGLEDQLSVRWVSPPALKDFLFQAKYQIRYRVEDSVDWKVVDDVSNQTSCRLAGLKPGTVYFVQVRCNPFGIYGSKKAGIWSEWSHPTAASTPRSERPGPGGGACEPRGGEPSSGPVRRELKQFLGWLKKHAYCSNLSFRLYDQWRAWMQKSHKTRNQDEGILPSGRRGTARGPAR

SEQ ID NO: 26824 - protein, 173 aa, Homo sapiens
  REGION 1..173: note = ENSP00000470625
  VARIANT 1: note = Any amino acid
XQDNTCEEYHTVGPHSCHIPKDLALFTPYEIWVEATNRLGSARSDVLTLDILDVVTTDPPPDVHVSRVGGLEDQLSVRWVSPPALKDFLFQAKYQIRYRVEDSVDWKVVDDVSNQTSCRLAGLKPGTVYFVQVRCNPFGIYGSKKAGIWKRPGPGGGACEPRGGEPSSGPVRR

SEQ ID NO: 26825 - protein, 524 aa, Homo sapiens
  REGION 1..524: note = ENSP00000408445
YALRDRQGNAIGVTACDIDGDGREEIYFLNTNNAFSGVATYTDKLFKFRNNRWEDILSDEVNVARGVASLFAGRSVACVDRKGSGRYSIYIANYAYGNVGPDALIEMDPEASDLSRGILALRDVAAEAGVSKYTGGRGVSVGPILSSSASDIFCDNENGPNFLFHNRGDGTFVDAAASAGVDDPHQHGRGVALADFNRDGKVDIVYGNWNGPHRLYLQMSTHGKVRFRDIASPKFSMPSPVRTVITADFDNDQELEIFFNNIAYRSSSANRLFRVIRREHGDPLIEELNPGDALEPEGRGTGGVVTDFDGDGMLDLILSHGESMAQPLSVFRGNQGFNNNWLRVVPRTRFGAFARGAKVVLYTKKSGAHLRIIDGGSGYLCEMEPVAHFGLGKDEASSVEVTWPDGKMVSRNVASGEMNSVLEILYPRDEDTLQDPAPLETPMNASSSHSCALETSPYVSTPMEATGAGPTRSAVGATSPTRMAQPAWGLSASHRAPAPPPPPLLLPLPLLLPLLELPLLHRSS

SEQ ID NO: 26826 - protein, 661 aa, Homo sapiens
  REGION 1..661: note = ENSP00000359629
MAPSADPGMSRMLPFLLLLWFLPITEGSQRAEPMFTAVTNSVLPPDYDSNPTQLNYGVAVTDVDHDGDFEIVVAGYNGPNLVLKYDRAQKRLVNIAVDERSSPYYALRDRQGNAIGVTACDIDGDGREEIYFLNTNNAFSGVATYTDKLFKFRNNRWEDILSDEVNVARGVASLFAGRSVACVDRKGSGRYSIYIANYAYGNVGPDALIEMDPEASDLSRGILALRDVAAEAGVSKYTGGRGVSVGPILSSSASDIFCDNENGPNFLFHNRGDGTFVDAAASAGVDDPHQHGRGVALADFNRDGKVDIVYGNWNGPHRLYLQMSTHGKVRFRDIASPKFSMPSPVRTVITADFDNDQELEIFFNNIAYRSSSANRLFRVIRREHGDPLIEELNPGDALEPEGRGTGGVVTDFDGDGMLDLILSHGESMAQPLSVFRGNQGFNNNWLRVVPRTRFGAFARGAKVVLYTKKSGAHLRIIDGGSGYLCEMEPVAHFGLGKDEASSVEVTWPDGKMVSRNVASGEMNSVLEILYPRDEDTLQDPAPLECGQGFSQQENGHCMDTNECIQFPFVCPRDKPVCVNTYGSYRCRTNKKCSRGYEPNEDGTACVGTLGQSPGPRPTTPTAAAATAAAAAAAGAATAAPVLVDGDLNLGSVVKESCEPSC

SEQ ID NO: 26827 - protein, 79 aa, Homo sapiens
  REGION 1..79: note = ENSP00000404549
  VARIANT 1: note = Any amino acid
XDEDTLQDPAPLETPMNASSSHSCALETSPYVSTPMEATGAGPTRSAVGATSPTRMAQPAWKEPCYLVSAISLENRMLL

SEQ ID NO: 26828 - protein, 637 aa, Homo sapiens
  REGION 1..637: note = ENSP00000310810
MSRMLPFLLLLWFLPITEGSQRAEPMFTAVTNSVLPPDYDSNPTQLNYGVAVTDVDHDGDFEIVVAGYNGPNLVLKYDRAQKRLVNIAVDERSSPYYALRDRQGNAIGVTACDIDGDGREEIYFLNTNNAFSGVATYTDKLFKFRNNRWEDILSDEVNVARGVASLFAGRSVACVDRKGSGRYSIYIANYAYGNVGPDALIEMDPEASDLSRGILALRDVAAEAGVSKYTGGRGVSVGPILSSSASDIFCDNENGPNFLFHNRGDGTFVDAAASAGVDDPHQHGRGVALADFNRDGKVDIVYGNWNGPHRLYLQMSTHGKVRFRDIASPKFSMPSPVRTVITADFDNDQELEIFFNNIAYRSSSANRLFRVIRREHGDPLIEELNPGDALEPEGRGTGGVVTDFDGDGMLDLILSHGESMAQPLSVFRGNQGFNNNWLRVVPRTRFGAFARGAKVVLYTKKSGAHLRIIDGGSGYLCEMEPVAHFGLGKDEASSVEVTWPDGKMVSRNVASGEMNSVLEILYPRDEDTLQDPAPLECGQGFSQQENGHCMDTNECIQFPFVCPRDKPVCVNTYGSYRCRTNKKCSRGYEPNEDGTACVAQVAFLGGYSSAASRISEPLSRASYLSLGLGLCLQLYAL

SEQ ID NO: 26829 - protein, 645 aa, Homo sapiens
  REGION 1..645: note = ENSP00000359623
MAPSADPGMSRMLPFLLLLWFLPITEGSQRAEPMFTAVTNSVLPPDYDSNPTQLNYGVAVTDVDHDGDFEIVVAGYNGPNLVLKYDRAQKRLVNIAVDERSSPYYALRDRQGNAIGVTACDIDGDGREEIYFLNTNNAFSGVATYTDKLFKFRNNRWEDILSDEVNVARGVASLFAGRSVACVDRKGSGRYSIYIANYAYGNVGPDALIEMDPEASDLSRGILALRDVAAEAGVSKYTGGRGVSVGPILSSSASDIFCDNENGPNFLFHNRGDGTFVDAAASAGVDDPHQHGRGVALADFNRDGKVDIVYGNWNGPHRLYLQMSTHGKVRFRDIASPKFSMPSPVRTVITADFDNDQELEIFFNNIAYRSSSANRLFRVIRREHGDPLIEELNPGDALEPEGRGTGGVVTDFDGDGMLDLILSHGESMAQPLSVFRGNQGFNNNWLRVVPRTRFGAFARGAKVVLYTKKSGAHLRIIDGGSGYLCEMEPVAHFGLGKDEASSVEVTWPDGKMVSRNVASGEMNSVLEILYPRDEDTLQDPAPLECGQGFSQQENGHCMDTNECIQFPFVCPRDKPVCVNTYGSYRCRTNKKCSRGYEPNEDGTACVAQVAFLGGYSSAASRISEPLSRASYLSLGLGLCLQLYAL

SEQ ID NO: 26830 - protein, 586 aa, Homo sapiens
  REGION 1..586: note = ENSP00000008527
MGVNAVHWFRKGLRLHDNPALKECIQGADTIRCVYILDPWFAGSSNVGINRWRFLLQCLEDLDANLRKLNSRLFVIRGQPADVFPRLFKEWNITKLSIEYDSEPFGKERDAAIKKLATEAGVEVIVRISHTLYDLDKIIELNGGQPPLTYKRFQTLISKMEPLEIPVETITSEVIEKCTTPLSDDHDEKYGVPSLEELGFDTDGLSSAVWPGGETEALTRLERHLERKAWVANFERPRMNANSLLASPTGLSPYLRFGCLSCRLFYFKLTDLYKKVKKNSSPPLSLYGQLLWREFFYTAATNNPRFDKMEGNPICVQIPWDKNPEALAKWAEGRTGFPWIDAIMTQLRQEGWIHHLARHAVACFLTRGDLWISWEEGMKVFEELLLDADWSINAGSWMWLSCSSFFQQFFHCYCPVGFGRRTDPNGDYIRRYLPVLRGFPAKYIYDPWNAPEGIQKVAKCLIGVNYPKPMVNHAEASRLNIERMKQIYQQLSRYRGLGLLASVPSNPNGNGGFMGYSAENIPGCSSSGSCSQGSGILHYAHGDSQQTHLLKQGRSSMGTGLSGGKRPSQEEDTQSIGPKVQRQSTN

SEQ ID NO: 26831 - protein, 106 aa, Homo sapiens
  REGION 1..106: note = ENSP00000447738
IERMKQIYQQLSRYRGLGLLASVPSNPNGNGGFMGYSAENIPGCSSSGSCSQGSGILHYAHGDSQQTHLLKQGRSSMGTGLSGGKRPSQEEDTQSIGPKVQRQSTN

SEQ ID NO: 26832 - protein, 175 aa, Homo sapiens
  REGION 1..175: note = ENSP00000436051
MDIAIHHPWIRRPFFPFHSPSRLFDQFFGEHLLESDLFPTSTSLSPFYLRPPSFLRAPSWFDTGLSEMRLEKDRFSVNLDVKHFSPEELKVKVLGDVIEVHGKHEERQDEHGFISREFHRKYRIPADVDPLTITSSLSSDGVLTVNGPRKQVSGPERTIPITREEKPAVTAAPKK

SEQ ID NO: 26833 - protein, 106 aa, Homo sapiens
  REGION 1..106: note = ENSP00000432454
  VARIANT 1: note = Any amino acid
XGPANIDLNLWEIPLNISMPQGLKNNEVLDCFRLLRFSLDEHGFISREFHRKYRIPADVDPLTITSSLSSDGVLTVNGPRKQVSGPERTIPITREEKPAVTAAPKK

SEQ ID NO: 26834 - protein, 108 aa, Homo sapiens
  REGION 1..108: note = ENSP00000435046
MRLEKDRFSVNLDVKHFSPEELKVKVLGDVIEVHGKHEERQDEHGFISREFHRKYRIPADVDPLTITSSLSSDGVLTVNGPRKQVSGPERTIPITREEKPAVTAAPKK

SEQ ID NO: 26835 - protein, 108 aa, Homo sapiens; identical to SEQ ID NO: 26834
  REGION 1..108: note = ENSP00000435411

SEQ ID NO: 26836 - protein, 175 aa, Homo sapiens; identical to SEQ ID NO: 26832
  REGION 1..175: note = ENSP00000433560

SEQ ID NO: 26837 - protein, 175 aa, Homo sapiens; identical to SEQ ID NO: 26832
  REGION 1..175: note = ENSP00000437149

SEQ ID NO: 26838 - protein, 175 aa, Homo sapiens; identical to SEQ ID NO: 26832
  REGION 1..175: note = ENSP00000227251

SEQ ID NO: 26839 - protein, 175 aa, Homo sapiens; identical to SEQ ID NO: 26832
  REGION 1..175: note = ENSP00000434247

SEQ ID NO: 26840 - protein, 108 aa, Homo sapiens; identical to SEQ ID NO: 26834
  REGION 1..108: note = ENSP00000435960

SEQ ID NO: 26841 - protein, 174 aa, Homo sapiens
  REGION 1..174: note = ENSP00000436089
MDIAIHHPWIRRPFFPFHSPSRLFDQFFGEHLLESDLFPTSTSLSPFYLRPPSFLRAPSWFDTGLSEMRLEKDRFSVNLDVKHFSPEELKVKVLGDVIEVHGKHEERQDEHGFISREFHRKYRIPADVDPLTITSSLSSDGVLTVNGPRKQVSGPERTIPITREEKPAVTAAPK

SEQ ID NO: 26842 - protein, 106 aa, Homo sapiens
  REGION 1..106: note = ENSP00000434793
MRLEKDRFSVNLDVKHFSPEELKVKVLGDVIEVHGKHEERQDEHGFISREFHRKYRIPADVDPLTITSSLSSDGVLTVNGPRKQVSGPERTIPITREEKPAVTAAP

SEQ ID NO: 26843 - protein, 129 aa, Homo sapiens
  REGION 1..129: note = ENSP00000431754
MDIAIHHPWIRRPFFPFHSPSRLFDQFFGEHLLESDLFPTSTSLSPFYLRPPSFLRAPSWFDTGLSEMRLEKDRFSVNLDVKHFSPEELKVKVLGDVIEVHGKHEERQDEHGFISREFHRKYRIPADVD

SEQ ID NO: 26844 - protein, 155 aa, Homo sapiens
  REGION 1..155: note = ENSP00000434269
MDIAIHHPWIRRPFFPFHSPSRLFDQFFGEHLLESDLFPTSTSLSPFYLRPPSFLRAPSWFDTGLSEMRLEKDRFSVNLDVKHFSPEELKVKVLGDVIEVHGKHEERQVCSLFFCFLLIHSVHTVIVQVVLSALEAGYIPVPSHNSRDQGLQINV

SEQ ID NO: 26845 - protein, 77 aa, Homo sapiens
  REGION 1..77: note = ENSP00000432182
MDIAIHHPWIRRPFFPFHSPSRLFDQFFGEHLLESDLFPTSTSLSPFYLRPPSFLRAPSWFDTGLSEMRLEKDRFSV

SEQ ID NO: 26846 - protein, 68 aa, Homo sapiens
  REGION 1..68: note = ENSP00000435931
MDIAIHHPWIRRPFFPFHSPSRLFDQFFGEHLLESDLFPTSTSLSPFYLRPPSFLRAPSWFDTGLSEM

SEQ ID NO: 26847 - protein, 175 aa, Homo sapiens; identical to SEQ ID NO: 26832
  REGION 1..175: note = ENSP00000483554

SEQ ID NO: 26848 - protein, 197 aa, Homo sapiens
  REGION 1..197: note = ENSP00000375946
MSSAPAPGPAPASLTLWDEEDFQGRRCRLLSDCANVCERGGLPRVRSVKVENGVWVAFEYPDFQGQQFILEKGDYPRWSAWSGSSSHNSNQLLSFRPVLCANHNDSRVTLFEGDNFQGCKFDLVDDYPSLPSMGWASKDVGSLKVSSGAWVAYQYPGYRGYQYVLERDRHSGEFCTYGELGTQAHTGQLQSIRRVQH

SEQ ID NO: 26849 - protein, 197 aa, Homo sapiens; identical to SEQ ID NO: 26848
  REGION 1..197: note = ENSP00000295728

SEQ ID NO: 26850 - protein, 128 aa, Homo sapiens
  REGION 1..128: note = ENSP00000395120
MSSAPAPGPAPASLTLWDEEDFQGRRCRLLSDCANVCERGGLPRVRSVKVENGVWVAFEYPDFQGQQFILEKGDYPRWSAWSGSSSHNSNQLLSFRPVLCANHNDSRVTLFEGDNFQGCKFDLVDDYP

SEQ ID NO: 26851 - protein, 2970 aa, Homo sapiens
  REGION 1..2970: note = ENSP00000374273
MSSGRRRGSAPWHSFSRFFAPRSPSRDKEEEEEERPGTSPPPAPGRSAASVENEPMSTSQKKENVLSSEAVKIRQSEDKRNHAEKPVTLPVQEDPKKAYDLSSSTSDTKIGESDRQPKESFFQFLGNLFNISGKSSLGEAKQSSFKDDQDKTEKDLQNPSDHHEDGIKREREIFSGSLRTQTHPTEEQDSNSSELSDAFSLDTTQDSDQETTNLLKQIDGKPEKPSVTYATYRGPRHIGKYLKQQTGLATVNTLDRENESSDSSTNRHIDPGSEIEAGVLPLLLSASTDSSMKGNLLEGPLEDSDCSKTSFNKENSLTNNPELQNIASSNNLLNKNAWGSIERNRSSPSSVTNSSYDGESDSQHHLSCEPVSQTNRNLVCSALLTGSNHRKVPCSPDFQRVTTTENTIKENSTVMSNRTLVQREELVEPQGPAISDFSCSKSDGSDTTEQESTNLPSPNKSIRHEHLQLPESECSDKQTIDSSSKQAATHTNIIALQRHAVTDTEFVNEGKRLSAQDSQKNVAVREIRRETESASAGESIASSHVKAPEDKIESLPKDTDQYFETKAKKLDFRSHDKIPHIRMNKKDLASLNYISESAVVASLGNENAPELKFELNRSHISETPLDSESPQQAEVSPDAKTSLSLDCKKLNFSISPPTFVSGVGMLSKLDIPDLMNEGSPVPIETGNVNIVGISYQPRKCKEENVKNHVEAAGRKSPPPSFCLEYTSAIFEFKEVLSNSEKCQVLPGSEASGPHLTGLELLSFDSGNLSKDCSSILSQDPNRVELVSSNTKANMSIIEKSDSLSLEAKTANIVSKAEIDGQNNVLVESHSGRGKTISLSKVSLSKVEPRNISQDKMSSFPLKITHVPEKPILSELTFLEVEQGKRFQSINHNEIGEKCSDAGLKENCQAELSPAASKYEDKPEPEVDALGSPPALLKSNISWILPPIHDEKISRQMAQNCEAHTCVFHQSLDICGTKKISGHSEMAELSLTNISPKFQETGSMKVNSPFLDSDSSLEKNSSASEDSSFLKVPSVLKLEKKSSSYRKKENIHFLNGGIDSVSSSSSYPEEVSMIVNSHKPQNNLDSIQVTKDLTHEGTSVTNLLYPTTSYLEFETSVSIGTEVTPFQEHFGIYTGKISIDFPTAAQFDNLVEAETGAVAGPAASVNSSGQQCSEASAEHIEARRRAHDQLLDLKSSLLKKADTLIGEIFNSVREELKFKHTVSTCQEHIAIEGIMNLGTLKEDISEKNPSEVTLTEIQQTEGLEEQGMENMSEVKEKPCVSPTVGEKNLLVDPNSMNVSCLLEDKARELVNEIIYVAQEKLRNDTFEDTEDTWDSELQANTSKILNSDSVKPHDVVREFLVSEQPVNQSTQISENKVLNEFFSLSNLASGTESIKGGEIVLYQKSLFSGNGSGLSDSINLQESDTVLLAEDMSHKRLDDRVKTHLFRSEDCNETMEIENVDNNKTETEDRRTLVLNFKWPPLVNDDIHAPGTSKSSLSDSLVCISEKNLPGHSKNTPLAMSDVGKVHKKDNEINIGKIELIPSMLETGKTNKKDAELNILKYEAVPPMIEMGRIHKMDAELNVTKTEPKANVFKMGEVYQMDAESCIEKTEGSAVILGMEKAYKMKDTEGDIGKIEVIPMMPEVKNIHQKDAEGDIVKTEMTPVTVDMENIYQTHAEGDIGKTGTIALSEVENIHQKGGEGISEKAEVIPVTLAMENTYQKDAEGDIGKAEVMPVRLEMENTYPKDTERDGGKTEVMPLALEVVNTYQKNAKGFTGNTEGSVLKMEATYRKTAEEVIKNTEIVPCVLKVKEAHETAPAPLEMEKACKRDVKETIGATVSTPSVIEMEKISPEDRGENIGKHKVLPAVVDIEKIHGTGLELTTKQGEAMLPAFESKTPQEYAEGSVEETKEEPTEIKEGLIAHENRLPTYFRGYESPTLSKDYEGYPAPAMPDFQPGDTTVRLDKRMSLTAIYDKRRETDYSDKGYNLAFVSQDEQENSSFTILYEEPLQEEDKYASAEARQTQSVLFHDTSADSMPVLACERSESRTDLVHHFEKGTKLGETFDSDSSEMFLSVEAKRYKIYPLALSPIYEDDSSQEDILSSEVSPGHHGPRKSRDSENQSSSVLSLLQSVSERLKMNFDEDDREAADEEEEEEEAAVLHKGDLRAGSGERVTFQLPDPSITFYPDDQESVGISKNSYVMPNEPTTSNLQVGLWPEKTSFLQKSDLTSKLHSSLKSAYHQYLQTSQSHSSEKGARFGGIFQEPVSKYFRVQDSPGRLSPFIENVDKQTLRCNPRPGKMVIYDLHESTYKQEVYCNIPDATSWSFPNGVLIKVVRGCWILYEKPHFRGQKCVLEEGEKVLNRDWILQNRRHPQRNFILGSLKRVLKDCSIPEIELFPQSDPACCPVYIQRAVPNLEELNISKSVSFTVKSGVWLAYPDINFKGQATVLEEDHGLFEISTAEMKSLHPLQMGGLKVEMPMNLKVIIYEKPHFHGQAKEFSEHIDSVPNFLKNNGDFHRIGSIRVIGGVWVAYEKEHFKGQQFLLEEGDFEDSNACGALSSPILSFRYLQANFIESSVTLFESDLESGKFIDITNQEISDLEEIGFGSKTRSIHVKSGVWVAYQQKFFCGEQYILEKGKYKCFFDWGGSNNIIMSIRPIQLEPLGINEPPHLLKAFSKPGFQGECIDFTEETSDLTSLMPCSFKVLRGCWLLYYQEDMFVNHCVLEEGLYADLTSCGCPASKVKSLKPIDYVFEEPSISLFALEHCEGRELHLEEAVNSVLNKDLHFYTQSVWVKSGLWIAYEGSNFLGRQILLRPNEIPNWTAFSRWKTIGSLRPMKQPAVYIRIKNRAQGEYLTVTGSLADTRATSVCISPYSGKNTQIWYYCRGLFKSKASDTCLDVIGGRDTPGAKVALWTEHGQFRQKWRLNKNGTISSYLSDQLVLDVKGGNYCDKTHVIVNQPLEGEETQKWDIEIL

SEQ ID NO: 26852 - protein, 131 aa, Homo sapiens
  REGION 1..131: note = ENSP00000418420
MNKKKVFEEPSISLFALEHCEGRELHLEEAVNSVLNKDLHFYTQSVWVKSGLWIAYEGSNFLGRQILLRPNEIPNWTAFSRWKTIGSLRPMKQPAVYIRIKNRAQGEYLTVTGSLADTRATSVCISPYSGK

SEQ ID NO: 26853 - protein, 148 aa, Homo sapiens
  REGION 1..148: note = ENSP00000479908
  VARIANT 1: note = Any amino acid
XQLSLISGCPNIQEAVEGAMHIQECVPEDLELKKKIFAQLDSIIDDRVILSSSTSCLMPSKLFAGLVHVKQCIVAHPVNPPYYIPLVELVPHPETAPTTVDRTHALMKKIGQCPMRVQKEVAGFVLNRLQYAIISEAWRLVELASVLG

SEQ ID NO: 26854 - protein, 297 aa, Homo sapiens
  REGION 1..297: note = ENSP00000372262
MLFASGGFQVKLYDIEQQQIRNALENIRKEMKLLEQAGSLKGSLSVEEQLSLISGCPNIQEAVEGAMHIQECVPEDLELKKKIFAQLDSIIDDRVILSSSTSCLMPSKLFAGLVHVKQCIVAHPVNPPYYIPLVELVPHPETAPTTVDRTHALMKKIGQCPMRVQKEVAGFVLNRLQYAIISEAWRLVEEGIVSPSDLDLVMSEGLGMRYAFIGPLETMHLNAEGMLSYCDRYSEGIKHVLQTFGPIPEFSRATAEKVNQDMCMKVPDDPEHLAARRQWRDECLMRLAKLKSQVQPQ

SEQ ID NO: 26855 - protein, 319 aa, Homo sapiens
  REGION 1..319: note = ENSP00000298248
MASSAAGCVVIVGSGVIGRSWAMLFASGGFQVKLYDIEQQQIRNALENIRKEMKLLEQAGSLKGSLSVEEQLSLISGCPNIQEAVEGAMHIQECVPEDLELKKKIFAQLDSIIDDRVILSSSTSCLMPSKLFAGLVHVKQCIVAHPVNPPYYIPLVELVPHPETAPTTVDRTHALMKKIGQCPMRVQKEVAGFVLNRLQYAIISEAWRLVEEGIVSPSDLDLVMSEGLGMRYAFIGPLETMHLNAEGMLSYCDRYSEGIKHVLQTFGPIPEFSRATAEKVNQDMCMKVPDDPEHLAARRQWRDECLMRLAKLKSQVQPQ

SEQ ID NO: 26856 - protein, 165 aa, Homo sapiens
  REGION 1..165: note = ENSP00000459982
MSRVPAFLSAAEVEEHLRSSSLLIPPLETALANFSSGPEGGVMQPVRTVVPVTKHRGYLGVMPAYSAAEDALTTKLVTFYEDRGITSVVPSHQATVLLFEPSNGTLLAVMDGNVITAKRTAAVSAIATKFLKPPSSEVLCILGAGVQAYSHYEIFTEQFSFKEVI

SEQ ID NO: 26857 - protein, 97 aa, Homo sapiens
  REGION 1..97: note = ENSP00000460820
  VARIANT 1: note = Any amino acid
XVGASRPDWRELDDELMKEAVLYVDSQEAALKESGDVLLSGAEIFAELGEVIKGVKPAHCEKTTVFKSLGMAVEDTVAAKLIYDSWSSAAPISLNLK

SEQ ID NO: 26858 - protein, 314 aa, Homo sapiens
  REGION 1..314: note = ENSP00000219599
MSRVPAFLSAAEVEEHLRSSSLLIPPLETALANFSSGPEGGVMQPVRTVVPVTKHRGYLGVMPAYSAAEDALTTKLVTFYEDRGITSVVPSHQATVLLFEPSNGTLLAVMDGNVITAKRTAAVSAIATKFLKPPSSEVLCILGAGVQAYSHYEIFTEQFSFKEVRIWNRTKENAEKFADTVQGEVRVCSSVQEAVAGADVIITVTLATEPILFGEWVKPGAHINAVGASRPDWRELDDELMKEAVLYVDSQEAALKESGDVLLSGAEIFAELGEVIKGVKPAHCEKTTVFKSLGMAVEDTVAAKLIYDSWSSGK

SEQ ID NO: 26859 - protein, 241 aa, Homo sapiens
  REGION 1..241: note = ENSP00000460126
MQPVRTVVPVTKHRGYLGVMPAYSAAEDALTTKLVTFYEDRGITSVVPSHQATVLLFEPSNGTLLAVMDGNVITAKRTAAVSAIATKFLKPPSSEVLCILGAGVQAYSHYEIFTEQFSFKEVRIWNRTKENAEKFADTVQGEVRVCSSVQEAVAGADVIITVTLATEPILFGEWVKPGAHINAVGASRPDWRELDDELMKEAVLYVDSQEAALKESGDVLLSGAEIFAELGEVIKGVKPAH

SEQ ID NO: 26860 - protein, 140 aa, Homo sapiens
  REGION 1..140: note = ENSP00000461904
MSRVPAFLSAAEVEEHLRSSSLLIPPLETALANFSSGPEGGVMQPVRTVVPVTKHRGYLGVMPAYSAAEDALTTKLVTFYEDRGITSVVPSHQATVLLFEPSNGTLLAVMDGNVITAKRTAAVSAIATKFLKPPSSEVLC

SEQ ID NO: 26861 - protein, 25 aa, Homo sapiens
  REGION 1..25: note = ENSP00000460510
MSRVPAFLSAAEVEEHLRSSSLLIP

SEQ ID NO: 26862 - protein, 314 aa, Homo sapiens; identical to SEQ ID NO: 26858
  REGION 1..314: note = ENSP00000440227

SEQ ID NO: 26863 - protein, 165 aa, Homo sapiens; identical to SEQ ID NO: 26856
  REGION 1..165: note = ENSP00000492884

SEQ ID NO: 26864 - protein, 97 aa, Homo sapiens; identical to SEQ ID NO: 26857
  REGION 1..97: note = ENSP00000491775
  VARIANT 1: note = Any amino acid

SEQ ID NO: 26865 - protein, 314 aa, Homo sapiens; identical to SEQ ID NO: 26858
  REGION 1..314: note = ENSP00000490961

SEQ ID NO: 26866 - protein, 314 aa, Homo sapiens; identical to SEQ ID NO: 26858
  REGION 1..314: note = ENSP00000492104

SEQ ID NO: 26867 - protein, 241 aa, Homo sapiens; identical to SEQ ID NO: 26859
  REGION 1..241: note = ENSP00000491052

SEQ ID NO: 26868 - protein, 140 aa, Homo sapiens; identical to SEQ ID NO: 26860
  REGION 1..140: note = ENSP00000491368

SEQ ID NO: 26869 - protein, 25 aa, Homo sapiens
  REGION 1..25: note = ENSP00000492312
MSRVPAFLSAAEVEEHLRSSSLLIP

SEQ ID NO: 26870 - protein, 671 aa, Homo sapiens
  REGION 1..671: note = ENSP00000422212
MGPGVLLLLLVATAWHGQGIPVIEPSVPELVVKPGATVTLRCVGNGSVEWDGPPSPHWTLYSDGSSSILSTNNATFQNTGTYRCTEPGDPLGGSAAIHLYVKDPARPWNVLAQEVVVFEDQDALLPCLLTDPVLEAGVSLVRVRGRPLMRHTNYSFSPWHGFTIHRAKFIQSQDYQCSALMGGRKVMSISIRLKVQKVIPGPPALTLVPAELVRIRGEAAQIVCSASSVDVNFDVFLQHNNTKLAIPQQSDFHNNRYQKVLTLNLDQVDFQHAGNYSCVASNVQGKHSTSMFFRVVESAYLNLSSEQNLIQEVTVGEGLNLKVMVEAYPGLQGFNWTYLGPFSDHQPEPKLANATTKDTYRHTFTLSLPRLKPSEAGRYSFLARNPGGWRALTFELTLRYPPEVSVIWTFINGSGTLLCAASGYPQPNVTWLQCSGHTDRCDEAQVLQVWDDPYPEVLSQEPFHKVTVQSLLTVETLEHNQTYECRAHNSVGSGSWAFIPISAGAHTHPPDEFLFTPVVVACMSIMALLLLLLLLLLYKYKQKPKYQVRWKIIESYEGNSYTFIDPTQLPYNEKWEFPRNNLQFGKTLGAGAFGKVVEATAFGLGKEDAVLKVAVKMLKSTAHADEKEALMSELKIMSHLGQHENIVNLLGACTHGGTVASPARVWTPMWR

SEQ ID NO: 26871 - protein, 972 aa, Homo sapiens
  REGION 1..972: note = ENSP00000286301
MGPGVLLLLLVATAWHGQGIPVIEPSVPELVVKPGATVTLRCVGNGSVEWDGPPSPHWTLYSDGSSSILSTNNATFQNTGTYRCTEPGDPLGGSAAIHLYVKDPARPWNVLAQEVVVFEDQDALLPCLLTDPVLEAGVSLVRVRGRPLMRHTNYSFSPWHGFTIHRAKFIQSQDYQCSALMGGRKVMSISIRLKVQKVIPGPPALTLVPAELVRIRGEAAQIVCSASSVDVNFDVFLQHNNTKLAIPQQSDFHNNRYQKVLTLNLDQVDFQHAGNYSCVASNVQGKHSTSMFFRVVESAYLNLSSEQNLIQEVTVGEGLNLKVMVEAYPGLQGFNWTYLGPFSDHQPEPKLANATTKDTYRHTFTLSLPRLKPSEAGRYSFLARNPGGWRALTFELTLRYPPEVSVIWTFINGSGTLLCAASGYPQPNVTWLQCSGHTDRCDEAQVLQVWDDPYPEVLSQEPFHKVTVQSLLTVETLEHNQTYECRAHNSVGSGSWAFIPISAGAHTHPPDEFLFTPVVVACMSIMALLLLLLLLLLYKYKQKPKYQVRWKIIESYEGNSYTFIDPTQLPYNEKWEFPRNNLQFGKTLGAGAFGKVVEATAFGLGKEDAVLKVAVKMLKSTAHADEKEALMSELKIMSHLGQHENIVNLLGACTHGGPVLVITEYCCYGDLLNFLRRKAEAMLGPSLSPGQDPEGGVDYKNIHLEKKYVRRDSGFSSQGVDTYVEMRPVSTSSNDSFSEQDLDKEDGRPLELRDLLHFSSQVAQGMAFLASKNCIHRDVAARNVLLTNGHVAKIGDFGLARDIMNDSNYIVKGNARLPVKWMAPESIFDCVYTVQSDVWSYGILLWEIFSLGLNPYPGILVNSKFYKLVKDGYQMAQPAFAPKNIYSIMQACWALEPTHRPTFQQICSFLQEQAQEDRRERDYTNLPSSSRSGGSGSSSSELEEESSSEHLTCCEQGDIAQPLLQPNNYQFC

SEQ ID NO: 26872 - protein, 64 aa, Homo sapiens
  REGION 1..64: note = ENSP00000427545
AGSPWALGQRPFGAQGLKGPVCVAATAHADEKEALMSELKIMSHLGQHENIVNLLGACTHGGIS

SEQ ID NO: 26873 - protein, 49 aa, Homo sapiens
  REGION 1..49: note = ENSP00000421174
MRHTNYSFSPWHGFTIHRAKFIQSQDYQCSALMGGRKVMSISIRLKVQK

SEQ ID NO: 26874 - protein, 306 aa, Homo sapiens
  REGION 1..306: note = ENSP00000445282
MGPGVLLLLLVATAWHGQGIPVIEPSVPELVVKPGATVTLRCVGNGSVEWDGPPSPHWTLYSDGSSSILSTNNATFQNTGTYRCTEPGDPLGGSAAIHLYVKDPARPWNVLAQEVVVFEDQDALLPCLLTDPVLEAGVSLVRVRGRPLMRHTNYSFSPWHGFTIHRAKFIQSQDYQCSALMGGRKVMSISIRLKVQKVIPGPPALTLVPAELVRIRGEAAQIVCSASSVDVNFDVFLQHNNTKLAIPQQSDFHNNRYQKVLTLNLDQVDFQHAGNYSCVASNVQGKHSTSMFFRVVGTPSPSLCPA

SEQ ID NO: 26875 - protein, 2967 aa, Homo sapiens
  REGION 1..2967: note = ENSP00000334828
  VARIANT 1: note = Any amino acid
XEIEKGGCGDPGIPAYGKRTGSSFLHGDTLTFECPAAFELVGERVITCQQNNQWSGNKPSCVFSCFFNFTASSGIILSPNYPEEYGNNMNCVWLIISEPGSRIHLIFNDFDVEPQFDFLAVKDDGISDITVLGTFSGNEVPSQLASSGHIVRLEFQSDHSTTGRGFNITYTTFGQNECHDPGIPINGRRFGDRFLLGSSVSFHCDDGFVKTQGSESITCILQDGNVVWSSTVPRCEAPCGGHLTASSGVILPPGWPGYYKDSLHCEWIIEAKPGHSIKITFDRFQTEVNYDTLEVRDGPASSSPLIGEYHGTQAPQFLISTGNFMYLLFTTDNSRSSIGFLIHYESVTLESDSCLDPGIPVNGHRHGGDFGIRSTVTFSCDPGYTLSDDEPLVCERNHQWNHALPSCDALCGGYIQGKSGTVLSPGFPDFYPNSLNCTWTIEVSHGKGVQMIFHTFHLESSHDYLLITEDGSFSEPVARLTGSVLPHTIKAGLFGNFTAQLRFISDFSISYEGFNITFSEYDLEPCDDPGVPAFSRRIGFHFGVGDSLTFSCFLGYRLEGATKLTCLGGGRRVWSAPLPRCVAECGASVKGNEGTLLSPNFPSNYDNNHECIYKIETEAGKGIHLRTRSFQLFEGDTLKVYDGKDSSSRPLGTFTKNELLGLILNSTSNHLWLEFNTNGSDTDQGFQLTYTSFDLVKCEDPGIPNYGYRIRDEGHFTDTVVLYSCNPGYAMHGSNTLTCLSGDRRVWDKPLPSCIAECGGQIHAATSGRILSPGYPAPYDNNLHCTWIIEADPGKTISLHFIVFDTEMAHDILKVWDGPVDSDILLKEWSGSALPEDIHSTFNSLTLQFDSDFFISKSGFSIQFSTSIAATCNDPGMPQNGTRYGDSREAGDTVTFQCDPGYQLQGQAKITCVQLNNRFFWQPDPPTCIAACGGNLTGPAGVILSPNYPQPYPPGKECDWRVKVNPDFVIALIFKSFNMEPSYDFLHIYEGEDSNSPLIGSYQGSQAPERIESSGNSLFLAFRSDASVGLSGFAIEFKEKPREACFDPGNIMNGTRVGTDFKLGSTITYQCDSGYKILDPSSITCVIGADGKPSWDQVLPSCNAPCGGQYTGSEGVVLSPNYPHNYTAGQICLYSITVPKEFVVFGQFAYFQTALNDLAELFDGTHAQARLLSSLSGSHSGETLPLATSNQILLRFSAKSGASARGFHFVYQAVPRTSDTQCSSVPEPRYGRRIGSEFSAGSIVRFECNPGYLLQGSTALHCQSVPNALAQWNDTIPSCVVPCSGNFTQRRGTILSPGYPEPYGNNLNCIWKIIVTEGSGIQIQVISFATEQNWDSLEIHDGGDVTAPRLGSFSGTTVPALLNSTSNQLYLHFQSDISVAAAGFHLEYKTVGLAACQEPALPSNSIKIGDRYMVNDVLSFQCEPGYTLQGRSHISCMPGTVRRWNYPSPLCIATCGGTLSTLGGVILSPGFPGSYPNNLDCTWRISLPIGYGAHIQFLNFSTEANHDFLEIQNGPYHTSPMIGQFSGTDLPAALLSTTHETLIHFYSDHSQNRQGFKLAYQAYELQNCPDPPPFQNGYMINSDYSVGQSVSFECYPGYILIGHPVLTCQHGINRNWNYPFPRCDAPCGYNVTSQNGTIYSPGFPDEYPILKDCIWLITVPPGHGVYINFTLLQTEAVNDYIAVWDGPDQNSPQLGVFSGNTALETAYSSTNQVLLKFHSDFSNGGFFVLNFHAFQLKKCQPPPAVPQAEMLTEDDDFEIGDFVKYQCHPGYTLVGTDILTCKLSSQLQFEGSLPTCEGSSGQSPLLVVLSGNHTEQSNFTSRSNQLYLRWSTDHATSKKGFKIRYAAPYCSLTHPLKNGGILNRTAGAVGSKVHYFCKPGYRMVGHSNATCRRNPLGMYQWDSLTPLCQAVSCGIPESPGNGSFTGNEFTLDSKVVYECHEGFKLESSQQATAVCQEDGLWSNKGKPPTCKPVACPSIEAQLSEHVIWRLVSGSLNEYGAQVLLSCSPGYYLEGWRLLRCQANGTWNIGDERPSCRVISCGSLSFPPNGNKIGTLTVYGATAIFTCNTGYTLVGSHVRECLANGLWSGSETRCLAGHCGSPDPIVNGHISGDGFSYRDTVVYQCNPGFRLVGTSVRICLQDHKWSGQTPVCVPITCGHPGNPAHGFTNGSEFNLNDVVNFTCNTGYLLQGVSRAQCRSNGQWSSPLPTCRVVNCSDPGFVENAIRHGQQNFPESFEYGMSILYHCKKGFYLLGSSALTCMANGLWDRSLPKCLAISCGHPGVPANAVLTGELFTYGAVVHYSCRGSESLIGNDTRVCQEDSHWSGALPHCTGNNPGFCGDPGTPAHGSRLGDDFKTKSLLRFSCEMGHQLRGSPERTCLLNGSWSGLQPVCEAVSCGNPGTPTNGMIVSSDGILFSSSVIYACWEGYKTSGLMTRHCTANGTWTGTAPDCTIISCGDPGTLANGIQFGTDFTFNKTVSYQCNPGYVMEAVTSATIRCTKDGRWNPSKPVCKAVLCPQPPPVQNGTVEGSDFRWGSSISYSCMDGYQLSHSAILSCEGRGVWKGEIPQCLPVFCGDPGIPAEGRLSGKSFTYKSEVFFQCKSPFILVGSSRRVCQADGTWSGIQPTCIDPAHNTCPDPGTPHFGIQNSSRGYEVGSTVFFRCRKGYHIQGSTTRTCLANLTWSGIQTECIPHACRQPETPAHADVRAIDLPTFGYTLVYTCHPGFFLAGGSEHRTCKADMKWTGKSPVCKIPSDVFFVNSLWKGYYEYLGKRQPATLTVDWFNATSSKVNATFSEASPVELKLTGIYKKEEAHLLLKAFQIKGQADIFVSKFENDNWGLDGYVSSGLERGGFTFQGDIHGKDFGKFKLERQDPLNPDQDSSSHYHGTSSGSVAAAILVPFFALILSGFAFYLYKHRTRPKVQYNGYAGHENSNGQASFENPMYDTNLKPTEAKAVRFDTTLNTVCTVV

SEQ ID NO: 26876 - protein, 3388 aa, Homo sapiens
  REGION 1..3388: note = ENSP00000383047
MTAWRRFQSLLLLLGLLVLCARLLTAAKGQNCGGLVQGPNGTIESPGFPHGYPNYANCTWIIITGERNRIQLSFHTFALEEDFDILSVYDGQPQQGNLKVRLSGFQLPSSIVSTGSILTLWFTTDFAVSAQGFKALYEVLPSHTCGNPGEILKGVLHGTRFNIGDKIRYSCLPGYILEGHAILTCIVSPGNGASWDFPAPFCRAEGACGGTLRGTSSSISSPHFPSEYENNADCTWTILAEPGDTIALVFTDFQLEEGYDFLEISGTEAPSIWLTGMNLPSPVISSKNWLRLHFTSDSNHRRKGFNAQFQVKKAIELKSRGVKMLPSKDGSHKNSVLSQGGVALVSDMCPDPGIPENGRRAGSDFSRVGANVQFSCEDNYVLQGSKSITCQRVTETLAAWSDHRPICRARTCGSNLRGPSGVITSPNYPVQYEDNAHCVWVITTTDPDKVIKLAFEEFELERGYDTLTVGDAGKVGDTRSVLYVLTGSSVPDLIVSMSNQMWLHLQSDDSIGSPGFKAVYQEIEKGGCGDPGIPAYGKRTGSSFLHGDTLTFECPAAFELVGERVITCQQNNQWSGNKPSCVFSCFFNFTASSGIILSPNYPEEYGNNMNCVWLIISEPGSRIHLIFNDFDVEPQFDFLAVKDDGISDITVLGTFSGNEVPSQLASSGHIVRLEFQSDHSTTGRGFNITYTTFGQNECHDPGIPINGRRFGDRFLLGSSVSFHCDDGFVKTQGSESITCILQDGNVVWSSTVPRCEAPCGGHLTASSGVILPPGWPGYYKDSLHCEWIIEAKPGHSIKITFDRFQTEVNYDTLEVRDGPASSSPLIGEYHGTQAPQFLISTGNFMYLLFTTDNSRSSIGFLIHYESVTLESDSCLDPGIPVNGHRHGGDFGIRSTVTFSCDPGYTLSDDEPLVCERNHQWNHALPSCDALCGGYIQGKSGTVLSPGFPDFYPNSLNCTWTIEVSHGKGVQMIFHTFHLESSHDYLLITEDGSFSEPVARLTGSVLPHTIKAGLFGNFTAQLRFISDFSISYEGFNITFSEYDLEPCDDPGVPAFSRRIGFHFGVGDSLTFSCFLGYRLEGATKLTCLGGGRRVWSAPLPRCVAECGASVKGNEGTLLSPNFPSNYDNNHECIYKIETEAGKGIHLRTRSFQLFEGDTLKVYDGKDSSSRPLGTFTKNELLGLILNSTSNHLWLEFNTNGSDTDQGFQLTYTSFDLVKCEDPGIPNYGYRIRDEGHFTDTVVLYSCNPGYAMHGSNTLTCLSGDRRVWDKPLPSCIAECGGQIHAATSGRILSPGYPAPYDNNLHCTWIIEADPGKTISLHFIVFDTEMAHDILKVWDGPVDSDILLKEWSGSALPEDIHSTFNSLTLQFDSDFFISKSGFSIQFSTSIAATCNDPGMPQNGTRYGDSREAGDTVTFQCDPGYQLQGQAKITCVQLNNRFFWQPDPPTCIAACGGNLTGPAGVILSPNYPQPYPPGKECDWRVKVNPDFVIALIFKSFNMEPSYDFLHIYEGEDSNSPLIGSYQGSQAPERIESSGNSLFLAFRSDASVGLSGFAIEFKEKPREACFDPGNIMNGTRVGTDFKLGSTITYQCDSGYKILDPSSITCVIGADGKPSWDQVLPSCNAPCGGQYTGSEGVVLSPNYPHNYTAGQICLYSITVPKEFVVFGQFAYFQTALNDLAELFDGTHAQARLLSSLSGSHSGETLPLATSNQILLRFSAKSGASARGFHFVYQAVPRTSDTQCSSVPEPRYGRRIGSEFSAGSIVRFECNPGYLLQGSTALHCQSVPNALAQWNDTIPSCVVPCSGNFTQRRGTILSPGYPEPYGNNLNCIWKIIVTEGSGIQIQVISFATEQNWDSLEIHDGGDVTAPRLGSFSGTTVPALLNSTSNQLYLHFQSDISVAAAGFHLEYKTVGLAACQEPALPSNSIKIGDRYMVNDVLSFQCEPGYTLQGRSHISCMPGTVRRWNYPSPLCIATCGGTLSTLGGVILSPGFPGSYPNNLDCTWRISLPIGYGAHIQFLNFSTEANHDFLEIQNGPYHTSPMIGQFSGTDLPAALLSTTHETLIHFYSDHSQNRQGFKLAYQAYELQNCPDPPPFQNGYMINSDYSVGQSVSFECYPGYILIGHPVLTCQHGINRNWNYPFPRCDAPCGYNVTSQNGTIYSPGFPDEYPILKDCIWLITVPPGHGVYINFTLLQTEAVNDYIAVWDGPDQNSPQLGVFSGNTALETAYSSTNQVLLKFHSDFSNGGFFVLNFHAFQLKKCQPPPAVPQAEMLTEDDDFEIGDFVKYQCHPGYTLVGTDILTCKLSSQLQFEGSLPTCEAQCPANEVRTGSSGVILSPGYPGNYFNSQTCSWSIKVEPNYNITIFVDTFQSEKQFDALEVFDGSSGQSPLLVVLSGNHTEQSNFTSRSNQLYLRWSTDHATSKKGFKIRYAAPYCSLTHPLKNGGILNRTAGAVGSKVHYFCKPGYRMVGHSNATCRRNPLGMYQWDSLTPLCQAVSCGIPESPGNGSFTGNEFTLDSKVVYECHEGFKLESSQQATAVCQEDGLWSNKGKPPTCKPVACPSIEAQLSEHVIWRLVSGSLNEYGAQVLLSCSPGYYLEGWRLLRCQANGTWNIGDERPSCRAGHCGSPDPIVNGHISGDGFSYRDTVVYQCNPGFRLVGTSVRICLQDHKWSGQTPVCVPITCGHPGNPAHGFTNGSEFNLNDVVNFTCNTGYLLQGVSRAQCRSNGQWSSPLPTCRVVNCSDPGFVENAIRHGQQNFPESFEYGMSILYHCKKGFYLLGSSALTCMANGLWDRSLPKCLAISCGHPGVPANAVLTGELFTYGAVVHYSCRGSESLIGNDTRVCQEDSHWSGALPHCTGNNPGFCGDPGTPAHGSRLGDDFKTKSLLRFSCEMGHQLRGSPERTCLLNGSWSGLQPVCEAVLCPQPPPVQNGTVEGSDFRWGSSISYSCMDGYQLSHSAILSCEGRGVWKGEIPQCLPVFCGDPGIPAEGRLSGKSFTYKSEVFFQCKSPFILVGSSRRVCQADGTWSGIQPTCIDPAHNTCPDPGTPHFGIQNSSRGYEVGSTVFFRCRKGYHIQGSTTRTCLANLTWSGIQTECIPHACRQPETPAHADVRAIDLPTFGYTLVYTCHPGFFLAGGSEHRTCKADMKWTGKSPVCKSKGVREVNETVTKTPVPSDVFFVNSLWKGYYEYLGKRQPATLTVDWFNATSSKVNATFSEASPVELKLTGIYKKEEAHLLLKAFQIKGQADIFVSKFENDNWGLDGYVSSGLERGGFTFQGDIHGKDFGKFKLERQDPLNPDQDSSSHYHGTSSGSVAAAILVPFFALILSGFAFYLYKHRTRPKVQYNGYAGHENSNGQASFENPMYDTNLKPTEAKAVRFDTTLNTVCTVV

SEQ ID NO: 26877 - protein, 3388 aa, Homo sapiens; identical to SEQ ID NO: 26876
  REGION 1..3388: note = ENSP00000473617

SEQ ID NO: 26878 - protein, 3564 aa, Homo sapiens
  REGION 1..3564: note = ENSP00000489225
MTAWRRFQSLLLLLGLLVLCARLLTAAKGQNCGGLVQGPNGTIESPGFPHGYPNYANCTWIIITGERNRIQLSFHTFALEEDFDILSVYDGQPQQGNLKVRLSGFQLPSSIVSTGSILTLWFTTDFAVSAQGFKALYEVLPSHTCGNPGEILKGVLHGTRFNIGDKIRYSCLPGYILEGHAILTCIVSPGNGASWDFPAPFCRAEGACGGTLRGTSSSISSPHFPSEYENNADCTWTILAEPGDTIALVFTDFQLEEGYDFLEISGTEAPSIWLTGMNLPSPVISSKNWLRLHFTSDSNHRRKGFNAQFQVKKAIELKSRGVKMLPSKDGSHKNSVLSQGGVALVSDMCPDPGIPENGRRAGSDFRVGANVQFSCEDNYVLQGSKSITCQRVTETLAAWSDHRPICRARTCGSNLRGPSGVITSPNYPVQYEDNAHCVWVITTTDPDKVIKLAFEEFELERGYDTLTVGDAGKVGDTRSVLYVLTGSSVPDLIVSMSNQMWLHLQSDDSIGSPGFKAVYQEIEKGGCGDPGIPAYGKRTGSSFLHGDTLTFECPAAFELVGERVITCQQNNQWSGNKPSCVFSCFFNFTASSGIILSPNYPEEYGNNMNCVWLIISEPGSRIHLIFNDFDVEPQFDFLAVKDDGISDITVLGTFSGNEVPSQLASSGHIVRLEFQSDHSTTGRGFNITYTTFGQNECHDPGIPINGRRFGDRFLLGSSVSFHCDDGFVKTQGSESITCILQDGNVVWSSTVPRCEAPCGGHLTASSGVILPPGWPGYYKDSLHCEWIIEAKPGHSIKITFDRFQTEVNYDTLEVRDGPASSSPLIGEYHGTQAPQFLISTGNFMYLLFTTDNSRSSIGFLIHYESVTLESDSCLDPGIPVNGHRHGGDFGIRSTVTFSCDPGYTLSDDEPLVCERNHQWNHALPSCDALCGGYIQGKSGTVLSPGFPDFYPNSLNCTWTIEVSHGKGVQMIFHTFHLESSHDYLLITEDGSFSEPVARLTGSVLPHTIKAGLFGNFTAQLRFISDFSISYEGFNITFSEYDLEPCDDPGVPAFSRRIGFHFGVGDSLTFSCFLGYRLEGATKLTCLGGGRRVWSAPLPRCVAECGASVKGNEGTLLSPNFPSNYDNNHECIYKIETEAGKGIHLRTRSFQLFEGDTLKVYDGKDSSSRPLGTFTKNELLGLILNSTSNHLWLEFNTNGSDTDQGFQLTYTSFDLVKCEDPGIPNYGYRIRDEGHFTDTVVLYSCNPGYAMHGSNTLTCLSGDRRVWDKPLPSCIAECGGQIHAATSGRILSPGYPAPYDNNLHCTWIIEADPGKTISLHFIVFDTEMAHDILKVWDGPVDSDILLKEWSGSALPEDIHSTFNSLTLQFDSDFFISKSGFSIQFSTSIAATCNDPGMPQNGTRYGDSREAGDTVTFQCDPGYQLQGQAKITCVQLNNRFFWQPDPPTCIAACGGNLTGPAGVILSPNYPQPYPPGKECDWRVKVNPDFVIALIFKSFNMEPSYDFLHIYEGEDSNSPLIGSYQGSQAPERIESSGNSLFLAFRSDASVGLSGFAIEFKEKPREACFDPGNIMNGTRVGTDFKLGSTITYQCDSGYKILDPSSITCVIGADGKPSWDQVLPSCNAPCGGQYTGSEGVVLSPNYPHNYTAGQICLYSITVPKEFVVFGQFAYFQTALNDLAELFDGTHAQARLLSSLSGSHSGETLPLATSNQILLRFSAKSGASARGFHFVYQAVPRTSDTQCSSVPEPRYGRRIGSEFSAGSIVRFECNPGYLLQGSTALHCQSVPNALAQWNDTIPSCVVPCSGNFTQRRGTILSPGYPEPYGNNLNCIWKIIVTEGSGIQIQVISFATEQNWDSLEIHDGGDVTAPRLGSFSGTTVPALLNSTSNQLYLHFQSDISVAAAGFHLEYKTVGLAACQEPALPSNSIKIGDRYMVNDVLSFQCEPGYTLQGRSHISCMPGTVRRWNYPSPLCIATCGGTLSTLGGVILSPGFPGSYPNNLDCTWRISLPIGYGAHIQFLNFSTEANHDFLEIQNGPYHTSPMIGQFSGTDLPAALLSTTHETLIHFYSDHSQNRQGFKLAYQAYELQNCPDPPPFQNGYMINSDYSVGQSVSFECYPGYILIGHPVLTCQHGINRNWNYPFPRCDAPCGYNVTSQNGTIYSPGFPDEYPILKDCIWLITVPPGHGVYINFTLLQTEAVNDYIAVWDGPDQNSPQLGVFSGNTALETAYSSTNQVLLKFHSDFSNGGFFVLNFHAFQLKKCQPPPAVPQAEMLTEDDDFEIGDFVKYQCHPGYTLVGTDILTCKLSSQLQFEGSLPTCEAQCPANEVRTGSSGVILSPGYPGNYFNSQTCSWSIKVEPNYNITIFVDTFQSEKQFDALEVFDGSSGQSPLLVVLSGNHTEQSNFTSRSNQLYLRWSTDHATSKKGFKIRYAAPYCSLTHPLKNGGILNRTAGAVGSKVHYFCKPGYRMVGHSNATCRRNPLGMYQWDSLTPLCQAVSCGIPESPGNGSFTGNEFTLDSKVVYECHEGFKLESSQQATAVCQEDGLWSNKGKPPTCKPVACPSIEAQLSEHVIWRLVSGSLNEYGAQVLLSCSPGYYLEGWRLLRCQANGTWNIGDERPSCRVISCGSLSFPPNGNKIGTLTVYGATAIFTCNTGYTLVGSHVRECLANGLWSGSETRCLAGHCGSPDPIVNGHISGDGFSYRDTVVYQCNPGFRLVGTSVRICLQDHKWSGQTPVCVPITCGHPGNPAHGFTNGSEFNLNDVVNFTCNTGYLLQGVSRAQCRSNGQWSSPLPTCRVVNCSDPGFVENAIRHGQQNFPESFEYGMSILYHCKKGFYLLGSSALTCMANGLWDRSLPKCLAISCGHPGVPANAVLTGELFTYGAVVHYSCRGSESLIGNDTRVCQEDSHWSGALPHCTGNNPGFCGDPGTPAHGSRLGDDFKTKSLLRFSCEMGHQLRGSPERTCLLNGSWSGLQPVCEAVSCGNPGTPTNGMIVSSDGILFSSSVIYACWEGYKTSGLMTRHCTANGTWTGTAPDCTIISCGDPGTLANGIQFGTDFTFNKTVSYQCNPGYVMEAVTSATIRCTKDGRWNPSKPVCKAVLCPQPPPVQNGTVEGSDFRWGSSISYSCMDGYQLSHSAILSCEGRGVWKGEIPQCLPVFCGDPGIPAEGRLSGKSFTYKSEVFFQCKSPFILVGSSRRVCQADGTWSGIQPTCIDPAHNTCPDPGTPHFGIQNSSRGYEVGSTVFFRCRKGYHIQGSTTRTCLANLTWSGIQTECIPHACRQPETPAHADVRAIDLPTFGYTLVYTCHPGFFLAGGSEHRTCKADMKWTGKSPVCKSKGVREVNETVTKTPVPSDVFFVNSLWKGYYEYLGKRQPATLTVDWFNATSSKVNATFSEASPVELKLTGIYKKEEAHLLLKAFQIKGQADIFVSKFENDNWGLDGYVSSGLERGGFTFQGDIHGKDFGKFKLERQDPLNPDQDSSSHYHGTSSGSVAAAILVPFFALILSGFAFYLYKHRTRPKVQYNGYAGHENSNGQASFENPMYDTNLKPTEAKAVRFDTTLNTVCTVV

SEQ ID NO: 26879 - protein, 3565 aa, Homo sapiens
  REGION 1..3565: note = ENSP00000430733
MTAWRRFQSLLLLLGLLVLCARLLTAAKGQNCGGLVQGPNGTIESPGFPHGYPNYANCTWIIITGERNRIQLSFHTFALEEDFDILSVYDGQPQQGNLKVRLSGFQLPSSIVSTGSILTLWFTTDFAVSAQGFKALYEVLPSHTCGNPGEILKGVLHGTRFNIGDKIRYSCLPGYILEGHAILTCIVSPGNGASWDFPAPFCRAEGACGGTLRGTSSSISSPHFPSEYENNADCTWTILAEPGDTIALVFTDFQLEEGYDFLEISGTEAPSIWLTGMNLPSPVISSKNWLRLHFTSDSNHRRKGFNAQFQVKKAIELKSRGVKMLPSKDGSHKNSVLSQGGVALVSDMCPDPGIPENGRRAGSDFSRVGANVQFSCEDNYVLQGSKSITCQRVTETLAAWSDHRPICRARTCGSNLRGPSGVITSPNYPVQYEDNAHCVWVITTTDPDKVIKLAFEEFELERGYDTLTVGDAGKVGDTRSVLYVLTGSSVPDLIVSMSNQMWLHLQSDDSIGSPGFKAVYQEIEKGGCGDPGIPAYGKRTGSSFLHGDTLTFECPAAFELVGERVITCQQNNQWSGNKPSCVFSCFFNFTASSGIILSPNYPEEYGNNMNCVWLIISEPGSRIHLIFNDFDVEPQFDFLAVKDDGISDITVLGTFSGNEVPSQLASSGHIVRLEFQSDHSTTGRGFNITYTTFGQNECHDPGIPINGRRFGDRFLLGSSVSFHCDDGFVKTQGSESITCILQDGNVVWSSTVPRCEAPCGGHLTASSGVILPPGWPGYYKDSLHCEWIIEAKPGHSIKITFDRFQTEVNYDTLEVRDGPASSSPLIGEYHGTQAPQFLISTGNFMYLLFTTDNSRSSIGFLIHYESVTLESDSCLDPGIPVNGHRHGGDFGIRSTVTFSCDPGYTLSDDEPLVCERNHQWNHALPSCDALCGGYIQGKSGTVLSPGFPDFYPNSLNCTWTIEVSHGKGVQMIFHTFHLESSHDYLLITEDGSFSEPVARLTGSVLPHTIKAGLFGNFTAQLRFISDFSISYEGFNITFSEYDLEPCDDPGVPAFSRRIGFHFGVGDSLTFSCFLGYRLEGATKLTCLGGGRRVWSAPLPRCVAECGASVKGNEGTLLSPNFPSNYDNNHECIYKIETEAGKGIHLRTRSFQLFEGDTLKVYDGKDSSSRPLGTFTKNELLGLILNSTSNHLWLEFNTNGSDTDQGFQLTYTSFDLVKCEDPGIPNYGYRIRDEGHFTDTVVLYSCNPGYAMHGSNTLTCLSGDRRVWDKPLPSCIAECGGQIHAATSGRILSPGYPAPYDNNLHCTWIIEADPGKTISLHFIVFDTEMAHDILKVWDGPVDSDILLKEWSGSALPEDIHSTFNSLTLQFDSDFFISKSGFSIQFSTSIAATCNDPGMPQNGTRYGDSREAGDTVTFQCDPGYQLQGQAKITCVQLNNRFFWQPDPPTCIAACGGNLTGPAGVILSPNYPQPYPPGKECDWRVKVNPDFVIALIFKSFNMEPSYDFLHIYEGEDSNSPLIGSYQGSQAPERIESSGNSLFLAFRSDASVGLSGFAIEFKEKPREACFDPGNIMNGTRVGTDFKLGSTITYQCDSGYKILDPSSITCVIGADGKPSWDQVLPSCNAPCGGQYTGSEGVVLSPNYPHNYTAGQICLYSITVPKEFVVFGQFAYFQTALNDLAELFDGTHAQARLLSSLSGSHSGETLPLATSNQILLRFSAKSGASARGFHFVYQAVPRTSDTQCSSVPEPRYGRRIGSEFSAGSIVRFECNPGYLLQGSTALHCQSVPNALAQWNDTIPSCVVPCSGNFTQRRGTILSPGYPEPYGNNLNCIWKIIVTEGSGIQIQVISFATEQNWDSLEIHDGGDVTAPRLGSFSGTTVPALLNSTSNQLYLHFQSDISVAAAGFHLEYKTVGLAACQEPALPSNSIKIGDRYMVNDVLSFQCEPGYTLQGRSHISCMPGTVRRWNYPSPLCIATCGGTLSTLGGVILSPGFPGSYPNNLDCTWRISLPIGYGAHIQFLNFSTEANHDFLEIQNGPYHTSPMIGQFSGTDLPAALLSTTHETLIHFYSDHSQNRQGFKLAYQAYELQNCPDPPPFQNGYMINSDYSVGQSVSFECYPGYILIGHPVLTCQHGINRNWNYPFPRCDAPCGYNVTSQNGTIYSPGFPDEYPILKDCIWLITVPPGHGVYINFTLLQTEAVNDYIAVWDGPDQNSPQLGVFSGNTALETAYSSTNQVLLKFHSDFSNGGFFVLNFHAFQLKKCQPPPAVPQAEMLTEDDDFEIGDFVKYQCHPGYTLVGTDILTCKLSSQLQFEGSLPTCEAQCPANEVRTGSSGVILSPGYPGNYFNSQTCSWSIKVEPNYNITIFVDTFQSEKQFDALEVFDGSSGQSPLLVVLSGNHTEQSNFTSRSNQLYLRWSTDHATSKKGFKIRYAAPYCSLTHPLKNGGILNRTAGAVGSKVHYFCKPGYRMVGHSNATCRRNPLGMYQWDSLTPLCQAVSCGIPESPGNGSFTGNEFTLDSKVVYECHEGFKLESSQQATAVCQEDGLWSNKGKPPTCKPVACPSIEAQLSEHVIWRLVSGSLNEYGAQVLLSCSPGYYLEGWRLLRCQANGTWNIGDERPSCRVISCGSLSFPPNGNKIGTLTVYGATAIFTCNTGYTLVGSHVRECLANGLWSGSETRCLAGHCGSPDPIVNGHISGDGFSYRDTVVYQCNPGFRLVGTSVRICLQDHKWSGQTPVCVPITCGHPGNPAHGFTNGSEFNLNDVVNFTCNTGYLLQGVSRAQCRSNGQWSSPLPTCRVVNCSDPGFVENAIRHGQQNFPESFEYGMSILYHCKKGFYLLGSSALTCMANGLWDRSLPKCLAISCGHPGVPANAVLTGELFTYGAVVHYSCRGSESLIGNDTRVCQEDSHWSGALPHCTGNNPGFCGDPGTPAHGSRLGDDFKTKSLLRFSCEMGHQLRGSPERTCLLNGSWSGLQPVCEAVSCGNPGTPTNGMIVSSDGILFSSSVIYACWEGYKTSGLMTRHCTANGTWTGTAPDCTIISCGDPGTLANGIQFGTDFTFNKTVSYQCNPGYVMEAVTSATIRCTKDGRWNPSKPVCKAVLCPQPPPVQNGTVEGSDFRWGSSISYSCMDGYQLSHSAILSCEGRGVWKGEIPQCLPVFCGDPGIPAEGRLSGKSFTYKSEVFFQCKSPFILVGSSRRVCQADGTWSGIQPTCIDPAHNTCPDPGTPHFGIQNSSRGYEVGSTVFFRCRKGYHIQGSTTRTCLANLTWSGIQTECIPHACRQPETPAHADVRAIDLPTFGYTLVYTCHPGFFLAGGSEHRTCKADMKWTGKSPVCKSKGVREVNETVTKTPVPSDVFFVNSLWKGYYEYLGKRQPATLTVDWFNATSSKVNATFSEASPVELKLTGIYKKEEAHLLLKAFQIKGQADIFVSKFENDNWGLDGYVSSGLERGGFTFQGDIHGKDFGKFKLERQDPLNPDQDSSSHYHGTSSGSVAAAILVPFFALILSGFAFYLYKHRTRPKVQYNGYAGHENSNGQASFENPMYDTNLKPTEAKAVRFDTTLNTVCTVV

SEQ ID NO: 26880 - protein, 3565 aa, Homo sapiens; identical to SEQ ID NO: 26879
  REGION 1..3565: note = ENSP00000473359

SEQ ID NO: 26881 - protein, 3426 aa, Homo sapiens
  REGION 1..3426: note = ENSP00000441462
VLPSHTCGNPGEILKGVLHGTRFNIGDKIRYSCLPGYILEGHAILTCIVSPGNGASWDFPAPFCRAEGACGGTLRGTSSSISSPHFPSEYENNADCTWTILAEPGDTIALVFTDFQLEEGYDFLEISGTEAPSIWLTGMNLPSPVISSKNWLRLHFTSDSNHRRKGFNAQFQVKKAIELKSRGVKMLPSKDGSHKNSVLSQGGVALVSDMCPDPGIPENGRRAGSDFRVGANVQFSCEDNYVLQGSKSITCQRVTETLAAWSDHRPICRARTCGSNLRGPSGVITSPNYPVQYEDNAHCVWVITTTDPDKVIKLAFEEFELERGYDTLTVGDAGKVGDTRSVLYVLTGSSVPDLIVSMSNQMWLHLQSDDSIGSPGFKAVYQEIEKGGCGDPGIPAYGKRTGSSFLHGDTLTFECPAAFELVGERVITCQQNNQWSGNKPSCVFSCFFNFTASSGIILSPNYPEEYGNNMNCVWLIISEPGSRIHLIFNDFDVEPQFDFLAVKDDGISDITVLGTFSGNEVPSQLASSGHIVRLEFQSDHSTTGRGFNITYTTFGQNECHDPGIPINGRRFGDRFLLGSSVSFHCDDGFVKTQGSESITCILQDGNVVWSSTVPRCEAPCGGHLTASSGVILPPGWPGYYKDSLHCEWIIEAKPGHSIKITFDRFQTEVNYDTLEVRDGPASSSPLIGEYHGTQAPQFLISTGNFMYLLFTTDNSRSSIGFLIHYESVTLESDSCLDPGIPVNGHRHGGDFGIRSTVTFSCDPGYTLSDDEPLVCERNHQWNHALPSCDALCGGYIQGKSGTVLSPGFPDFYPNSLNCTWTIEVSHGKGVQMIFHTFHLESSHDYLLITEDGSFSEPVARLTGSVLPHTIKAGLFGNFTAQLRFISDFSISYEGFNITFSEYDLEPCDDPGVPAFSRRIGFHFGVGDSLTFSCFLGYRLEGATKLTCLGGGRRVWSAPLPRCVAECGASVKGNEGTLLSPNFPSNYDNNHECIYKIETEAGKGIHLRTRSFQLFEGDTLKVYDGKDSSSRPLGTFTKNELLGLILNSTSNHLWLEFNTNGSDTDQGFQLTYTSFDLVKCEDPGIPNYGYRIRDEGHFTDTVVLYSCNPGYAMHGSNTLTCLSGDRRVWDKPLPSCIAECGGQIHAATSGRILSPGYPAPYDNNLHCTWIIEADPGKTISLHFIVFDTEMAHDILKVWDGPVDSDILLKEWSGSALPEDIHSTFNSLTLQFDSDFFISKSGFSIQFSTSIAATCNDPGMPQNGTRYGDSREAGDTVTFQCDPGYQLQGQAKITCVQLNNRFFWQPDPPTCIAACGGNLTGPAGVILSPNYPQPYPPGKECDWRVKVNPDFVIALIFKSFNMEPSYDFLHIYEGEDSNSPLIGSYQGSQAPERIESSGNSLFLAFRSDASVGLSGFAIEFKEKPREACFDPGNIMNGTRVGTDFKLGSTITYQCDSGYKILDPSSITCVIGADGKPSWDQVLPSCNAPCGGQYTGSEGVVLSPNYPHNYTAGQICLYSITVPKEFVVFGQFAYFQTALNDLAELFDGTHAQARLLSSLSGSHSGETLPLATSNQILLRFSAKSGASARGFHFVYQAVPRTSDTQCSSVPEPRYGRRIGSEFSAGSIVRFECNPGYLLQGSTALHCQSVPNALAQWNDTIPSCVVPCSGNFTQRRGTILSPGYPEPYGNNLNCIWKIIVTEGSGIQIQVISFATEQNWDSLEIHDGGDVTAPRLGSFSGTTVPALLNSTSNQLYLHFQSDISVAAAGFHLEYKTVGLAACQEPALPSNSIKIGDRYMVNDVLSFQCEPGYTLQGRSHISCMPGTVRRWNYPSPLCIATCGGTLSTLGGVILSPGFPGSYPNNLDCTWRISLPIGYGAHIQFLNFSTEANHDFLEIQNGPYHTSPMIGQFSGTDLPAALLSTTHETLIHFYSDHSQNRQGFKLAYQAYELQNCPDPPPFQNGYMINSDYSVGQSVSFECYPGYILIGHPVLTCQHGINRNWNYPFPRCDAPCGYNVTSQNGTIYSPGFPDEYPILKDCIWLITVPPGHGVYINFTLLQTEAVNDYIAVWDGPDQNSPQLGVFSGNTALETAYSSTNQVLLKFHSDFSNGGFFVLNFHAFQLKKCQPPPAVPQAEMLTEDDDFEIGDFVKYQCHPGYTLVGTDILTCKLSSQLQFEGSLPTCEAQCPANEVRTGSSGVILSPGYPGNYFNSQTCSWSIKVEPNYNITIFVDTFQSEKQFDALEVFDGSSGQSPLLVVLSGNHTEQSNFTSRSNQLYLRWSTDHATSKKGFKIRYAAPYCSLTHPLKNGGILNRTAGAVGSKVHYFCKPGYRMVGHSNATCRRNPLGMYQWDSLTPLCQAVSCGIPESPGNGSFTGNEFTLDSKVVYECHEGFKLESSQQATAVCQEDGLWSNKGKPPTCKPVACPSIEAQLSEHVIWRLVSGSLNEYGAQVLLSCSPGYYLEGWRLLRCQANGTWNIGDERPSCRVISCGSLSFPPNGNKIGTLTVYGATAIFTCNTGYTLVGSHVRECLANGLWSGSETRCLAGHCGSPDPIVNGHISGDGFSYRDTVVYQCNPGFRLVGTSVRICLQDHKWSGQTPVCVPITCGHPGNPAHGFTNGSEFNLNDVVNFTCNTGYLLQGVSRAQCRSNGQWSSPLPTCRVVNCSDPGFVENAIRHGQQNFPESFEYGMSILYHCKKGFYLLGSSALTCMANGLWDRSLPKCLAISCGHPGVPANAVLTGELFTYGAVVHYSCRGSESLIGNDTRVCQEDSHWSGALPHCTGNNPGFCGDPGTPAHGSRLGDDFKTKSLLRFSCEMGHQLRGSPERTCLLNGSWSGLQPVCEAVSCGNPGTPTNGMIVSSDGILFSSSVIYACWEGYKTSGLMTRHCTANGTWTGTAPDCTIISCGDPGTLANGIQFGTDFTFNKTVSYQCNPGYVMEAVTSATIRCTKDGRWNPSKPVCKAVLCPQPPPVQNGTVEGSDFRWGSSISYSCMDGYQLSHSAILSCEGRGVWKGEIPQCLPVFCGDPGIPAEGRLSGKSFTYKSEVFFQCKSPFILVGSSRRVCQADGTWSGIQPTCIDPAHNTCPDPGTPHFGIQNSSRGYEVGSTVFFRCRKGYHIQGSTTRTCLANLTWSGIQTECIPHACRQPETPAHADVRAIDLPTFGYTLVYTCHPGFFLAGGSEHRTCKADMKWTGKSPVCKSKGVREVNETVTKTPVPSDVFFVNSLWKGYYEYLGKRQPATLTVDWFNATSSKVNATFSEASPVELKLTGIYKKEEAHLLLKAFQIKGQADIFVSKFENDNWGLDGYVSSGLERGGFTFQGDIHGKDFGKFKLERQDPLNPDQDSSSHYHGTSSGSVAAAILVPFFALILSGFAFYLYKHRTRPKVQYNGYAGHENSNGQASFENPMYDTNLKPTEAKAVRFDTTLNTVCTVV

SEQ ID NO: 26882 - protein, 2967 aa, Homo sapiens; identical to SEQ ID NO: 26875
  REGION 1..2967: note = ENSP00000334828
  VARIANT 1: note = Any amino acid

SEQ ID NO: 26883 - protein, 3388 aa, Homo sapiens; identical to SEQ ID NO: 26876
  REGION 1..3388: note = ENSP00000383047

SEQ ID NO: 26884 - protein, 3388 aa, Homo sapiens; identical to SEQ ID NO: 26876
  REGION 1..3388: note = ENSP00000473617

SEQ ID NO: 26885 - protein, 3564 aa, Homo sapiens; identical to SEQ ID NO: 26878
  REGION 1..3564: note = ENSP00000489225

SEQ ID NO: 26886 - protein, 3565 aa, Homo sapiens; identical to SEQ ID NO: 26879
  REGION 1..3565: note = ENSP00000430733

SEQ ID NO: 26887 - protein, 3565 aa, Homo sapiens; identical to SEQ ID NO: 26879
  REGION 1..3565: note = ENSP00000473359

SEQ ID NO: 26888 - protein, 3426 aa, Homo sapiens; identical to SEQ ID NO: 26881
  REGION 1..3426: note = ENSP00000441462

SEQ ID NO: 26889 - protein, 3487 aa, Homo sapiens
  REGION 1..3487: note = ENSP00000241312
MRLISIAPGPRWQVQSHHPRSAGQNCTFQLHGPNGTVESPGFPYGYPNYANCTWTITAEEQHRIQLVFQSFALEEDFDVLSVFDGPPQPENLRTRLTGFQLPATIVSAATTLSLRLISDYAVSAQGFHATYEVLPSHTCGNPGRLPNGIQQGSTFNLGDKVRYSCNLGFFLEGHAVLTCHAGSENSATWDFPLPSCRADDACGGTLRGQSGIISSPHFPSEYHNNADCTWTILAELGDTIALVFIDFQLEDGYDFLEVTGTEGSSLWFTGASLPAPVISSKNWLRLHFTSDGNHRQRGFSAQYQVKKQIELKSRGVKLMPSKDNSQKTSVLTQVGVSQGHNMCPDPGIPERGKRLGSDFRLGSSVQFTCNEGYDLQGSKRITCMKVSDMFAAWSDHRPVCRARMCDAHLRGPSGIITSPNFPIQYDNNAHCVWIITALNPSKVIKLAFEEFDLERGYDTLTVGDGGQDGDQKTVLYILTGTSVPDLIVSTNHQMWLLFQTDGSGSSLGFKASYEEIEQGSCGDPGIPAYGRREGSRFHHGDTLKFECQPAFELVGQKAITCQKNNQWSAKKPGCVFSCFFNFTSPSGVVLSPNYPEDYGNHLHCVWLILARPESRIHLAFNDIDVEPQFDFLVIKDGATAEAPVLGTFSGNQLPSSITSSGHVARLEFQTDHSTGKRGFNITFTTFRHNECPDPGVPVNGKRFGDSLQLGSSISFLCDEGFLGTQGSETITCVLKEGSVVWNSAVLRCEAPCGGHLTSPSGTILSPGWPGFYKDALSCAWVIEAQPGYPIKITFDRFKTEVNYDTLEVRDGRTYSAPLIGVYHGTQVPQFLISTSNYLYLLFSTDKSHSDIGFQLRYETITLQSDHCLDPGIPVNGQRHGNDFYVGALVTFSCDSGYTLSDGEPLECEPNFQWSRALPSCEALCGGFIQGSSGTILSPGFPDFYPNNLNCTWIIETSHGKGVFFTFHTFHLESGHDYLLITENGSFTQPLRQLTGSRLPAPISAGLYGNFTAQVRFISDFSMSYEGFNITFSEYDLEPCEEPEVPAYSIRKGLQFGVGDTLTFSCFPGYRLEGTARITCLGGRRRLWSSPLPRCVAECGNSVTGTQGTLLSPNFPVNYNNNHECIYSIQTQPGKGIQLKARAFELSEGDVLKVYDGNNNSARLLGVFSHSEMMGVTLNSTSSSLWLDFITDAENTSKGFELHFSSFELIKCEDPGTPKFGYKVHDEGHFAGSSVSFSCDPGYSLRGSEELLCLSGERRTWDRPLPTCVAECGGTVRGEVSGQVLSPGYPAPYEHNLNCIWTIEAEAGCTIGLHFLVFDTEEVHDVLRIWDGPVESGVLLKELSGPALPKDLHSTFNSVVLQFSTDFFTSKQGFAIQFSVSTATSCNDPGIPQNGSRSGDSWEAGDSTVFQCDPGYALQGSAEISCVKIENRFFWQPSPPTCIAPCGGDLTGPSGVILSPNYPEPYPPGKECDWKVTVSPDYVIALVFNIFNLEPGYDFLHIYDGRDSLSPLIGSFYGSQLPGRIESSSNSLFLAFRSDASVSNAGFVIDYTENPRESCFDPGSIKNGTRVGSDLKLGSSVTYYCHGGYEVEGTSTLSCILGPDGKPVWNNPRPVCTAPCGGQYVGSDGVVLSPNYPQNYTSGQICLYFVTVPKDYVVFGQFAFFHTALNDVVEVHDGHSQHSRLLSSLSGSHTGESLPLATSNQVLIKFSAKGLAPARGFHFVYQAVPRTSATQCSSVPEPRYGKRLGSDFSVGAIVRFECNSGYALQGSPEIECLPVPGALAQWNVSAPTCVVPCGGNLTERRGTILSPGFPEPYLNSLNCVWKIVVPEGAGIQIQVVSFVTEQNWDSLEVFDGADNTVTMLGSFSGTTVPALLNSTSNQLYLHFYSDISVSAAGFHLEYKTVGLSSCPEPAVPSNGVKTGERYLVNDVVSFQCEPGYALQGHAHISCMPGTVRRWNYPPPLCIAQCGGTVEEMEGVILSPGFPGNYPSNMDCSWKIALPVGFGAHIQFLNFSTEPNHDYIEIRNGPYETSRMMGRFSGSELPSSLLSTSHETTVYFHSDHSQNRPGFKLEYQDLTYSHQISSFLRGFDLSELERTNSTPPVAASYVWDLDPGCEAYELQECPDPEPFANGIVRGAGYNVGQSVTFECLPGYQLTGHPVLTCQHGTNRNWDHPLPKCEVPCGGNITSSNGTVYSPGFPSPYSSSQDCVWLITVPIGHGVRLNLSLLQTEPSGDFITIWDGPQQTAPRLGVFTRSMAKKTVQSSSNQVLLKFHRDAATGGIFAIAFSAYPLTKCPPPTILPNAEVVTENEEFNIGDIVRYRCLPGFTLVGNEILTCKLGTYLQFEGPPPICEVHCPTNELLTDSTGVILSQSYPGSYPQFQTCSWLVRVEPDYNISLTVEYFLSEKQYDEFEIFDGPSGQSPLLKALSGNYSAPLIVTSSSNSVYLRWSSDHAYNRKGFKIRYSAPYCSLPRAPLHGFILGQTSTQPGGSIHFGCNAGYRLVGHSMAICTRHPQGYHLWSEAIPLCQALSCGLPEAPKNGMVFGKEYTVGTKAMYSCSEGYHLQAGAEATAECLDTGLWSNRNVPPQCVPVTCPDVSSISVEHGRWRLIFETQYQFQAQLMLICDPGYYYTGQRVIRCQANGKWSLGDSTPTCRIISCGELPIPPNGHRIGTLSVYGATAIFSCNSGYTLVGSRVRECMANGLWSGSEVRCLAGHCGTPEPIVNGHINGENYSYRGSVVYQCNAGFRLIGMSVRICQQDHHWSGKTPFCVLVSCGHPGSPPHSQMSGDSYTVGAVVRYSCIGKRTLVGNSTRMCGLDGHWTGSLPHCSGTSVGVCGDPGIPAHGIRLGDSFDPGTVMRFSCEAGHVLRGSSERTCQANGSWSGSQPECGVISCGNPGTPSNARVVFSDGLVFSSSIVYECREGYYATGLLSRHCSVNGTWTGSDPECLVINCGDPGIPANGLRLGNDFRYNKTVTYQCVPGYMMESHRVSVLSCTKDRTWNGTKPVCKALMCKPPPLIPNGKVVGSDFMWGSSVTYACLEGYQLSLPAVFTCEGNGSWTGELPQCFPVFCGDPGVPSRGRREDRGFSYRSSVSFSCHPPLVLVGSPRRFCQSDGTWSGTQPSCIDPTLTTCADPGVPQFGIQNNSQGYQVGSTVLFRCQKGYLLQGSTTRTCLPNLTWSGTPPDCVPHHCRQPETPTHANVGALDLPSMGYTLIYSCQEGFSLKGGSEHRTCKADGSWTGKPPICLEVRPSGRPINTAREPPLTQALIPGDVFAKNSLWKGAYEYQGKKQPAMLRVTGFQVANSKVNATMIDHSGVELHLAGTYKKEDFHLLLQVYQITGPVEIFMNKFKDDHWALDGHVSSESSGATFIYQGSVKGQGFGQFGFQRLDLRLLESDPESIGRHFASNSSSVAAAILVPFIALIIAGFVLYLYKHRRRPKVPFNGYAGHENTNVRATFENPMYDRNIQPTDIMASEAEFTVSTVCTAV

SEQ ID NO: 26890 - protein, 1167 aa, Homo sapiens
  REGION 1..1167: note = ENSP00000362478
MVIVILFPAECGNSVTGTQGTLLSPNFPVNYNNNHECIYSIQTQPGKGIQLKARAFELSEGDVLKVYDGNNNSARLLGVFSHSEMMGVTLNSTSSSLWLDFITDAENTSKGFELHFSSFELIKCEDPGTPKFGYKVHDEGHFAGSSVSFSCDPGYSLRGSEELLCLSGERRTWDRPLPTCVAECGGTVRGEVSGQVLSPGYPAPYEHNLNCIWTIEAEAGCTIGLHFLVFDTEEVHDVLRIWDGPVESGVLLKELSGPALPKDLHSTFNSVVLQFSTDFFTSKQGFAIQFSVSTATSCNDPGIPQNGSRSGDSWEAGDSTVFQCDPGYALQGSAEISCVKIENRFFWQPSPPTCIAPCGGDLTGPSGVILSPNYPEPYPPGKECDWKVTVSPDYVIALVFNIFNLEPGYDFLHIYDGRDSLSPLIGSFYGSQLPGRIESSSNSLFLAFRSDASVSNAGFVIDYTENPRESCFDPGSIKNGTRVGSDLKLGSSVTYYCHGGYEVEGTSTLSCILGPDGKPVWNNPRPVCTAPCGGQYVGSDGVVLSPNYPQNYTSGQICLYFVTVPKDYVVFGQFAFFHTALNDVVEVHDGHSQHSRLLSSLSGSHTGESLPLATSNQVLIKFSAKGLAPARGFHFVYQAVPRTSATQCSSVPEPRYGKRLGSDFSVGAIVRFECNSGYALQGSPEIECLPVPGALAQWNVSAPTCVVPCGGNLTERRGTILSPGFPEPYLNSLNCVWKIVVPEGAGIQIQVVSFVTEQNWDSLEVFDGADNTVTMLGSFSGTTVPALLNSTSNQLYLHFYSDISVSAAGFHLEYKTVGLSSCPEPAVPSNGVKTGERYLVNDVVSFQCEPGYALQGHAHISCMPGTVRRWNYPPPLCIAQCGGTVEEMEGVILSPGFPGNYPSNMDCSWKIALPVGFGAHIQFLNFSTEPNHDYIEIRNGPYETSRMMGRFSGSELPSSLLSTSHETTVYFHSDHSQNRPGFKLEYQAYELQECPDPEPFANGIVRGAGYNVGQSVTFECLPGYQLTGHPVLTCQHGTNRNWDHPLPKCEVPCGGNITSSNGTVYSPGFPSPYSSSQDCVWLITVPIGHGVRLNLSLLQTEPSGDFITIWDGPQQTAPRLGVFTRSMAKKTVQSSSNQVLLKFHRDAATGGIFAIAFSGHLAAVCTL

SEQ ID NO: 26891 - protein, 426 aa, Homo sapiens
  REGION 1..426: note = ENSP00000362475
MLGSFSGTTVPALLNSTSNQLYLHFYSDISVSAAGFHLEYKTVGLSSCPEPAVPSNGVKTGERYLVNDVVSFQCEPGYALQGHAHISCMPGTVRRWNYPPPLCIAQCGGTVEEMEGVILSPGFPGNYPSNMDCSWKIALPVGFGAHIQFLNFSTEPNHDYIEIRNGPYETSRMMGRFSGSELPSSLLSTSHETTVYFHSDHSQNRPGFKLEYQAYELQECPDPEPFANGIVRGAGYNVGQSVTFECLPGYQLTGHPVLTCQHGTNRNWDHPLPKCEVPCGGNITSSNGTVYSPGFPSPYSSSQDCVWLITVPIGHGVRLNLSLLQTEPSGDFITIWDGPQQTAPRLGVFTRSMAKKTVQSSSNQVLLKFHRDAATGGIFAIAFSDHCRYFNQKSGKLDFTPSSTLGQLCKTLHRSLPHLRLQFLHL

SEQ ID NO: 26892 - protein, 225 aa, Homo sapiens
  REGION 1..225: note = ENSP00000340311
MCDAHLRGPSGIITSPNFPIQYDNNAHCVWIITALNPSKAGGDPGNIQCNKEGLSVETQSLRLRNRSCLLGNSKDNGCCVPNPVHGTGLQVIKLAFEEFDLERGYDTLTVGDGGQDGDQKTVLYILTGTSVPDLIVSTNHQMWLLFQTDGSGSSLGFKASYEEIEQGSCGDPGIPAYGRREGSRFHHGDTLKFECQPAFELVGQKAITCQKNNQWSAKKPGCVCK

SEQ ID NO: 26893 - protein, 3487 aa, Homo sapiens; identical to SEQ ID NO: 26889
  REGION 1..3487: note = ENSP00000362486

SEQ ID NO: 26894 - protein, 3631 aa, Homo sapiens
  REGION 1..3631: note = ENSP00000362479
MPRSRGRELGRCGCPAGRARGETGISALVPGAGSRWGRPPPPTPPPLLLLLGCGLLSVSAAAGQNCTFQLHGPNGTVESPGFPYGYPNYANCTWTITAEEQHRIQLVFQSFALEEDFDVLSVFDGPPQPENLRTRLTGFQLPATIVSAATTLSLRLISDYAVSAQGFHATYEVLPSHTCGNPGRLPNGIQQGSTFNLGDKVRYSCNLGFFLEGHAVLTCHAGSENSATWDFPLPSCRADDACGGTLRGQSGIISSPHFPSEYHNNADCTWTILAELGDTIALVFIDFQLEDGYDFLEVTGTEGSSLWFTGASLPAPVISSKNWLRLHFTSDGNHRQRGFSAQYQVKKQIELKSRGVKLMPSKDNSQKTSVLTQVGVSQGHNMCPDPGIPERGKRLGSDFRLGSSVQFTCNEGYDLQGSKRITCMKVSDMFAAWSDHRPVCRARMCDAHLRGPSGIITSPNFPIQYDNNAHCVWIITALNPSKVIKLAFEEFDLERGYDTLTVGDGGQDGDQKTVLYILTGTSVPDLIVSTNHQMWLLFQTDGSGSSLGFKASYEEIEQGSCGDPGIPAYGRREGSRFHHGDTLKFECQPAFELVGQKAITCQKNNQWSAKKPGCVFSCFFNFTSPSGVVLSPNYPEDYGNHLHCVWLILARPESRIHLAFNDIDVEPQFDFLVIKDGATAEAPVLGTFSGNQLPSSITSSGHVARLEFQTDHSTGKRGFNITFTTFRHNECPDPGVPVNGKRFGDSLQLGSSISFLCDEGFLGTQGSETITCVLKEGSVVWNSAVLRCEAPCGGHLTSPSGTILSPGWPGFYKDALSCAWVIEAQPGYPIKITFDRFKTEVNYDTLEVRDGRTYSAPLIGVYHGTQVPQFLISTSNYLYLLFSTDKSHSDIGFQLRYETITLQSDHCLDPGIPVNGQRHGNDFYVGALVTFSCDSGYTLSDGEPLECEPNFQWSRALPSCEALCGGFIQGSSGTILSPGFPDFYPNNLNCTWIIETSHGKGVFFTFHTFHLESGHDYLLITENGSFTQPLRQLTGSRLPAPISAGLYGNFTAQVRFISDFSMSYEGFNITFSEYDLEPCEEPEVPAYSIRKGLQFGVGDTLTFSCFPGYRLEGTARITCLGGRRRLWSSPLPRCVAECGNSVTGTQGTLLSPNFPVNYNNNHECIYSIQTQPGKGIQLKARAFELSEGDVLKVYDGNNNSARLLGVFSHSEMMGVTLNSTSSSLWLDFITDAENTSKGFELHFSSFELIKCEDPGTPKFGYKVHDEGHFAGSSVSFSCDPGYSLRGSEELLCLSGERRTWDRPLPTCVAECGGTVRGEVSGQVLSPGYPAPYEHNLNCIWTIEAEAGCTIGLHFLVFDTEEVHDVLRIWDGPVESGVLLKELSGPALPKDLHSTFNSVVLQFSTDFFTSKQGFAIQFSVSTATSCNDPGIPQNGSRSGDSWEAGDSTVFQCDPGYALQGSAEISCVKIENRFFWQPSPPTCIAPCGGDLTGPSGVILSPNYPEPYPPGKECDWKVTVSPDYVIALVFNIFNLEPGYDFLHIYDGRDSLSPLIGSFYGSQLPGRIESSSNSLFLAFRSDASVSNAGFVIDYTENPRESCFDPGSIKNGTRVGSDLKLGSSVTYYCHGGYEVEGTSTLSCILGPDGKPVWNNPRPVCTAPCGGQYVGSDGVVLSPNYPQNYTSGQICLYFVTVPKDYVVFGQFAFFHTALNDVVEVHDGHSQHSRLLSSLSGSHTGESLPLATSNQVLIKFSAKGLAPARGFHFVYQAVPRTSATQCSSVPEPRYGKRLGSDFSVGAIVRFECNSGYALQGSPEIECLPVPGALAQWNVSAPTCVVPCGGNLTERRGTILSPGFPEPYLNSLNCVWKIVVPEGAGIQIQVVSFVTEQNWDSLEVFDGADNTVTMLGSFSGTTVPALLNSTSNQLYLHFYSDISVSAAGFHLEYKTVGLSSCPEPAVPSNGVKTGERYLVNDVVSFQCEPGYALQGHAHISCMPGTVRRWNYPPPLCIAQCGGTVEEMEGVILSPGFPGNYPSNMDCSWKIALPVGFGAHIQFLNFSTEPNHDYIEIRNGPYETSRMMGRFSGSELPSSLLSTSHETTVYFHSDHSQNRPGFKLEYQAYELQECPDPEPFANGIVRGAGYNVGQSVTFECLPGYQLTGHPVLTCQHGTNRNWDHPLPKCEVPCGGNITSSNGTVYSPGFPSPYSSSQDCVWLITVPIGHGVRLNLSLLQTEPSGDFITIWDGPQQTAPRLGVFTRSMAKKTVQSSSNQVLLKFHRDAATGGIFAIAFSAYPLTKCPPPTILPNAEVVTENEEFNIGDIVRYRCLPGFTLVGNEILTCKLGTYLQFEGPPPICEVHCPTNELLTDSTGVILSQSYPGSYPQFQTCSWLVRVEPDYNISLTVEYFLSEKQYDEFEIFDGPSGQSPLLKALSGNYSAPLIVTSSSNSVYLRWSSDHAYNRKGFKIRYSAPYCSLPRAPLHGFILGQTSTQPGGSIHFGCNAGYRLVGHSMAICTRHPQGYHLWSEAIPLCQALSCGLPEAPKNGMVFGKEYTVGTKAMYSCSEGYHLQAGAEATAECLDTGLWSNRNVPPQCVPVTCPDVSSISVEHGRWRLIFETQYQFQAQLMLICDPGYYYTGQRVIRCQANGKWSLGDSTPTCRIISCGELPIPPNGHRIGTLSVYGATAIFSCNSGYTLVGSRVRECMANGLWSGSEVRCLATQTKLHSIFYKLLFDVLSSPSLTKAGHCGTPEPIVNGHINGENYSYRGSVVYQCNAGFRLIGMSVRICQQDHHWSGKTPFCVPITCGHPGNPVNGLTQGNQFNLNDVVKFVCNPGYMAEGAARSQCLASGQWSDMLPTCRIINCTDPGHQENSVRQVHASGPHRFSFGTTVSYRCNHGFYLLGTPVLSCQGDGTWDRPRPQCLLVSCGHPGSPPHSQMSGDSYTVGAVVRYSCIGKRTLVGNSTRMCGLDGHWTGSLPHCSGTSVGVCGDPGIPAHGIRLGDSFDPGTVMRFSCEAGHVLRGSSERTCQANGSWSGSQPECGVISCGNPGTPSNARVVFSDGLVFSSSIVYECREGYYATGLLSRHCSVNGTWTGSDPECLVINCGDPGIPANGLRLGNDFRYNKTVTYQCVPGYMMESHRVSVLSCTKDRTWNGTKPVCKALMCKPPPLIPNGKVVGSDFMWGSSVTYACLEGYQLSLPAVFTCEGNGSWTGELPQCFPVFCGDPGVPSRGRREDRGFSYRSSVSFSCHPPLVLVGSPRRFCQSDGTWSGTQPSCIDPTLTTCADPGVPQFGIQNNSQGYQVGSTVLFRCQKGYLLQGSTTRTCLPNLTWSGTPPDCVPHHCRQPETPTHANVGALDLPSMGYTLIYSCQEGFSLKGGSEHRTCKADGSWTGKPPICLEVRPSGRPINTAREPPLTQALIPGDVFAKNSLWKGAYEYQGKKQPAMLRVTGFQVANSKVNATMIDHSGVELHLAGTYKKEDFHLLLQVYQITGPVEIFMNKFKDDHWALDGHVSSESSGATFIYQGSVKGQGFGQFGFQRLDLRLLESDPESIGRHFASNSSSVAAAILVPFIALIIAGFVLYLYKHRRRPKVPFNGYAGHENTNVRATFENPMYDRNIQPTDIMASEAEFTVSTVCTAV

SEQ ID NO: 26895 - protein, 3591 aa, Homo sapiens
  REGION 1..3591: note = ENSP00000483463
MRLISIAPGPRWQVQSHHPRSAGQNCTFQLHGPNGTVESPGFPYGYPNYANCTWTITAEEQHRIQLVFQSFALEEDFDVLSVFDGPPQPENLRTRLTGFQLPATIVSAATTLSLRLISDYAVSAQGFHATYEVLPSHTCGNPGRLPNGIQQGSTFNLGDKVRYSCNLGFFLEGHAVLTCHAGSENSATWDFPLPSCRADDACGGTLRGQSGIISSPHFPSEYHNNADCTWTILAELGDTIALVFIDFQLEDGYDFLEVTGTEGSSLWFTGASLPAPVISSKNWLRLHFTSDGNHRQRGFSAQYQVKKQIELKSRGVKLMPSKDNSQKTSVLTQVGVSQGHNMCPDPGIPERGKRLGSDFRLGSSVQFTCNEGYDLQGSKRITCMKVSDMFAAWSDHRPVCRARMCDAHLRGPSGIITSPNFPIQYDNNAHCVWIITALNPSKVIKLAFEEFDLERGYDTLTVGDGGQDGDQKTVLYILTGTSVPDLIVSTNHQMWLLFQTDGSGSSLGFKASYEEIEQGSCGDPGIPAYGRREGSRFHHGDTLKFECQPAFELVGQKAITCQKNNQWSAKKPGCVFSCFFNFTSPSGVVLSPNYPEDYGNHLHCVWLILARPESRIHLAFNDIDVEPQFDFLVIKDGATAEAPVLGTFSGNQLPSSITSSGHVARLEFQTDHSTGKRGFNITFTTFRHNECPDPGVPVNGKRFGDSLQLGSSISFLCDEGFLGTQGSETITCVLKEGSVVWNSAVLRCEAPCGGHLTSPSGTILSPGWPGFYKDALSCAWVIEAQPGYPIKITFDRFKTEVNYDTLEVRDGRTYSAPLIGVYHGTQVPQFLISTSNYLYLLFSTDKSHSDIGFQLRYETITLQSDHCLDPGIPVNGQRHGNDFYVGALVTFSCDSGYTLSDGEPLECEPNFQWSRALPSCEALCGGFIQGSSGTILSPGFPDFYPNNLNCTWIIETSHGKGVFFTFHTFHLESGHDYLLITENGSFTQPLRQLTGSRLPAPISAGLYGNFTAQVRFISDFSMSYEGFNITFSEYDLEPCEEPEVPAYSIRKGLQFGVGDTLTFSCFPGYRLEGTARITCLGGRRRLWSSPLPRCVAECGNSVTGTQGTLLSPNFPVNYNNNHECIYSIQTQPGKGIQLKARAFELSEGDVLKVYDGNNNSARLLGVFSHSEMMGVTLNSTSSSLWLDFITDAENTSKGFELHFSSFELIKCEDPGTPKFGYKVHDEGHFAGSSVSFSCDPGYSLRGSEELLCLSGERRTWDRPLPTCVAECGGTVRGEVSGQVLSPGYPAPYEHNLNCIWTIEAEAGCTIGLHFLVFDTEEVHDVLRIWDGPVESGVLLKELSGPALPKDLHSTFNSVVLQFSTDFFTSKQGFAIQFSVSTATSCNDPGIPQNGSRSGDSWEAGDSTVFQCDPGYALQGSAEISCVKIENRFFWQPSPPTCIAPCGGDLTGPSGVILSPNYPEPYPPGKECDWKVTVSPDYVIALVFNIFNLEPGYDFLHIYDGRDSLSPLIGSFYGSQLPGRIESSSNSLFLAFRSDASVSNAGFVIDYTENPRESCFDPGSIKNGTRVGSDLKLGSSVTYYCHGGYEVEGTSTLSCILGPDGKPVWNNPRPVCTAPCGGQYVGSDGVVLSPNYPQNYTSGQICLYFVTVPKDYVVFGQFAFFHTALNDVVEVHDGHSQHSRLLSSLSGSHTGESLPLATSNQVLIKFSAKGLAPARGFHFVYQAVPRTSATQCSSVPEPRYGKRLGSDFSVGAIVRFECNSGYALQGSPEIECLPVPGALAQWNVSAPTCVVPCGGNLTERRGTILSPGFPEPYLNSLNCVWKIVVPEGAGIQIQVVSFVTEQNWDSLEVFDGADNTVTMLGSFSGTTVPALLNSTSNQLYLHFYSDISVSAAGFHLEYKTVGLSSCPEPAVPSNGVKTGERYLVNDVVSFQCEPGYALQGHAHISCMPGTVRRWNYPPPLCIAQCGGTVEEMEGVILSPGFPGNYPSNMDCSWKIALPVGFGAHIQFLNFSTEPNHDYIEIRNGPYETSRMMGRFSGSELPSSLLSTSHETTVYFHSDHSQNRPGFKLEYQAYELQECPDPEPFANGIVRGAGYNVGQSVTFECLPGYQLTGHPVLTCQHGTNRNWDHPLPKCEVPCGGNITSSNGTVYSPGFPSPYSSSQDCVWLITVPIGHGVRLNLSLLQTEPSGDFITIWDGPQQTAPRLGVFTRSMAKKTVQSSSNQVLLKFHRDAATGGIFAIAFSAYPLTKCPPPTILPNAEVVTENEEFNIGDIVRYRCLPGFTLVGNEILTCKLGTYLQFEGPPPICEVHCPTNELLTDSTGVILSQSYPGSYPQFQTCSWLVRVEPDYNISLTVEYFLSEKQYDEFEIFDGPSGQSPLLKALSGNYSAPLIVTSSSNSVYLRWSSDHAYNRKGFKIRYSAPYCSLPRAPLHGFILGQTSTQPGGSIHFGCNAGYRLVGHSMAICTRHPQGYHLWSEAIPLCQALSCGLPEAPKNGMVFGKEYTVGTKAMYSCSEGYHLQAGAEATAECLDTGLWSNRNVPPQCVPVTCPDVSSISVEHGRWRLIFETQYQFQAQLMLICDPGYYYTGQRVIRCQANGKWSLGDSTPTCRIISCGELPIPPNGHRIGTLSVYGATAIFSCNSGYTLVGSRVRECMANGLWSGSEVRCLATQTKLHSIFYKLLFDVLSSPSLTKAGHCGTPEPIVNGHINGENYSYRGSVVYQCNAGFRLIGMSVRICQQDHHWSGKTPFCVPITCGHPGNPVNGLTQGNQFNLNDVVKFVCNPGYMAEGAARSQCLASGQWSDMLPTCRIINCTDPGHQENSVRQVHASGPHRFSFGTTVSYRCNHGFYLLGTPVLSCQGDGTWDRPRPQCLLVSCGHPGSPPHSQMSGDSYTVGAVVRYSCIGKRTLVGNSTRMCGLDGHWTGSLPHCSGTSVGVCGDPGIPAHGIRLGDSFDPGTVMRFSCEAGHVLRGSSERTCQANGSWSGSQPECGVISCGNPGTPSNARVVFSDGLVFSSSIVYECREGYYATGLLSRHCSVNGTWTGSDPECLVINCGDPGIPANGLRLGNDFRYNKTVTYQCVPGYMMESHRVSVLSCTKDRTWNGTKPVCKALMCKPPPLIPNGKVVGSDFMWGSSVTYACLEGYQLSLPAVFTCEGNGSWTGELPQCFPVFCGDPGVPSRGRREDRGFSYRSSVSFSCHPPLVLVGSPRRFCQSDGTWSGTQPSCIDPTLTTCADPGVPQFGIQNNSQGYQVGSTVLFRCQKGYLLQGSTTRTCLPNLTWSGTPPDCVPHHCRQPETPTHANVGALDLPSMGYTLIYSCQEGFSLKGGSEHRTCKADGSWTGKPPICLEVRPSGRPINTAREPPLTQALIPGDVFAKNSLWKGAYEYQGKKQPAMLRVTGFQVANSKVNATMIDHSGVELHLAGTYKKEDFHLLLQVYQITGPVEIFMNKFKDDHWALDGHVSSESSGATFIYQGSVKGQGFGQFGFQRLDLRLLESDPESIGRHFASNSSSVAAAILVPFIALIIAGFVLYLYKHRRRPKVPFNGYAGHENTNVRATFENPMYDRNIQPTDIMASEAEFTVSTVCTAV

SEQ ID NO: 26896 - protein, 2322 aa, Homo sapiens
  REGION 1..2322: note = ENSP00000312506
MQSGPRPPLPAPGLALALTLTMLARLASAASFFGENHLEVPVATALTDIDLQLQFSTSQPEALLLLAAGPADHLLLQLYSGRLQVRLVLGQEELRLQTPAETLLSDSIPHTVVLTVVEGWATLSVDGFLNASSAVPGAPLEVPYGLFVGGTGTLGLPYLRGTSRPLRGCLHAATLNGRSLLRPLTPDVHEGCAEEFSASDDVALGFSGPHSLAAFPAWGTQDEGTLEFTLTTQSRQAPLAFQAGGRRGDFIYVDIFEGHLRAVVEKGQGTVLLHNSVPVADGQPHEVSVHINAHRLEISVDQYPTHTSNRGVLSYLEPRGSLLLGGLDAEASRHLQEHRLGLTPEATNASLLGCMEDLSVNGQRRGLREALLTRNMAAGCRLEEEEYEDDAYGHYEAFSTLAPEAWPAMELPEPCVPEPGLPPVFANFTQLLTISPLVVAEGGTAWLEWRHVQPTLDLMEAELRKSQVLFSVTRGARHGELELDIPGAQARKMFTLLDVVNRKARFIHDGSEDTSDQLVLEVSVTARVPMPSCLRRGQTYLLPIQVNPVNDPPHIIFPHGSLMVILEHTQKPLGPEVFQAYDPDSACEGLTFQVLGTSSGLPVERRDQPGEPATEFSCRELEAGSLVYVHRGGPAQDLTFRVSDGLQASPPATLKVVAIRPAIQIHRSTGLRLAQGSAMPILPANLSVETNAVGQDVSVLFRVTGALQFGELQKQGAGGVEGAEWWATQAFHQRDVEQGRVRYLSTDPQHHAYDTVENLALEVQVGQEILSNLSFPVTIQRATVWMLRLEPLHTQNTQQETLTTAHLEATLEEAGPSPPTFHYEVVQAPRKGNLQLQGTRLSDGQGFTQDDIQAGRVTYGATARASEAVEDTFRFRVTAPPYFSPLYTFPIHIGGDPDAPVLTNVLLVVPEGGEGVLSADHLFVKSLNSASYLYEVMERPRHGRLAWRGTQDKTTMVTSFTNEDLLRGRLVYQHDDSETTEDDIPFVATRQGESSGDMAWEEVRGVFRVAIQPVNDHAPVQTISRIFHVARGGRRLLTTDDVAFSDADSGFADAQLVLTRKDLLFGSIVAVDEPTRPIYRFTQEDLRKRRVLFVHSGADRGWIQLQVSDGQHQATALLEVQASEPYLRVANGSSLVVPQGGQGTIDTAVLHLDTNLDIRSGDEVHYHVTAGPRWGQLVRAGQPATAFSQQDLLDGAVLYSHNGSLSPRDTMAFSVEAGPVHTDATLQVTIALEGPLAPLKLVRHKKIYVFQGEAAEIRRDQLEAAQEAVPPADIVFSVKSPPSAGYLVMVSRGALADEPPSLDPVQSFSQEAVDTGRVLYLHSRPEAWSDAFSLDVASGLGAPLEGVLVELEVLPAAIPLEAQNFSVPEGGSLTLAPPLLRVSGPYFPTLLGLSLQVLEPPQHGALQKEDGPQARTLSAFSWRMVEEQLIRYVHDGSETLTDSFVLMANASEMDRQSHPVAFTVTVLPVNDQPPILTTNTGLQMWEGATAPIPAEALRSTDGDSGSEDLVYTIEQPSNGRVVLRGAPGTEVRSFTQAQLDGGLVLFSHRGTLDGGFRFRLSDGEHTSPGHFFRVTAQKQVLLSLKGSQTLTVCPGSVQPLSSQTLRASSSAGTDPQLLLYRVVRGPQLGRLFHAQQDSTGEALVNFTQAEVYAGNILYEHEMPPEPFWEAHDTLELQLSSPPARDVAATLAVAVSFEAACPQRPSHLWKNKGLWVPEGQRARITVAALDASNLLASVPSPQRSEHDVLFQVTQFPSRGQLLVSEEPLHAGQPHFLQSQLAAGQLVYAHGGGGTQQDGFHFRAHLQGPAGASVAGPQTSEAFAITVRDVNERPPQPQASVPLRLTRGSRAPISRAQLSVVDPDSAPGEIEYEVQRAPHNGFLSLVGGGLGPVTRFTQADVDSGRLAFVANGSSVAGIFQLSMSDGASPPLPMSLAVDILPSAIEVQLRAPLEVPQALGRSSLSQQQLRVVSDREEPEAAYRLIQGPQYGHLLVGGRPTSAFSQFQIDQGEVVFAFTNFSSSHDHFRVLALARGVNASAVVNVTVRALLHVWAGGPWPQGATLRLDPTVLDAGELANRTGSVPRFRLLEGPRHGRVVRVPRARTEPGGSQLVEQFTQQDLEDGRLGLEVGRPEGRAPGPAGDSLTLELWAQGVPPAVASLDFATEPYNAARPYSVALLSVPEAARTEAGKPESSTPTGEPGPMASSPEPAVAKGGFLSFLEANMFSVIIPMCLVLLLLALILPLLFYLRKRNKTGKHDVQVLTAKPRNGLAGDTETFRKVEPGQAIPLTAVPGQGPPPGGQPDPELLQFCRTPNPALKNGQYWV

SEQ ID NO: 26897 - protein, 2322 aa, Homo sapiens; identical to SEQ ID NO: 26896
  REGION 1..2322: note = ENSP00000312506

SEQ ID NO: 26898 - protein, 401 aa, Homo sapiens
  REGION 1..401: note = ENSP00000392096
MPPAIPEATEASGPPSPTPGDKLSPASELPKESPLEVWLNLGGSTPDPQGPELTYPFQGTLEPQPASDIIDIDYFEGLDGEGRGADLGSFPGSPGTSENHPDTEGETPSWSLLDLYDDFTPFDESDFYPTTSFYDDLDEEEEEEEDDKDAVGGGDLEDENELLVPTGKPGLGPGTGQPTSRWHAVPPQHTLGSVPGSSIALRPRPGEPGRDLASSENGTECRSGFVRHNGSCRSVCDLFPSYCHNGGQCYLVENIGAFCRCNTQDYIWHKGMRCESIITDFQVMCVAVGSAALVLLLLFMMTVFFAKKLYLLKTENTKLRRTNKFRTPSELHNDNFSLSTIAEGSHPNDDPSAPHKIQEVLKSCLKEEESFNIQNSMSPKLEGGKGDQADLDVNCLQNNLT

SEQ ID NO: 26899 - protein, 566 aa, Homo sapiens
  REGION 1..566: note = ENSP00000373244
MGRAGGGGPGRGPPPLLLFLGAALVLASGAVPAREAGSAVEAEELVKGSPAWEPPANDTREEAGPPAAGEDEASWTAPGGELAGPEEVLQESAAVTGTAWLEADSPGLGGVTAEAGSGDAQALPATLQAPHEVLGQSIMPPAIPEATEASGPPSPTPGDKLSPASELPKESPLEVWLNLGGSTPDPQGPELTYPFQGTLEPQPASDIIDIDYFEGLDGEGRGADLGSFPGSPGTSENHPDTEGETPSWSLLDLYDDFTPFDESDFYPTTSFYDDLDEEEEEEEDDKDAVGGGDLEDENELLVPTGKPGLGPGTGQPTSRWHAVPPQHTLGSVPGSSIALRPRPGEPGRDLASSENGTECRSGFVRHNGSCRSVCDLFPSYCHNGGQCYLVENIGAFCRCNTQDYIWHKGMRCESIITDFQVMCVAVGSAALVLLLLFMMTVFFAKKLYLLKTENTKLRRTNKFRTPSELHNDNFSLSTIAEGSHPNVRKLCNTPRTSSPHARALAHYDNVICQDDPSAPHKIQEVLKSCLKEEESFNIQNSMSPKLEGGKGDQADLDVNCLQNNLT

SEQ ID NO: 26900 - protein, 539 aa, Homo sapiens
  REGION 1..539: note = ENSP00000264723
MGRAGGGGPGRGPPPLLLFLGAALVLASGAVPAREAGSAVEAEELVKGSPAWEPPANDTREEAGPPAAGEDEASWTAPGGELAGPEEVLQESAAVTGTAWLEADSPGLGGVTAEAGSGDAQALPATLQAPHEVLGQSIMPPAIPEATEASGPPSPTPGDKLSPASELPKESPLEVWLNLGGSTPDPQGPELTYPFQGTLEPQPASDIIDIDYFEGLDGEGRGADLGSFPGSPGTSENHPDTEGETPSWSLLDLYDDFTPFDESDFYPTTSFYDDLDEEEEEEEDDKDAVGGGDLEDENELLVPTGKPGLGPGTGQPTSRWHAVPPQHTLGSVPGSSIALRPRPGEPGRDLASSENGTECRSGFVRHNGSCRSVCDLFPSYCHNGGQCYLVENIGAFCRCNTQDYIWHKGMRCESIITDFQVMCVAVGSAALVLLLLFMMTVFFAKKLYLLKTENTKLRRTNKFRTPSELHNDNFSLSTIAEGSHPNDDPSAPHKIQEVLKSCLKEEESFNIQNSMSPKLEGGKGDQADLDVNCLQNNLT

SEQ ID NO: 26901 - protein, 477 aa, Homo sapiens
  REGION 1..477: note = ENSP00000478923
MGRAGGGGPGRGPPPLLLFLGAALVLASGAVPAREAGSAVEAEELVKGSPAWEPPANDTREEAGPPAAGEDEASWTAPGGELAGPEEVLQESAAVTGTAWLEADSPGLGGVTAEAGSGDAQALPATLQAPHEVLGQSIMPPAIPEATEASGPPSPTPGDKLSPASELPKESPLEVWLNLGGSTPDPQGPELTYPFQGTLEPQPASDIIDIDYFEGLDGEGRGADLGSFPGSPGTSENHPDTEGETPSWSLLDLYDDFTPFDESDFYPTTSFYDDLDEEEEEEEDDKDAVGGGDLEDENELLVPTGKPGLGPGTGQPTSRWHAVPPQHTLGSVPGSSIALRPRPGEPGRDLASSENGTECRSGFVRHNGSCRSVCDLFPSYCHNGGQCYLVENIGAFCRCNTQDYIWHKGMRCESIITDFQVMCVAVGSAALVLLLLFMMTVFFAKKLYLLKTENTKLRRTKMILVLPTKSRRFSSPA

SEQ ID NO: 26902 - protein, 589 aa, Homo sapiens
  REGION 1..589: note = ENSP00000273153
MTGLLKRKFDQLDEDNSSVSSSSSSSGCQSRSCSPSSSVSRAWDSEEEGPWDQMPLPDRDFCGPRSFTPLSILKRARRERPGRVAFDGITVFYFPRCQGFTSVPSRGGCTLGMALRHSACRRFSLAEFAQEQARARHEKLRQRLKEEKLEMLQWKLSAAGVPQAEAGLPPVVDAIDDASVEEDLAVAVAGGRLEEVSFLQPYPARRRRALLRASGVRRIDREEKRELQALRQSREDCGCHCDRICDPETCSCSLAGIKCQMDHTAFPCGCCREGCENPMGRVEFNQARVQTHFIHTLTRLQLEQEAESFRELEAPAQGSPPSPGEEALVPTFPLAKPPMNNELGDNSCSSDMTDSSTASSSASGTSEAPDCPTHPGLPGPGFQPGVDDDSLARILSFSDSDFGGEEEEEEEGSVGNLDNLSCFHPADIFGTSDPGGLASWTHSYSGCSFTSGVLDENANLDASCFLNGGLEGSREGSLPGTSVPPSMDAGRSSSVDLSLSSCDSFELLQALPDYSLGPHYTSQKVSDSLDNIEAPHFPLPGLSPPGDASSCFLESLMGFSEPAAEALDPFIDSQFEDTVPASLMEPVPV

SEQ ID NO: 26903 - protein, 589 aa, Homo sapiens; identical to SEQ ID NO: 26902
  REGION 1..589: note = ENSP00000422532

SEQ ID NO: 26904 - protein, 437 aa, Homo sapiens
  REGION 1..437: note = ENSP00000412081
MSGILKRKFEEVDGSSPCSSVRESDDEVSSSESADSGDSVNPSTSSHFTPSSILKREKRLRTKNVHFSCVTVYYFTRRQGFTSVPSQGGSTLGMSSRHNSVRQYTLGEFAREQERLHREMLREHLREEKLNSLKLKMTKNGTVESEEASTLTLDDISDDDIDLDNTEVDEYFFLQPLPTKKRRALLRASGVKKIDVEEKHELRAIRLSREDCGCDCRVFCDPDTCTCSLAGIKCQVDRMSFPCGCTKEGCSNTAGRIEFNPIRVRTHFLHTIMKLELEKNREQQIPTLNGCHSEISAHSSSMGPVAHSVEYSIADSFEIETEPQAAVLHLQSAEELDCQGEEEEEEEDGSSFCSGVTDSSTQSLAPSESDEEEEEEEEEEEEEDDDDDKGDGFVEGLGTHAEVVPLPSVLCYSDGTAVHESHAKNASFYANSSTLYY

SEQ ID NO: 26905 - protein, 138 aa, Homo sapiens
  REGION 1..138: note = ENSP00000386278
MSGILKRKFEEVDGSSPCSSVRESDDEVSSSESADSGDSVNPSTSSHFTPSSILKREKRLRTKNVHFSCVTVYYFTRRQGFTSVPSQGGSTLGMSSRHNSVRQYTLGEFAREQERLHREMLREHLREEKLNSLKLKMT

SEQ ID NO: 26906 - protein, 585 aa, Homo sapiens
  REGION 1..585: note = ENSP00000344042
MSGILKRKFEEVDGSSPCSSVRESDDEVSSSESADSGDSVNPSTSSHFTPSSILKREKRLRTKNVHFSCVTVYYFTRRQGFTSVPSQGGSTLGMSSRHNSVRQYTLGEFAREQERLHREMLREHLREEKLNSLKLKMTKNGTVESEEASTLTLDDISDDDIDLDNTEVDEYFFLQPLPTKKRRALLRASGVKKIDVEEKHELRAIRLSREDCGCDCRVFCDPDTCTCSLAGIKCQVDRMSFPCGCTKEGCSNTAGRIEFNPIRVRTHFLHTIMKLELEKNREQQIPTLNGCHSEISAHSSSMGPVAHSVEYSIADSFEIETEPQAAVLHLQSAEELDCQGEEEEEEEDGSSFCSGVTDSSTQSLAPSESDEEEEEEEEEEEEEDDDDDKGDGFVEGLGTHAEVVPLPSVLCYSDGTAVHESHAKNASFYANSSTLYYQIDSHIPGTPNQISENYSERDTVKNGTLSLVPYTMTPEQFVDYARQAEEAYGASHYPAANPSVIVCCSSSENDSGVPCNSLYPEHRSNHPQVEFHSYLKGPSQEGFVSALNGDSHISEHPAENSLSLAEKSILHEECIKSPVVETVPV

SEQ ID NO: 26907 - protein, 617 aa, Homo sapiens
  REGION 1..617: note = ENSP00000387195
MKCALFLRVKILQRVCRSRYIVHAGTCDSTAAMSGILKRKFEEVDGSSPCSSVRESDDEVSSSESADSGDSVNPSTSSHFTPSSILKREKRLRTKNVHFSCVTVYYFTRRQGFTSVPSQGGSTLGMSSRHNSVRQYTLGEFAREQERLHREMLREHLREEKLNSLKLKMTKNGTVESEEASTLTLDDISDDDIDLDNTEVDEYFFLQPLPTKKRRALLRASGVKKIDVEEKHELRAIRLSREDCGCDCRVFCDPDTCTCSLAGIKCQVDRMSFPCGCTKEGCSNTAGRIEFNPIRVRTHFLHTIMKLELEKNREQQIPTLNGCHSEISAHSSSMGPVAHSVEYSIADSFEIETEPQAAVLHLQSAEELDCQGEEEEEEEDGSSFCSGVTDSSTQSLAPSESDEEEEEEEEEEEEEDDDDDKGDGFVEGLGTHAEVVPLPSVLCYSDGTAVHESHAKNASFYANSSTLYYQIDSHIPGTPNQISENYSERDTVKNGTLSLVPYTMTPEQFVDYARQAEEAYGASHYPAANPSVIVCCSSSENDSGVPCNSLYPEHRSNHPQVEFHSYLKGPSQEGFVSALNGDSHISEHPAENSLSLAEKSILHEECIKSPVVETVPV

SEQ ID NO: 26908 - protein, 585 aa, Homo sapiens; identical to SEQ ID NO: 26906
  REGION 1..585: note = ENSP00000318258

SEQ ID NO: 26909 - protein, 193 aa, Homo sapiens
  REGION 1..193: note = ENSP00000356275
MPNWGGGKKCGVCQKTVYFAEEVQCEGNSFHKSCFLCMVCKKNLDSTTVAVHGEEIYCKSCYGKKYGPKGYGYGQGAGTLSTDKGESLGIKHEEAPGHRPTTNPNASKFAQKIGGSERCPRCSQAVYAAEKVIGAGKSWHKACFRCAKCGKGLESTTLADKDGEIYCKGCYAKNFGPKGFGFGQGAGALVHSE

SEQ ID NO: 26910 - protein, 153 aa, Homo sapiens
  REGION 1..153: note = ENSP00000432110
MPNWGGGKKCGVCQKTVYFAEEVQCEGNSFHKSCFLCMVCKKNLDSTTVAVHGEEIYCKSCYGKKYGPKGYGYGQGAGTLSTDKGESLGIKHEEAPGHRPTTNPNASKFAQKIGGSERCPRCSQAVYAAEKDPKVRMLFDLLKHLVPCLMGGS

SEQ ID NO: 26911 - protein, 193 aa, Homo sapiens; identical to SEQ ID NO: 26909
  REGION 1..193: note = ENSP00000434147

SEQ ID NO: 26912 - protein, 17 aa, Homo sapiens
  REGION 1..17: note = ENSP00000483864
MPNWGGGKKSGALVHSE

SEQ ID NO: 26913 - protein, 193 aa, Homo sapiens; identical to SEQ ID NO: 26909
  REGION 1..193: note = ENSP00000436792

SEQ ID NO: 26914 - protein, 160 aa, Homo sapiens
  REGION 1..160: note = ENSP00000436491
MPNWGGGKKCGVCQKTVYFAEEIYCKSCYGKKYGPKGYGYGQGAGTLSTDKGESLGIKHEEAPGHRPTTNPNASKFAQKIGGSERCPRCSQAVYAAEKVIGAGKSWHKACFRCAKCGKGLESTTLADKDGEIYCKGCYAKNFGPKGFGFGQGAGALVHSE

SEQ ID NO: 26915 - protein, 153 aa, Homo sapiens
  REGION 1..153: note = ENSP00000437218
MVCKKNLDSTTVAVHGEEIYCKSCYGKKYGPKGYGYGQGAGTLSTDKGESLGIKHEEAPGHRPTTNPNASKFAQKIGGSERCPRCSQAVYAAEKVIGAGKSWHKACFRCAKCGKGLESTTLADKDGEIYCKGCYAKNFGPKGFGFGQGAGALV

SEQ ID NO: 26916 - protein, 193 aa, Homo sapiens; identical to SEQ ID NO: 26909
  REGION 1..193: note = ENSP00000345079

SEQ ID NO: 26917 - protein, 98 aa, Homo sapiens
  REGION 1..98: note = ENSP00000264474
MIPGGLSEAKPATPEIQEIVDKVKPQLEEKTNETYGKLEAVQYKTQVVAGTNYYIKVRAGDNKYMHLKVFKSLPGQNEDLVLTGYQVDKNKDDELTGF

SEQ ID NO: 26918 - protein, 63 aa, Homo sapiens
  REGION 1..63: note = ENSP00000418891
MIPGGLSEAKPATPEIQEIVDKVKPQLEEKTNETYGKLEAVQYKTQVVAGTNYYIKVRVQHLL

SEQ ID NO: 26919 - protein, 616 aa, Homo sapiens
  REGION 1..616: note = ENSP00000332444
MSSLAVRDPAMDRSLRSVFVGNIPYEATEEQLKDIFSEVGSVVSFRLVYDRETGKPKGYGFCEYQDQETALSAMRNLNGREFSGRALRVDNAASEKNKEELKSLGPAAPIIDSPYGDPIDPEDAPESITRAVASLPPEQMFELMKQMKLCVQNSHQEARNMLLQNPQLAYALLQAQVVMRIMDPEIALKILHRKIHVTPLIPGKSQSVSVSGPGPGPGPGLCPGPNVLLNQQNPPAPQPQHLARRPVKDIPPLMQTPIQGGIPAPGPIPAAVPGAGPGSLTPGGAMQPQLGMPGVGPVPLERGQVQMSDPRAPIPRGPVTPGGLPPRGLLGDAPNDPRGGTLLSVTGEVEPRGYLGPPHQGPPMHHASGHDTRGPSSHEMRGGPLGDPRLLIGEPRGPMIDQRGLPMDGRGGRDSRAMETRAMETEVLETRVMERRGMETCAMETRGMEARGMDARGLEMRGPVPSSRGPMTGGIQGPGPINIGAGGPPQGPRQVPGISGVGNPGAGMQGTGIQGTGMQGAGIQGGGMQGAGIQGVSIQGGGIQGGGIQGASKQGGSQPSSFSPGQSQVTPQDQEKAALIMQVLQLTADQIAMLPPEQRQSILILKEQIQKSTGAS

SEQ ID NO: 26920 - protein, 405 aa, Homo sapiens
  REGION 1..405: note = ENSP00000359976
MQEKDASSQGFLPHFQHFATQAIHVGQDPEQWTSRAVVPPISLSTTFKQGAPGQHSGFEYSRSGNPTRNCLEKAVAALDGAKYCLAFASGLAATVTITHLLKAGDQIICMDDVYGGTNRYFRQVASEFGLKISFVDCSKIKLLEAAITPETKLVWIETPTNPTQKVIDIEGCAHIVHKHGDIILVVDNTFMSPYFQRPLALGADISMYSATKYMNGHSDVVMGLVSVNCESLHNRLRFLQNSLGAVPSPIDCYLCNRGLKTLHVRMEKHFKNGMAVAQFLESNPWVEKVIYPGLPSHPQHELVKRQCTGCTGMVTFYIKGTLQHAEIFLKNLKLFTLAESLGGFESLAELPAIMTHASVLKNDRDVLGISDTLIRLSVGLEDEEDLLEDLDQALKAAHPPSGSHS

SEQ ID NO: 26921 - protein, 361 aa, Homo sapiens
  REGION 1..361: note = ENSP00000311554
MQEKDASSQGFLPHFQHFATQAIHVGQDPEQWTSRAVVPPISLSTTFKQGAPGQHSGFEYSRSGNPTRNCLEKAVAALDGAKYCLAFASGLAATVTITHLLKAGDQIICMDDVYGGTNRYFRQVASEFGLKISFVDCSKIKLLEAAITPETKRPLALGADISMYSATKYMNGHSDVVMGLVSVNCESLHNRLRFLQNSLGAVPSPIDCYLCNRGLKTLHVRMEKHFKNGMAVAQFLESNPWVEKVIYPGLPSHPQHELVKRQCTGCTGMVTFYIKGTLQHAEIFLKNLKLFTLAESLGGFESLAELPAIMTHASVLKNDRDVLGISDTLIRLSVGLEDEEDLLEDLDQALKAAHPPSGSHS

SEQ ID NO: 26922 - protein, 373 aa, Homo sapiens
  REGION 1..373: note = ENSP00000413407
MQEKDASSQGFLPHFQHFATQAIHVGQDPEQWTSRAVVPPISLSTTFKQGAPGQHSGFEYSRSGNPTRNCLEKAVAALDGAKYCTNRYFRQVASEFGLKISFVDCSKIKLLEAAITPETKLVWIETPTNPTQKVIDIEGCAHIVHKHGDIILVVDNTFMSPYFQRPLALGADISMYSATKYMNGHSDVVMGLVSVNCESLHNRLRFLQNSLGAVPSPIDCYLCNRGLKTLHVRMEKHFKNGMAVAQFLESNPWVEKVIYPGLPSHPQHELVKRQCTGCTGMVTFYIKGTLQHAEIFLKNLKLFTLAESLGGFESLAELPAIMTHASVLKNDRDVLGISDTLIRLSVGLEDEEDLLEDLDQALKAAHPPSGSHS

SEQ ID NO: 26923 - protein, 895 aa, Homo sapiens
  REGION 1..895: note = ENSP00000389714
MSAETPITLNIDPQDLQVQTFTVEKLLEPLIIQVTTLVNCPQNPSSRKKGRSKRASVLLASVEEATWNLLDKGEKIAQEATVLKDELTASLEEVRKESEALKVSAERFTDDPCFLPKREAVVQAARALLAAVTRLLILADMIDVMCLLQHVSAFQRTFESLKNVANKSDLQKTYQKLGKELENLDYLAFKRQQDLKSPNQRDEIAGARASLKENSPLLHSICSACLEHSDVASLKASKDTVCEEIQNALNVISNASQGIQNMTTPPEPQAATLGSALDELENLIVLNPLTVTEEEIRPSLEKRLEAIISGAALLADSSCTRDLHRERIIAECNAIRQALQDLLSEYMNNAGKKERSNTLNIALDNMCKKTRDLRRQLRKAIIDHVSDSFLDTTVPLLVLIEAAKNGREKEIKEYAAIFHEHTSRLVEVANLACSMSTNEDGIKIVKIAANHLETLCPQIINAALALAARPKSQAVKNTMEMYKRTWENHIHVLTEAVDDITSIDDFLAVSESHILEDVNKCIIALRDQDADNLDRAAGAIRGRAARVAHIVTGEMDSYEPGAYTEGVMRNVNFLTSTVIPEFVTQVNVALEALSKSSLNVLDDNQFVDISKKIYDTIHDIRCSVMMIRTPEELEDVSDLEEEHEVRSHTSIQTEGKTDRAKMTQLPEAEKEKIAEQVADFKKVKSKLDAEIEIWDDTSNDIIVLAKNMCMIMMEMTDFTRGKGPLKHTTDVIYAAKMISESGSRMDVLARQIANQCPDPSCKQDLLAYLEQIKFYSHQLKICSQVKAEIQNLGGELIMSALDSVTSLIQAAKNLMNAVVQTVKMSYIASTKIIRIQSPAGPRHPVVMWRMKAPAKKPLIKREKPEETCAAVRRGSAKKKIHPLQVMSEFRGRQIY

SEQ ID NO: 26924 - protein, 127 aa, Homo sapiens
  REGION 1..127: note = ENSP00000477144
  VARIANT 1: note = Any amino acid
XISGAALLADSSCTRDLHRERIIAECNAIRQALQDLLSEYMNNAGKKERSNTLNIALDNMCKKTRDLRRQLRKAIIDHVSDSFLDTTVPLLVLIEAAKNGREKEIKEYAAIFHEHTSRLVEVSMLEL

SEQ ID NO: 26925 - protein, 193 aa, Homo sapiens
  REGION 1..193: note = ENSP00000330570
MSAETPITLNIDPQDLQVQTFTVEKLLEPLIIQVTTLVNCPQNPSSRKKGRSKRASVLLASVEEATWNLLDKGEKIAQEATVLKDELTASLEEVRKESEALKVSAERFTDDPCFLPKREAVVQAARALLAAVTRLLILADMIDVMCLLQHVSAFQRTFESLKNVANKSDLQKTYQKLGKELENLDYLAFKRQQ

SEQ ID NO: 26926 - protein, 184 aa, Homo sapiens
  REGION 1..184: note = ENSP00000441444
QDLKSPNQRDEIAGARASLKENSPLLHSICSACLEHSDVASLKASKDTVCEEIQNALNVISNASQGIQNMTTPPEPQAATLGSALDELENLIVLNPLTVTEEEIRPSLEKRLEAIISGAALLADSSCTRDLHRERIIAECNAIRQALQDLLSEYMNNLCNQKSDLGLTGVKIKLLEECIIFWSL

SEQ ID NO: 26927 - protein, 333 aa, Homo sapiens [sequence omitted]

SEQ ID NO: 26928 - protein, 333 aa, Homo sapiens [sequence omitted]

SEQ ID NO: 26929 - protein, 225 aa, Homo sapiens
  REGION 1..225: note = ENSP00000340470
MNPTLILAAFCLGIASATLTFDHSLEAQWTKWKAMHNRLYGMNEEGWRRAVWEKNMKMIELHNQEYREGKHSFTMAMNAFGDMTSEEFRQVMNGFQNRKPRKGKVFQEPLFYEAPRSVDWREKGYVTPVKNQGQCGSCWAFSATGALEGQMFRKTGRLISLSEQNLVDCSGPQGNEGCNGGLMDYAFQYVQDNGGLDSEESYPYEATVSGAPCHHSSSAFGRWTL

SEQ ID NO: 26930 - protein, 331 aa, Homo sapiens
  REGION 1..331: note = ENSP00000357981
MKRLVCVLLVCSSAVAQLHKDPTLDHHWHLWKKTYGKQYKEKNEEAVRRLIWEKNLKFVMLHNLEHSMGMHSYDLGMNHLGDMTSEEVMSLMSSLRVPSQWQRNITYKSNPNRILPDSVDWREKGCVTEVKYQGSCGACWAFSAVGALEAQLKLKTGKLVSLSAQNLVDCSTEKYGNKGCNGGFMTTAFQYIIDNKGIDSDASYPYKAMDQKCQYDSKYRAATCSKYTELPYGREDVLKEAVANKGPVSVGVDARHPSFFLYRSGVYYEPSCTQNVNHGVLVVGYGDLNGKEYWLVKNSWGHNFGEEGYIRMARNKGNHCGIASFPSYPEI

SEQ ID NO: 26931 - protein, 96 aa, Homo sapiens
  REGION 1..96: note = ENSP00000475176
  VARIANT 1: note = Any amino acid
XVLKEAVANKGPVSVGVDARHPSFFLYRSGVYYEPSCTQNVNHGVLVVGYGDLNGKEYWLVKNSWGHNFGEEGYIRMARNKGNHCGIASFPSYPEI

SEQ ID NO: 26932 - protein, 5 aa, Homo sapiens
  REGION 1..5: note = ENSP00000475557
  VARIANT 1: note = Any amino acid
XYPEI

SEQ ID NO: 26933 - protein, 281 aa, Homo sapiens
  REGION 1..281: note = ENSP00000408414
MKRLVCVLLVCSSAVAQLHKDPTLDHHWHLWKKTYGKQYKEKNEEAVRRLIWEKNLKFVMLHNLEHSMGMHSYDLGMNHLGDMGSCGACWAFSAVGALEAQLKLKTGKLVSLSAQNLVDCSTEKYGNKGCNGGFMTTAFQYIIDNKGIDSDASYPYKAMDQKCQYDSKYRAATCSKYTELPYGREDVLKEAVANKGPVSVGVDARHPSFFLYRSGVYYEPSCTQNVNHGVLVVGYGDLNGKEYWLVKNSWGHNFGEEGYIRMARNKGNHCGIASFPSYPEI

SEQ ID NO: 26934 - protein, 117 aa, Homo sapiens
  REGION 1..117: note = ENSP00000475812
IIDNKGIDSDASYPYKAMDQKCQYDSKYRAATCSKYTELPYGREDVLKEAVANKGPVSVGVDARHPSFFLYRSDGVLLCCQAGVRWHDLSSLQPLPPGFKQFSCLSLLSSWDYRCLL

SEQ ID NO: 26935 - protein, 1663 aa, Homo sapiens
  REGION 1..1663: note = ENSP00000160373
MATDGASCEPDLSRAPEDAAGAAAEAAKKEFDVDTLSKSELRMLLSVMEGELEARDLVIEALRARRKEVFIQERYGRFNLNDPFLALQRDYEAGAGDKEKKPVCTNPLSILEAVMAHCKKMQERMSAQLAAAESRQKKLEMEKLQLQALEQEHKKLAARLEEERGKNKQVVLMLVKECKQLSGKVIEEAQKLEDVMAKLEEEKKKTNELEEELSAEKRRSTEMEAQMEKQLSEFDTEREQLRAKLNREEAHTTDLKEEIDKMRKMIEQLKRGSDSKPSLSLPRKTKDRRLVSISVGTEGTVTRSVACQTDLVTENADHMKKLPLTMPVKPSTGSPLVSANAKGSVCTSATMARPGIDRQASYGDLIGASVPAFPPPSANKIEENGPSTGSTPDPTSSTPPLPSNAAPPTAQTPGIAPQNSQAPPMHSLHSPCANTSLHPGLNPRIQAARFRFQGNANDPDQNGNTTQSPPSRDVSPTSRDNLVAKQLARNTVTQALSRFTSPQAGAPSRPGVPPTGDVGTHPPVGRTSLKTHGVARVDRGNPPPIPPKKPGLSQTPSPPHPQLKVIIDSSRASNTGAKVDNKTVASTPSSLPQGNRVINEENLPKSSSPQLPPKPSIDLTVAPAGCAVSALATSQVGAWPAATPGLNQPACSDSSLVIPTTIAFCSSINPVSASSCRPGASDSLLVTASGWSPSLTPLLMSGGPAPLAGRPTLLQQAAAQGNVTLLSMLLNEEGLDINYSCEDGHSALYSAAKNGHTDCVRLLLSAEAQVNAADKNGFTPLCAAAAQGHFECVELLISYDANINHAADGGQTPLYLACKNGNKECIKLLLEAGTNRSVKTTDGWTPVHAAVDTGNVDSLKLLMYHRIPAHGNSFNEEESESSVFDLDGGEESPEGISKPVVPADLINHANREGWTAAHIAASKGFKNCLEILCRHGGLEPERRDKCNRTVHDVATDDCKHLLENLNALKIPLRISVGEIEPSNYGSDDLECENTICALNIRKQTSWDDFSKAVSQALTNHFQAISSDGWWSLEDVTCNNTTDSNIGLSARSIRSITLGNVPWSVGQSFAQSPWDFMRKNKAEHITVLLSGPQEGCLSSVTYASMIPLQMMQNYLRLVEQYHNVIFHGPEGSLQDYIVHQLALCLKHRQMAAGFSCEIVRAEVDAGFSKEQLLDLFISSACLIPVKQSPSKKKIIIILENLEKSSLSELLRDFLAPLENRSTESPCTFQKGNGLSECYYFHENCFLMGTIAKACLQGSDLLVQQHFRWVQLRWDGEPMQGLLQRFLRRKVVNKFKGQAPSPCDPVCKIVDWALSVWRQLNSCLARLGTPEALLGPKYFLSCPVVPGHAQVTVKWMSKLWNGVIAPRVQEAILSRASVKRQPGFGQTTAKRHPSQGQQAVVKAALSILLNKAVLHGCPLPRAELDQHTADFKGGSFPLSIVSSYNTCNKKKGESGAWRKVNTSPRRKSGRFSLPTWNKPDLSTEGMKNKTISQLNCNRNASLSKQKSLENDLSLTLNLDQRLSLGSDDEADLVKELQSMCSSKSESDISKIADSRDDLRMFDSSGNNPVLSATINNLRMPVSQKEVSPLSSHQTTECSNSKSKTELGVSRVKSFLPVPRSKVTQCSQNTKRSSSSSNTRQIEINNNSKEVNWNLHKNEHLEKPNK

SEQ ID NO: 26936 - protein, 1151 aa, Homo sapiens
  REGION 1..1151: note = ENSP00000389576
  VARIANT 1: note = Any amino acid
XDVSPTSRDNLVAKQLARNTVTQALSRFTSPQAGAPSRPGVPPTGDVGTHPPVGRTSLKTHGVARVDRGNPPPIPPKKPGLSQTPSPPHPQLKVIIDSSRASNTGAKVDNKTVASTPSSLPQGNRVINEENLPKSSSPQLPPKPSIDLTVAPAGCAVSALATSQKIQKVKCTREEPSCWSPSLTPLLMSGGPAPLAGRPTLLQQAAAQGNVTLLSMLLNEEGLDINYSCEDGHSALYSAAKNGHTDCVRLLLSAEAQVNAADKNGFTPLCAAAAQGHFECVELLISYDANINHAADGGQTPLYLACKNGNKECIKLLLEAGTNRSVKTTDGWTPVHAAVDTGNVDSLKLLMYHRIPAHGNSFNEEESESSVFDLDGGEESPEGISKPVVPADLINHANREGWTAAHIAASKGFKNCLEILCRHGGLEPERRDKCNRTVHDVATDDCKHLLENLNALKIPLRISVGEIEPSNYGSDDLECENTICALNIRKQTSWDDFSKAVSQALTNHFQAISSDGWWSLEDVTCNNTTDSNIGLSARSIRSITLGNVPWSVGQSFAQSPWDFMRKNKAEHITVLLSGPQEGCLSSVTYASMIPLQMMQNYLRLVEQYHNVIFHGPEGSLQDYIVHQLALCLKHRQMAAGFSCEIVRAEVDAGFSKEQLLDLFISSACLIPVKQSPSKKKIIIILENLEKSSLSELLRDFLAPLENRSTESPCTFQKGNGLSECYYFHENCFLMGTIAKACLQGSDLLVQQHFRWVQLRWDGEPMQGLLQRFLRRKVVNKFKGQAPSPCDPVCKIVDWALSVWRQLNSCLARLGTPEALLGPKYFLSCPVVPGHAQVTVKWMSKLWNGVIAPRVQEAILSRASVKRQPGFGQTTAKRHPSQGQQAVVKAALSILLNKAVLHGCPLPRAELDQHTADFKGGSFPLSIVSSYNTCNKKKGESGAWRKVNTSPRRKSGRFSLPTWNKPDLSTEGMKNKTISQLNCNRNASLSKQKSLENDLSLTLNLDQRLSLGSDDEADLVKELQSMCSSKSESDISKIADSRDDLRMFDSSGNNPVLSATINNLRMPVSQKEVSPLSSHQTTECSNSKSKTELGVSRVKSFLPVPRSKVTQCSQNTKRSSSSSNTRQIEINNNSKEVNWNLHKNEHLEKPNK

SEQ ID NO: 26937 - protein, 640 aa, Homo sapiens
  REGION 1..640: note = ENSP00000397678
MATDGASCEPDLSRAPEDAAGAAAEAAKKEFDVDTLSKSELRMLLSVMEGELEARDLVIEALRARRKEVFIQERYGRFNLNDPFLALQRDYEAGAGDKEKKPVCTNPLSILEAVMAHCKKMQERMSAQLAAAESRQKKLEMEKLQLQALEQEHKKLAARLEEERGKNKQVVLMLVKECKQLSGKVIEEAQKLEDVMAKLEEEKKKTNELEEELSAEKRRSTEMEAQMEKQLSEFDTEREQLRAKLNREEAHTTDLKEEIDKMRKMIEQLKRGSDSKPSLSLPRKTKDRRLVSISVGTEGTVTRSVACQTDLVTENADHMKKLPLTMPVKPSTGSPLVSANAKGSVCTSATMARPGIDRQASYGDLIGASVPAFPPPSANKIEENGPSTGSTPDPTSSTPPLPSNAAPPTAQTPGIAPQNSQAPPMHSLHSPCANTSLHPGLNPRIQAARFRFQGNANDPDQNGNTTQSPPSRDVSPTSRDNLVAKQLARNTVTQALSRFTSPQAGAPSRPGVPPTGDVGTHPPVGRTSLKTHGVARVDRGNPPPIPPKKPGLSQTPSPPHPQLKVIIDSSRASNTGAKVDNKTVASTPSSLPQGNRVINEENLPKSSSPQLPPKPSIDLTVAPAGCAVSALATSQAGHPP

SEQ ID NO: 26938 - protein, 47 aa, Homo sapiens
  REGION 1..47: note = ENSP00000389491
  VARIANT 1: note = Any amino acid
XSVWRQLNSCLARLGTPEALLGPKYFLSCPVVPGHAQVTVKARPAYS

SEQ ID NO: 26939 - protein, 193 aa, Homo sapiens
  REGION 1..193: note = ENSP00000395925
  VARIANT 1: note = Any amino acid
XDLECENTICALNIRKQTSWDDFSKAVSQALTNHFQAISSDGWWSLEDVTCNNTTDSNIGLSARSIRSITLGNVPWSVGQSFAQSPWDFMRKNKAEHITVLLSGPQEGCLSSVTYASMIPLQMMQNYLRLHRQMAAGFSCEIVRAEVDAGFSKEQLLDLFISSACLIPVKQSPSKKKIIIILENLEKSSLSEL

SEQ ID NO: 26940 - protein, 120 aa, Homo sapiens
  REGION 1..120: note = ENSP00000406142
  VARIANT 1: note = Any amino acid
XWDDFSKAVSQALTNHFQAISSDGWWSLEDVTCNNTTDSNIGLSARSIRSITLGNVPWSVGQSFAQSPWDFMRKNKAEHITVLLSGPQEGCLSSVTYASMIPLQMMQNYLRLMGKLNRER

SEQ ID NO: 26941 - protein, 161 aa, Homo sapiens
  REGION 1..161: note = ENSP00000396014
MLLSVMEGELEARDLVIEALRARRKEVFIQERYGRFNLNDPFLALQRDYEAGAGDKEKKPVCTNPLSILEAVMAHCKKMQERMSAQLAAAESRQKKLEMEKLQLQALEQEHKKLAARLEEERGKNKQVVLMLVKECKQLSGKVIEEAQKLEDVMAKLEEEK

SEQ ID NO: 26942 - protein, 136 aa, Homo sapiens
  REGION 1..136: note = ENSP00000405831
MLLSVMEGELEARDLVIEALRARRKEVFIQERYGRFNLNDPFLALQRDYEAGAGDKEKKPVCTNPLSILEAVMAHCKKMQERMSAQLAAAESRQKKLEMEKLQLQALEQEHKKLAARLEEERGKNKQVVLMLVKEC

SEQ ID NO: 26943 - protein, 95 aa, Homo sapiens
  REGION 1..95: note = ENSP00000393373
MLLSVMEGELEARDLVIEALRARRKEVFIQERYGRFNLNDPFLALQRDYEAGAGDKEKKPVCTNPLSILEAVMAHCKKMQERMSAQLAAAESRQK

SEQ ID NO: 26944 - protein, 82 aa, Homo sapiens
  REGION 1..82: note = ENSP00000313226
MSATWTLSPEPLPPSTGPPVGAGLDAEQRTVFAFVLCLLVVLVLLMVRCVRILLDPYSRMPASSWTDHKEALERGQFDYALV

SEQ ID NO: 26945 - protein, 81 aa, Homo sapiens
  REGION 1..81: note = ENSP00000368758
MDGGQPIPSSLVPLGNESADSSMSLEQKMTFVFVILLFIFLGILIVRCFRILLDPYRSMPTSTWADGLEGLEKGQFDHALA

SEQ ID NO: 26946 - protein, 81 aa, Homo sapiens; identical to SEQ ID NO: 26945
  REGION 1..81: note = ENSP00000378732

SEQ ID NO: 26947 - protein, 81 aa, Homo sapiens; identical to SEQ ID NO: 26945
  REGION 1..81: note = ENSP00000482081

SEQ ID NO: 26948 - protein, 1698 aa, Homo sapiens
  REGION 1..1698: note = ENSP00000265348
MVGELRYREFRVPLGPGLHAYPDELIRQRVGHDGHPEYQIRWLILRRGDEGDGGSGQVDCKAEHILLWMSKDEIYANCHKMLGEDGQVIGPSQESAGEVGALDKSVLEEMETDVKSLIQRALRQLEECVGTIPPAPLLHTVHVLSAYASIEPLTGVFKDPRVLDLLMHMLSSPDYQIRWSAGRMIQALSSHDAGTRTQILLSLSQQEAIEKHLDFDSRCALLALFAQATLSEHPMSFEGIQLPQVPGRVLFSLVKRYLHVTSLLDQLNDSAAEPGAQNTSAPEELSGERGQLELEFSMAMGTLISELVQAMRWDQASDRPRSSARSPGSIFQPQLADVSPGLPAAQAQPSFRRSRRFRPRSEFASGNTYALYVRDTLQPGMRVRMLDDYEEISAGDEGEFRQSNNGVPPVQVFWESTGRTYWVHWHMLEILGFEEDIEDMVEADEYQGAVASRVLGRALPAWRWRPMTELYAVPYVLPEDEDTEECEHLTLAEWWELLFFIKKLDGPDHQEVLQILQENLDGEILDDEILAELAVPIELAQDLLLTLPQRLNDSALRDLINCHVYKKYGPEALAGNQAYPSLLEAQEDVLLLDAQAQAKDSEDAAKVEAKEPPSQSPNTPLQRLVEGYGPAGKILLDLEQALSSEGTQENKVKPLLLQLQRQPQPFLALMQSLDTPETNRTLHLTVLRILKQLVDFPEALLLPWHEAVDACMACLRSPNTDREVLQELIFFLHRLTSVSRDYAVVLNQLGARDAISKALEKHLGKLELAQELRDMVFKCEKHAHLYRKLITNILGGCIQMVLGQIEDHRRTHQPINIPFFDVFLRYLCQGSSVEVKEDKCWEKVEVSSNPHRASKLTDHNPKTYWESNGSAGSHYITLHMRRGILIRQLTLLVASEDSSYMPARVVVCGGDSTSSLHTELNSVNVMPSASRVILLENLTRFWPIIQIRIKRCQQGGIDTRIRGLEILGPKPTFWPVFREQLCRHTRLFYMVRAQAWSQDMAEDRRSLLHLSSRLNGALRQEQNFADRFLPDDEAAQALGKTCWEALVSPVVQNITSPDEDGISPLGWLLDQYLECQEAVFNPQSRGPAFFSRVRRLTHLLVHVEPCEAPPPVVATPRPKGRNRSHDWSSLATRGLPSSIMRNLTRCWRAVVEKQVNNFLTSSWRDDDFVPRYCEHFNILQNSSSELFGPRAAFLLALQNGCAGALLKLPFLKAAHVSEQFARHIDQQIQGSRIGGAQEMERLAQLQQCLQAVLIFSGLEIATTFEHYYQHYMADRLLGVVSSWLEGAVLEQIGPCFPNRLPQQMLQSLSTSKELQRQFHVYQLQQLDQELLKLEDTEKKIQVGLGASGKEHKSEKEEEAGAAAVVDVAEGEEEEEENEDLYYEGAMPEVSVLVLSRHSWPVASICHTLNPRTCLPSYLRGTLNRYSNFYNKSQSHPALERGSQRRLQWTWLGWAELQFGNQTLHVSTVQMWLLLYLNDLKAVSVESLLAFSGLSADMLNQAIGPLTSSRGPLDLHEQKDIPGGVLKIRDGSKEPRSRWDIVRLIPPQTYLQAEGEDGQNLEKRRNLLNCLIVRILKAHGDEGLHIDQLVCLVLEAWQKGPCPPRGLVSSLGKGSACSSTDVLSCILHLLGKGTLRRHDDRPQVLSYAVPVTVMEPHTESLNPGSSGPNPPLTFHTLQIRSRGVPYASCTATQSFSTFR

SEQ ID NO: 26949 - protein, 1782 aa, Homo sapiens
  REGION 1..1782: note = ENSP00000438788
MSRGFWLAEPLAGTGPHPAPVAADSRGCSSVPRRHAPSRLSVSTPSRGPGARMVGELRYREFRVPLGPGLHAYPDELIRQRVGHDGHPEYQIRWLILRRGDEGDGGSGQVDCKAEHILLWMSKDEIYANCHKMLGEDGQVIGPSQESAGEVGALDKSVLEEMETDVKSLIQRALRQLEECVGTIPPAPLLHTVHVLSAYASIEPLTGVFKDPRVLDLLMHMLSSPDYQIRWSAGRMIQALSSHDAGEGQCGEEGKAGEGLGRLRDSQDTVAGASDLIRTRTQILLSLSQQEAIEKHLDFDSRCALLALFAQATLSEHPMSFEGIQLPQVPGRVLFSLVKRYLHVTSLLDQLNDSAAEPGAQNTSAPEELSGERGQLELEFSMAMGTLISELVQAMRWDQASDRPRSSARSPGSIFQPQLADVSPGLPAAQAQPSFRRSRRFRPRSEFASGNTYALYVRDTLQPGMRVRMLDDYEEISAGDEGEFRQSNNGVPPVQVFWESTGRTYWVHWHMLEILGFEEDIEDMVEADEYQGAVASRVLGRALPAWRWRPMTELYAVPYVLPEDEDTEECEHLTLAEWWELLFFIKKLDGPDHQEVLQILQENLDGEILDDEILAELAVPIELAQDLLLTLPQRLNDSALRDLINCHVYKKYGPEALAGNQAYPSLLEAQEDVLLLDAQAQAKDSEDAAKVEAKEPPSQSPNTPLQRLVEGYGPAGKILLDLEQALSSEGTQENKVKPLLLQLQRQPQPFLALMQSLDTPETNRTLHLTVLRILKQLVDFPEALLLPWHEAVDACMACLRSPNTDREVLQELIFFLHRLTSVSRDYAVVLNQLGARDAISKALEKHLGKLELAQELRDMVFKCEKHAHLYRKLITNILGGCIQMVLGQIEDHRRTHQPINIPFFDVFLRYLCQGSSVEVKEDKCWEKVEVSSNPHRASKLTDHNPKTYWESNGSAGSHYITLHMRRGILIRQLTLLVASEDSSYMPARVVVCGGDSTSSLHTELNSVNVMPSASRVILLENLTRFWPIIQIRIKRCQQGGIDTRIRGLEILGPKPTFWPVFREQLCRHTRLFYMVRAQAWSQDMAEDRRSLLHLSSRLNGALRQEQNFADRFLPDDEAAQALGKTCWEALVSPVVQNITSPDEDGISPLGWLLDQYLECQEAVFNPQSRGPAFFSRVRRLTHLLVHVEPCEAPPPVVATPRPKGRNRSHDWSSLATRGLPSSIMRNLTRCWRAVVEKQVNNFLTSSWRDDDFVPRYCEHFNILQNSSSELFGPRAAFLLALQNGCAGALLKLPFLKAAHVSEQFARHIDQQIQGSRIGGAQEMERLAQLQQCLQAVLIFSGLEIATTFEHYYQHYMADRLLGVVSSWLEGAVLEQIGPCFPNRLPQQMLQSLSTSKELQRQFHVYQLQQLDQELLKLEDTEKKIQVGLGASGKEHKSEKEEEAGAAAVVDVAEGEEEEEENEDLYYEGAMPEVSVLVLSRHSWPVASICHTLNPRTCLPSYLRGTLNRYSNFYNKSQSHPALERGSQRRLQWTWLGWAELQFGNQTLHVSTVQMWLLLYLNDLKAVSVESLLAFSGLSADMLNQAIGPLTSSRGPLDLHEQKDIPGGVLKIRDGSKEPRSRWDIVRLIPPQTYLQAEGEDGQNLEKRRNLLNCLIVRILKAHGDEGLHIDQLVCLVLEAWQKGPCPPRGLVSSLGKGSACSSTDVLSCILHLLGKGTLRRHDDRPQVLSYAVPVTVMEPHTESLNPGSSGPNPPLTFHTLQIRSRGVPYASCTATQSFSTFR

SEQ ID NO: 26950 - protein, 397 aa, Homo sapiens
  REGION 1..397: note = ENSP00000006053
MAPISLSWLLRLATFCHLTVLLAGQHHGVTKCNITCSKMTSKIPVALLIHYQQNQASCGKRAIILETRQHRLFCADPKEQWVKDAMQHLDRQAAALTRNGGTFEKQIGEVKPRTTPAAGGMDESVVLEPEATGESSSLEPTPSSQEAQRALGTSPELPTGVTGSSGTRLPPTPKAQDGGPVGTELFRVPPVSTAATWQSSAPHQPGPSLWAEAKTSEAPSTQDPSTQASTASSPAPEENAPSEGQRVWGQGQSPRPENSLEREEMGPVPAHTDAFQDWGPGSMAHVSVVPVSSEGTPSREPVASGSWTPKAEEPIHATMDPQRLGVLITPVPDAQAATRRQAVGLLAFLGLLFCLGVAMFTYQSLQGCPRKMAGEMAEGLRYIPRSCGSNSYVLVPV

SEQ ID NO: 26951 - protein, 403 aa, Homo sapiens
  REGION 1..403: note = ENSP00000456830
MAPISLSWLLRLATFCHLTVLLAGTSLNSGQHHGVTKCNITCSKMTSKIPVALLIHYQQNQASCGKRAIILETRQHRLFCADPKEQWVKDAMQHLDRQAAALTRNGGTFEKQIGEVKPRTTPAAGGMDESVVLEPEATGESSSLEPTPSSQEAQRALGTSPELPTGVTGSSGTRLPPTPKAQDGGPVGTELFRVPPVSTAATWQSSAPHQPGPSLWAEAKTSEAPSTQDPSTQASTASSPAPEENAPSEGQRVWGQGQSPRPENSLEREEMGPVPAHTDAFQDWGPGSMAHVSVVPVSSEGTPSREPVASGSWTPKAEEPIHATMDPQRLGVLITPVPDAQAATRRQAVGLLAFLGLLFCLGVAMFTYQSLQGCPRKMAGEMAEGLRYIPRSCGSNSYVLVPV

SEQ ID NO: 26952 - protein, 55 aa, Homo sapiens
  REGION 1..55: note = ENSP00000457996
MAPISLSWLLRLATFCHLTVLLAAWRRDSTGCSVPTRRSNGSRTRCSIWTARLLP

SEQ ID NO: 26953 - protein, 359 aa, Homo sapiens
  REGION 1..359: note = ENSP00000464114
MTSKIPVALLIHYQQNQASCGKRAIILETRQHRLFCADPKEQWVKDAMQHLDRQAAALTRNGGTFEKQIGEVKPRTTPAAGGMDESVVLEPEATGESSSLEPTPSSQEAQRALGTSPELPTGVTGSSGTRLPPTPKAQDGGPVGTELFRVPPVSTAATWQSSAPHQPGPSLWAEAKTSEAPSTQDPSTQASTASSPAPEENAPSEGQRVWGQGQSPRPENSLEREEMGPVPAHTDAFQDWGPGSMAHVSVVPVSSEGTPSREPVASGSWTPKAEEPIHATMDPQRLGVLITPVPDAQAATRRQAVGLLAFLGLLFCLGVAMFTYQSLQGCPRKMAGEMAEGLRYIPRSCGSNSYVLVPV

SEQ ID NO: 26954 - protein, 355 aa, Homo sapiens
  REGION 1..355: note = ENSP00000382166
MDQFPESVTENFEYDDLAEACYIGDIVVFGTVFLSIFYSVIFAIGLVGNLLVVFALTNSKKPKSVTDIYLLNLALSDLLFVATLPFWTHYLINEKGLHNAMCKFTTAFFFIGFFGSIFFITVISIDRYLAIVLAANSMNNRTVQHGVTISLGVWAAAILVAAPQFMFTKQKENECLGDYPEVLQEIWPVLRNVETNFLGFLLPLLIMSYCYFRIIQTLFSCKNHKKAKAIKLILLVVIVFFLFWTPYNVMIFLETLKLYDFFPSCDMRKDLRLALSVTETVAFSHCCLNPLIYAFAGEKFRRYLYHLYGKCLAVLCGRSVHVDFSSSESQRSRHGSVLSSNFTYHTSDGDALLLL

SEQ ID NO: 26955 - protein, 166 aa, Homo sapiens
  REGION 1..166: note = ENSP00000394960
MDQFPESVTENFEYDDLAEACYIGDIVVFGTVFLSIFYSVIFAIGLVGNLLVVFALTNSKKPKSVTDIYLLNLALSDLLFVATLPFWTHYLINEKGLHNAMCKFTTAFFFIGFFGSIFFITVISIDRYLAIVLAANSMNNRTVQHGVTISLGVWAAAILVAAPQFM

SEQ ID NO: 26956 - protein, 106 aa, Homo sapiens
  REGION 1..106: note = ENSP00000408835
MDQFPESVTENFEYDDLAEACYIGDIVVFGTVFLSIFYSVIFAIGLVGNLLVVFALTNSKKPKSVTDIYLLNLALSDLLFVATLPFWTHYLINEKGLHNAMCKFTT

SEQ ID NO: 26957 - protein, 355 aa, Homo sapiens; identical to SEQ ID NO: 26954
  REGION 1..355: note = ENSP00000439140

SEQ ID NO: 26958 - protein, 355 aa, Homo sapiens; identical to SEQ ID NO: 26954
  REGION 1..355: note = ENSP00000444928

SEQ ID NO: 26959 - protein, 387 aa, Homo sapiens
  REGION 1..387: note = ENSP00000351059
MREPLEAFKLADLDFRKSSLASGWRMASGAFTMDQFPESVTENFEYDDLAEACYIGDIVVFGTVFLSIFYSVIFAIGLVGNLLVVFALTNSKKPKSVTDIYLLNLALSDLLFVATLPFWTHYLINEKGLHNAMCKFTTAFFFIGFFGSIFFITVISIDRYLAIVLAANSMNNRTVQHGVTISLGVWAAAILVAAPQFMFTKQKENECLGDYPEVLQEIWPVLRNVETNFLGFLLPLLIMSYCYFRIIQTLFSCKNHKKAKAIKLILLVVIVFFLFWTPYNVMIFLETLKLYDFFPSCDMRKDLRLALSVTETVAFSHCCLNPLIYAFAGEKFRRYLYHLYGKCLAVLCGRSVHVDFSSSESQRSRHGSVLSSNFTYHTSDGDALLLL

SEQ ID NO: 26960 - protein, 93 aa, Homo sapiens
  REGION 1..93: note = ENSP00000363551
MNAKVVVVLVLVLTALCLSDGKPVSLSYRCPCRFFESHVARANVKHLKILNTPNCALQIVARLKNNNRQVCIDPKLKWIQEYLEKALNKRFKM

SEQ ID NO: 26961 - protein, 103 aa, Homo sapiens
  REGION 1..103: note = ENSP00000379139
MNAKVVVVLVLVLTALCLSDGKPVSLSYRCPCRFFESHYCTCLIRVSFHGATPLTQGSWVLYSLSCAGGETGLREPGPMVSPRVESHQEGRLGVPGPVNLGKA

SEQ ID NO: 26962 - protein, 119 aa, Homo sapiens
  REGION 1..119: note = ENSP00000363548
MNAKVVVVLVLVLTALCLSDGKPVSLSYRCPCRFFESHVARANVKHLKILNTPNCALQIVARLKNNNRQVCIDPKLKWIQEYLEKALNKGRREEKVGKKEKIGKKKRQKKRKAAQKRKN

SEQ ID NO: 26963 - protein, 89 aa, Homo sapiens
  REGION 1..89: note = ENSP00000339913
MNAKVVVVLVLVLTALCLSDGKPVSLSYRCPCRFFESHVARANVKHLKILNTPNCALQIVARLKNNNRQVCIDPKLKWIQEYLEKALNK

SEQ ID NO: 26964 - protein, 140 aa, Homo sapiens
  REGION 1..140: note = ENSP00000379140
MNAKVVVVLVLVLTALCLSDGKPVSLSYRCPCRFFESHVARANVKHLKILNTPNCALQIVARLKNNNRQVCIDPKLKWIQEYLEKALNNLISAAPAGKRVIAGARALHPSPPRACPTARALCEIRLWPPPEWSWPSPGDV

SEQ ID NO: 26965 - protein, 103 aa, Homo sapiens; identical to SEQ ID NO: 26961
  REGION 1..103: note = ENSP00000379141

SEQ ID NO: 26966 - protein, 99 aa, Homo sapiens
  REGION 1..99: note = ENSP00000423783
MRLLAAALLLLLLALYTARVDGSKCKCSRKGPKIRYSDVKKLEMKPKYPHCEEKMVIITTKSVSRYRGQEHCLHPKLQSTKRFIKWYNAWNEKRRVYEE

SEQ ID NO: 26967 - protein, 111 aa, Homo sapiens
  REGION 1..111: note = ENSP00000337065
MSLLPRRAPPVSMRLLAAALLLLLLALYTARVDGSKCKCSRKGPKIRYSDVKKLEMKPKYPHCEEKMVIITTKSVSRYRGQEHCLHPKLQSTKRFIKWYNAWNEKRRVYEE

SEQ ID NO: 26968 - protein, 114 aa, Homo sapiens
  REGION 1..114: note = ENSP00000296027
MSLLSSRAARVPGPSSSLCALLVLLLLLTQPGPIASAGPAAAVLRELRCVCLQTTQGVHPKMISNLQVFAIGPQCSKVEVVASLKNGKEICLDPEAPFLKKVIQKILDGGNKEN

SEQ ID NO: 26969 - protein, 356 aa, Homo sapiens
  REGION 1..356: note = ENSP00000386884
MSIPLPLLQIYTSDNYTEEMGSGDYDSMKEPCFREENANFNKIFLPTIYSIIFLTGIVGNGLVILVMGYQKKLRSMTDKYRLHLSVADLLFVITLPFWAVDAVANWYFGNFLCKAVHVIYTVNLYSSVLILAFISLDRYLAIVHATNSQRPRKLLAEKVVYVGVWIPALLLTIPDFIFANVSEADDRYICDRFYPNDLWVVVFQFQHIMVGLILPGIVILSCYCIIISKLSHSKGHQKRKALKTTVILILAFFACWLPYYIGISIDSFILLEIIKQGCEFENTVHKWISITEALAFFHCCLNPILYAFLGAKFKTSAQHALTSVSRGSSLKILSKGKRGGHSSVSTESESSSFHSS

SEQ ID NO: 26970 - protein, 352 aa, Homo sapiens
  REGION 1..352: note = ENSP00000241393
MEGISIYTSDNYTEEMGSGDYDSMKEPCFREENANFNKIFLPTIYSIIFLTGIVGNGLVILVMGYQKKLRSMTDKYRLHLSVADLLFVITLPFWAVDAVANWYFGNFLCKAVHVIYTVNLYSSVLILAFISLDRYLAIVHATNSQRPRKLLAEKVVYVGVWIPALLLTIPDFIFANVSEADDRYICDRFYPNDLWVVVFQFQHIMVGLILPGIVILSCYCIIISKLSHSKGHQKRKALKTTVILILAFFACWLPYYIGISIDSFILLEIIKQGCEFENTVHKWISITEALAFFHCCLNPILYAFLGAKFKTSAQHALTSVSRGSSLKILSKGKRGGHSSVSTESESSSFHSS

SEQ ID NO: 26971 - protein, 433 aa, Homo sapiens
  REGION 1..433: note = ENSP00000381086
MEPQLGPEAAALRPGWLALLLWVSALSCSFSLPASSLSSLVPQVRTSYNFGRTFLGLDKCNACIGTSICKKFFKEEIRSDNWLASHLGLPPDSLLSYPANYSDDSKIWRPVEIFRLVSKYQNEISDRRICASASAPKTCSIERVLRKTERFQKWLQAKRLTPDLVQGLASPLLRCPSQRLLDRVVRRYAEVADAGSIFMDHFTDRDKLRLLYTLAVNSHPILLQIFPGAEGWPLPKYLGSCGRFLVSTSTRPLQEFYDAPPDQAADLAYQLLGVLESLRSNDLNYFFYFTHIDAGMFGVFNNGHLFIRDASAVGVIDKQEGSQEANRAGENKDIFSCLVSGCQAQLPSCESISEKQSLVLVCQKLLPRLLQGRFPSPVQDDIDSILVQCGDSIRPDPEVLGAASQLKDILRPLRTCDSRFAYRYPDCKYNDKF

SEQ ID NO: 26972 - protein, 182 aa, Homo sapiens
  REGION 1..182: note = ENSP00000367168
MEPQLGPEAAALRPGWLALLLWVSALSCSFSLPASSLSSLVPQVRTSYNFGRTFLGLDKCNACIGTSICKKFFKEEIRSDNWLASHLGLPPDSLLSYPANYSDDSKIWRPVEIFRLVSKYQNEISDRRICASASAPKTCSIERVLRKTERFQKWLQAKRLTPDLVQDCHQGQRELKFLCMLR

SEQ ID NO: 26973 - protein, 367 aa, Homo sapiens
  REGION 1..367: note = ENSP00000378248
MNTNVCVEPGPSPEAPGLPKESHLPEGALNSLVDYNSEMERYRSFATSFYKTNGGAFPQAAKIARITTPIFPSSAAAAAAAARIGMSPWNCDNAATAAAATAMLWGSGGGGGGGGGGGGGGGGGGGGGGGGGGGRKSSSAAASSSASSSSAILPAGGGGGGGGGGSRTSMHHRNDSQRLGKAGCPPEPSLQMANTNFLSTLSPEHCRPLAGECMNKLKCGAAEAEIMNLPERVGTFSAIPALGGISLPPGVIVMTALHSPAAASAAVTDSAFQIANLADCPQNHSSSSSSSSGGAGGANPAKKKRKRCGVCVPCKRLINCGVCSSCRNRKTGHQICKFRKCEELKKKPGTSLERTPVPSAEAFRWFF

SEQ ID NO: 26974 - protein, 134 aa, Homo sapiens
  REGION 1..134: note = ENSP00000341625
MAEQSDEAVKYYTLEEIQKHNHSKSTWLILHHKVYDLTKFLEEHPGGEEVLREQAGGDATENFEDVGHSTDAREMSKTFIIGELHPDDRPKLNKPPETLITTIDSSSSWWTNWVIPAISAVAVALMYRLYMAED

SEQ ID NO: 26975 - protein, 60 aa, Homo sapiens
  REGION 1..60: note = ENSP00000299438
MSKTFIIGELHPDDRPKLNKPPETLITTIDSSSSWWTNWVIPAISAVAVALMYRLYMAED

SEQ ID NO: 26976 - protein, 98 aa, Homo sapiens
  REGION 1..98: note = ENSP00000436461
MAEQSDEAVKYYTLEEIQKHNHSKSTWLILHHKVYDLTKFLEEHPGGEEVLREQAGGDATENFEDVGHSTDAREMSKTFIIGELHPDDRPKLNKPPEP

SEQ ID NO: 26977 - protein, 124 aa, Homo sapiens
  REGION 1..124: note = ENSP00000381011
MAEQSDEAVKYYTLEEIQKHNHSKSTWLILHHKVYDLTKFLEEHPGGEEVLREQAGGDATENFEDVGHSTDAREMSKTFIIGELHPETLITTIDSSSSWWTNWVIPAISAVAVALMYRLYMAED

SEQ ID NO: 26978 - protein, 105 aa, Homo sapiens
  REGION 1..105: note = ENSP00000307786
MGDVEKGKKIFIMKCSQCHTVEKGGKHKTGPNLHGLFGRKTGQAPGYSYTAANKNKGIIWGEDTLMEYLENPKKYIPGTKMIFVGIKKKEERADLIAYLKKATNE

SEQ ID NO: 26979 - protein, 105 aa, Homo sapiens; identical to SEQ ID NO: 26978
  REGION 1..105: note = ENSP00000386270

SEQ ID NO: 26980 - protein, 105 aa, Homo sapiens; identical to SEQ ID NO: 26978
  REGION 1..105: note = ENSP00000387279

SEQ ID NO: 26981 - protein, 101 aa, Homo sapiens
  REGION 1..101: note = ENSP00000416479
MGDVEKGKKIFIMKCSQCHTVEKGGKHKTGPNLHGLFGRKTGQAPGYSYTAANKNKGIIWGEDTLMEYLENPKKYIPGTKMIFVGIKKKEERADLIAYLKK

SEQ ID NO: 26982 - protein, 1278 aa, Homo sapiens
  REGION 1..1278: note = ENSP00000479719
MTTHVTLEDALSNVDLLEELPLPDQQPCIEPPPSSIMYQANFDTNFEDRNAFVTGIARYIEQATVHSSMNEMLEEGHEYAVMLYTWRSCSRAIPQVKCNEQPNRVEIYEKTVEVLEPEVTKLMKFMYFQRKAIERFCSEVKRLCHAERRKDFVSEAYLLTLGKFINMFAVLDELKNMKCSVKNDHSAYKRAAQFLRKMADPQSIQESQNLSMFLANHNRITQCLHQQLEVIPGYEELLADIVNICVDYYENKMYLTPSEKHMLLKVMGFGLYLMDGNVSNIYKLDAKKRINLSKIDKFFKQLQVVPLFGDMQIELARYIKTSAHYEENKSKWTCTQSSISPQYNICEQMVQIRDDHIRFISELARYSNSEVVTGSGLDSQKSDEEYRELFDLALRGLQLLSKWSAHVMEVYSWKLVHPTDKFCNKDCPGTAEEYERATRYNYTSEEKFAFVEVIAMIKGLQVLMGRMESVFNQAIRNTIYAALQDFAQVTLREPLRQAVRKKKNVLISVLQAIRKTICDWEGGREPPNDPCLRGEKDPKGGFDIKVPRRAVGPSSTQACQWSPRALFHPTGGTQGRRGCRSLLYMVRTMLESLIADKSGSKKTLRSSLDGPIVLAIEDFHKQSFFFTHLLNISEALQQCCDLSQLWFREFFLELTMGRRIQFPIEMSMPWILTDHILETKEPSMMEYVLYPLDLYNDSAYYALTKFKKQFLYDEIEAEVNLCFDQFVYKLADQIFAYYKAMAGSVLLDKRFRAECKNYGVIIPYPPSNRYETLLKQRHVQLLGRSIDLNRLITQRISAAMYKSLDQAISRFESEDLTSIVELEWLLEINRLTHRLLCKHMTLDSFDAMFREANHNVSAPYGRITLHVFWELNFDFLPNYCYNGSTNRFVRTAIPFTQEPQRDKPANVQPYYLYGSKPLNIAYSHIYSSYRNFVGPPHFKTICRLLGYQGIAVVMEELLKIVKSLLQGTILQYVKTLIEVMPKICRLPRHEYGSPGILEFFHHQLKDIIEYAELKTDVFQSLREVGNAILFCLLIEQALSQEEVCDLLHAAPFQNILPRVYIKEGERLEVRMKRLEAKYAPLHLVPLIERLGTPQQIAIAREGDLLTKERLCCGLSMFEVILTRIRSYLQDPIWRGPPPTNGVMHVDECVEFHRLWSAMQFVYCIPVGTNEFTAEQCFGDGLNWAGCSIIVLLGQQRRFDLFDFCYHLLKVQRQDGKDEIIKNVPLKKMADRIRKYQILNNEVFAILNKYMKSVETDSSTVEHVRCFQPPIHQSLATTC

SEQ ID NO: 26983 - protein, 1253 aa, Homo sapiens
  REGION 1..1253: note = ENSP00000479968
MTTHVTLEDALSNVDLLEELPLPDQQPCIEPPPSSIMYQANFDTNFEDRNAFVTGIARYIEQATVHSSMNEMLEEGHEYAVMLYTWRSCSRAIPQVKCNEQPNRVEIYEKTVEVLEPEVTKLMKFMYFQRKAIERFCSEVKRLCHAERRKDFVSEAYLLTLGKFINMFAVLDELKNMKCSVKNDHSAYKRAAQFLRKMADPQSIQESQNLSMFLANHNRITQCLHQQLEVIPGYEELLADIVNICVDYYENKMYLTPSEKHMLLKVMGFGLYLMDGNVSNIYKLDAKKRINLSKIDKFFKQLQVVPLFGDMQIELARYIKTSAHYEENKSKWTCTQSSISPQYNICEQMVQIRDDHIRFISELARYSNSEVVTGSGLDSQKSDEEYRELFDLALRGLQLLSKWSAHVMEVYSWKLVHPTDKFCNKDCPGTAEEYERATRYNYTSEEKFAFVEVIAMIKGLQVLMGRMESVFNQAIRNTIYAALQDFAQVTLREPLRQAVRKKKNVLISVLQAIRKTICDWEGGREPPNDPCLRGEKDPKGGFDIKVPRRAVGPSSTQLYMVRTMLESLIADKSGSKKTLRSSLDGPIVLAIEDFHKQSFFFTHLLNISEALQQCCDLSQLWFREFFLELTMGRRIQFPIEMSMPWILTDHILETKEPSMMEYVLYPLDLYNDSAYYALTKFKKQFLYDEIEAEVNLCFDQFVYKLADQIFAYYKAMAGSVLLDKRFRAECKNYGVIIPYPPSNRYETLLKQRHVQLLGRSIDLNRLITQRISAAMYKSLDQAISRFESEDLTSIVELEWLLEINRLTHRLLCKHMTLDSFDAMFREANHNVSAPYGRITLHVFWELNFDFLPNYCYNGSTNRFVRTAIPFTQEPQRDKPANVQPYYLYGSKPLNIAYSHIYSSYRNFVGPPHFKTICRLLGYQGIAVVMEELLKIVKSLLQGTILQYVKTLIEVMPKICRLPRHEYGSPGILEFFHHQLKDIIEYAELKTDVFQSLREVGNAILFCLLIEQALSQEEVCDLLHAAPFQNILPRVYIKEGERLEVRMKRLEAKYAPLHLVPLIERLGTPQQIAIAREGDLLTKERLCCGLSMFEVILTRIRSYLQDPIWRGPPPTNGVMHVDECVEFHRLWSAMQFVYCIPVGTNEFTAEQCFGDGLNWAGCSIIVLLGQQRRFDLFDFCYHLLKVQRQDGKDEIIKNVPLKKMADRIRKYQILNNEVFAILNKYMKSVETDSSTVEHVRCFQPPIHQSLATTC

SEQ ID NO: 26984 - protein, 1057 aa, Homo sapiens
  REGION 1..1057: note = ENSP00000428009
MTTHVTLEDALSNVDLLEELPLPDQQPCIEPPPSSIMYQANFDTNFEDRNAFVTGIARYIEQATVHSSMVMGFGLYLMDGNVSNIYKLDAKKRINLSKIDKFFKQLQVVPLFGDMQIELARYIKTSAHYEENKSKWTCTQSSISPQYNICEQMVQIRDDHIRFISELARYSNSEVVTGSGLDSQKSDEEYRELFDLALRGLQLLSKWSAHVMEVYSWKLVHPTDKFCNKDCPGTAEEYERATRYNYTSEEKFAFVEVIAMIKGLQVLMGRMESVFNQAIRNTIYAALQDFAQVTLREPLRQAVRKKKNVLISVLQAIRKTICDWEGGREPPNDPCLRGEKDPKGGFDIKVPRRAVGPSSTQLYMVRTMLESLIADKSGSKKTLRSSLDGPIVLAIEDFHKQSFFFTHLLNISEALQQCCDLSQLWFREFFLELTMGRRIQFPIEMSMPWILTDHILETKEPSMMEYVLYPLDLYNDSAYYALTKFKKQFLYDEIEAEVNLCFDQFVYKLADQIFAYYKAMAGSVLLDKRFRAECKNYGVIIPYPPSNRYETLLKQRHVQLLGRSIDLNRLITQRISAAMYKSLDQAISRFESEDLTSIVELEWLLEINRLTHRLLCKHMTLDSFDAMFREANHNVSAPYGRITLHVFWELNFDFLPNYCYNGSTNRFVRTAIPFTQEPQRDKPANVQPYYLYGSKPLNIAYSHIYSSYRNFVGPPHFKTICRLLGYQGIAVVMEELLKIVKSLLQGTILQYVKTLIEVMPKICRLPRHEYGSPGILEFFHHQLKDIIEYAELKTDVFQSLREVGNAILFCLLIEQALSQEEVCDLLHAAPFQNILPRVYIKEGERLEVRMKRLEAKYAPLHLVPLIERLGTPQQIAIAREGDLLTKERLCCGLSMFEVILTRIRSYLQDPIWRGPPPTNGVMHVDECVEFHRLWSAMQFVYCIPVGTNEFTAEQCFGDGLNWAGCSIIVLLGQQRRFDLFDFCYHLLKVQRQDGKDEIIKNVPLKKMADRIRKYQILNNEVFAILNKYMKSVETDSSTVEHVRCFQPPIHQSLATTC

SEQ ID NO: 26985 - protein, 1117 aa, Homo sapiens
  REGION 1..1117: note = ENSP00000403793
MTTHVTLEDALSNVDLLEELPLPDQQPCIEPPPSSIMYQANFDTNFEDRNAFVTGIARYIEQATVHSSMNEMLEEGHEYAVMLYTWRSCSRAIPQVKCNEQPNRVEIYEKTVEVLEPEVTKLMKFMYFQVMGFGLYLMDGNVSNIYKLDAKKRINLSKIDKFFKQLQVVPLFGDMQIELARYIKTSAHYEENKSKWTCTQSSISPQYNICEQMVQIRDDHIRFISELARYSNSEVVTGSGLDSQKSDEEYRELFDLALRGLQLLSKWSAHVMEVYSWKLVHPTDKFCNKDCPGTAEEYERATRYNYTSEEKFAFVEVIAMIKGLQVLMGRMESVFNQAIRNTIYAALQDFAQVTLREPLRQAVRKKKNVLISVLQAIRKTICDWEGGREPPNDPCLRGEKDPKGGFDIKVPRRAVGPSSTQLYMVRTMLESLIADKSGSKKTLRSSLDGPIVLAIEDFHKQSFFFTHLLNISEALQQCCDLSQLWFREFFLELTMGRRIQFPIEMSMPWILTDHILETKEPSMMEYVLYPLDLYNDSAYYALTKFKKQFLYDEIEAEVNLCFDQFVYKLADQIFAYYKAMAGSVLLDKRFRAECKNYGVIIPYPPSNRYETLLKQRHVQLLGRSIDLNRLITQRISAAMYKSLDQAISRFESEDLTSIVELEWLLEINRLTHRLLCKHMTLDSFDAMFREANHNVSAPYGRITLHVFWELNFDFLPNYCYNGSTNRFVRTAIPFTQEPQRDKPANVQPYYLYGSKPLNIAYSHIYSSYRNFVGPPHFKTICRLLGYQGIAVVMEELLKIVKSLLQGTILQYVKTLIEVMPKICRLPRHEYGSPGILEFFHHQLKDIIEYAELKTDVFQSLREVGNAILFCLLIEQALSQEEVCDLLHAAPFQNILPRVYIKEGERLEVRMKRLEAKYAPLHLVPLIERLGTPQQIAIAREGDLLTKERLCCGLSMFEVILTRIRSYLQDPIWRGPPPTNGVMHVDECVEFHRLWSAMQFVYCIPVGTNEFTAEQCFGDGLNWAGCSIIVLLGQQRRFDLFDFCYHLLKVQRQDGKDEIIKNVPLKKMADRIRKYQILNNEVFAILNKYMKSVETDSSTVEHVRCFQPPIHQSLATTC

SEQ ID NO: 26986 - protein, 68 aa, Homo sapiens
  REGION 1..68: note = ENSP00000428079
MTTHVTLEDALSNVDLLEELPLPDQQPCIEPPPSSIMYQANFDTNFEDRNAFVTGIASARPSSGSAAR

SEQ ID NO: 26987 - protein, 1227 aa, Homo sapiens
  REGION 1..1227: note = ENSP00000430904
MTTHVTLEDALSNVDLLEELPLPDQQPCIEPPPSSIMYQANFDTNFEDRNAFVTGIARYIEQATVHSSMVKCNEQPNRVEIYEKTVEVLEPEVTKLMKFMYFQRKAIERFCSEVKRLCHAERRKDFVSEAYLLTLGKFINMFAVLDELKNMKCSVKNDHSAYKRAAQFLRKMADPQSIQESQNLSMFLANHNRITQCLHQQLEVIPGYEELLADIVNICVDYYENKMYLTPSEKHMLLKVMGFGLYLMDGNVSNIYKLDAKKRINLSKIDKFFKQLQVVPLFGDMQIELARYIKTSAHYEENKSKWTCTQSSISPQYNICEQMVQIRDDHIRFISELARYSNSEVVTGSGLDSQKSDEEYRELFDLALRGLQLLSKWSAHVMEVYSWKLVHPTDKFCNKDCPGTAEEYERATRYNYTSEEKFAFVEVIAMIKGLQVLMGRMESVFNQAIRNTIYAALQDFAQVTLREPLRQAVRKKKNVLISVLQAIRKTICDWEGGREPPNDPCLRGEKDPKGGFDIKVPRRAVGPSSTQLYMVRTMLESLIADKSGSKKTLRSSLDGPIVLAIEDFHKQSFFFTHLLNISEALQQCCDLSQLWFREFFLELTMGRRIQFPIEMSMPWILTDHILETKEPSMMEYVLYPLDLYNDSAYYALTKFKKQFLYDEIEAEVNLCFDQFVYKLADQIFAYYKAMAGSVLLDKRFRAECKNYGVIIPYPPSNRYETLLKQRHVQLLGRSIDLNRLITQRISAAMYKSLDQAISRFESEDLTSIVELEWLLEINRLTHRLLCKHMTLDSFDAMFREANHNVSAPYGRITLHVFWELNFDFLPNYCYNGSTNRFVRTAIPFTQEPQRDKPANVQPYYLYGSKPLNIAYSHIYSSYRNFVGPPHFKTICRLLGYQGIAVVMEELLKIVKSLLQGTILQYVKTLIEVMPKICRLPRHEYGSPGILEFFHHQLKDIIEYAELKTDVFQSLREVGNAILFCLLIEQALSQEEVCDLLHAAPFQNILPRVYIKEGERLEVRMKRLEAKYAPLHLVPLIERLGTPQQIAIAREGDLLTKERLCCGLSMFEVILTRIRSYLQDPIWRGPPPTNGVMHVDECVEFHRLWSAMQFVYCIPVGTNEFTAEQCFGDGLNWAGCSIIVLLGQQRRFDLFDFCYHLLKVQRQDGKDEIIKNVPLKKMADRIRKYQILNNEVFAILNKYMKSVETDSSTVEHVRCFQPPIHQSLATTC

SEQ ID NO: 26988 - protein, 295 aa, Homo sapiens
  REGION 1..295: note = ENSP00000480605
MTTHVTLEDALSNVDLLEELPLPDQQPCIEPPPSSIMYQANFDTNFEDRNAFVTGIARYIEQATVHSSMNEMLEEGHEYAVMLYTWRSCSRAIPQVKCNEQPNRVEIYEKTVEVLEPEVTKLMKFMYFQRKAIERFCSEVKRLCHAERRKDFVSEAYLLTLGKFINMFAVLDELKNMKCSVKNDHSAYKRAAQFLRKMADPQSIQESQNLSMFLANHNRITQQLEVIPGYEELLADIVNICVDYYENKMYLTPSEKHMLLKVMGFGLYLMDGNVSNIYKLDAKKRINLSKIDKFF

SEQ ID NO: 26989 - protein, 188 aa, Homo sapiens
  REGION 1..188: note = ENSP00000479376
MTTHVTLEDALSNVDLLEELPLPDQQPCIEPPPSSIMYQANFDTNFEDRNAFVTGIARYIEQATVHSSMNEMLEEGHEYAVMLYTWRSCSRAIPQVKCNEQPNRVEIYEKTVEVLEPEVTKLMKFMYFQRKAIERFCSEVKRLCHAERRKDFVSEAYLLTLGKFINMFAVLDELKNMKCSVKNDHSAY

SEQ ID NO: 26990 - protein, 222 aa, Homo sapiens
  REGION 1..222: note = ENSP00000478058
MTTHVTLEDALSNVDLLEELPLPDQQPCIEPPPSSIMYQANFDTNFEDRNAFVTGIARYIEQATVHSSMNEMLEEGHEYAVMLYTWRSCSRAIPQVKCNEQPNRVEIYEKTVEVLEPEVTKLMKFMYFQRKAIERFCSEVKRLCHAERRKDFVSEAYLLTLGKFINMFAVLDELKNMKCSVKNDHSAYKRAAQFLRKMADPQSIQESQNLSMFLANHNRITQ

SEQ ID NO: 26991 - protein, 1253 aa, Homo sapiens; identical to SEQ ID NO: 26983
  REGION 1..1253: note = ENSP00000484819

SEQ ID NO: 26992 - protein, 71 aa, Homo sapiens
  REGION 1..71: note = ENSP00000479211
MTTHVTLEDALSNVDLLEELPLPDQQPCIEPPPSSIMYQANFDTNFEDRNAFVTGIARYIEQATVHSSMIF

SEQ ID NO: 26993 - protein, 101 aa, Homo sapiens
  REGION 1..101: note = ENSP00000482739
LYMVRTMLESLIADKSGSKKTLRSSLDGPIVLAIEDFHKQSFFFTHLLNISDGVLLCCPGWSAVALSQLTATSASQVQAGVQSCDLSSPQPLPPRSPAAVL

SEQ ID NO: 26994 - protein, 190 aa, Homo sapiens
  REGION 1..190: note = ENSP00000293230
MEKVPGEMEIERRERSEELSEAERKAVQAMWARLYANCEDVGVAILVRFFVNFPSAKQYFSQFKHMEDPLEMERSPQLRKHACRVMGALNTVVENLHDPDKVSSVLALVGKAHALKHKVEPVYFKILSGVILEVVAEEFASDFPPETQRAWAKLRGLIYSHVTAAYKEVGWVQQVPNATTPPATLPSSGP

SEQ ID NO: 26995 - protein, 226 aa, Homo sapiens
  REGION 1..226: note = ENSP00000466448
MEKVPGEMEIERRERSEELSEAERKAVQAMWARLYANCEDVGVAILVRFFVNFPSAKQYFSQFKHMEDPLEMERSPQLRKHACRVMGALNTVVENLHDPDKVSSVLALVGKAHALKHKVEPVYFKPTGHTALFGAVGPLTPPPSLAAPRAEGRVLKTLLDAPFLGAKEAGGIPDSTSPKEASVAARVPPWSCWEAALAAWMLTPARRAERGPLFLAFLLTVRERPS

SEQ ID NO: 26996 - protein, 125 aa, Homo sapiens
  REGION 1..125: note = ENSP00000464817
MEDPLEMERSPQLRKHACRVMGALNTVVENLHDPDKVSSVLALVGKAHALKHKVEPVYFKILSGVILEVVAEEFASDFPPETQRAWAKLRGLIYSHVTAAYKEVGWVQQVPNATTPPATLPSSGP

SEQ ID NO: 26997 - protein, 125 aa, Homo sapiens; identical to SEQ ID NO: 26996
  REGION 1..125: note = ENSP00000468559

SEQ ID NO: 26998 - protein, 531 aa, Homo sapiens
  REGION 1..531: note = ENSP00000258415
MAALGCARLRWALRGAGRGLCPHGARAKAAIPAALPSDKATGAPGAGPGVRRRQRSLEEIPRLGQLRFFFQLFVQGYALQLHQLQVLYKAKYGPMWMSYLGPQMHVNLASAPLLEQVMRQEGKYPVRNDMELWKEHRDQHDLTYGPFTTEGHHWYQLRQALNQRLLKPAEAALYTDAFNEVIDDFMTRLDQLRAESASGNQVSDMAQLFYYFALEAICYILFEKRIGCLQRSIPEDTVTFVRSIGLMFQNSLYATFLPKWTRPVLPFWKRYLDGWNAIFSFGKKLIDEKLEDMEAQLQAAGPDGIQVSGYLHFLLASGQLSPREAMGSLPELLMAGVDTTSNTLTWALYHLSKDPEIQEALHEEVVGVVPAGQVPQHKDFAHMPLLKAVLKETLRLYPVVPTNSRIIEKEIEVDGFLFPKNTQFVFCHYVVSRDPTAFSEPESFQPHRWLRNSQPATPRIQHPFGSVPFGYGVRACLGRRIAELEMQLLLARLIQKYKVVLAPETGELKSVARIVLVPNKKVGLQFLQRQC

SEQ ID NO: 26999 - protein, 115 aa, Homo sapiens
  REGION 1..115: note = ENSP00000404945
MAALGCARLRWALRGAGRGLCPHGARAKAAIPAALPSDKATGAPGAGPGVRRRQRSLEEIPRLGQLRFFFQLFVQGYALQLHQLQGRTPLVPAAPGSEPAVAEASGSSALYGCFQ

SEQ ID NO: 27000 - protein, 221 aa, Homo sapiens
  REGION 1..221: note = ENSP00000392671
MWMSYLGPQMHVNLASAPLLEQVMRQEGKYPVRNDMELWKEHRDQHDLTYGPFTTEGHHWYQLRQALNQRLLKPAEAALYTDAFNEVIDDFMTRLDQLRAESASGNQVSDMAQLFYYFALEAICYILFEKRIGCLQRSIPEDTVTFVRSIGLMFQNSLYATFLPKWTRPVLPFWKRYLDGWNAIFSFGKKLIDEKLEDMEAQLQAAGPDGIQVSGYLHFLL

SEQ ID NO: 27001 - protein, 180 aa, Homo sapiens
  REGION 1..180: note = ENSP00000353241
LRRRFGDVFSLQLAWTPVVVLNGLAAVREALVTHGEDTADRPPVPITQILGFGPRSQGRPFRPNGLLDKAVSNVIASLTCGRRFEYDDPRFLRLLDLAQEGLKEESGFLREVLNAVPVLLHIPALAGKVLRFQKAFLTQLDELLTEHRMTWDPAQPPRDLTEAFLAEMEKWWLTCSLPGW

SEQ ID NO: 27002 - protein, 497 aa, Homo sapiens [sequence omitted]

SEQ ID NO: 27003 - protein, 446 aa, Homo sapiens
  REGION 1..446: note = ENSP00000351927
MGLEALVPLAVIVAIFLLLVDLMHRRQRWAARYPPGPLPLPGLGNLLHVDFQNTPYCFDQLRRRFGDVFSLQLAWTPVVVLNGLAAVREALVTHGEDTADRPPVPITQILGFGPRSQGRPFRPNGLLDKAVSNVIASLTCGRRFEYDDPRFLRLLDLAQEGLKEESGFLREVLNAVPVLLHIPALAGKVLRFQKAFLTQLDELLTEHRMTWDPAQPPRDLTEAFLAEMEKAKGNPESSFNDENLRIVVADLFSAGMVTTSTTLAWGLLLMILHPDVQRRVQQEIDDVIGQVRRPEMGDQAHMPYTTAVIHEVQRFGDIVPLGVTHMTSRDIEVQGFRIPKGTTLITNLSSVLKDEAVWEKPFRFHPEHFLDAQGHFVKPEAFLPFSAGRRACLGEPLARMELFLFFTSLLQHFSFSVPTGQPRPSHHGVFAFLVSPSPYELCAVPR

SEQ ID NO: 27004 - protein, 494 aa, Homo sapiens [sequence omitted]

SEQ ID NO: 27005 - protein, 180 aa, Homo sapiens; identical to SEQ ID NO: 27001
  REGION 1..180: note = ENSP00000487214

SEQ ID NO: 27006 - protein, 497 aa, Homo sapiens
  REGION 1..497: note = ENSP00000479867
MGLEALVPLAVIVAIFLLLVDLMHRRQRWAARYPPGPLPLPGLGNLLHVDFQNTPYCFDQLRRRFGDVFSLQLAWTPVVVLNGLAAVREALVTHGEDTADRPPVPITQILGFGPRSQGVFLARYGPAWREQRRFSVSTLRNLGLGKKSLEQWVTEEAACLCAAFANHSGRPFRPNGLLDKAVSNVIASLTCGRRFEYDDPRFLRLLDLAQEGLKEESGFLREVLNAVPVLLHIPALAGKVLRFQKAFLTQLDELLTEHRMTWDPAQPPRDLTEAFLAEMEKAKGNPESSFNDENLCIVVADLFSAGMVTTSTTLAWGLLLMILHPDVQRRVQQEIDDVIGQVRRPEMGDQAHMPYTTAVIHEVQRFGDIVPLGVTHMTSRDIEVQGFRIPKGTTLITNLSSVLKDEAVWEKPFRFHPEHFLDAQGHFVKPEAFLPFSAGRRACLGEPLARMELFLFFTSLLQHFSFSVPTGQPRPSHHGVFAFLVTPSPYELCAVPR

SEQ ID NO: 27007 - protein, 446 aa, Homo sapiens
  REGION 1..446: note = ENSP00000483677
MGLEALVPLAVIVAIFLLLVDLMHRRQRWAARYPPGPLPLPGLGNLLHVDFQNTPYCFDQLRRRFGDVFSLQLAWTPVVVLNGLAAVREALVTHGEDTADRPPVPITQILGFGPRSQGRPFRPNGLLDKAVSNVIASLTCGRRFEYDDPRFLRLLDLAQEGLKEESGFLREVLNAVPVLLHIPALAGKVLRFQKAFLTQLDELLTEHRMTWDPAQPPRDLTEAFLAEMEKAKGNPESSFNDENLCIVVADLFSAGMVTTSTTLAWGLLLMILHPDVQRRVQQEIDDVIGQVRRPEMGDQAHMPYTTAVIHEVQRFGDIVPLGVTHMTSRDIEVQGFRIPKGTTLITNLSSVLKDEAVWEKPFRFHPEHFLDAQGHFVKPEAFLPFSAGRRACLGEPLARMELFLFFTSLLQHFSFSVPTGQPRPSHHGVFAFLVTPSPYELCAVPR

SEQ ID NO: 27008 - protein, 497 aa, Homo sapiens
  REGION 1..497: note = ENSP00000476021
MGLEALVPLAVIVAIFLLLVDLMHRRQRWAARYSPGPLPLPGLGNLLHVDFQNTPYCFDQLRRRFGDVFSLQLAWTPVVVLNGLAAVREALVTHGEDTADRPPVPITQILGFGPRSQGVFLARYGPAWREQRRFSVSTLRNLGLGKKSLEQWVTEEAACLCAAFANHSGRPFRPNGLLDKAVSNVIASLTCGRRFEYDDPRFLRLLDLAQEGLKEESGFLREVLNAVPVLLHIPALAGKVLRFQKAFLTQLDELLTEHRMTWDPAQPPRDLTEAFLAEMEKAKGNPESSFNDENLRIVVADLFSAGMVTTSTTLAWGLLLMILHPDVQRRVQQEIDDVIGQVRRPEMGDQAHMPYTTAVIHEVQRFGDIVPLGVTHMTSRDIEVQGFRIPKGTTLITNLSSVLKDEAVWEKPFRFHPEHFLDAQGHFVKPEAFLPFSAGRRACLGEPLARMELFLFFTSLLQHFSFSVPTGQPRPSHHGVFAFLVTPSPYELCAVPR

SEQ ID NO: 27009 - protein, 446 aa, Homo sapiens
  REGION 1..446: note = ENSP00000483245
MGLEALVPLAVIVAIFLLLVDLMHRRQRWAARYSPGPLPLPGLGNLLHVDFQNTPYCFDQLRRRFGDVFSLQLAWTPVVVLNGLAAVREALVTHGEDTADRPPVPITQILGFGPRSQGRPFRPNGLLDKAVSNVIASLTCGRRFEYDDPRFLRLLDLAQEGLKEESGFLREVLNAVPVLLHIPALAGKVLRFQKAFLTQLDELLTEHRMTWDPAQPPRDLTEAFLAEMEKAKGNPESSFNDENLRIVVADLFSAGMVTTSTTLAWGLLLMILHPDVQRRVQQEIDDVIGQVRRPEMGDQAHMPYTTAVIHEVQRFGDIVPLGVTHMTSRDIEVQGFRIPKGTTLITNLSSVLKDEAVWEKPFRFHPEHFLDAQGHFVKPEAFLPFSAGRRACLGEPLARMELFLFFTSLLQHFSFSVPTGQPRPSHHGVFAFLVTPSPYELCAVPR

SEQ ID NO: 27010 - protein, 180 aa, Homo sapiens; identical to SEQ ID NO: 27001
  REGION 1..180: note = ENSP00000487281

SEQ ID NO: 27011 - protein, 497 aa, Homo sapiens; identical to SEQ ID NO: 27008
  REGION 1..497: note = ENSP00000486094

SEQ ID NO: 27012 - protein, 494 aa, Homo sapiens
  REGION 1..494: note = ENSP00000487558
MHRRQRWAARYSPGPLPLPGLGNLLHVDFQNTPYCFDQLRRRFGDVFSLQLAWTPVVVLNGLAAVREALVTHGEDTADRPPVPITQILGFGPRSQGVFLARYGPAWREQRRFSVSTLRNLGLGKKSLEQWVTEEAACLCAAFANHSGRPFRPNGLLDKAVSNVIASLTCGRRFEYDDPRFLRLLDLAQEGLKEESGFLREVLNAVPVLLHIPALAGKVLRFQKAFLTQLDELLTEHRMTWDPAQPPRDLTEAFLAEMEKAKGNPESSFNDENLRIVVADLFSAGMVTTSTTLAWGLLLMILHPDVQQGGRVQAGAHPIVGTHVCPGRVQQEIDDVIGQVRRPEMGDQAHMPYTTAVIHEVQRFGDIVPLGVTHMTSRDIEVQGFRIPKGTTLITNLSSVLKDEAVWEKPFRFHPEHFLDAQGHFVKPEAFLPFSAGRRACLGEPLARMELFLFFTSLLQHFSFSVPTGQPRPSHHGVFAFLVTPSPYELCAVPR

SEQ ID NO: 27013 - protein, 446 aa, Homo sapiens; identical to SEQ ID NO: 27009
  REGION 1..446: note = ENSP00000486619

SEQ ID NO: 27014 - protein, 180 aa, Homo sapiens; identical to SEQ ID NO: 27001
  REGION 1..180: note = ENSP00000488991

SEQ ID NO: 27015 - protein, 497 aa, Homo sapiens; identical to SEQ ID NO: 27008
  REGION 1..497: note = ENSP00000489231

SEQ ID NO: 27016 - protein, 446 aa, Homo sapiens; identical to SEQ ID NO: 27009
  REGION 1..446: note = ENSP00000489103

SEQ ID NO: 27017 - protein, 494 aa, Homo sapiens; identical to SEQ ID NO: 27012
  REGION 1..494: note = ENSP00000489144

SEQ ID NO: 27018 - protein, 180 aa, Homo sapiens
  REGION 1..180: note = ENSP00000490065
LRRRFGDVFSLQLAWTPVVVLNGLAAVREAMVTRGEDTADRPPVPITQILGFGPRSQGRPFRPNGLLDKAVSNVIASLTCGRRFEYDDPRFLRLLDLAQEGLKEESGFLREVLNAVPVLLHIPALAGKVLRFQKAFLTQLDELLTEHRMTWDPAQPPRDLTEAFLAEMEKWWLTCSLPGW

SEQ ID NO: 27019 - protein, 497 aa, Homo sapiens [sequence omitted]

SEQ ID NO: 27020 - protein, 494 aa, Homo sapiens
  REGION 1..494: note = ENSP00000489990
MHRRQRWAARYSPGPLPLPGLGNLLHVDFQNTPYCFDQLRRRFGDVFSLQLAWTPVVVLNGLAAVREAMVTRGEDTADRPPVPITQILGFGPRSQGVFLARYGPAWREQRRFSVSTLRNLGLGKKSLEQWVTEEAACLCAAFANHSGRPFRPNGLLDKAVSNVIASLTCGRRFEYDDPRFLRLLDLAQEGLKEESGFLREVLNAVPVLLHIPALAGKVLRFQKAFLTQLDELLTEHRMTWDPAQPPRDLTEAFLAEMEKAKGNPESSFNDENLRIVVADLFSAGMVTTSTTLAWGLLLMILHPDVQQGGRVQAGAHPIVGTHVCPGRVQQEIDDVIGQVRRPEMGDQAHMPYTTAVIHEVQRFGDIVPLGVTHMTSRDIEVQGFRIPKGTTLITNLSSVLKDEAVWEKPFRFHPEHFLDAQGHFVKPEAFLPFSAGRRACLGEPLARMELFLFFTSLLQHFSFSVPTGQPRPSHHGVFAFLVTPSPYELCAVPR

SEQ ID NO: 27021 - protein, 446 aa, Homo sapiens
  REGION 1..446: note = ENSP00000490398
MGLEALVPLAVIVAIFLLLVDLMHRRQRWAARYSPGPLPLPGLGNLLHVDFQNTPYCFDQLRRRFGDVFSLQLAWTPVVVLNGLAAVREAMVTRGEDTADRPPVPITQILGFGPRSQGRPFRPNGLLDKAVSNVIASLTCGRRFEYDDPRFLRLLDLAQEGLKEESGFLREVLNAVPVLLHIPALAGKVLRFQKAFLTQLDELLTEHRMTWDPAQPPRDLTEAFLAEMEKAKGNPESSFNDENLRIVVADLFSAGMVTTSTTLAWGLLLMILHPDVQRRVQQEIDDVIGQVRRPEMGDQAHMPYTTAVIHEVQRFGDIVPLGVTHMTSRDIEVQGFRIPKGTTLITNLSSVLKDEAVWEKPFRFHPEHFLDAQGHFVKPEAFLPFSAGRRACLGEPLARMELFLFFTSLLQHFSFSVPTGQPRPSHHGVFAFLVTPSPYELCAVPR

SEQ ID NO: 27022 - protein, 502 aa, Homo sapiens
  REGION 1..502: note = ENSP00000360247
MLAAMGSLAAALWAVVHPRTLLLGTVAFLLAADFLKRRRPKNYPPGPWRLPFLGNFFLVDFEQSHLEVQLFVKKYGNLFSLELGDISAVLITGLPLIKEALIHMDQNFGNRPVTPMREHIFKKNGLIMSSGQAWKEQRRFTLTALRNFGLGKKSLEERIQEEAQHLTEAIKEENGQPFDPHFKINNAVSNIICSITFGERFEYQDSWFQQLLKLLDEVTYLEASKTCQLYNVFPWIMKFLPGPHQTLFSNWKKLKLFVSHMIDKHRKDWNPAETRDFIDAYLKEMSKHTGNPTSSFHEENLICSTLDLFFAGTETTSTTLRWALLYMALYPEIQEKVQAEIDRVIGQGQQPSTAARESMPYTNAVIHEVQRMGNIIPLNVPREVTVDTTLAGYHLPKGTMILTNLTALHRDPTEWATPDTFNPDHFLENGQFKKREAFMPFSIGKRACLGEQLARTELFIFFTSLMQKFTFRPPNNEKLSLKFRMGITISPVSHRLCAVPQV

SEQ ID NO: 27023 - protein, 506 aa, Homo sapiens
  REGION 1..506: note = ENSP00000310721
MAGEVSAATGRFSLERLGLPGLALAAALLLLALCLLVRRTRRPGEPPLIKGWLPYLGVVLNLRKDPLRFMKTLQKQHGDTFTVLLGGKYITFILDPFQYQLVIKNHKQLSFRVFSNKLLEKAFSISQLQKNHDMNDELHLCYQFLQGKSLDILLESMMQNLKQVFEPQLLKTTSWDTAELYPFCSSIIFEITFTTIYGKVIVCDNNKFISELRDDFLKFDDKFAYLVSNIPIELLGNVKSIREKIIKCFSSEKLAKMQGWSEVFQSRQDVLEKYYVHEDLEIGAHHLGFLWASVANTIPTMFWAMYYLLRHPEAMAAVRDEIDRLLQSTGQKKGSGFPIHLTREQLDSLICLESSIFEALRLSSYSTTIRFVEEDLTLSSETGDYCVRKGDLVAIFPPVLHGDPEIFEAPEEFRYDRFIEDGKKKTTFFKRGKKLKCYLMPFGTGTSKCPGRFFALMEIKQLLVILLTYFDLEIIDDKPIGLNYSRLLFGIQYPDSDVLFRYKVKS

SEQ ID NO: 27024 - protein, 381 aa, Homo sapiens [sequence omitted]

SEQ ID NO: 27025 - protein, 97 aa, Homo sapiens
  REGION 1..97: note = ENSP00000261811
MNQENPPPYPGPGPTAPYPPYPPQPMGPGPMGGPYPPPQGYPYQGYPQYGWQGGPQEPPKTTVYVVEDQRRDELGPSTCLTACWTALCCCCLWDMLT

SEQ ID NO: 27026 - protein, 154 aa, Homo sapiens
  REGION 1..154: note = ENSP00000299340
MDAPRLPVRPGVLLPKLVLLFVYADDCLAQCGKDCKSYCCDGTTPYCCSYYAYIGNILSGTAIAGIVFGIVFIMGVIAGIAICICMCMKNHRATRVGILRTTHINTVSSYPGPPPYGHDHEMEYCADLPPPYSPTPQGPAQRSPPPPYPGNARK

SEQ ID NO: 27027 - protein, 132 aa, Homo sapiens
  REGION 1..132: note = ENSP00000382918
MDAPRLPVRPGVLLPKLVLLFVYADDCLAQCGKDCKSYCCDGTTPYCCSYYAYIGNILSGTAIAGIVFGIVFIMGVIAGIAICICMCMKNHRATRVGILRTTHINTVSSYPEYELHEAEILVYFVQHSIPSM

SEQ ID NO: 27028 - protein, 297 aa, Homo sapiens
  REGION 1..297: note = ENSP00000284881
MNEEEQFVNIDLNDDNICSVCKLGTDKETLSFCHICFELNIEGVPKSDLLHTKSLRGHKDCFEKYHLIANQGCPRSKLSKSTYEEVKTILSKKINWIVQYAQNKDLDSDSECSKNPQHHLFNFRHKPEEKLLPQFDSQVPKYSAKWIDGSAGGISNCTQRILEQRENTDFGLSMLQDSGATLCRNSVLWPHSHNQAQKKEETISSPEANVQTQHPHYSREELNSMTLGEVEQLNAKLLQQIQEVFEELTHQVQEKDSLASQLHVRHVAIEQLLKNCSKLPCLQVGRTGMKSHLPINN

SEQ ID NO: 27029 - protein, 296 aa, Homo sapiens
  REGION 1..296: note = ENSP00000383404
MNEEEQFVNIDLNDDNICSVCKLGTDKETLSFCHICFELNIEGVPKSDLLHTKSLRGHKDCFEKYHLIANQGCPRSKLSKSTYEEVKTILSKKINWIVQYAQNKDLDSDSECSKNPQHHLFNFRHKPEEKLLPQFDSQVPKYSAKWIDGSAGGISNCTQRILEQRENTDFGLSMLQDSGATLCRNSVLWPHSHNQAQKKEETISSPEANVQTQHPHYSREELNSMTLGEVEQLNAKLLQQIQVFEELTHQVQEKDSLASQLHVRHVAIEQLLKNCSKLPCLQVGRTGMKSHLPINN

SEQ ID NO: 27030 - protein, 221 aa, Homo sapiens
  REGION 1..221: note = ENSP00000383403
MNEEEQFVNIDLNDDNICSVCKLGTDKETLSFCHICFELNIEGVPKSDLLHTKSLRGHKDCFEKYHLIANQGCPRSKLSKSTYEEVKTILSKKINWIVQYAQNKDLDSDSECSKNPQHHLFNFRHKPEEKLLPQFDSQVPKYSAKWIDGSAGGISNCTQRILEQRENTDFGLSMLQDSGATLCRNSVLWPHSHNQAQKKEETISSPEANVQTQHPHYSREE

SEQ ID NO: 27031 - protein, 242 aa, Homo sapiens
  REGION 1..242: note = ENSP00000385566
MNEEEQFVNIDLNDDNICSVCKLGTDKETLSFCHICFELNIEGVPKSDLLHTKSLRGHKDCFEKYHLIANQGCPRSKLSKSTYEEVKTILSKKINWIVQYAQNKDLDSDSECSKNPQHHLFNFRHKPEEKLLPQFDSQVPKYSAKWIDGSAGGISNCTQRILEQRENTDFGLSMLQDSGATLCRNSVLWPHSHNQAQKKEETISSPEANVQTQHPHYSREELNSMTLGEVEQLNAKLLQQIQ

SEQ ID NO: 27032 - protein, 836 aa, Homo sapiens
  REGION 1..836: note = ENSP00000433481
  VARIANT 1: note = Any amino acid
XPSKDSTESLVQPGPKGGQEAADVSADTVSSKVQPTAAAAVTLFLRKSSPPALSAALVAKGTSSSPLAVASGPAKSSSMTTLAKNVTNKAASGPKRTPGAVHTAFPFTPTYMYARTGHTTSTHTAMQGNMDTASGLLSTTYLPRKPQAMHTGLPNPTNLEMPRASTPRPLTVTAALTSITASVKATRLPPLRAENTDAVLPAASAAVVTTGKMASNLECQMSSKLLVKTVLFLTQRRVQISESLKFSIAKGLTQALRKAFHQNDVSAHVDILEYSHNVTVGYYATKGKLVYLPAVVIEMLGVYGVSNVTADLKQHTPHLQSVAVLASPWNPQPAGYFQLKTVLQFVSQADNIQSCKFAQTMEQRLQKAFQDAERKVLNTKSNLTIQIVSTSNASQAVTLVYVVGNQSTFLNGTVASSLLSQLSAELVGFYLTYPPLTIAEPLEYPNLDISETTRDYWVITVLQGVDNSLVGLHNQSFARVMEQRLAQLFMMSQQQGRRFKRATTLGSYTVQMVKMQRVPGPKDPAELTYYTLYNGKPLLGTAAAKILSTIDSQRMALTLHHVVLLQADPVVKNPPNNLWIIAAVLAPIAVVTVIIIIITAVLCRKNKNDFKPDTMINLPQRAKPVQGFDYAKQHLGQQGADEEVIPVTQETVVLPLPIRDAPQERDVAQDGSTIKTAKSTETRKSRSPSENGSVISNESGKPSSGRRSPQNVMAQQKVTKEEARKRNVPASDEEEGAVLFDNSSKVAAEPFDTSSGSVQLIAIKPTALPMVPPTSDRSQESSAVLNGEVNKALKQKSDIEHYRNKLRLKAKRKGYYDFPAVETSKGLTERKKMYEK

SEQ ID NO: 27033 - protein, 1849 aa, Homo sapiens
  REGION 1..1849: note = ENSP00000315295
MDHTASQNAQDLIGIPHLGVSGSSTKWHSELSPTEGPHSAGSSTPGFLSPMAELSHPSPPPPALGSLLQLPDGSPSWSMLEVASGPASTQQIKAGVPGRVHNGVSLPTFKNTETATHEAEPPLFQTAESGAIEMTSRKLASATANDSANPLHLSAAPENSRGPALSAEHTSSLVPSLHITTLGQEQAILSGAVPASPSTGTADFPSILTFLQPTENHASPSPVPEMPTLPAEGSDGSPPATRDLLLSSKVPNLLSTSWTFPRWKKDSVTAILGKNEEANVTIPLQAFPRKEVLSLHTVNGFVSDFSTGSVSSPIITAPRTNPLPSGPPLPSILSIQATQTVFPSLGFSSTKPEAYAAAVDHSGLPASASKQVRASPSSMDVYDSLTIGDMKKPATTDVFWSSLSAETGSLSTESIISGLQQQTNYDLNGHTISTTSWETHLAPTAPPNGLTSAADAIKSQDFKDTAGHSVTAEGFSIQDLVLGTSIEQPVQQSDMTMVGSHIDLWPTSNNNHSRDFQTAEVAYYSPTTRHSVSHPQLQLPNQPAHPLLLTSPGPTSTGSLQEMLSDGTDTGSEISSDINSSPERNASTPFQNILGYHSAAESSISTSVFPRTSSRVLRASQHPKKWTADTVSSKVQPTAAAAVTLFLRKSSPPALSAALVAKGTSSSPLAVASGPAKSSSMTTLAKNVTNKAASGPKRTPGAVHTAFPFTPTYMYARTGHTTSTHTAMQGNMDTASGLLSTTYLPRKPQAMHTGLPNPTNLEMPRASTPRPLTVTAALTSITASVKATRLPPLRAENTDAVLPAASAAVVTTGKMASNLECQMSSKLLVKTVLFLTQRRVQISESLKFSIAKGLTQALRKAFHQNDVSAHVDILEYSHNVTVGYYATKGKLVYLPAVVIEMLGVYGVSNVTADLKQHTPHLQSVAVLASPWNPQPAGYFQLKTVLQFVSQADNIQSCKFAQTMEQRLQKAFQDAERKVLNTKSNLTIQIVSTSNASQAVTLVYVVGNQSTFLNGTVASSLLSQLSAELVGFYLTYPPLTIAEPLEYPNLDISETTRDYWVITVLQGVDNSLVGLHNQSFARVMEQRLAQLFMMSQQQGRRFKRATTLGSYTVQMVKMQRVPGPKDPAELTYYTLYNGKPLLGTAAAKILSTIDSQRMALTLHHVVLLQADPVVKNPPNNLWIIAAVLAPIAVVTVIIIIITAVLCRKNKNDFKPDTMINLPQRAKPVQGFDYAKQHLGQQGADEEVIPVTQETVVLPLPIRDAPQERDVAQDGSTIKTAKSTETRKSRSPSENGSVISNESGKPSSGRRSPQNVMAQQKVTKEEARKRNVPASDEEEGAVLFDNSSKVAAEPFDTSSGSVQLIAIKPTALPMVPPTSDRSQESSAVLNGEVNKALKQKSDIEHYRNKLRLKAKRKGYYDFPAVETSKGLTERKKMYEKAPKEMEHVLDPDSELCAPFTESKNRQQMKNSVYRSRQSLNSPSPGETEMDLLVTRERPRRGIRNSGYDTEPEIIEETNIDRVPEPRGYSRSRQVKGHSETSTLSSQPSIDEVRQQMHMLLEEAFSLASAGHAGQSRHQEAYGSAQHLPYSEVVTSAPGTMTRPRAGVQWVPTYRPEMYQYSLPRPAYRFSQLPEMVMGSPPPPVPPRTGPVAVASLRRSTSDIGSKTRMAESTGPEPAQLHDSASFTQMSRGPVSVTQLDQSALNYSGNTVPAVFAIPAANRPGFTGYFIPTPPSSYRNQAWMSYAGENELPSQWADSVPLPGYIEAYPRSRYPQSSPSRLPRQYSQPANLHPSLEQAPAPSTAASQQSLAENDPSDAPLTNISTAALVKAIREEVAKLAKKQTDMFEFQV

SEQ ID NO: 27034 - protein, 1235 aa, Homo sapiens
  REGION 1..1235: note = ENSP00000265654
MDHTASQNAQDLIGIPHLGVSGSSTKWHSELSPTEGPHSAGSSTPGFLSPMAELSHPSPPPPALGSLLQLPDGSPSWSMLEVASGPASTQQIKAGVPGRVHNGVSLPTFKNTETATHEAEPPLFQTAESGAIEMTSRKLASATANDSANPLHLSAAPENSRGPALSAEHTSSLVPSLHITTLGQEQAILSGAVPASPSTGTADFPSILTFLQPTENHASPSPVPEMPTLPAEGSDGSPPATRDLLLSSKVPNLLSTSWTFPRWKKDSVTAILGKNEEANVTIPLQAFPRKEVLSLHTVNGFVSDFSTGSVSSPIITAPRTNPLPSGPPLPSILSIQATQTVFPSLGFSSTKPEAYAAAVDHSGLPASASKQVRASPSSMDVYDSLTIGDMKKPATTDVFWSSLSAETGSLSTESIISGLQQQTNYDLNGHTISTTSWETHLAPTAPPNGLTSAADAIKSQDFKDTAGHSVTAEGFSIQDLVLGTSIEQPVQQSDMTMVGSHIDLWPTSNNNHSRDFQTAEVAYYSPTTRHSVSHPQLQLPNQPAHPLLLTSPGPTSTGSLQEMLSDGTDTGSEISSDINSSPERNASTPFQNILGYHSAAESSISTSVFPRTSSRVLRASQHPKKWTGAATNAADTVSSKVQPTAAAAVTLFLRKSSPPALSAALVAKGTSSSPLAVASGPAKSSSMTTLAKNVTNKAASGPKRTPGAVHTAFPFTPTYMYARTGHTTSTHTAMQGNMDTASGLLSTTYLPRKPQAMHTGLPNPTNLEMPRASTPRPLTVTAALTSITASVKATRLPPLRAENTDAVLPAASAAVVTTGKMASNLECQMSSKLLVKTVLFLTQRRVQISESLKFSIAKGLTQALRKAFHQNDVSAHVDILEYSHNVTVGYYATKGKLVYLPAVVIEMLGVYGVSNVTADLKQHTPHLQSVAVLASPWNPQPAGYFQLKTVLQFVSQADNIQSCKFAQTMEQRLQKAFQDAERKVLNTKSNLTIQIVSTSNASQAVTLVYVVGNQSTFLNGTVASSLLSQLSAELVGFYLTYPPLTIAEPLEYPNLDISETTRDYWVITVLQGVDNSLVGLHNQSFARVMEQRLAQLFMMSQQQGRRFKRATTLGSYTVQMVKMQRVPGPKDPAELTYYTLYNGKPLLGTAAAKILSTIDSQRMALTLHHVVLLQADPVVKNPPNNLWIIAAVLAPIAVVTVIIIIITAVLCRKNKNDFKPDTMINLPQRAKQVAQ

SEQ ID NO: 27035 - protein, 836 aa, Homo sapiens; identical to SEQ ID NO: 27032
  REGION 1..836: note = ENSP00000433481
  VARIANT 1: note = Any amino acid

SEQ ID NO: 27036 - protein, 1849 aa, Homo sapiens; identical to SEQ ID NO: 27033
  REGION 1..1849: note = ENSP00000315295

SEQ ID NO: 27037 - protein, 1235 aa, Homo sapiens; identical to SEQ ID NO: 27034
  REGION 1..1235: note = ENSP00000265654

SEQ ID NO: 27038 - protein, 1618 aa, Homo sapiens
  REGION 1..1618: note = ENSP00000261588
MDGQTLRKAERSWSCSREKKEGYAKDMVTDFDEKHDEYLILLQQRNRILKHLKSKDPVQLRLEHLEQGFSVYVNGANSELKSSPRKAIHSDFSRSASHTEGTHDYGRRTLFREAEEALRRSSRTAPSKVQRRGWHQKSVQIRTEAGPRLHIEPPVDYSDDFELCGDVTLQANNTSEDRPQELRRSLELSVNLQRKQKDCSSDEYDSIEEDILSEPEPEDPALVGHPRHDRPPSSGDWTQKDVHGEQETEGRSSPGPDTLVVLEFNPASKSHKRERNLSAKRKDNAEVFVPTKPEPNLTPQAPAVFPDQERMCSRPGSRRERPLSATRKTLCEAEYPEEDASAVLQAIQVENAALQRALLSRKAEQPASPLQDAEGPPAKPWTSLLEEKEETLELLPITTATTTQEPAGAAGGARAINQAMDRIGLLGSRQQQKLLKVLQAVESDSAHLGRVVSPTKEQVSDTEDKQRMRADEIKDAIYVTMEILSNWGNSWWVGLTEVEFFDLNDTKLYVSPHDVDIRNTATPGELGRLVNRNLAGKKDSSPWTCPFHPPLQLFFVIRNTRQLGDFHLAKIKVRNYWTADGDLDIGAKNVKLYVNRNLIFNGKLDKGDREAPADHSILVDQKNEKSEQLEEAMNAHSEESKGTHEMAGASGDKELGLGCSPPAETLADAKLSSQGNVSGKRKNSTNCRKDSLSQLEEYLRLSAVPTSMGDMPSAPATSPPVKCPPVHEEPSLIQQLENLMGRKICEPPGKTPSWLQPSPTGKDRKQGGRKPKPLWLSPEKPLAWKGRLPSDDVIGEGPGETEARDKGLRHEPGWGTSRSVNTKERPQRATTKVHSDDSDIFNQPPNRERPASGRRGSRKDAGSSSHGDDQPASREDTWSSRTPSRSRWRSEQEHTLHESWSSLSAFDRSHRGRISNTELPGDILDELLQQKSSRHSDLPPSKKGEQPGLSRGQDGYSGETDAGGDFKIPVLPYGQRLVIDIKSTWGDRHYVGLNGIEIFSSKGEPVQISNIKADPPDINILPAYGKDPRVVTNLIDGVNRTQDDMHVWLAPFTRGRSHSITIDFTHPCHVALIRIWNYNKSRIHSFRGVKDITMLLDTQCIFEGEIAKASGTLAGAPEHFGDTILFTTDDDILEAIFYSDEMFDLDVGSLDSLQDEEAMRRPSTADGEGDERPFTQAGLGADERIPELELPSSSPVPQVTTPEPGIYHGICLQLNFTASWGDLHYLGLTGLEVVGKEGQALPIHLHQISASPRDLNELPEYSDDSRALDKLIDGTNITMEDEHMWLIPFSPGLDHVVTIRLDRAESIAGLRFWNYNKSPEDTYRGAKIVHVSLDGLCVSPPEGFLIRKGPGNCHFDFAQEILFVDYLRAQLLPQPARRLDMRSLECASMDYEAPLMPCGFIFQFQLLTSWGDPYYIGLTGLELYDERGEKIPLSENNIAAFPDSVNSLEGVGGDVRTPDKLIDQVNDTSDGRHMWLAPILPGLVNRVYVIFDLPTTVSMIKLWNYAKTPHRGVKEFGLLVDDLLVYNGILAMVSHLVGGILPTCEPTVPYHTILFTEDRDIRHQEKHTTISNQAEDQDVQMMNENQIITNAKRKQSVVDPALRPKTCISEKETRRRRC

SEQ ID NO: 27039 - protein, 249 aa, Homo sapiens
  REGION 1..249: note = ENSP00000454884
  VARIANT 1: note = Any amino acid
XLRKAERSWSCSREKKEGYAKDMVTDFDEKHDEYLILLQQRNRILKHLKSKDPVQLRLEHLEQGFSVYVNGANSELKSSPRKAIHSDFSRSASHTEGTHDYGRRTLFREAEEALRRSSRTAPSKVQRRGWHQKSVQIRTEAGPRLHIEPPVDYSDDFELCGDVTLQANNTSEDRPQDTKSPTSTKPCGFNFSLLNACGHSDPSSSVDKERILLTIQDVMELRRSLELSVNLQRKQKDCSSDEYDSIEED

SEQ ID NO: 27040 - protein, 55 aa, Homo sapiens
  REGION 1..55: note = ENSP00000455380
  VARIANT 1: note = Any amino acid
XRSWSCSREKKEDIKAFEKQGPRAIEAGALGARFLCLCQRCQFGAEIITAESYSL

SEQ ID NO: 27041 - protein, 110 aa, Homo sapiens
  REGION 1..110: note = ENSP00000483214
EYLILLQQRNRILKHLKSKDPVQLRLEHLEQGFSVYVNGANSELKSSPRKAIHSDFSRSASHTEGTHDYGRRTLFREAEEALRRSSRTAPSKVQRRGWHQVWRLWPQPTL

SEQ ID NO: 27042 - protein, 139 aa, Homo sapiens
  REGION 1..139: note = ENSP00000389385
RPIYPNRREREAMILSSYAGILMNSIPIEEVFKIYGADSSADSGTIKVPRVSSLCLSLHPFAMLTAPKAAAYARKQIETGFHRGLDLLTSRSARLGLPKRWDYRLEPPRPAQLLGHLENWNCTMELHNRFSGSRREASS

SEQ ID NO: 27043 - protein, 193 aa, Homo sapiens
  REGION 1..193: note = ENSP00000343171
MERRLIKKEMKKLLGDYIGIRLRENEFDPKGRRQLTFLDDMAHYDLAISVALQWLDPSEDLTWLEWEELKIPLHGRPIYPNRREREAMILSSYAGILMNSIPIEEVFKIYGADSSADSGTIKVPRVSSLCLSLHPFAMLTAPKAAAYARKQSVKSRKVTTNKNATSISAKEANATEWKSSQRFSDTQPKHKVT

SEQ ID NO: 27044 - protein, 174 aa, Homo sapiens
  REGION 1..174: note = ENSP00000405393
MRGCFSMPPEAEKEQKHWNRSPAHYDLAISVALQWLDPSEDLTWLEWEELKIPLHGRPIYPNRREREAMILSSYAGILMNSIPIEEVFKIYGADSSADSGTIKVPRVSSLCLSLHPFAMLTAPKAAAYARKQSVKSRKVTTNKNATSISAKEANATEWKSSQRFSDTQPKHKVT

SEQ ID NO: 27045 - protein, 128 aa, Homo sapiens
  REGION 1..128: note = ENSP00000408378
  VARIANT 1: note = Any amino acid
XVALQWLDPSEDLTWLEWEELKIPLHGRPIYPNRREREAMILSSYAGILMNSIPIEEVFKIYGADSSADSGTIKVPRVSSLCLSLHPFAMLTAPKAAAYARKQSHLENWNCTMELHNRFSGSRREASS

SEQ ID NO: 27046 - protein, 124 aa, Homo sapiens
  REGION 1..124: note = ENSP00000397144
MERRLIKKEMKKLLGDYIGIRLRENEFDPKGRRQLTFLDDMAHYDLAISVALQWLDPSEDLTWLEWEELKIPLHGRPIYPNRREREAMILSSYAGILMNSIPIEEVFKIYGADSSADSGTIKVT

SEQ ID NO: 27047 - protein, 83 aa, Homo sapiens
  REGION 1..83: note = ENSP00000413016
MILSSYAGILMNSIPIEEVFKIYGADSSADSGTIKVPRVSSLCLSLHPFAMLTAPKAAAYARKQSVKSRKVTTNKNATSISAK

SEQ ID NO: 27048 - protein, 66 aa, Homo sapiens
  REGION 1..66: note = ENSP00000397281
MERRLIKKEMKKLLGDYIGIRLRENEFDPKGRRQLTFLDDMAHYDLAISVALQWLDPSEDLTWLEW

SEQ ID NO: 27049 - protein, 242 aa, Homo sapiens
  REGION 1..242: note = ENSP00000411609
  VARIANT 1: note = Any amino acid
XWSGSFPLENTELANVGANQVTVRKGEKDHTTHCHASDHANQLSIHIPGWSYRAGDYTCCDLVVKIKECKKSEDPTTPEPSPAAPSPAPRDGAGSPGLSEDCSESQQTPARSLTLQEALEVRKPQFISRSQERLKKLEHMVQQRKAQRKEDLRQKQSLLPIRTSKKQFTIPHPLSDNLFKPKERCISEKEMHMRSKRIYDNLPEVKKKKEEQRKRVILQSNRLRAEVFKKQLLDQLLQRNAV

SEQ ID NO: 27050 - protein, 103 aa, Homo sapiens
  REGION 1..103: note = ENSP00000474753
MVQQRKAQRKEDLRQKQSLLPIRTSKKQFTIPHPLSDNLFKPKERCISEKEMHMRSKRIYDNLPEVKKKKEEQRKRVILQSNRLRAEVFKKQLLDQLLQRNAV

SEQ ID NO: 27051 - protein, 660 aa, Homo sapiens
  REGION 1..660: note = ENSP00000349318
MISSIVISQMIDENKSRENRASLPLPCAIAQSRAHHAKQSLANRSGVNIHRAFALLPGRLGIPAPSDERGPEAELPPKEERPCGGPRRGFASITITARRVGPPARALVWGTAGDSLCPKCRAEDTLFQAPPALANGAHPGRHQRSFACTEFSRNSSVVRLKVPEAHTGLCERRKYWVTHADDKETSFSPDTPLSGKSPLVFSSCVHLRVSQQCPDSIYYVDKSLSVPIEPPQIASPKMHRSVLSLNLNCSSHRLTADGVDGLVNREPISEALKQELLEGDQDLVGQRWNPGLQESHLKETPSLRRVHLGTGACPWSGSFPLENTELANVGANQVTVRKGEKDHTTHCHASDHANQLSIHIPGWSYRAVHTKVFSGSSKRQQGEVCMTVSAPPVEQKPTRHFLPIGDSSPSDDCLSRDLSEPTERRHQSFLKPRILFPGFLCPLQDVCASLQEDNGVQIESKFPKGDYTCCDLVVKIKECKKSEDPTTPEPSPAAPSPAPRDGAGSPGLSEDCSESQQTPARSLTLQEALEVRKPQFISRSQERLKKLEHMVQQRKAQRKEDLRQKQSLLPIRTSKKQFTIPHPLSDNLFKPKERCISEKEMHMRSKRIYDNLPEVKKKKEEQRKRVILQSNRLRAEVFKKVMASSPAGVMCVVHRCRIST

SEQ ID NO: 27052 - protein, 662 aa, Homo sapiens
  REGION 1..662: note = ENSP00000405995
MLKLSGEGLRDSYHSRRDQIALKNLQSDVTEAKSDFTKETLASQNTKMISSIVISQMIDENKSRENRASLPLPCAIAQSRAHHAKQSLANRSGVNIHRAFALLPGRLGIPAPSDERGPEAELPPKEERPCGGPRRGFASITITARRVGPPARALVWGTAGDSLCPKCRAEDTLFQAPPALANGAHPGRHQRSFACTEFSRNSSVVRLKVPEAHTGLCERRKYWVTHADDKETSFSPDTPLSGKSPLVFSSCVHLRVSQQCPDSIYYVDKSLSVPIEPPQIASPKMHRSVLSLNLNCSSHRLTADGVDGLVNREPISEALKQELLEGDQDLVGQRWNPGLQESHLKETPSLRRVHLGTGACPWSGSFPLENTELANVGANQVTVRKGEKDHTTHCHASDHANQLSIHIPGWSYRAVHTKVFSGSSKRQQGEVCMTVSAPPVEQKPTRHFLPIGDSSPSDDCLSRDLSEPTERRHQSFLKPRILFPGFLCPLQDVCASLQEDNGVQIESKFPKGDYTCCDLVVKIKECKKSEDPTTPEPSPAAPSPAPRDGAGSPGLSEDCSESQQTPARSLTLQEALEVRKPQFISRSQERLKKLEHMVQQRKAQRKEDLRQKQSLLPIRTSKKQFTIPHPLSDNLFKPKERCISEKEMHMRSKRIYDNLPEV

SEQ ID NO: 27053 - protein, 209 aa, Homo sapiens
  REGION 1..209: note = ENSP00000474558
MISSIVISQMIDENKSRENRASLPLPCAIAQSRAHHAKQSLANRSGVNIHRAFALLPGRLGIPAPSDERGPEAELPPKEERPCGGPRRGFASITITARRVGPPARALVWGTAGDSLCPKCRAEDTLFQAPPALANGAHPGRHQRSFACTEFSRNSSVVRLKVPEAHTGLCERRKYWVTHADDKETSFSPDTPLSGKSPLVFSSCVHLRV

SEQ ID NO: 27054 - protein, 39 aa, Homo sapiens
  REGION 1..39: note = ENSP00000474615
MLKLSGEGLRDSYHSRRDQIALKNLQSDVTEAKSDFTKV

SEQ ID NO: 27055 - protein, 699 aa, Homo sapiens
  REGION 1..699: note = ENSP00000284694
MLKLSGEGLRDSYHSRRDQIALKNLQSDVTEAKSDFTKETLASQNTKMISSIVISQMIDENKSRENRASLPLPCAIAQSRAHHAKQSLANRSGVNIHRAFALLPGRLGIPAPSDERGPEAELPPKEERPCGGPRRGFASITITARRVGPPARALVWGTAGDSLCPKCRAEDTLFQAPPALANGAHPGRHQRSFACTEFSRNSSVVRLKVPEAHTGLCERRKYWVTHADDKETSFSPDTPLSGKSPLVFSSCVHLRVSQQCPDSIYYVDKSLSVPIEPPQIASPKMHRSVLSLNLNCSSHRLTADGVDGLVNREPISEALKQELLEGDQDLVGQRWNPGLQESHLKETPSLRRVHLGTGACPWSGSFPLENTELANVGANQVTVRKGEKDHTTHCHASDHANQLSIHIPGWSYRAVHTKVFSGSSKRQQGEVCMTVSAPPVEQKPTRHFLPIGDSSPSDDCLSRDLSEPTERRHQSFLKPRILFPGFLCPLQDVCASLQEDNGVQIESKFPKGDYTCCDLVVKIKECKKSEDPTTPEPSPAAPSPAPRDGAGSPGLSEDCSESQQTPARSLTLQEALEVRKPQFISRSQERLKKLEHMVQQRKAQRKEDLRQKQSLLPIRTSKKQFTIPHPLSDNLFKPKERCISEKEMHMRSKRIYDNLPEVKKKKEEQRKRVILQSNRLRAEVFKKQLLDQLLQRNAV

SEQ ID NO: 27056 - protein, 1609 aa, Homo sapiens
  REGION 1..1609: note = ENSP00000386574
MAGLRRPQPGCYCRTAAAVNLLLGVFQVLLPCCRPGGAQGQAIEPLPNVVELWQAEEGELLLPTQGDSEEGLEEPSQEQSFSDKLFSGKGLHFQPSVLDFGIQFLGHPVAKILHAYNPSRDSEVVVNSVFAAAGHFHVPPVPCRVIPAMGKTSFRIIFLPTEEGSIESSLFINTSSYGVLSYHVSGIGTRRISTEGSAKQLPNAYFLLPKVQSIQLSQMQAETTNTSLLQVQLECSLHNKVCQQLKGCYLESDDVLRLQMSIMVTMENFSKEFEENTQHLLDHLSIVYVATDESETSDDSAVNMYILHSGNSLIWIQDIRHFSQRDALSLQFEPVLLPTSTTNFTKIASFTCKATSCDSGIIEDVKKTTHTPTLKACLFSSVAQGYFRMDSSATQFHIETHENTSGLWSIWYRNHFDRSVVLNDVFLSKETKHMLKILNFTGPLFLPPGCWNIFSLKLAVKDIAINLFTNVFLTTNIGAIFAIPLQIYSAPTKEGSLGFEVIAHCGMHYFMGKSKAGNPNWNGSLSLDQSTWNVDSELANKLYERWKKYKNGDVCKRNVLGTTRFAHLKKSKESESFVFFLPRLIAEPGLMLNFSATALRSRMIKYFVVQNPSSWPVSLQLLPLSLYPKPEALVHLLHRWFGTDMQMINFTTGEFQLTEACPYLGTHSEESRFGILHLHLQPLEMKRVGVVFTPADYGKVTSLILIRNNLTVIDMIGVEGFGARELLKVGGRLPGAGGSLRFKVPESTLMDCRRQLKDSKQILSITKNFKVENIGPLPITVSSLKINGYNCQGYGFEVLDCHQFSLDPNTSRDISIVFTPDFTSSWVIRDLSLVTAADLEFRFTLNVTLPHHLLPLCADVVPGPSWEESFWRLTVFFVSLSLLGVILIAFQQAQYILMEFMKTRQRQNASSSSQQNNGPMDVISPHSYKSNCKNFLDTYGPSDKGRGKNCLPVNTPQSRIQNAAKRSPATYGHSQKKHKCSVYYSKHKTSTAAASSTSTTTEEKQTSPLGSSLPAAKEDICTDAMRENWISLRYASGINVNLQKNLTLPKNLLNKEENTLKNTIVFSNPSSECSMKEGIQTCMFPKETDIKTSENTAEFKERELCPLKTSKKLPENHLPRNSPQYHQPDLPEISRKNNGNNQQVPVKNEVDHCENLKKVDTKPSSEKKIHKTSREDMFSEKQDIPFVEQEDPYRKKKLQEKREGNLQNLNWSKSRTCRKNKKRGVAPVSRPPEQSDLKLVCSDFERSELSSDINVRSWCIQESTREVCKADAEIASSLPAAQREAEGYYQKPEKKCVDKFCSDSSSDCGSSSGSVRASRGSWGSWSSTSSSDGDKKPMVDAQHFLPAGDSVSQNDFPSEAPISLNLSHNICNPMTVNSLPQYAEPSCPSLPAGPTGVEEDKGLYSPGDLWPTPPVCVTSSLNCTLENGVPCVIQESAPVHNSFIDWSATCEGQFSSAYCPLELNDYNAFPEENMNYANGFPCPADVQTDFIDHNSQSTWNTPPNMPAAWGHASFISSPPYLTSTRSLSPMSGLFGSIWAPQSDVYENCCPINPTTEHSTHMENQAVVCKEYYPGFNPFRAYMNLDIWTTTANRNANFPLSRDSSYCGNV

SEQ ID NO: 27057 - protein, 71 aa, Homo sapiens
  REGION 1..71: note = ENSP00000413054
MAGLRRPQPGCYCRTAAAVNLLLGVFQVLLPCCRPGGAQGQAIEPLPNVVELWQAEEGELLLPTQLLGQTI

SEQ ID NO: 27058 - protein, 1610 aa, Homo sapiens
  REGION 1..1610: note = ENSP00000386787
MAGLRRPQPGCYCRTAAAVNLLLGVFQVLLPCCRPGGAQGQAIEPLPNVVELWQAEEGELLLPTQGDSEEGLEEPSQEQSFSDKLFSGKGLHFQPSVLDFGIQFLGHPVAKILHAYNPSRDSEVVVNSVFAAAGHFHVPPVPCRVIPAMGKTSFRIIFLPTEEGSIESSLFINTSSYGVLSYHVSGIGTRRISTEGSAKQLPNAYFLLPKVQSIQLSQMQAETTNTSLLQVQLECSLHNKVCQQLKGCYLESDDVLRLQMSIMVTMENFSKEFEENTQHLLDHLSIVYVATDESETSDDSAVNMYILHSGNSLIWIQDIRHFSQRDALSLQFEPVLLPTSTTNFTKIASFTCKAATSCDSGIIEDVKKTTHTPTLKACLFSSVAQGYFRMDSSATQFHIETHENTSGLWSIWYRNHFDRSVVLNDVFLSKETKHMLKILNFTGPLFLPPGCWNIFSLKLAVKDIAINLFTNVFLTTNIGAIFAIPLQIYSAPTKEGSLGFEVIAHCGMHYFMGKSKAGNPNWNGSLSLDQSTWNVDSELANKLYERWKKYKNGDVCKRNVLGTTRFAHLKKSKESESFVFFLPRLIAEPGLMLNFSATALRSRMIKYFVVQNPSSWPVSLQLLPLSLYPKPEALVHLLHRWFGTDMQMINFTTGEFQLTEACPYLGTHSEESRFGILHLHLQPLEMKRVGVVFTPADYGKVTSLILIRNNLTVIDMIGVEGFGARELLKVGGRLPGAGGSLRFKVPESTLMDCRRQLKDSKQILSITKNFKVENIGPLPITVSSLKINGYNCQGYGFEVLDCHQFSLDPNTSRDISIVFTPDFTSSWVIRDLSLVTAADLEFRFTLNVTLPHHLLPLCADVVPGPSWEESFWRLTVFFVSLSLLGVILIAFQQAQYILMEFMKTRQRQNASSSSQQNNGPMDVISPHSYKSNCKNFLDTYGPSDKGRGKNCLPVNTPQSRIQNAAKRSPATYGHSQKKHKCSVYYSKHKTSTAAASSTSTTTEEKQTSPLGSSLPAAKEDICTDAMRENWISLRYASGINVNLQKNLTLPKNLLNKEENTLKNTIVFSNPSSECSMKEGIQTCMFPKETDIKTSENTAEFKERELCPLKTSKKLPENHLPRNSPQYHQPDLPEISRKNNGNNQQVPVKNEVDHCENLKKVDTKPSSEKKIHKTSREDMFSEKQDIPFVEQEDPYRKKKLQEKREGNLQNLNWSKSRTCRKNKKRGVAPVSRPPEQSDLKLVCSDFERSELSSDINVRSWCIQESTREVCKADAEIASSLPAAQREAEGYYQKPEKKCVDKFCSDSSSDCGSSSGSVRASRGSWGSWSSTSSSDGDKKPMVDAQHFLPAGDSVSQNDFPSEAPISLNLSHNICNPMTVNSLPQYAEPSCPSLPAGPTGVEEDKGLYSPGDLWPTPPVCVTSSLNCTLENGVPCVIQESAPVHNSFIDWSATCEGQFSSAYCPLELNDYNAFPEENMNYANGFPCPADVQTDFIDHNSQSTWNTPPNMPAAWGHASFISSPPYLTSTRSLSPMSGLFGSIWAPQSDVYENCCPINPTTEHSTHMENQAVVCKEYYPGFNPFRAYMNLDIWTTTANRNANFPLSRDSSYCGNV

SEQ ID NO: 27059 - protein, 1387 aa, Homo sapiens
  REGION 1..1387: note = ENSP00000240487
PVPCRVIPAMGKTSFRIIFLPTEEGSIESSLFINTSSYGVLSYHVSGIGTRRISTEGSAKQLPNAYFLLPKVQSIQLSQMQAETTNTSLLQVQLECSLHNKVCQQLKGCYLESDDVLRLQMSIMVTMENFSKEFEENTQHLLDHLSIVYVATDESETSDDSAVNMYILHSGNSLIWIQDIRHFSQRDALSLQFEPVLLPTSTTNFTKIASFTCKAATSCDSGIIEDVKKTTHTPTLKACLFSSVAQGYFRMDSSATQFHIETHENTSGLWSIWYRNHFDRSVVLNDVFLSKETKHMLKILNFTGPLFLPPGCWNIFSLKLAVKDIAINLFTNVFLTTNIGAIFAIPLQIYSAPTKEGSLGFEVIAHCGMHYFMGKSKAGNPNWNGSLSLDQSTWNVDSELANKLYERWKKYKNGDVCKFGTDMQMINFTTGEFQLTEACPYLGTHSEESRFGILHLHLQPLEMKRVGVVFTPADYGKVTSLILIRNNLTVIDMIGVEGFGARELLKVGGRLPGAGGSLRFKVPESTLMDCRRQLKDSKQILSITKNFKVENIGPLPITVSSLKINGYNCQGYGFEVLDCHQFSLDPNTSRDISIVFTPDFTSSWVIRDLSLVTAADLEFRFTLNVTLPHHLLPLCADVVPGPSWEESFWRLTVFFVSLSLLGVILIAFQQAQYILMEFMKTRQRQNASSSSQQNNGPMDVISPHSYKSNCKNFLDTYGPSDKGRGKNCLPVNTPQSRIQNAAKRSPATYGHSQKKHKCSVYYSKHKTSTAAASSTSTTTEEKQTSPLGSSLPAAKEDICTDAMRENWISLRYASGINVNLQKNLTLPKNLLNKEENTLKNTIVFSNPSSECSMKEGIQTCMFPKETDIKTSENTAEFKERELCPLKTSKKLPENHLPRNSPQYHQPDLPEISRKNNGNNQQVPVKNEVDHCENLKKVDTKPSSEKKIHKTSREDMFSEKQDIPFVEQEDPYRKKKLQEKREGNLQNLNWSKSRTCRKNKKRGVAPVSRPPEQSDLKLVCSDFERSELSSDINVRSWCIQESTREVCKADAEIASSLPAAQREAEGYYQKPEKKCVDKFCSDSSSDCGSSSGSVRASRGSWGSWSSTSSSDGDKKPMVDAQHFLPAGDSVSQNDFPSEAPISLNLSHNICNPMTVNSLPQYAEPSCPSLPAGPTGVEEDKGLYSPGDLWPTPPVCVTSSLNCTLENGVPCVIQESAPVHNSFIDWSATCEGQFSSAYCPLELNDYNAFPEENMNYANGFPCPADVQTDFIDHNSQSTWNTPPNMPAAWGHASFISSPPYLTSTRSLSPMSGLFGSIWAPQSDVYENCCPINPTTEHSTHMENQAVVCKEYYPGFNPFRAYMNLDIWTTTANRNANFPLSRDSSYCGNV

SEQ ID NO: 27060 - protein, 555 aa, Homo sapiens
  REGION 1..555: note = ENSP00000360280
MSTETELQVAVKTSAKKDSRKKGQDRSEATLIKRFKGEGVRYKAKLIGIDEVSAARGDKLCQDSMMKLKGVVAGARSKGEHKQKIFLTISFGGIKIFDEKTGALQHHHAVHEISYIAKDITDHRAFGYVCGKEGNHRFVAIKTAQAAEPVILDLRDLFQLIYELKQREELEKKAQKDKQCEQAVYQTILEEDVEDPVYQYIVFEAGHEPIRDPETEENIYQVPTSQKKEGVYDVPKSQPVSAVTQLELFGDMSTPPDITSPPTPATPGDAFIPSSSQTLPASADVFSSVPFGTAAVPSGYVAMGAVLPSFWGQQPLVQQQMVMGAQPPVAQVMPGAQPIAWGQPGLFPATQQPWPTVAGQFPPAAFMPTQTVMPLPAAMFQGPLTPLATVPGTSDSTRSSPQTDKPRQKMGKETFKDFQMAQPPPVPSRKPDQPSLTCTSEAFSSYFNKVGVAQDTDDCDDFDISQLNLTPVTSTTPSTNSPPTPAPRQSSPSKSSASHASDPTTDDIFEEGFESPSKSEEQEAPDGSQASSNSDPFGEPSGEPSGDNISPQAGS

SEQ ID NO: 27061 - protein, 588 aa, Homo sapiens
  REGION 1..588: note = ENSP00000360275
MSTETELQVAVKTSAKKDSRKKGQDRSEATLIKRFKGEGVRYKAKLIGIDEVSAARGDKLCQDSMMKLKGVVAGARSKGEHKQKIFLTISFGGIKIFDEKTGALQHHHAVHEISYIAKDITDHRAFGYVCGKEGNHRFVAIKTAQAAEPVILDLRDLFQLIYELKQREELEKKAQKDKQCEQAVYQTILEEDVEDPVYQYIVFEAGHEPIRDPETEENIYQVPTSQKKEGVYDVPKSQPVSNGYSFEDFEERFAAATPNRNLPTDFDEIFEATKAVTQLELFGDMSTPPDITSPPTPATPGDAFIPSSSQTLPASADVFSSVPFGTAAVPSGYVAMGAVLPSFWGQQPLVQQQMVMGAQPPVAQVMPGAQPIAWGQPGLFPATQQPWPTVAGQFPPAAFMPTQTVMPLPAAMFQGPLTPLATVPGTSDSTRSSPQTDKPRQKMGKETFKDFQMAQPPPVPSRKPDQPSLTCTSEAFSSYFNKVGVAQDTDDCDDFDISQLNLTPVTSTTPSTNSPPTPAPRQSSPSKSSASHASDPTTDDIFEEGFESPSKSEEQEAPDGSQASSNSDPFGEPSGEPSGDNISPQAGS

SEQ ID NO: 27062 - protein, 239 aa, Homo sapiens
  REGION 1..239: note = ENSP00000360276
MSTETELQVAVKTSAKKDSRKKGQDRSEATLIKRFKGEGVRYKAKLIGIDEVSAARGDKLCQDSMMKLKGVVAGARSKGEHKQKIFLTISFGGIKIFDEKTGVPTSQKKEGVYDVPKSQPVSNGYSFEDFEERFAAATPNRNLPTDFDEIFEATKAVTQLELFGDMSTPPDITSPPTPATPGDAFIPSSSQTLPASADVFSSVPFGTAAVPSGYVAMGAVLPSFWGQQPLVQQQMVMGA

SEQ ID NO: 27063 - protein, 204 aa, Homo sapiens
  REGION 1..204: note = ENSP00000329120
MSTETELQVAVKTSAKKDSRKKGQDRSEATLIKRFKGEGVRYKAKLIGIDEVSAARGDKLCQDSMMKLKGVVAGARSKGEHKQKIFLTISFGGIKIFDEKTGALQHHHAVHEISYIAKDITDHRAFGYVCGKEGNHRFVAIKTAQAAEPVILDLRDLFQLIYELKQREELEKKAQKDKQCEQAVYQVPTSQKKEGVYDVPKSQP

SEQ ID NO: 27064 - protein, 213 aa, Homo sapiens
  REGION 1..213: note = ENSP00000360274
MSTETELQVAVKTSAKKDSRKKGQDRSEATLIKRFKGEGVRYKAKLIGIDEVSAARGDKLCQDSMMKLKGVVAGARSKGEHKQKIFLTISFGGIKIFDEKTGALQHHHAVHEISYIAKDITDHRAFGYVCGKEGNHRFVAIKTAQAAEPVILDLRDLFQLIYELKQREELEKKAQKDKQCEQAVYQTILEEDVEDPVYQVISETSRGFRFKSD

SEQ ID NO: 27065 - protein, 555 aa, Homo sapiens; identical to SEQ ID NO: 27060
  REGION 1..555: note = ENSP00000387581

SEQ ID NO: 27066 - protein, 553 aa, Homo sapiens
  REGION 1..553: note = ENSP00000395296
MSTETELQVAVKTSAKKDSRKKGQDRSEATLIKRFKGEGVRYKAKLIGIDEVSAARGDKLCQDSMMKLKGVVAGARSKGEHKQKIFLTISFGGIKIFDEKTGALQHHHAVHEISYIAKDITDHRAFGYVCGKEGNHRFVAIKTAQAAEPVILDLRDLFQLIYELKQREELEKKAQKDKQCEQAVYQVPTSQKKEGVYDVPKSQPVSNGYSFEDFEERFAAATPNRNLPTDFDEIFEATKAVTQLELFGDMSTPPDITSPPTPATPGDAFIPSSSQTLPASADVFSSVPFGTAAVPSGYVAMGAVLPSFWGQQPLVQQQMVMGAQPPVAQVMPGAQPIAWGQPGLFPATQQPWPTVAGQFPPAAFMPTQTVMPLPAAMFQGPLTPLATVPGTSDSTRSSPQTDKPRQKMGKETFKDFQMAQPPPVPSRKPDQPSLTCTSEAFSSYFNKVGVAQDTDDCDDFDISQLNLTPVTSTTPSTNSPPTPAPRQSSPSKSSASHASDPTTDDIFEEGFESPSKSEEQEAPDGSQASSNSDPFGEPSGEPSGDNISPQAGS

SEQ ID NO: 27067 - protein, 706 aa, Homo sapiens
  REGION 1..706: note = ENSP00000482245
MAVPAALIPPTQLVPPQPPISTSASSSGTTTSTSSATSSPAPSIGPPASSGPTLFRPEPIASAAAAAATVTSTGGGGGGGGSGGGGGSSGNGGGGGGGGGGSNCNPNLAAASNGSGGGGGGISAGGGVASSTPINASTGSSSSSSSSSSSSSSSSSSSSSSSSCGPLPGKPVYSTPSPVENTPQNNECKMVDLRGAKVASFTVEGCELICLPQAFDLFLKHLVGGLHTVYTKLKRLEITPVVCNVEQVRILRGLGAIQPGVNRCKLISRKDFETLYNDCTNASSRPGRPPKRTQSVTSPENSHIMPHSVPGLMSPGIIPPTGLTAAAAAAAAATNAAIAEAMKVKKIKLEAMSNYHASNNQHGADSENGDMNSSVGLELPFMMMPHPLIPVSLPPASVTMAMSQMNHLSTIANMAAAAQVQSPPSRVETSVIKERVPDSPSPAPSLEEGRRPGSHPSSHRSSSVSSSPARTESSSDRIPVHQNGLSMNQMLMGLSPNVLPGPKEGDLAGHDMGHESKRMHIEKDETPLSTPTARDSLDKLSLTGHGQPLPPGFPSPFLFPDGLSSIETLLTNIQGLLKVAIDNARAQEKQVQLEKTELKMDFLRERELRETLEKQLAMEQKNRAIVQKRLKKEKKAKRKLQEALEFETKRREQAEQTLKQAASTDSLRVLNDSLTPEIEADRSGGRTDAERTIQDGRLYLKTTVMY

SEQ ID NO: 27068 - protein, 758 aa, Homo sapiens
  REGION 1..758: note = ENSP00000482797
MAVPAALIPPTQLVPPQPPISTSASSSGTTTSTSSATSSPAPSIGPPASSGPTLFRPEPIASAAAAAATVTSTGGGGGGGGSGGGGGSSGNGGGGGGGGGGSNCNPNLAAASNGSGGGGGGISAGGGVASSTPINASTGSSSSSSSSSSSSSSSSSSSSSSSSCGPLPGKPVYSTPSPVENTPQNNECKMVDLRGAKVASFTVEGCELICLPQAFDLFLKHLVGGLHTVYTKLKRLEITPVVCNVEQVRILRGLGAIQPGVNRCKLISRKDFETLYNDCTNASSRPGRPPKRTQSVTSPENSHIMPHSVPGLMSPGIIPPTGLTAAAAAAAAATNAAIAEAMKVKKIKLEAMSNYHASNNQHGADSENGDMNSSVGSSDGSWDKETLPSSPSQGPQASITHPRMPGARSLPLSHPLNHLQQSHLLPNGLELPFMMMPHPLIPVSLPPASVTMAMSQMNHLSTIANMAAAAQVQSPPSRVETSVIKERVPDSPSPAPSLEEGRRPGSHPSSHRSSSVSSSPARTESSSDRIPVHQNGLSMNQMLMGLSPNVLPGPKEGDLAGHDMGHESKRMHIEKDETPLSTPTARDSLDKLSLTGHGQPLPPGFPSPFLFPDGLSSIETLLTNIQGLLKVAIDNARAQEKQVQLEKTELKMDFLRERELRETLEKQLAMEQKNRAIVQKRLKKEKKAKRKLQEALEFETKRREQAEQTLKQAASTDSLRVLNDSLTPEIEADRSGGRTDAERTIQDGRLYLKTTVMY

SEQ ID NO: 27069 - protein, 558 aa, Homo sapiens
  REGION 1..558: note = ENSP00000482493
MAVPAALIPPTQLVPPQPPISTSASSSGTTTSTSSATSSPAPSIGPPASSGPTLFRPEPIASAAAAAATVTSTGGGGGGGGSGGGGGSSGNGGGGGGGGGGSNCNPNLAAASNGSGGGGGGISAGGGVASSTPINASTGSSSSSSSSSSSSSSSSSSSSSSSSCGPLPGKPVYSTPSPVENTPQNNECKMVDLRGAKVASFTVEGCELICLPQAFDLFLKHLVGGLHTVYTKLKRLEITPVVCNVEQVRILRGLGAIQPGVNRCKLISRKDFETLYNDCTNASSRPGRPPKRTQSVTSPENSHIMPHSVPGLMSPGIIPPTGLTAAAAAAAAATNAAIAEAMKVKKIKLEAMSNYHASNNQHGADSENGDMNSSVDETPLSTPTARDSLDKLSLTGHGQPLPPGFPSPFLFPDGLSSIETLLTNIQGLLKVAIDNARAQEKQVQLEKTELKMDFLRERELRETLEKQLAMEQKNRAIVQKRLKKEKKAKRKLQEALEFETKRREQAEQTLKQAASTDSLRVLNDSLTPEIEADRSGGRTDAERTIQDGRLYLKTTVMY

SEQ ID NO: 27070 - protein, 504 aa, Homo sapiens
  REGION 1..504: note = ENSP00000481551
MAVPAALIPPTQLVPPQPPISTSASSSGTTTSTSSATSSPAPSIGPPASSGPTLFRPEPIASAAAAAATVTSTGGGGGGGGSGGGGGSSGNGGGGGGGGGGSNCNPNLAAASNGSGGGGGGISAGGGVASSTPINASTGSSSSSSSSSSSSSSSSSSSSSSSSCGPLPGKPVYSTPSPVENTPQNNECKMVDLRGAKVASFTVEGCELICLPQAFDLFLKHLVGGLHTVYTKLKRLEITPVVCNVEQVRILRGLGAIQPGVNRCKLISRKDFETLYNDCTNASSRPGRPPKRTQSVTSPENSHIMPHSVPGLMSPGIIPPTDETPLSTPTARDSLDKLSLTGHGQPLPPGFPSPFLFPDGLSSIETLLTNIQGLLKVAIDNARAQEKQVQLEKTELKMDFLRERELRETLEKQLAMEQKNRAIVQKRLKKEKKAKRKLQEALEFETKRREQAEQTLKQAASTDSLRVLNDSLTPEIEADRSGGRTDAERTIQDGRLYLKTTVMY

SEQ ID NO: 27071 - protein, 280 aa, Homo sapiens
  REGION 1..280: note = ENSP00000355761
MWTPGGPPGSAGWDRRRLGARLRAAFAGLQELQGLRATQQERVRGALALQPPPAPAAPCGPHGLHGPEQQLEAALAALQEQLSRLRQQDIGLKTHLDQLDLQISKLQLDVGTASGEALDSDSRPSSGFYEMSDGGSCSLSTSCASVCSDHISPSLGSLLPVAQAHKARPSMGDWRPRSVDETTVPAWRPQATEEGARPPGSVEDAGQPWGTFWPRPVSTELCNAPGELDMHAPPAGCTSSSLTGVGSGLRGKCGLCGCQLPFCSVNTSSKTKSSGISRQQ

SEQ ID NO: 27072 - protein, 774 aa, Homo sapiens
  REGION 1..774: note = ENSP00000355760
MWTPGGPPGSAGWDRRRLGARLRAAFAGLQELQGLRATQQERVRGALALQPPPAPAAPCGPHGLHGPEQQLEAALAALQEQLSRLRQQDIGLKTHLDQLDLQISKLQLDVGTASGEALDSDSRPSSGFYEMSDGGSCSLSTSCASVCSDHISPSLGSLLPVAQAHKARPSMGDWRPRSVDETTVPAWRPQATEEGARPPGSVEDAGQPWGTFWPRPVSTGDLDRALPADTGLQKASADAELLGLLCQGVDIPLHVPDPKYRQDLVSQGGREVYPYPSPLHAVALQSPLFVLTKETPQRGGPSFPRESPRGPAGLNTIQTGPVLEAGPARARAYIDRLLHLWGRETPAKGSEGEQGPLRHAASPSPQRQGGWSTDGGGRLLVFAPGREDEGGPAQSRGAGRGGPQQQGYMPLEGPQQSGSLPEEGSKPSNSCVLRETMVQASPSSKAQQTPSAQDYGRGNIISPSRMLDKSPSPASGHFAHPSFAASLKMGPPKSKAEKIKRSPMDKVLRFARQPLLLLDRPEGAHAAPQPSLEWDPAHWPTGRGGLQRRPALAWEAPGRSCSESTLYPMPVLVPLAVAPQESHRTSAQALFPFEASLLTSVARRKHRRWQSTVEISARARLASCPESNLGPPRPVARRAGGPLARGRPSLVRQDAYTRSDSEPSKHSAECDPRFPSVIPETSEGESSDHTTNRFGDRESSSSDEEGGAQSRDCDLALGYVAAGHAELAWTQEAPVSSGPLLSPVPKLCRIKASKALKKKIRRFQPTALKVMTMV

SEQ ID NO: 27073 - protein, 604 aa, Homo sapiens
  REGION 1..604: note = ENSP00000476573
MGDWRPRSVDETTVPAWRPQATEEGARPPGSVEDAGQPWGTFWPRPVSTGDLDRALPADTGLQKASADAELLGLLCQGVDIPLHVPDPKYRQDLVSQGGREVYPYPSPLHAVALQSPLFVLTKETPQRGGPSFPRESPRGPAGLNTIQTGPVLEAGPARARAYIDRLLHLWGRETPAKGSEGEQGPLRHAASPSPQRQGGWSTDGGGRLLVFAPGREDEGGPAQSRGAGRGGPQQQGYMPLEGPQQSGSLPEEGSKPSNSCVLRETMVQASPSSKAQQTPSAQDYGRGNIISPSRMLDKSPSPASGHFAHPSFAASLKMGPPKSKAEKIKRSPMDKVLRFARQPLLLLDRPEGAHAAPQPSLEWDPAHWPTGRGGLQRRPALAWEAPGRSCSESTLYPMPVLVPLAVAPQESHRTSAQALFPFEASLLTSVARRKHRRWQSTVEISARARLASCPESNLGPPRPVARRAGGPLARGRPSLVRQDAYTRSDSEPSKHSAECDPRFPSVIPETSEGESSDHTTNRFGDRESSSSDEEGGAQSRDCDLALGYVAAGHAELAWTQEAPVSSGPLLSPVPKLCRIKASKALKKKIRRFQPTALKVMTMV

SEQ ID NO: 27074 - protein, 366 aa, Homo sapiens
  REGION 1..366: note = ENSP00000476434
MPLEGPQQSGSLPEEGSKPSNSCVLRETMVQASPSSKAQQTPSAQDYGRGNIISPSRMLDKSPSPASGHFAHPSFAASLKMGPPKSKAEKIKRSPMDKVLRFARQPLLLLDRPEGAHAAPQPSLEWDPAHWPTGRGGLQRRPALAWEAPGRSCSESTLYPMPVLVPLAVAPQESHRTSAQALFPFEASLLTSVARRKHRRWQSTVEISARARLASCPESNLGPPRPVARRAGGPLARGRPSLVRQDAYTRSDSEPSKHSAECDPRFPSVIPETSEGESSDHTTNRFGDRESSSSDEEGGAQSRDCDLALGYVAAGHAELAWTQEAPVSSGPLLSPVPKLCRIKASKALKKKIRRFQPTALKVMTMV

SEQ ID NO: 27075 - protein, 1042 aa, Homo sapiens
  REGION 1..1042: note = ENSP00000257215
MPGIVVFRRRWSVGSDDLVLPAIFLFLLHTTWFVILSVVLFGLVYNPHEACSLNLVDHGRGYLGILLSCMIAEMAIIWLSMRGGILYTEPRDSMQYVLYVRLAILVIEFIYAIVGIVWLTQYYTSCNDLTAKNVTLGMVVCNWVVILSVCITVLCVFDPTGRTFVKLRATKRRQRNLRTYNLRHRLEEGQATSWSRRLKVFLCCTRTKDSQSDAYSEIAYLFAEFFRDLDIVPSDIIAGLVLLRQRQRAKRNAVLDEANNDILAFLSGMPVTRNTKYLDLKNSQEMLRYKEVCYYMLFALAAYGWPMYLMRKPACGLCQLARSCSCCLCPARPRFAPGVTIEEDNCCGCNAIAIRRHFLDENMTAVDIVYTSCHDAVYETPFYVAVDHDKKKVVISIRGTLSPKDALTDLTGDAERLPVEGHHGTWLGHKGMVLSAEYIKKKLEQEMVLSQAFGRDLGRGTKHYGLIVVGHSLGAGTAAILSFLLRPQYPTLKCFAYSPPGGLLSEDAMEYSKEFVTAVVLGKDLVPRIGLSQLEGFRRQLLDVLQRSTKPKWRIIVGATKCIPKSELPEEVEVTTLASTRLWTHPSDLTIALSASTPLYPPGRIIHVVHNHPAEQCCCCEQEEPTYFAIWGDNKAFNEVIISPAMLHEHLPYVVMEGLNKVLENYNKGKTALLSAAKVMVSPTEVDLTPELIFQQQPLPTGPPMPTGLALELPTADHRNSSVRSKSQSEMSLEGFSEGRLLSPVVAAAARQDPVELLLLSTQERLAAELQARRAPLATMESLSDTESLYSFDSRRSSGFRSIRGSPSLHAVLERDEGHLFYIDPAIPEENPSLSSRTELLAADSLSKHSQDTQPLEAALGSGGVTPERPPSAAANDEEEEVGGGGGGPASRGELALHNGRLGDSPSPQVLEFAEFIDSLFNLDSKSSSFQDLYCMVVPESPTSDYAEGPKSPSQQEILLRAQFEPNLVPKPPRLFAGSADPSSGISLSPSFPLSSSGELMDLTPTGLSSQECLAADKIRTSTPTGHGASPAKQDELVISAR

SEQ ID NO: 27076 - protein, 167 aa, Homo sapiens
  REGION 1..167: note = ENSP00000440264
MPGIVVFRRRWSVGSDDLVLPAIFLFLLHTTWFVILSVVLFGLVYNPHEACSLNLVDHGRGYLGILLSCMIAEMAIIWLSMRGGILYTEPRDSMHHPGDRVHLRHRGHRLAHSVLHLLQRPHCQECHPRNGCLQLGSHPQCVHHCPLRLRPHGPHLCQAESHQEEAA

SEQ ID NO: 27077 - protein, 281 aa, Homo sapiens
  REGION 1..281: note = ENSP00000446853
MRVVVIGAGVIGLSTALCIHERYHSVLQPLDIKVYADRFTPLTTTDVAAGLWQPYLSDPNNPQEADWSQQTFDYLLSHVHSPNAENLGLFLISGYNLFHEAIPVAREGADVIVNCTGVWAGALQRDPLLQPGRGQIMKVDAPWMKHFILTHDPERGIYNSPYIIPGTQTVTLGGIFQLGNWSELNNIQDHNTIWEGCCRLEPTLKNARIIGERTGFRPVRPQIRLEREQLRTGPSNTEVIHNYGHGGYGLTIHWGCALEAAKLFGRILEEKKLSRMPPSHL

SEQ ID NO: 27078 - protein, 347 aa, Homo sapiens
  REGION 1..347: note = ENSP00000228476
MRVVVIGAGVIGLSTALCIHERYHSVLQPLDIKVYADRFTPLTTTDVAAGLWQPYLSDPNNPQEADWSQQTFDYLLSHVHSPNAENLGLFLISGYNLFHEAIPDPSWKDTVLGFRKLTPRELDMFPDYGYGWFHTSLILEGKNYLQWLTERLTERGVKFFQRKVESFEEVAREGADVIVNCTGVWAGALQRDPLLQPGRGQIMKVDAPWMKHFILTHDPERGIYNSPYIIPGTQTVTLGGIFQLGNWSELNNIQDHNTIWEGCCRLEPTLKNARIIGERTGFRPVRPQIRLEREQLRTGPSNTEVIHNYGHGGYGLTIHWGCALEAAKLFGRILEEKKLSRMPPSHL

SEQ ID NO: 27079 - protein, 78 aa, Homo sapiens
  REGION 1..78: note = ENSP00000448095
MRVVVIGAGVIGLSTALCIHERYHSVLQPLDIKVYADRFTPLTTTDVAAGLWQPYLSDPNNPQEATLPGRTQFWDFGS

SEQ ID NO: 27080 - protein, 166 aa, Homo sapiens
  REGION 1..166: note = ENSP00000449967
MFPDYGYGWFHTSLILEGKNYLQWLTERLTERGVKFFQRKVESFEEVAREGADVIVNCTGVWAGALQRDPLLQPGRGQIMKVDAPWMKHFILTHDPERGIYNSPYIIPGTQTVTLGGIFQLGNWSELNNIQDHNTIWEGCCRLEPTLKNARIIGERTGFRPVRPQI

SEQ ID NO: 27081 - protein, 123 aa, Homo sapiens
  REGION 1..123: note = ENSP00000449248
MRVVVIGAGVIGLSTALCIHERYHSVLQPLDIKVYADRFTPLTTTDVAAGLWQPYLSDPNNPQEADWSQQTFDYLLSHVHSPNAENLGLFLISGYNLFHEAIPLWLVPHKPNSGGKELSTVAD

SEQ ID NO: 27082 - protein, 196 aa, Homo sapiens
  REGION 1..196: note = ENSP00000447104
MRVVVIGAGVIGLSTALCIHERYHSVLQPLDIKVYADRFTPLTTTDVAAGLWQPYLSDPNNPQEADWSQQTFDYLLSHVHSPNAENLGLFLISGYNLFHEAIPDPSWKDTVLGFRKLTPRELDMFPDYGYGWFHTSLILEGKNYLQWLTERLTERGVKFFQRKVESFEEVAREGADVIVNCTGVWAGALQRDPLLQ

SEQ ID NO: 27083 - protein, 1430 aa, Homo sapiens
  REGION 1..1430: note = ENSP00000350785
MTVFRQENVDDYYDTGEELGSGQFAVVKKCREKSTGLQYAAKFIKKRRTKSSRRGVSREDIEREVSILKEIQHPNVITLHEVYENKTDVILILELVAGGELFDFLAEKESLTEEEATEFLKQILNGVYYLHSLQIAHFDLKPENIMLLDRNVPKPRIKIIDFGLAHKIDFGNEFKNIFGTPEFVAPEIVNYEPLGLEADMWSIGVITYILLSGASPFLGDTKQETLANVSAVNYEFEDEYFSNTSALAKDFIRRLLVKDPKKRMTIQDSLQHPWIKPKDTQQALSRKASAVNMEKFKKFAARKKWKQSVRLISLCQRLSRSFLSRSNMSVARSDDTLDEEDSFVMKAIIHAINDDNVPGLQHLLGSLSNYDVNQPNKHGTPPLLIAAGCGNIQILQLLIKRGSRIDVQDKGGSNAVYWAARHGHVDTLKFLSENKCPLDVKDKSGEMALHVAARYGHADVAQLLCSFGSNPNIQDKEEETPLHCAAWHGYYSVAKALCEAGCNVNIKNREGETPLLTASARGYHDIVECLAEHGADLNACDKDGHIALHLAVRRCQMEVIKTLLSQGCFVDYQDRHGNTPLHVACKDGNMPIVVALCEANCNLDISNKYGRTPLHLAANNGILDVVRYLCLMGASVEALTTDGKTAEDLARSEQHEHVAGLLARLRKDTHRGLFIQQLRPTQNLQPRIKLKLFGHSGSGKTTLVESLKCGLLRSFFRRRRPRLSSTNSSRFPPSPLASKPTVSVSINNLYPGCENVSVRSRSMMFEPGLTKGMLEVFVAPTHHPHCSADDQSTKAIDIQNAYLNGVGDFSVWEFSGNPVYFCCYDYFAANDPTSIHVVVFSLEEPYEIQLNQVIFWLSFLKSLVPVEEPIAFGGKLKNPLQVVLVATHADIMNVPRPAGGEFGYDKDTSLLKEIRNRFGNDLHISNKLFVLDAGASGSKDMKVLRNHLQEIRSQIVSVCPPMTHLCEKIISTLPSWRKLNGPNQLMSLQQFVYDVQDQLNPLASEEDLRRIAQQLHSTGEINIMQSETVQDVLLLDPRWLCTNVLGKLLSVETPRALHHYRGRYTVEDIQRLVPDSDVEELLQILDAMDICARDLSSGTMVDVPALIKTDNLHRSWADEEDEVMVYGGVRIVPVEHLTPFPCGIFHKVQVNLCRWIHQQSTEGDADIRLWVNGCKLANRGAELLVLLVNHGQGIEVQVRGLETEKIKCCLLLDSVCSTIENVMATTLPGLLTVKHYLSPQQLREHHEPVMIYQPRDFFRAQTLKETSLTNTMGGYKESFSSIMCFGCHDVYSQASLGMDIHASDLNLLTRRKLSRLLDPPDPLGKDWCLLAMNLGLPDLVAKYNTSNGAPKDFLPSPLHALLREWTTYPESTVGTLMSKLRELGRRDAADFLLKASSVFKINLDGNGQEAYASSCNSGTSYNSISSVVSR

SEQ ID NO: 27084 - protein, 1430 aa, Homo sapiens; identical to SEQ ID NO: 27083
  REGION 1..1430: note = ENSP00000417076

SEQ ID NO: 27085 - protein, 1430 aa, Homo sapiens; identical to SEQ ID NO: 27083
  REGION 1..1430: note = ENSP00000386135

SEQ ID NO: 27086 - protein, 1364 aa, Homo sapiens
  REGION 1..1364: note = ENSP00000419026
MTVFRQENVDDYYDTGEELGSGQFAVVKKCREKSTGLQYAAKFIKKRRTKSSRRGVSREDIEREVSILKEIQHPNVITLHEVYENKTDVILILELVAGGELFDFLAEKESLTEEEATEFLKQILNGVYYLHSLQIAHFDLKPENIMLLDRNVPKPRIKIIDFGLAHKIDFGNEFKNIFGTPEFVAPEIVNYEPLGLEADMWSIGVITYILLSGASPFLGDTKQETLANVSAVNYEFEDEYFSNTSALAKDFIRRLLVKDPKKRMTIQDSLQHPWIKPKDTQQALSRKASAVNMEKFKKFAARKKWKQSVRLISLCQRLSRSFLSRSNMSVARSDDTLDEEDSFVMKAIIHAINDDNVPGLQHLLGSLSNYDVNQPNKHGTPPLLIAAGCGNIQILQLLIKRGSRIDVQDKGGSNAVYWAARHGHVDTLKFLSENKCPLDVKDKSGEMALHVAARYGHADVAQLLCSFGSNPNIQDKEEETPLHCAAWHGYYSVAKALCEAGCNVNIKNREGETPLLTASARGYHDIVECLAEHGADLNACDKDGHIALHLAVRRCQMEVIKTLLSQGCFVDYQDRHGNTPLHVACKDGNMPIVVALCEANCNLDISNKYGRTPLHLAANNGILDVVRYLCLMGASVEALTTDGKTAEDLARSEQHEHVAGLLARLRKDTHRGLFIQQLRPTQNLQPRIKLKLFGHSGSGKTTLVESLKCGLLRSFFRRRRPRLSSTNSSRFPPSPLASKPTVSVSINNLYPGCENVSVRSRSMMFEPGLTKGMLEVFVAPTHHPHCSADDQSTKAIDIQNAYLNAFGGKLKNPLQVVLVATHADIMNVPRPAGGEFGYDKDTSLLKEIRNRFGNDLHISNKLFVLDAGASGSKDMKVLRNHLQEIRSQIVSVCPPMTHLCEKIISTLPSWRKLNGPNQLMSLQQFVYDVQDQLNPLASEEDLRRIAQQLHSTGEINIMQSETVQDVLLLDPRWLCTNVLGKLLSVETPRALHHYRGRYTVEDIQRLVPDSDVEELLQILDAMDICARDLSSGTMVDVPALIKTDNLHRSWADEEDEVMVYGGVRIVPVEHLTPFPCGIFHKVQVNLCRWIHQQSTEGDADIRLWVNGCKLANRGAELLVLLVNHGQGIEVQVRGLETEKIKCCLLLDSVCSTIENVMATTLPGLLTVKHYLSPQQLREHHEPVMIYQPRDFFRAQTLKETSLTNTMGGYKESFSSIMCFGCHDVYSQASLGMDIHASDLNLLTRRKLSRLLDPPDPLGKDWCLLAMNLGLPDLVAKYNTSNGAPKDFLPSPLHALLREWTTYPESTVGTLMSKLRELGRRDAADFLLKASSVFKINLDGNGQEAYASSCNSGTSYNSISSVVSR

SEQ ID NO: 27087 - protein, 188 aa, Homo sapiens
  REGION 1..188: note = ENSP00000417746
MTVFRQENVDDYYDTGEELGSGQFAVVKKCREKSTGLQYAAKFIKKRRTKSSRRGVSREDIEREVSILKEIQHPNVITLHEVYENKTDVILILELVAGGELFDFLAEKESLTEEEATEFLKQILNGVYYLHSLQIAHFDLKPENIMLLDRNVPKPRIKIIDFGLAHKIDFGNEFKNIFGTPEFVGVSG

SEQ ID NO: 27088 - protein, 1430 aa, Homo sapiens; identical to SEQ ID NO: 27083
  REGION 1..1430: note = ENSP00000484267

SEQ ID NO: 27089 - protein, 1364 aa, Homo sapiens; identical to SEQ ID NO: 27086
  REGION 1..1364: note = ENSP00000418885

SEQ ID NO: 27090 - protein, 91 aa, Homo sapiens
  REGION 1..91: note = ENSP00000453639
MFQASMRSPNMEPFKQQKVEDFYDIGEELGSGQFAIVKKCREKSTGLEYAAKFIKKRQSRASRRGVSREEIERESVWRRALRFPGPEGVTE

SEQ ID NO: 27091 - protein, 370 aa, Homo sapiens
  REGION 1..370: note = ENSP00000408277
MFQASMRSPNMEPFKQQKVEDFYDIGEELGSGQFAIVKKCREKSTGLEYAAKFIKKRQSRASRRGVSREEIEREVSILRQVLHHNVITLHDVYENRTDVVLILELVSGGELFDFLAQKESLSEEEATSFIKQILDGVNYLHTKKIAHFDLKPENIMLLDKNIPIPHIKLIDFGLAHEIEDGVEFKNIFGTPEFVAPEIVNYEPLGLEADMWSIGVITYILLSGASPFLGDTKQETLANITAVSYDFDEEFFSQTSELAKDFIRKLLVKETRKRLTIQEALRHPWITPVDNQQAMVRRESVVNLENFRKQYVRRRWKLSFSIVSLCNHLTRSLMKKVHLRPDEDLRNCESDTEEDIARRKALHPRRRSSTS

SEQ ID NO: 27092 - protein, 48 aa, Homo sapiens
  REGION 1..48: note = ENSP00000453101
MKKVHLRPDEDLTEFHSYCLGWSAMARSRLTATSASWLQAILLRQPPE

SEQ ID NO: 27093 - protein, 488 aa, Homo sapiens
  REGION 1..488: note = ENSP00000484390
MFQASMRSPNMEPFKQQKVEDFYDIGEELGSGQFAIVKKCREKSTGLEYAAKFIKKRQSRASRRGVSREEIEREVSILRQVLHHNVITLHDVYENRTDVVLILELVSGGELFDFLAQKESLSEEEATSFIKQILDGVNYLHTKKIAHFDLKPENIMLLDKNIPIPHIKLIDFGLAHEIEDGVEFKNIFGTPEFVAPEIVNYEPLGLEADMWSIGVITYILLSGASPFLGDTKQETLANITAVSYDFDEEFFSQTSELAKDFIRKLLVKETRKRLTIQEALRHPWITSKGEGRAPEQRKTEPTQLKTKHLREYTLKCHSSMPPNNSYVNFERFACVVEDVARVDLGCRALVEAHDTIQDDVEALVSIFNEKEAWYREENESARHDLSQLRYEFRKVESLKKLLREDIQATGCSLGSMARKLDHLQAQFEILRQELSADLQWIQELVGSFQLESGSSEGLGSTFYQDTSESLSELLSRSCTEEFLAGWKL

SEQ ID NO: 27094 - protein, 88 aa, Homo sapiens
  REGION 1..88: note = ENSP00000453284
MFQASMRSPNMEPFKQQKVEDFYDIGEELGRFLAGILLFQTLHLLLTLLLLPACFSLLSCPSSSQRTAHLALWPVCHREEVPGEEHGA

SEQ ID NO: 27095 - protein, 80 aa, Homo sapiens
  REGION 1..80: note = ENSP00000452970
MFQASMRSPNMEPFKQQKVEDFYDIGEELGSGQFAIVKKCREKSTGLEYAAKFIKKRQSRASRRGVSREEIEREVSILRQ

SEQ ID NO: 27096 - protein, 370 aa, Homo sapiens; identical to SEQ ID NO: 27091
  REGION 1..370: note = ENSP00000261891

SEQ ID NO: 27097 - protein, 488 aa, Homo sapiens; identical to SEQ ID NO: 27093
  REGION 1..488: note = ENSP00000453235

SEQ ID NO: 27098 - protein, 620 aa, Homo sapiens
  REGION 1..620: note = ENSP00000270349
MSKSKCSVGLMSSVVAPAKEPNAVGPKEVELILVKEQNGVQLTSSTLTNPRQSPVEAQDRETWGKKIDFLLSVIGFAVDLANVWRFPYLCYKNGGGAFLVPYLLFMVIAGMPLFYMELALGQFNREGAAGVWKICPILKGVGFTVILISLYVGFFYNVIIAWALHYLFSSFTTELPWIHCNNSWNSPNCSDAHPGDSSGDSSGLNDTFGTTPAAEYFERGVLHLHQSHGIDDLGPPRWQLTACLVLVIVLLYFSLWKGVKTSGKVVWITATMPYVVLTALLLRGVTLPGAIDGIRAYLSVDFYRLCEASVWIDAATQVCFSLGVGFGVLIAFSSYNKFTNNCYRDAIVTTSINSLTSFSSGFVVFSFLGYMAQKHSVPIGDVAKDGPGLIFIIYPEAIATLPLSSAWAVVFFIMLLTLGIDSAMGGMESVITGLIDEFQLLHRHRELFTLFIVLATFLLSLFCVTNGGIYVFTLLDHFAAGTSILFGVLIEAIGVAWFYGVGQFSDDIQQMTGQRPSLYWRLCWKLVSPCFLLFVVVVSIVTFRPPHYGAYIFPDWANALGWVIATSSMAMVPIYAAYKFCSLPGSFREKLAYAIAPEKDRELVDRGEVRQFTLRHWLKV

SEQ ID NO: 27099 - protein, 620 aa, Homo sapiens; identical to SEQ ID NO: 27098
  REGION 1..620: note = ENSP00000479597

SEQ ID NO: 27100 - protein, 617 aa, Homo sapiens
  REGION 1..617: note = ENSP00000376776
MPALSRWASLPGPSMREAAFMYSTAVAIFLVILVAALQGSAPRESPLPYHIPLDPEGSLELSWNVSYTQEAIHFQLLVRRLKAGVLFGMSDRGELENADLVVLWTDGDTAYFADAWSDQKGQIHLDPQQDYQLLQVQRTPEGLTLLFKRPFGTCDPKDYLIEDGTVHLVYGILEEPFRSLEAINGSGLQMGLQRVQLLKPNIPEPELPSDACTMEVQAPNIQIPSQETTYWCYIKELPKGFSRHHIIKYEPIVTKGNEALVHHMEVFQCAPEMDSVPHFSGPCDSKMKPDRLNYCRHVLAAWALGAKAFYYPEEAGLAFGGPGSSRYLRLEVHYHNPLVIEGRNDSSGIRLYYTAKLRRFNAGIMELGLVYTPVMAIPPRETAFILTGYCTDKCTQLALPPSGIHIFASQLHTHLTGRKVVTVLVRDGREWEIVNQDNHYSPHFQEIRMLKKVVSVHPGDVLITSCTYNTEDRELATVGGFGILEEMCVNYVHYYPQTQLELCKSAVDAGFLQKYFHLINRFNNEDVCTCPQASVSQQFTSVPWNSFNRDVLKALYSFAPISMHCNKSSAVRFQGEWNLQPLPKVISTLEEPTPQCPTSQGRSPAGPTVVSIGGGKG

SEQ ID NO: 27101 - protein, 244 aa, Homo sapiens
  REGION 1..244: note = ENSP00000263611
MREAAFMYSTAVAIFLVILVAALQGSAPRESPLPYHIPLDPEGSLELSWNVSYTQEAIHFQLLVRRLKAGVLFGMSDRGELENADLVVLWTDGDTAYFADGTVHLVYGILEEPFRSLEAINGSGLQMGLQRVQLLKPNIPEPELPSDACTMEVQAPNIQIPSQETTYWCYIKELPKGFSRHHIIKYEPIVTKGNEALVHHMEVFQCAPEMDSVPHFSGPCDSKMKPDRLNYCRHVLAAWALGAK

SEQ ID NO: 27102 - protein, 539 aa, Homo sapiens
  REGION 1..539: note = ENSP00000296955
MVPGARGGGALARAAGRGLLALLLAVSAPLRLQAEELGDGCGHLVTYQDSGTMTSKNYPGTYPNHTVCEKTITVPKGKRLILRLGDLDIESQTCASDYLLFTSSSDQYGPYCGSMTVPKELLLNTSEVTVRFESGSHISGRGFLLTYASSDHPDLITCLERASHYLKTEYSKFCPAGCRDVAGDISGNMVDGYRDTSLLCKAAIHAGIIADELGGQISVLQRKGISRYEGILANGVLSRDGSLSDKRFLFTSNGCSRSLSFEPDGQIRASSSWQSVNESGDQVHWSPGQARLQDQGPSWASGDSSNNHKPREWLEIDLGEKKKITGIRTTGSTQSNFNFYVKSFVMNFKNNNSKWKTYKGIVNNEEKVFQGNSNFRDPVQNNFIPPIVARYVRVVPQTWHQRIALKVELIGCQITQGNDSLVWRKTSQSTSVSTKKEDETITRPIPSEETSTGINITTVAIPLVLLVVLVFAGMGIFAAFRKKKKKGSPYGSAEAQKTDCWKQIKYPFARHQSAEFTISYDNEKEMTQKLDLITSDMAG

SEQ ID NO: 27103 - protein, 715 aa, Homo sapiens
  REGION 1..715: note = ENSP00000342422
MVPGARGGGALARAAGRGLLALLLAVSAPLRLQAEELGDGCGHLVTYQDSGTMTSKNYPGTYPNHTVCEKTITVPKGKRLILRLGDLDIESQTCASDYLLFTSSSDQYGPYCGSMTVPKELLLNTSEVTVRFESGSHISGRGFLLTYASSDHPDLITCLERASHYLKTEYSKFCPAGCRDVAGDISGNMVDGYRDTSLLCKAAIHAGIIADELGGQISVLQRKGISRYEGILANGVLSRDGSLSDKRFLFTSNGCSRSLSFEPDGQIRASSSWQSVNESGDQVHWSPGQARLQDQGPSWASGDSSNNHKPREWLEIDLGEKKKITGIRTTGSTQSNFNFYVKSFVMNFKNNNSKWKTYKGIVNNEEKVFQGNSNFRDPVQNNFIPPIVARYVRVVPQTWHQRIALKVELIGCQITQGNDSLVWRKTSQSTSVSTKKEDETITRPIPSEETSTGINITTVAIPLVLLVVLVFAGMGIFAAFRKKKKKGSPYGSAEAQKTDCWKQIKYPFARHQSAEFTISYDNEKEMTQKLDLITSDMADYQQPLMIGTGTVTRKGSTFRPMDTDAEEAGVSTDAGGHYDCPQRAGRHEYALPLAPPEPEYATPIVERHVLRAHTFSAQSGYRVPGPQPGHKHSLSSGGFSPVAGVGAQDGDYQRPHSAQPADRGYDRPKAVSALATESGHPDSQKPPTHPGTSDSYSAPRDCLTPLNQTAMTALL

SEQ ID NO: 27104 - protein, 99 aa, Homo sapiens
  REGION 1..99: note = ENSP00000391700
NNHKPREWLEIDLGEKKKITGIRTTGSTQSNFNFYVKSFVMNFKNNNSKWKTYKGIVNNEEKVMIHWCGARQVKAPVFQLRKKMRQSQGPSPRKKHPQE

SEQ ID NO: 27105 - protein, 1447 aa, Homo sapiens
  REGION 1..1447: note = ENSP00000389140
MENSLRCVWVPKLAFVLFGASLFSAHLQVTGFQIKAFTALRFLSEPSDAVTMRGGNVLLDCSAESDRGVPVIKWKKDGIHLALGMDERKQQLSNGSLLIQNILHSRHHKPDEGLYQCEASLGDSGSIISRTAKVAVAGPLRFLSQTESVTAFMGDTVLLKCEVIGEPMPTIHWQKNQQDLTPIPGDSRVVVLPSGALQISRLQPGDIGIYRCSARNPASSRTGNEAEVRILSDPGLHRQLYFLQRPSNVVAIEGKDAVLECCVSGYPPPSFTWLRGEEVIQLRSKKYSLLGGSNLLISNVTDDDSGMYTCVVTYKNENISASAELTVLVPPWFLNHPSNLYAYESMDIEFECTVSGKPVPTVNWMKNGDVVIPSDYFQIVGGSNLRILGVVKSDEGFYQCVAENEAGNAQTSAQLIVPKPAIPSSSVLPSAPRDVVPVLVSSRFVRLSWRPPAEAKGNIQTFTVFFSREGDNRERALNTTQPGSLQLTVGNLKPEAMYTFRVVAYNEWGPGESSQPIKVATQPELQVPGPVENLQAVSTSPTSILITWEPPAYANGPVQGYRLFCTEVSTGKEQNIEVDGLSYKLEGLKKFTEYSLRFLAYNRYGPGVSTDDITVVTLSDVPSAPPQNVSLEVVNSRSIKVSWLPPPSGTQNGFITGYKIRHRKTTRRGEMETLEPNNLWYLFTGLEKGSQYSFQVSAMTVNGTGPPSNWYTAETPENDLDESQVPDQPSSLHVRPQTNCIIMSWTPPLNPNIVVRGYIIGYGVGSPYAETVRVDSKQRYYSIERLESSSHYVISLKAFNNAGEGVPLYESATTRSITDPTDPVDYYPLLDDFPTSVPDLSTPMLPPVGVQAVALTHDAVRVSWADNSVPKNQKTSEVRLYTVRWRTSFSASAKYKSEDTTSLSYTATGLKPNTMYEFSVMVTKNRRSSTWSMTAHATTYEAAPTSAPKDLTVITREGKPRAVIVSWQPPLEANGKITAYILFYTLDKNIPIDDWIMETISGDRLTHQIMDLNLDTMYYFRIQARNSKGVGPLSDPILFRTLKVEHPDKMANDQGRHGDGGYWPVDTNLIDRSTLNEPPIGQMHPPHGSVTPQKNSNLLVIIVVTVGVITVLVVVIVAVICTRRSSAQQRKKRATHSAGKRKGSQKDLRPPDLWIHHEEMEMKNIEKPSGTDPAGRDSPIQSCQDLTPVSHSQSETQLGSKSTSHSGQDTEEAGSSMSTLERSLAARRAPRAKLMIPMDAQSNNPAVVSAIPVPTLESAQYPGILPSPTCGYPHPQFTLRPVPFPTLSVDRGFGAGRSQSVSEGPTTQQPPMLPPSQPEHSSSEEAPSRTIPTACVRPTHPLRSFANPLLPPPMSAIEPKVPYTPLLSQPGPTLPKTHVKTASLGLAGKARSPLLPVSVPTAPEVSEESHKPTEDSANVYEQDDLSEQMASLEGLMKQLNAITGSAF

SEQ ID NO: 27106 - protein, 181 aa, Homo sapiens
  REGION 1..181: note = ENSP00000463699
  VARIANT 1: note = Any amino acid
XIKAFTALRFLSEPSDAVTMRGGNVLLDCSAESDRGVPVIKWKKDGIHLALGMDERKQQLSNGSLLIQNILHSRHHKPDEGLYQCEASLGDSGSIISRTAKVAVAGANIRILPRRSTSSCAAVWKMYPRALEYAQNSIWEGLVTVQSFPFYIYRDIVYFQMISRKLNCSDSVILNDLMIFI

SEQ ID NO: 27107 - protein, 88 aa, Homo sapiens
  REGION 1..88: note = ENSP00000463131
RGVPVIKWKKDGIHLALGMDERKQQLSNGSLLIQNILHSRHHKPDEGLYQCEASLGDSGSIISRTAKVAVAEGNVRLRKFGQHSHGSL

SEQ ID NO: 27108 - protein, 772 aa, Homo sapiens
  REGION 1..772: note = ENSP00000304146
  VARIANT 1: note = Any amino acid
XGVPVIKWKKDGIHLALGMDERKQQLSNGSLLIQNILHSRHHKPDEGLYQCEASLGDSGSIISRTAKVAVAGPLRFLSQTESVTAFMGDTVLLKCEVIGEPMPTIHWQKNQQDLTPIPGDSRVVVLPSGALQISRLQPGDIGIYRCSARNPASSRTGNEAEVRILSDPGLHRQLYFLQRPSNVVAIEGKDAVLECCVSGYPPPSFTWLRGEEVIQLRSKKYSLLGGSNLLISNVTDDDSGMYTCVVTYKNENISASAELTVLVPPWFLNHPSNLYAYESMDIEFECTVSGKPVPTVNWMKNGDVVIPSDYFQIVGGSNLRILGVVKSDEGFYQCVAENEAGNAQTSAQLIVPKPAIPSSSVLPSAPRDVVPVLVSSRFVRLSWRPPAEAKGNIQTFTVFFSREGDNRERALNTTQPGSLQLTVGNLKPEAMYTFRVVAYNEWGPGESSQPIKVATQPELQVPGPVENLQAVSTSPTSILITWEPPAYANGPVQGYRLFCTEVSTGKEQNIEVDGLSYKLEGLKKFTEYSLRFLAYNRYGPGVSTDDITVVTLSDVPSAPPQNVSLEVVNSRSIKVSWLPPPSGTQNGFITGYKIRHRKTTRRGEMETLEPNNLWYLFTGLEKGSQYSFQVSAMTVNGTGPPSNWYTAETPENDLDESQVPDQPSSLHVRPQTNCIIMSWTPPLNPNIVVRGYIIGYGVGSPYAETVRVDSKQRYYSIERLESSSHYVISLKAFNNAGEGVPLYESATTRSITVRRHNISKLHSNRPQTKHNV

SEQ ID NO: 27109 - protein, 74 aa, Homo sapiens
  REGION 1..74: note = ENSP00000464277
  VARIANT 1: note = Any amino acid
XVPVIKWKKDGIHLALGMDERKQQLSNGSLLIQNILHSRHHKPDEGLYQCEASLGDSGSIISRTAKVAVAGLCS

SEQ ID NO: 27110 - protein, 70 aa, Homo sapiens
  REGION 1..70: note = ENSP00000463463
VPVIKWKKDGIHLALGMDERKQQLSNGSLLIQNILHSRHHKPDEGLYQCEASLGDSGSIISRTAKVAVAD

SEQ ID NO: 27111 - protein, 1076 aa, Homo sapiens
  REGION 1..1076: note = ENSP00000464582
MDIEFECTVSGKPVPTVNWMKNGDVVIPSDYFQIVGGSNLRILGVVKSDEGFYQCVAENEAGNAQTSAQLIVPKPAIPSSSVLPSAPRDVVPVLVSSRFVRLSWRPPAEAKGNIQTFTVFFSREGDNRERALNTTQPGSLQLTVGNLKPEAMYTFRVVAYNEWGPGESSQPIKVATQPELQVPGPVENLQAVSTSPTSILITWEPPAYANGPVQGYRLFCTEVSTGKEQNIEVDGLSYKLEGLKKFTEYSLRFLAYNRYGPGVSTDDITVVTLSDVPSAPPQNVSLEVVNSRSIKVSWLPPPSGTQNGFITGYKIRHRKTTRRGEMETLEPNNLWYLFTGLEKGSQYSFQVSAMTVNGTGPPSNWYTAETPENDLDESQVPDQPSSLHVRPQTNCIIMSWTPPLNPNIVVRGYIIGYGVGSPYAETVRVDSKQRYYSIERLESSSHYVISLKAFNNAGEGVPLYESATTRSITDLSTPMLPPVGVQAVALTHDAVRVSWADNSVPKNQKTSEVRLYTVRWRTSFSASAKYKSEDTTSLSYTATGLKPNTMYEFSVMVTKNRRSSTWSMTAHATTYEAAPTSAPKDLTVITREGKPRAVIVSWQPPLEANGKITAYILFYTLDKNIPIDDWIMETISGDRLTHQIMDLNLDTMYYFRIQARNSKGVGPLSDPILFRTLKVEHPDKMANDQGRHGDGGYWPVDTNLIDRSTLNEPPIGQMHPPHGSVTPQKNSNLLVIIVVTVGVITVLVVVIVAVICTRRSSAQQRKKRATHSAGKRKGSQKDLRPPDLWIHHEEMEMKNIEKPSGTDPAGRDSPIQSCQDLTPVSHSQSETQLGSKSTSHSGQDTEEAGSSMSTLERSLAARRAPRAKLMIPMDAQSNNPAVVSAIPVPTLESAQYPGILPSPTCGYPHPQFTLRPVPFPTLSVDRGFGAGRTVSEGPTTQQPPMLPPSQPEHSSSEEAPSRTIPTACVRPTHPLRSFANPLLPPPMSAIEPKVPYTPLLSQPGPTLPKTHVKTASLGLAGKARSPLLPVSVPTAPEVSEESHKPTEDSANVEMEWVKQYAISYYPLLLPASSFSV

SEQ ID NO: 27112 - protein, 102 aa, Homo sapiens
  REGION 1..102: note = ENSP00000463766
MDIEFECTVSGKPVPTVNWMKNGDVVIPSDYFQIVGGSNLRILGVVKSDEGFYQCVAENEAGNAQTSAQLIVPKPAIPSSSVLPSAPRDVVPVLVSSRFVRL

SEQ ID NO: 27113 - protein, 208 aa, Homo sapiens
  REGION 1..208: note = ENSP00000464292
  VARIANT 1: note = Any amino acid
XSWADNSVPKNQKTSEVRLYTVRWRTSFSASAKYKSEDTTSLSYTATGLKPNTMYEFSVMVTKNRRSSTWSMTAHATTYEAAPTSAPKDLTVITREGKPRAVIVSWQPPLEANGKITAYILFYTLDKNIPIDDWIMETISGDRLTHQIMDLNLDTMYYFRIQARNSKGVGPLSDPILFRTLKVEHPDKMANDQDTGVTINLVNEVLLG

SEQ ID NO: 27114 - protein, 1424 aa, Homo sapiens
  REGION 1..1424: note = ENSP00000397322
SLCSLVPGFQIKAFTALRFLSEPSDAVTMRGGNVLLDCSAESDRGVPVIKWKKDGIHLALGMDERKQQLSNGSLLIQNILHSRHHKPDEGLYQCEASLGDSGSIISRTAKVAVAGPLRFLSQTESVTAFMGDTVLLKCEVIGEPMPTIHWQKNQQDLTPIPGDSRVVVLPSGALQISRLQPGDIGIYRCSARNPASSRTGNEAEVRILSDPGLHRQLYFLQRPSNVVAIEGKDAVLECCVSGYPPPSFTWLRGEEVIQLRSKKYSLLGGSNLLISNVTDDDSGMYTCVVTYKNENISASAELTVLVPPWFLNHPSNLYAYESMDIEFECTVSGKPVPTVNWMKNGDVVIPSDYFQIVGGSNLRILGVVKSDEGFYQCVAENEAGNAQTSAQLIVPKPAIPSSSVLPSAPRDVVPVLVSSRFVRLSWRPPAEAKGNIQTFTVFFSREGDNRERALNTTQPGSLQLTVGNLKPEAMYTFRVVAYNEWGPGESSQPIKVATQPELQVPGPVENLQAVSTSPTSILITWEPPAYANGPVQGYRLFCTEVSTGKEQNIEVDGLSYKLEGLKKFTEYSLRFLAYNRYGPGVSTDDITVVTLSDVPSAPPQNVSLEVVNSRSIKVSWLPPPSGTQNGFITGYKIRHRKTTRRGEMETLEPNNLWYLFTGLEKGSQYSFQVSAMTVNGTGPPSNWYTAETPENDLDESQVPDQPSSLHVRPQTNCIIMSWTPPLNPNIVVRGYIIGYGVGSPYAETVRVDSKQRYYSIERLESSSHYVISLKAFNNAGEGVPLYESATTRSITDPTDPVDYYPLLDDFPTSVPDLSTPMLPPVGVQAVALTHDAVRVSWADNSVPKNQKTSEVRLYTVRWRTSFSASAKYKSEDTTSLSYTATGLKPNTMYEFSVMVTKNRRSSTWSMTAHATTYEAAPTSAPKDLTVITREGKPRAVIVSWQPPLEANGKITAYILFYTLDKNIPIDDWIMETISGDRLTHQIMDLNLDTMYYFRIQARNSKGVGPLSDPILFRTLKVEHPDKMANDQGRHGDGGYWPVDTNLIDRSTLNEPPIGQMHPPHGSVTPQKNSNLLVIIVVTVGVITVLVVVIVAVICTRRSSAQQRKKRATHSAGKRKGSQKDLRPPDLWIHHEEMEMKNIEKPSGTDPAGRDSPIQSCQDLTPVSHSQSETQLGSKSTSHSGQDTEEAGSSMSTLERSLAARRAPRAKLMIPMDAQSNNPAVVSAIPVPTLESAQYPGILPSPTCGYPHPQFTLRPVPFPTLSVDRGFGAGRSQSVSEGPTTQQPPMLPPSQPEHSSSEEAPSRTIPTACVRPTHPLRSFANPLLPPPMSAIEPKVPYTPLLSQPGPTLPKTHVKTASLGLAGKARSPLLPVSVPTAPEVSEESHKPTEDSANVYEQDDLSEQMASLEGLMKQLNAITGSAF

SEQ ID NO: 27115 - protein, 740 aa, Homo sapiens
  REGION 1..740: note = ENSP00000353846
MSFGRDMELEHFDERDKAQRYSRGSRVNGLPSPTHSAHCSFYRTRTLQTLSSEKKAKKVRFYRNGDRYFKGIVYAISPDRFRSFEALLADLTRTLSDNVNLPQGVRTIYTIDGLKKISSLDQLVEGESYVCGSIEPFKKLEYTKNVNPNWSVNVKTTSASRAVSSLATAKGSPSEVRENKDFIRPKLVTIIRSGVKPRKAVRILLNKKTAHSFEQVLTDITDAIKLDSGVVKRLYTLDGKQVMCLQDFFGDDDIFIACGPEKFRYQDDFLLDESECRVVKSTSYTKIASSSRRSTTKSPGPSRRSKSPASTSSVNGTPGSQLSTPRSGKSPSPSPTSPGSLRKQRSSQHGGSSTSLASTKVCSSMDENDGPGEEVSEEGFQIPATITERYKVGRTIGDGNFAVVKECVERSTAREYALKIIKKSKCRGKEHMIQNEVSILRRVKHPNIVLLIEEMDVPTELYLVMELVKGGDLFDAITSTNKYTERDASGMLYNLASAIKYLHSLNIVHRDIKPENLLVYEHQDGSKSLKLGDFGLATIVDGPLYTVCGTPTYVAPEIIAETGYGLKVDIWAAGVITYILLCGFPPFRGSGDDQEVLFDQILMGQVDFPSPYWDNVSDSAKELITMMLLVDVDQRFSAVQVLEHPWVNDDGLPENEHQLSVAGKIKKHFNTGPKPNSTAAGVSVIATTALDKERQVFRRRRNQDVRSRYKAQPAPPELNSESEDYSPSSSETVRSPNSPF

SEQ ID NO: 27116 - protein, 433 aa, Homo sapiens
  REGION 1..433: note = ENSP00000369223
MLELIEVNGTPGSQLSTPRSGKSPSPSPTSPGSLRKQRSSQHGGSSTSLASTKVCSSMDENDGPGEEVSEEGFQIPATITERYKVGRTIGDGNFAVVKECVERSTAREYALKIIKKSKCRGKEHMIQNEVSILRRVKHPNIVLLIEEMDVPTELYLVMELVKGGDLFDAITSTNKYTERDASGMLYNLASAIKYLHSLNIVHRDIKPENLLVYEHQDGSKSLKLGDFGLATIVDGPLYTVCGTPTYVAPEIIAETGYGLKVDIWAAGVITYILLCGFPPFRGSGDDQEVLFDQILMGQVDFPSPYWDNVSDSAKELITMMLLVDVDQRFSAVQVLEHPWVNDDGLPENEHQLSVAGKIKKHFNTGPKPNSTAAGVSVIATTALDKERQVFRRRRNQDVRSRYKAQPAPPELNSESEDYSPSSSETVRSPNSPF

SEQ ID NO: 27117 - protein, 729 aa, Homo sapiens
  REGION 1..729: note = ENSP00000255448
MSFGRDMELEHFDERDKAQRYSRGSRVNGLPSPTHSAHCSFYRTRTLQTLSSEKKAKKVRFYRNGDRYFKGIVYAISPDRFRSFEALLADLTRTLSDNVNLPQGVRTIYTIDGLKKISSLDQLVEGESYVCGSIEPFKKLEYTKNVNPNWSVNVKTTSASRAVSSLATAKGSPSEVRENKDFIRPKLVTIIRSGVKPRKAVRILLNKKTAHSFEQVLTDITDAIKLDSGVVKRLYTLDGKQVMCLQDFFGDDDIFIACGPEKFRYQDDFLLDESECRVVKSTSYTKIASSSRRSTTKSPGPSRRSKSPASTSSVNGTPGSQLSTPRSGKSPSPSPTSPGSLRKQRSSQHGGSSTSLASTKVCSSMDENDGPGEEVSEEGFQIPATITERYKVGRTIGDGNFAVVKECVERSTAREYALKIIKKSKCRGKEHMIQNEVSILRRVKHPNIVLLIEEMDVPTELYLVMELVKGGDLFDAITSTNKYTERDASGMLYNLASAIKYLHSLNIVHRDIKPENLLVYEHQDGSKSLKLGDFGLATIVDGPLYTVCGTPTYVAPEIIAETGYGLKVDIWAAGVITYILLCGFPPFRGSGDDQEVLFDQILMGQVDFPSPYWDNVSDSAKELITMMLLVDVDQRFSAVQVLEHPWVNDDGLPENEHQLSVAGKIKKHFNTGPKPNSTAAGVSVIALDHGFTIKRSGSLDYYQQPGMYWIRPPLLIRRGRFSDEDATRM

SEQ ID NO: 27118 - protein, 363 aa, Homo sapiens
  REGION 1..363: note = ENSP00000369222
MSFGRDMELEHFDERDKAQRYSRGSRVNGLPSPTHSAHCSFYRTRTLQTLSSEKKAKKVRFYRNGDRYFKGIVYAISPDRFRSFEALLADLTRTLSDNVNLPQGVRTIYTIDGLKKISSLDQLVEGESYVCGSIEPFKKLEYTKNVNPNWSVNVKTTSASRAVSSLATAKGSPSEVRENKDFIRPKLVTIIRSGVKPRKAVRILLNKKTAHSFEQVLTDITDAIKLDSGVVKRLYTLDGKQVMCLQDFFGDDDIFIACGPEKFRYQDDFLLDESECRVVKSTSYTKIASSSRRSTTKSPGPSRRSKSPASTSSVNGTPGSQLSTPRSGKSPSPSPTSPGSLRKQRDLYRPLSSDDLDSVGDSV

SEQ ID NO: 27119 - protein, 422 aa, Homo sapiens
  REGION 1..422: note = ENSP00000484452
MLELIEVNGTPGSQLSTPRSGKSPSPSPTSPGSLRKQRSSQHGGSSTSLASTKVCSSMDENDGPGEEVSEEGFQIPATITERYKVGRTIGDGNFAVVKECVERSTAREYALKIIKKSKCRGKEHMIQNEVSILRRVKHPNIVLLIEEMDVPTELYLVMELVKGGDLFDAITSTNKYTERDASGMLYNLASAIKYLHSLNIVHRDIKPENLLVYEHQDGSKSLKLGDFGLATIVDGPLYTVCGTPTYVAPEIIAETGYGLKVDIWAAGVITYILLCGFPPFRGSGDDQEVLFDQILMGQVDFPSPYWDNVSDSAKELITMMLLVDVDQRFSAVQVLEHPWVNDDGLPENEHQLSVAGKIKKHFNTGPKPNSTAAGVSVIALDHGFTIKRSGSLDYYQQPGMYWIRPPLLIRRGRFSDEDATRM

SEQ ID NO: 27120 - protein, 304 aa, Homo sapiens
  REGION 1..304: note = ENSP00000319482
MGQCVTKCKNPSSTLGSKNGDREPSNKSHSRRGAGHREEQVPPCGKPGGDILVNGTKKAEAATEACQLPTSSGDAGRESKSNAEESSLQRLEELFRRYKDEREDAILEEGMERFCNDLCVDPTEFRVLLLAWKFQAATMCKFTRKEFFDGCKAISADSIDGICARFPSLLTEAKQEDKFKDLYRFTFQFGLDSEEGQRSLHREIAIALWKLVFTQNNPPVLDQWLNFLTENPSGIKGISRDTWNMFLNFTQVIGPDLSNYSEDEAWPSLFDTFVEWEMERRKREGEGRGALSSGPEGLCPEEQT

SEQ ID NO: 27121 - protein, 304 aa, Homo sapiens; identical to SEQ ID NO: 27120
  REGION 1..304: note = ENSP00000454762

SEQ ID NO: 27122 - protein, 365 aa, Homo sapiens
  REGION 1..365: note = ENSP00000489635
MELDFGHFDERDKTSRNMRGSRMNGLPSPTHSAHCSFYRTRTLQALSNEKKAKKVRFYRNGDRYFKGIVYAVSSDRFRSFDALLADLTRSLSDNINLPQGVRYIYTIDGSRKIGSMDELEEGESYVCSSDNFFKKVEYTKNVNPNWSVNVKTSANMKAPQSLASSNSAQARENKDFVRPKLVTIIRSGVKPRKAVRVLLNKKTAHSFEQVLTDITEAIKLETGVVKKLYTLDGKQVTCLHDFFGDDDVFIACGPEKFRYAQDDFSLDENECRVMKGNPSATAGPKASPTPQKTSAKSPGPMRRSKSPADSGNDQDANGTSSSQLSTPKSKQSPISTPTSPGSLRKHKDLYLPLSLDDSDSLGDSM

SEQ ID NO: 27123 - protein, 366 aa, Homo sapiens
  REGION 1..366: note = ENSP00000490614
MELDFGHFDERDKTSRNMRGSRMNGLPSPTHSAHCSFYRTRTLQALSNEKKAKKVRFYRNGDRYFKGIVYAVSSDRFRSFDALLADLTRSLSDNINLPQGVRYIYTIDGSRKIGSMDELEEGESYVCSSDNFFKKVEYTKNVNPNWSVNVKTSANMKAPQSLASSNSAQARENKDFVRPKLVTIIRSGVKPRKAVRVLLNKKTAHSFEQVLTDITEAIKLETGVVKKLYTLDGKQVTCLHDFFGDDDVFIACGPEKFRYAQDDFSLDENECRVMKGNPSATAGPKASPTPQKTSAKSPGPMRRSKSPADSGNDQDANGTSSSQLSTPKSKQSPISTPTSPGSLRKHKVDLYLPLSLDDSDSLGDSM

SEQ ID NO: 27124 - protein, 360 aa, Homo sapiens
  REGION 1..360: note = ENSP00000350776
MELDFGHFDERDKTSRNMRGSRMNGLPSPTHSAHCSFYRTRTLQALSNEKKAKKVRFYRNGDRYFKGIVYAVSSDRFRSFDALLADLTRSLSDNINLPQGVRYIYTIDGSRKIGSMDELEEGESYVCSSDNFFKKVEYTKNVNPNWSVNVKTSANMKAPQSLASSNSAQARENKDFVRPKLVTIIRSGVKPRKAVRVLLNKKTAHSFEQVLTDITEAIKLETGVVKKLYTLDGKQVTCLHDFFGDDDVFIACGPEKFRYAQDDFSLDENECRVMKGNPSATAGPKASPTPQKTSAKSPGPMRRSKSPADSANGTSSSQLSTPKSKQSPISTPTSPGSLRKHKDLYLPLSLDDSDSLGDSM

SEQ ID NO: 27125 - protein, 361 aa, Homo sapiens
  REGION 1..361: note = ENSP00000490878
MELDFGHFDERDKTSRNMRGSRMNGLPSPTHSAHCSFYRTRTLQALSNEKKAKKVRFYRNGDRYFKGIVYAVSSDRFRSFDALLADLTRSLSDNINLPQGVRYIYTIDGSRKIGSMDELEEGESYVCSSDNFFKKVEYTKNVNPNWSVNVKTSANMKAPQSLASSNSAQARENKDFVRPKLVTIIRSGVKPRKAVRVLLNKKTAHSFEQVLTDITEAIKLETGVVKKLYTLDGKQVTCLHDFFGDDDVFIACGPEKFRYAQDDFSLDENECRVMKGNPSATAGPKASPTPQKTSAKSPGPMRRSKSPADSANGTSSSQLSTPKSKQSPISTPTSPGSLRKHKVDLYLPLSLDDSDSLGDSM

SEQ ID NO: 27126 - protein, 366 aa, Homo sapiens; identical to SEQ ID NO: 27123
  REGION 1..366: note = ENSP00000348553

SEQ ID NO: 27127 - protein, 360 aa, Homo sapiens; identical to SEQ ID NO: 27124
  REGION 1..360: note = ENSP00000419861

SEQ ID NO: 27128 - protein, 366 aa, Homo sapiens; identical to SEQ ID NO: 27123
  REGION 1..366: note = ENSP00000490357

SEQ ID NO: 27129 - protein, 365 aa, Homo sapiens; identical to SEQ ID NO: 27122
  REGION 1..365: note = ENSP00000490448

SEQ ID NO: 27130 - protein, 139 aa, Homo sapiens
  REGION 1..139: note = ENSP00000490068
MELDFGHFDERDKTSRNMRGSRMNGLPSPTHSAHCSFYRTRTLQALSNEKKAKKVRFYRNGDRYFKGIVYAVSSDRFRSFDALLADLTRSLSDNINLPQGVRYIYTIDGSRKIGSMDELEEGESYVCSSDNFFKKVEYT

SEQ ID NO: 27131 - protein, 113 aa, Homo sapiens
  REGION 1..113: note = ENSP00000418811
MELDFGHFDERDKTSRNMRGSRMNGLPSPTHSAHCSFYRTRTLQALSNEKKAKKVRFYRNGDRYFKGIVYAVSSDRFRSFDALLADLTRSLSDNINLPQGVRYIYTIDGSRKI

SEQ ID NO: 27132 - protein, 360 aa, Homo sapiens; identical to SEQ ID NO: 27124
  REGION 1..360: note = ENSP00000361061

SEQ ID NO: 27133 - protein, 879 aa, Homo sapiens
  REGION 1..879: note = ENSP00000378970
MNYPGRGSPRSPEHNGRGGGGGAWELGSDARPAFGGGVCCFEHLPGGDPDDGDVPLALLRGEPGLHLAPGTDDHNHHLALDPCLSDENYDFSSAESGSSLRYYSEGESGGGGSSLSLHPPQQPPLVPTNSGGGGATGGSPGERKRTRLGGPAARHRYEVVTELGPEEVRWFYKEDKKTWKPFIGYDSLRIELAFRTLLQTTGARPQGGDRDGDHVCSPTGPASSSGEDDDEDRACGFCQSTTGHEPEMVELVNIEPVCVRGGLYEVDVTQGECYPVYWNQADKIPVMRGQWFIDGTWQPLEEEESNLIEQEHLNCFRGQQMQENFDIEVSKSIDGKDGSGINYSAVHSFKLSRNHVDWHSVDEVYLYSDATTSKIARTVTQKLGFSKASSSGTRLHRGYVEEATLEDKPSQTTHIVFVVHGIGQKMDQGRIIKNTAMMREAARKIEERHFSNHATHVEFLPVEWRSKLTLDGDTVDSITPDKVRGLRDMLNSSAMDIMYYTSPLYRDELVKGLQQELNRLYSLFCSRNPDFEEKGGKVSIVSHSLGCVITYDIMTGWNPVRLYEQLLQKEEELPDERWMSYEERHLLDELYITKRRLKEIEERLHGLKASSMTQTPALKFKVENFFCMGSPLAVFLALRGIRPGNTGSQDHILPREICNRLLNIFHPTDPVAYRLEPLILKHYSNISPVQIHWYNTSNPLPYEHMKPSFLNPAKEPTSVSENEGISTIPSPVTSPVLSRRHYGESITNIGKASILGAASIGKGLGGMLFSRFGRSSTTQSSETSKDSMEDEKKPVASPSATTVGTQTLPHSSSGFLDSALELDHRIDFELREGLVESRYWSAVTSHTAYWSSLDVALFLLTFMYKHEHDDDAKPNLDPI

SEQ ID NO: 27134 - protein, 900 aa, Homo sapiens
  REGION 1..900: note = ENSP00000327104
MNYPGRGSPRSPEHNGRGGGGGAWELGSDARPAFGGGVCCFEHLPGGDPDDGDVPLALLRGEPGLHLAPGTDDHNHHLALDPCLSDENYDFSSAESGSSLRYYSEGESGGGGSSLSLHPPQQPPLVPTNSGGGGATGGSPGERKRTRLGGPAARHRYEVVTELGPEEVRWFYKEDKKTWKPFIGYDSLRIELAFRTLLQTTGARPQGGDRDGDHVCSPTGPASSSGEDDDEDRACGFCQSTTGHEPEMVELVNIEPVCVRGGLYEVDVTQGECYPVYWNQADKIPVMRGQWFIDGTWQPLEEEESNLIEQEHLNCFRGQQMQENFDIEVSKSIDGKDAVHSFKLSRNHVDWHSVDEVYLYSDATTSKIARTVTQKLGFSKASSSGTRLHRGYVEEATLEDKPSQTTHIVFVVHGIGQKMDQGRIIKNTAMMREAARKIEERHFSNHATHVEFLPVEWRSKLTLDGDTVDSITPDKVRGLRDMLNSSAMDIMYYTSPLYRDELVKGLQQELNRLYSLFCSRNPDFEEKGGKVSIVSHSLGCVITYDIMTGWNPVRLYEQLLQKEEELPDERWMSYEERHLLDELYITKRRLKEIEERLHGLKASSMTQTPALKFKVENFFCMGSPLAVFLALRGIRPGNTGSQDHILPREICNRLLNIFHPTDPVAYRLEPLILKHYSNISPVQIHWYNTSNPLPYEHMKPSFLNPAKEPTSVSENEGISTIPSPVTSPVLSRRHYGESITNIGKASILGAASIGKGLGGMLFSRFGRSSTTQSSETSKDSMEDEKKPVASPSATTVGTQTLPHSSSGFLDSAYFRLQESFFNLPQLLFPENVMQNKDNALVELDHRIDFELREGLVESRYWSAVTSHTAYWSSLDVALFLLTFMYKHEHDDDAKPNLDPI

SEQ ID NO: 27135 - protein, 872 aa, Homo sapiens
  REGION 1..872: note = ENSP00000350401
MNYPGRGSPRSPEHNGRGGGGGAWELGSDARPAFGGGVCCFEHLPGGDPDDGDVPLALLRGEPGLHLAPGTDDHNHHLALDPCLSDENYDFSSAESGSSLRYYSEGESGGGGSSLSLHPPQQPPLVPTNSGGGGATGGSPGERKRTRLGGPAARHRYEVVTELGPEEVRWFYKEDKKTWKPFIGYDSLRIELAFRTLLQTTGARPQGGDRDGDHVCSPTGPASSSGEDDDEDRACGFCQSTTGHEPEMVELVNIEPVCVRGGLYEVDVTQGECYPVYWNQADKIPVMRGQWFIDGTWQPLEEEESNLIEQEHLNCFRGQQMQENFDIEVSKSIDGKDAVHSFKLSRNHVDWHSVDEVYLYSDATTSKIARTVTQKLGFSKASSSGTRLHRGYVEEATLEDKPSQTTHIVFVVHGIGQKMDQGRIIKNTAMMREAARKIEERHFSNHATHVEFLPVEWRSKLTLDGDTVDSITPDKVRGLRDMLNSSAMDIMYYTSPLYRDELVKGLQQELNRLYSLFCSRNPDFEEKGGKVSIVSHSLGCVITYDIMTGWNPVRLYEQLLQKEEELPDERWMSYEERHLLDELYITKRRLKEIEERLHGLKASSMTQTPALKFKVENFFCMGSPLAVFLALRGIRPGNTGSQDHILPREICNRLLNIFHPTDPVAYRLEPLILKHYSNISPVQIHWYNTSNPLPYEHMKPSFLNPAKEPTSVSENEGISTIPSPVTSPVLSRRHYGESITNIGKASILGAASIGKGLGGMLFSRFGRSSTTQSSETSKDSMEDEKKPVASPSATTVGTQTLPHSSSGFLDSALELDHRIDFELREGLVESRYWSAVTSHTAYWSSLDVALFLLTFMYKHEHDDDAKPNLDPI

SEQ ID NO: 27136 - protein, 92 aa, Homo sapiens
  REGION 1..92: note = ENSP00000450785
MRGQWFIDGTWQPLEEEESNLIEQEHLNCFRGQQMQENFDIEVSKSIDGKDAVHSFKLSRNHVDWHSVDEVYLYSDATTSKIARTVTQKLGF

SEQ ID NO: 27137 - protein, 771 aa, Homo sapiens
  REGION 1..771: note = ENSP00000483405
MNYPGRGSPRSPEHNGRGGGGGAWELGSDARPAFGGGVCCFEHLPGGDPDDGDVPLALLRGEPGLHLAPGTDDHNHHLALDPCLSDENYDFSSAESGSSLRYYSEGESGGGGSSLSLHPPQQPPLVPTNSGGGLYEVDVTQGECYPVYWNQADKIPVMRGQWFIDGTWQPLEEEESNLIEQEHLNCFRGQQMQENFDIEVSKSIDGKDAVHSFKLSRNHVDWHSVDEVYLYSDATTSKIARTVTQKLGFSKASSSGTRLHRGYVEEATLEDKPSQTTHIVFVVHGIGQKMDQGRIIKNTAMMREAARKIEERHFSNHATHVEFLPVEWRSKLTLDGDTVDSITPDKVRGLRDMLNSSAMDIMYYTSPLYRDELVKGLQQELNRLYSLFCSRNPDFEEKGGKVSIVSHSLGCVITYDIMTGWNPVRLYEQLLQKEEELPDERWMSYEERHLLDELYITKRRLKEIEERLHGLKASSMTQTPALKFKVENFFCMGSPLAVFLALRGIRPGNTGSQDHILPREICNRLLNIFHPTDPVAYRLEPLILKHYSNISPVQIHWYNTSNPLPYEHMKPSFLNPAKEPTSVSENEGISTIPSPVTSPVLSRRHYGESITNIGKASILGAASIGKGLGGMLFSRFGRSSTTQSSETSKDSMEDEKKPVASPSATTVGTQTLPHSSSGFLDSAYFRLQESFFNLPQLLFPENVMQNKDNALVELDHRIDFELREGLVESRYWSAVTSHTAYWSSLDVALFLLTFMYKHEHDDDAKPNLDPI

SEQ ID NO: 27138 - protein, 169 aa, Homo sapiens
  REGION 1..169: note = ENSP00000447188
MAAESLPFSFGTLSSWELEAWYEDLQEVLSSDENGGTYVSPPGNEEEESKIFTTLDPASLAWLTEEEPEPAEVTSTSQSPHSPDSSQSSLAQEEEEEDQGRTRKRKQSGHSPARAGKQRMKEKEQENERKVAQLAEENERLKQEIERLTREVEATRRALIDRMVNLHQA

SEQ ID NO: 27139 - protein, 192 aa, Homo sapiens
  REGION 1..192: note = ENSP00000448665
MELVPATPHYPADVLFQTDPTAEMAAESLPFSFGTLSSWELEAWYEDLQEVLSSDENGGTYVSPPGNEEEESKIFTTLDPASLAWLTEEEPEPAEVTSTSQSPHSPDSSQSSLAQEEEEEDQGRTRKRKQSGHSPARAGKQRMKEKEQENERKVAQLAEENERLKQEIERLTREVEATRRALIDRMVNLHQA

SEQ ID NO: 27140 - protein, 169 aa, Homo sapiens; identical to SEQ ID NO: 27138
  REGION 1..169: note = ENSP00000340671

SEQ ID NO: 27141 - protein, 192 aa, Homo sapiens; identical to SEQ ID NO: 27139
  REGION 1..192: note = ENSP00000447803

SEQ ID NO: 27142 - protein, 145 aa, Homo sapiens
  REGION 1..145: note = ENSP00000447503
MELVPATPHYPADVLFQTDPTAEMAAESLPFSFGTLSSWELEAWYEDLQEVLSSDENGGTYVSPPGNEEEESKIFTTLDPASLAWLTEEEPEPAEVTSTSQSPHSPDSSQSSLAQEEEEEDQGRTRKRKQSGHSPARAGKQRMKE

SEQ ID NO: 27143 - protein, 232 aa, Homo sapiens
  REGION 1..232: note = ENSP00000307305
MPSLWDRFSSSSTSSSPSSLPRTPTPDRPPRSAWGSATREEGFDRSTSLESSDCESLDSSNSGFGPEEDTAYLDGVSLPDFELLSDPEDEHLCANLMQLLQESLAQARLGSRRPARLLMPSQLVSQVGKELLRLAYSEPCGLRGALLDVCVEQGKSCHSVGQLALDPSLVPTFQLTLVLRLDSRLWPKIQGLFSSANSPFLPGFSQSLTLSTGFRVIKKKLYSSEQLLIEEC

SEQ ID NO: 27144 - protein, 193 aa, Homo sapiens
  REGION 1..193: note = ENSP00000354830
MVATGSLSSKNPASISELLDCGYHPESLLSDFDYWDYVVPEPNLNEVIFEESTCQNLVKMLENCLSKSKQTKLGCSKVLVPEKLTQRIAQDVLRLSSTEPCGLRGCVMHVNLEIENVCKKLDRIVCDSSVVPTFELTLVFKQENCSWTSFRDFFFSRGRFSSGFRRTLILSSGFRLVKKKLYSLIGTTVIEGS

SEQ ID NO: 27145 - protein, 177 aa, Homo sapiens
  REGION 1..177: note = ENSP00000427301
MVATGSLSSKNPASISELLDCGYHPESLLSDFDYWDYVVPEPNLNEVIFEESTCQNLVKMLENCLSKSKQTKLGCSKVLVPEKLTQRIAQDVLRLSSTEPCGLRGCVMHVNLEIENVCKKLDRIVCDSSVVPTFELTLVFKQENCSWTSFRDFFFSRGRFSSGFRRTLILSSGFRLV

SEQ ID NO: 27146 - protein, 128 aa, Homo sapiens
  REGION 1..128: note = ENSP00000427040
MVATGSLSSKNPASISELLDCGYHPESLLSDFDYWDYVVPEPNLNEVIFEESTCQNLVKMLENCLSKSKQTKLGCSKVLVPEKLTQRIAQDVLRLSSTEPCGLRGCVMHVNLEIENVCKKLDRIVCDS

SEQ ID NO: 27147 - protein, 711 aa, Homo sapiens
  REGION 1..711: note = ENSP00000390590
MLDGPLFSEGPDSPRELQDEESGSCLWVQKSKLLVIEVKTISCHYSRRAPSRQPMDFQASHWARGFQNRTCGPRPGSPQPPPRRPWASRVLQEATNWRAGPLAEVRAREQEKRKAASQEREAKETERKRRKAGGARRSPPGRPRPEPRNAPRVAQLAGLPAPLRPERLAPVGRAPRPSAQPQSDPGSAWAGPWGGRRPGPPSYEAHLLLRGSAGTAPRRRWDRPPPYVAPPSYEGPHRTLGTKRGPGNSQVPTSSAPAATPARTDGGRTKKRLDPRIYRDVLGAWGLRQGQGLLGGSPGCGAARARPEPGKGVVEKSLGLAAADLNSGSDSHPQAKATGSAGTEIAPAGSATAAPCAPHPAPRSRHHLKGSREGKEGEQIWFPKCWIPSPKKQPPRHSQTLPRPWAPGGTGWRESLGLGEGAGPETLEGWKATRRAHTLPRSSQGLSRGEGVFVIDATCVVIRSQYVPTPRTQQVQLLPSGVTRVVGDSPSQSKPGKEEGEGATVFPSPCQKRLSSSRLLHQPGGGRGGEAEGGRPGDSTLEERTFRILGLPAPEVNLRDAPTQPGSPEHQALGPAASGAQGRAEGSEVAVVQRRAGRGWARTPGPYAGALREAVSRIRRHTAPDSDTDEAEELSVHSGSSDGSDTEAPGASWRNERTLPEVGNSSPEEDGKTAELSDSVGEILDVISQTEEVLFGVRDIRGTQQGNRKRQ

SEQ ID NO: 27148 - protein, 369 aa, Homo sapiens
  REGION 1..369: note = ENSP00000357920
MRPARHWETRFGARDFGGFQDCFFRDRLMDTARIAVVGAGVVGLSTAVCISKLVPRCSVTIISDKFTPDTTSDVAAGMLIPHTYPDTPIHTQKQWFRETFNHLFAIANSAEAGDAGVHLVSGWQIFQSTPTEEVPFWADVVLGFRKMTEAELKKFPQYVFGQAFTTLKCECPAYLPWLEKRIKGSGGWTLTRRIEDLWELHPSFDIVVNCSGLGSRQLAGDSKIFPVRGQVLQVQAPWVEHFIRDGSGLTYIYPGTSHVTLGGTRQKGDWNLSPDAENSREILSRCCALEPSLHGACNIREKVGLRPYRPGVRLQTELLARDGQRLPVVHHYGHGSGGISVHWGTALEAARLVSECVHALRTPIPKSNL

SEQ ID NO: 27149 - protein, 310 aa, Homo sapiens
  REGION 1..310: note = ENSP00000357919
MRPARHWETRFGARDFGGFQDCFFRDRLMDTARIAVVGAGVVGLSTAVCISKLVPRCSVTIISDKFTPDTTSDVAAGMLIPHTYPDTPIHTQKQWFRETFNHLFAIANSAEAGDAGVHLVSGIKGSGGWTLTRRIEDLWELHPSFDIVVNCSGLGSRQLAGDSKIFPVRGQVLQVQAPWVEHFIRDGSGLTYIYPGTSHVTLGGTRQKGDWNLSPDAENSREILSRCCALEPSLHGACNIREKVGLRPYRPGVRLQTELLARDGQRLPVVHHYGHGSGGISVHWGTALEAARLVSECVHALRTPIPKSNL

SEQ ID NO: 27150 - protein, 110 aa, Homo sapiens
  REGION 1..110: note = ENSP00000436642
MRPARHWETRFGARDFGGFQDCFFRDRLMDTARIAVVGAGVVGLSTAVCISKLVPRCSVTIISDKFTPDTTSDVAAGMLIPHTYPVGRYFRALRLKKCHSGLTWFWDFER

SEQ ID NO: 27151 - protein, 130 aa, Homo sapiens
  REGION 1..130: note = ENSP00000400309
MILIPRMLLVLFLLLPILSSAKAQVNPAICRYPLGMSGGQIPDEDITASSQWSESTAAKYGRLDSEEGDGAWCPEIPVEPDDLKEFLQIDLHTLHFITLVGTQGRHAGGHGIEFAPMYKINYSRDGTRWI

SEQ ID NO: 27152 - protein, 148 aa, Homo sapiens
  REGION 1..148: note = ENSP00000391310
MILIPRMLLVLFLLLPILSSAKAQVNPAICRYPLGMSGGQIPDEDITASSQWSESTAAKYGRLDSEEGDGAWCPEIPVEPDDLKEFLQIDLHTLHFITLVGTQGRHAGGHGIEFAPMYKINYSRDGTRWISWRNRHGKQVLDGNSNPY

SEQ ID NO: 27153 - protein, 855 aa, Homo sapiens
  REGION 1..855: note = ENSP00000356899
MILIPRMLLVLFLLLPILSSAKAQVNPAICRYPLGMSGGQIPDEDITASSQWSESTAAKYGRLDSEEGDGAWCPEIPVEPDDLKEFLQIDLHTLHFITLVGTQGRHAGGHGIEFAPMYKINYSRDGTRWISWRNRHGKQVLDGNSNPYDIFLKDLEPPIVARFVRFIPVTDHSMNVCMRVELYGCVWLDGLVSYNAPAGQQFVLPGGSIIYLNDSVYDGAVGYSMTEGLGQLTDGVSGLDDFTQTHEYHVWPGYDYVGWRNESATNGYIEIMFEFDRIRNFTTMKVHCNNMFAKGVKIFKEVQCYFRSEASEWEPNAISFPLVLDDVNPSARFVTVPLHHRMASAIKCQYHFADTWMMFSEITFQSDAAMYNNSEALPTSPMAPTTYDPMLKVDDSNTRILIGCLVAIIFILLAIIVIILWRQFWQKMLEKASRRMLDDEMTVSLSLPSDSSMFNNNRSSSPSEQGSNSTYDRIFPLRPDYQEPSRLIRKLPEFAPGEEESGCSGVVKPVQPSGPEGVPHYAEADIVNLQGVTGGNTYSVPAVTMDLLSGKDVAVEEFPRKLLTFKEKLGEGQFGEVHLCEVEGMEKFKDKDFALDVSANQPVLVAVKMLRADANKNARNDFLKEIKIMSRLKDPNIIHLLAVCITDDPLCMITEYMENGDLNQFLSRHEPPNSSSSDVRTVSYTNLKFMATQIASGMKYLSSLNFVHRDLATRNCLVGKNYTIKIADFGMSRNLYSGDYYRIQGRAVLPIRWMSWESILLGKFTTASDVWAFGVTLWETFTFCQEQPYSQLSDEQVIENTGEFFRDQGRQTYLPQPAICPDSVYKLMLSCWRRDTKNRPSFQEIHLLLLQQGDE

SEQ ID NO: 27154 - protein, 855 aa, Homo sapiens; identical to SEQ ID NO: 27153
  REGION 1..855: note = ENSP00000356898

SEQ ID NO: 27155 - protein, 166 aa, Homo sapiens
  REGION 1..166: note = ENSP00000417030
LKVDDSNTRILIGCLVAIIFILLAIIVIILWRQFWQKMLEKASRRMLDDEMTVSLSLPSDSSMFNNNRSSSPSEQGSNSTYDRIFPLRPDYQEPSRLIRKLPEFAPGEEESGEDDVVGRVSREKPQQASGRYDTPAPSSLHLFLVSANLLRSPHSLSRFGLPLLLA

SEQ ID NO: 27156 - protein, 171 aa, Homo sapiens
  REGION 1..171: note = ENSP00000396864
  VARIANT 1: note = Any amino acid
XIFILLAIIVIILWRQFWQKMLEKASRRMLDDEMTVSLSLPSDSSMFNNNRSSSPSEQGSNSTYDRIFPLRPDYQEPSRLIRKLPEFAPGEEESGCSGVVKPVQPSGPEGVPHYAEADIVNLQGVTGGNTYSVPAVTMDLLSGKDVAVEEFPRKLLTFKEKLGEGQFGEVS

SEQ ID NO: 27157 - protein, 660 aa, Homo sapiens
  REGION 1..660: note = ENSP00000353284
MSHVVVKNDPELDQQLANLDLNSEKQSGGASTASKGRYIPPHLRNREASKGFHDKDSSGWSCSKDKDAYSSFGSRDSRGKPGYFSERGSGSRGRFDDRGRSDYDGIGNRERPGFGRFERSGHSRWCDKSVEDDWSKPLPPSERLEQELFSGGNTGINFEKYDDIPVEATGSNCPPHIENFSDIDMGEIIMGNIELTRYTRPTPVQKHAIPIIKGKRDLMACAQTGSGKTAAFLLPILSQIYTDGPGEALKAVKENGRYGRRKQYPISLVLAPTRELAVQIYEEARKFSYRSRVRPCVVYGGADIGQQIRDLERGCHLLVATPGRLVDMMERGKIGLDFCKYLVLDEADRMLDMGFEPQIRRIVEQDTMPPKGVRHTMMFSATFPKEIQMLARDFLDEYIFLAVGRVGSTSENITQKVVWVEDLDKRSFLLDILGATGSDSLTLVFVETKKGADSLEDFLYHEGYACTSIHGDRSQRDREEALHQFRSGKSPILVATAVAARGLDISNVRHVINFDLPSDIEEYVHRIGRTGRVGNLGLATSFFNEKNMNITKDLLDLLVEAKQEVPSWLENMAYEHHYKGGSRGRSKSNRFSGGFGARDYRQSSGSSSSGFGASRGSSSRSGGGGYGNSRGFGGGGYGGFYNSDGYGGNYNSQGVDWWGN

SEQ ID NO: 27158 - protein, 224 aa, Homo sapiens
  REGION 1..224: note = ENSP00000398953
MSHVVVKNDPELDQQLANLDLNSEKQSGGASTASKGRYIPPHLRNREASKGFHDKDSSGWSCSKDKDAYSSFGSRDSRGKPGYFSERGSGSRGRFDDRGRSDYDGIGNRERPGFGRFERSGHSRWCDKSVEDDWSKPLPPSERLEQELFSGGNTGINFEKYDDIPVEATGSNCPPHIENFSDIDMGEIIMGNIELTRYTRPTPVQKHAIPIIKGKRDLMACAQT

SEQ ID NO: 27159 - protein, 660 aa, Homo sapiens; identical to SEQ ID NO: 27157
  REGION 1..660: note = ENSP00000336725

SEQ ID NO: 27160 - protein, 250 aa, Homo sapiens
  REGION 1..250: note = ENSP00000400377
MEIGRPRKDTWKLANLDLNSEKQSGGASTASKGRYIPPHLRNREASKGFHDKDSSGWSCSKDKDAYSSFGSRDSRGKPGYFSERGSGSRGRFDDRGRSDYDGIGNRERPGFGRFERSGHSRWCDKSVEDDWSKPLPPSERLEQELFSGGNTGINFEKYDDIPVEATGSNCPPHIENFSDIDMGEIIMGNIELTRYTRPTPVQKHAIPIIKGKRDLMACAQTGSGKTAAFLLPILSQIYTDGPGEALKAVK

SEQ ID NO: 27161 - protein, 483 aa, Homo sapiens
  REGION 1..483: note = ENSP00000247003
MAGFAELGLSSWLVEQCRQLGLKQPTPVQLGCIPAILEGRDCLGCAKTGSGKTAAFVLPILQKLSEDPYGIFCLVLTPTRELAYQIAEQFRVLGKPLGLKDCIIVGGMDMVAQALELSRKPHVVIATPGRLADHLRSSNTFSIKKIRFLVMDEADRLLEQGCTDFTVDLEAILAAVPARRQTLLFSATLTDTLRELQGLATNQPFFWEAQAPVSTVEQLDQRYLLVPEKVKDAYLVHLIQRFQDEHEDWSIIIFTNTCKTCQILCMMLRKFSFPTVALHSMMKQKERFAALAKFKSSIYRILIATDVASRGLDIPTVQVVINHNTPGLPKIYIHRVGRTARAGRQGQAITLVTQYDIHLVHAIEEQIKKKLEEFSVEEAEVLQILTQVNVVRRECEIKLEAAHFDEKKEINKRKQLILEGKDPDLEAKRKAELAKIKQKNRRFKEKVEETLKRQKAGRAGHKGRPPRTPSGSHSGPVPSQGLV

SEQ ID NO: 27162 - protein, 118 aa, Homo sapiens
  REGION 1..118: note = ENSP00000470440
MAGFAELGLSSWLVEQCRQLGLKQPTPVQLGCIPAILEGRDCLGCAKTGSGKTAAFVLPILQKLSEDPYGIFCLVLTPTRIKQDGPGAVAHTCNPSTLGAPGSWPTRSQSSSGSWGSL

SEQ ID NO: 27163 - protein, 166 aa, Homo sapiens
  REGION 1..166: note = ENSP00000471292
MAGFAELGLSSWLVEQCRQLGLKQPTPVQLGCIPAILEGRDCLGCAKTGSGKTAAFVLPILQKLSEDPYGIFCLVLTPTRGPAELNKMAPVQWLTPVIPALWELQGAGLPDRRAVPGPGEASRAERLHHRRWHGHGGPGAGALSETTRGHRHAGAPGRSPAQLQHF

SEQ ID NO: 27164 - protein, 41 aa, Homo sapiens
  REGION 1..41: note = ENSP00000472289
MAGFAELGLSSWLVEQCRQLGLKQPTPVQLGCIPAILEEAV

SEQ ID NO: 27165 - protein, 112 aa, Homo sapiens
  REGION 1..112: note = ENSP00000472084
MAGFAELGLSSWLVEQCRQLGLKQPTPVQLGCIPAILEGRDCLGCAKTGSGKTAAFVLPILQKLSEDPYGIFCLVLTPTRHGGPGAGALSETTRGHRHAGAPGRSPAQLQHF

SEQ ID NO: 27166 - protein, 41 aa, Homo sapiens; identical to SEQ ID NO: 27164
  REGION 1..41: note = ENSP00000469086

SEQ ID NO: 27167 - protein, 166 aa, Homo sapiens; identical to SEQ ID NO: 27163
  REGION 1..166: note = ENSP00000487048

SEQ ID NO: 27168 - protein, 321 aa, Homo sapiens
  REGION 1..321: note = ENSP00000336972
MALSGSTPAPCWEEDECLDYYGMLSLHRMFEVVGGQLTECELELLAFLLDEAPGAAGGLARARSGLELLLELERRGQCDESNLRLLGQLLRVLARHDLLPHLARKRRRPVSPERYSYGTSSSSKRTEGSCRRRRQSSSSANSQQGSPPTKRQRRSRGRPSGGARRRRRGAPAAPQQQSEPARPSSEGKVTCDIRLRVRAEYCEHGPALEQGVASRRPQALARQLDVFGQATAVLRSRDLGSVVCDIKFSELSYLDAFWGDYLSGALLQALRGVFLTEALREAVGREAVRLLVSVDEADYEAGRRRLLLMEEEGGRRPTEAS

SEQ ID NO: 27169 - protein, 326 aa, Homo sapiens
  REGION 1..326: note = ENSP00000470082
MALSGSTPAPCWEEDECLDYYGMLSLHRMFEVVGGQLTECELELLAFLLDEAPGAAGGLARARSGLELLLELERRGQCDESNLRLLGQLLRVLARHDLLPHLARKRRRPVSPERYSYGTSSSSKRTEGSCRRRRQSSSSANSQQGQWETGSPPTKRQRRSRGRPSGGARRRRRGAPAAPQQQSEPARPSSEGKVTCDIRLRVRAEYCEHGPALEQGVASRRPQALARQLDVFGQATAVLRSRDLGSVVCDIKFSELSYLDAFWGDYLSGALLQALRGVFLTEALREAVGREAVRLLVSVDEADYEAGRRRLLLMEEEGGRRPTEAS

SEQ ID NO: 27170 - protein, 326 aa, Homo sapiens; identical to SEQ ID NO: 27169
  REGION 1..326: note = ENSP00000471512

SEQ ID NO: 27171 - protein, 204 aa, Homo sapiens
  REGION 1..204: note = ENSP00000469233
MALSGSTPAPCWEEDECLDYYGMLSLHRMFEVVGGQLTECELELLAFLLDEAPGAAGGLARARSGLELLLELERRGQCDESNLRLLGQLLRVLARHDLLPHLARKRRRPVSPERYSYGTSSSSKRTEGSCRRRRQSSSSANSQQGQWETGSPPTKRQRRSRGRPSGGARRRRRGAPAAPQQQSEPARPSSEGKVTCDGETGSER

SEQ ID NO: 27172 - protein, 117 aa, Homo sapiens
  REGION 1..117: note = ENSP00000469898
MALSGSTPAPCWEEDECLDYYGMLSLHRMFEVVGGQLTECELELLAFLLDEAPGAAGGLARARSGLELLLELERRGQCDESNLRLLGQLLRVLARHDLLPHLARKRRRPVSPERYSY

SEQ ID NO: 27173 - protein, 529 aa, Homo sapiens
  REGION 1..529: note = ENSP00000265036
MEHRIVGPGPYRATRLWNETVELFRAKMPLRKHRCRFKSYEHCFTAAEAVDWLHELLRCSQNFGPEVTRKQTVQLLKKFLKNHVIEDIKGKWGEEDFEDNRHLYRFPPSSPLKPYPKKPPNQKDVIKFPEWNDLPPGTSQENIPVRPVVMNSEMWYKRHSIAIGEVPACRLVHRRQLTEANVEEIWKSMTLSYLQKILGLDSLEEVLDVKLVNSKFIIHNVYSVSKQGVVILDDKSKELPHWVLSAMKCLANWPNCSDLKQPMYLGFEKDVFKTIADYYGHLKEPLLTFHLFDAFVSVLGLLQKEKVAVEAFQICCLLLPPENRRKLQLLMRMMARICLNKEMPPLCDGFGTRTLMVQTFSRCILCSKDEVDLDELLAARLVTFLMDNYQEILKVPLALQTSIEERVAHLRRVQIKYPGADMDITLSAPSFCRQISPEEFEYQRSYGSQEPLAALLEEVITDAKLSNKEKKKKLKQFQKSYPEVYQERFPTPESAALLFPEKPKPKPQLLMWALKKPFQPFQRTRSFRM

SEQ ID NO: 27174 - protein, 467 aa, Homo sapiens
  REGION 1..467: note = ENSP00000389101
MEHRIVGPGPYRATRLWNETVELFRAKMPLRKHRCRFKSYEHCFTAAEAVDWLHELLRCSQNFGPEVTRKQTVQLLKKFLKNHVIEDIKGKWGEEDFEDNRHLYRFPPSSPLKPYPKKPPNQKDVIKFPEWNDLPPGTSQENIPVRPVVMNSEMWYKRHSIAIGEVPACRLVHRRQLTEANVEEIWKSMTLSYLQKILGLDSLEEVLDVKLVNSKFIIHNVYSVSKQGVVILDDKSKELPHWVLSAMKCLANWPNCSDLKQPMYLGFEKDVFKTIADYYGHLKEPLLTFHLFDAFVSVLGLLQKEKVAVEAFQICCLLLPPENRRKLQLLMRMMARICLNKEMPPLCDGFGTRTLMVQTFSRCILCSKDEVDLDELLAARLVTFLMDNYQEILKVPLALQTSIEERVAHLRRVQFQKSYPEVYQERFPTPESAALLFPEKPKPKPQLLMWALKKPFQPFQRTRSFRM

SEQ ID NO: 27175 - protein, 22 aa, Homo sapiens
  REGION 1..22: note = ENSP00000427527
MEHRIVGPGPYRATRLGLILLS

SEQ ID NO: 27176 - protein, 36 aa, Homo sapiens
  REGION 1..36: note = ENSP00000426979
MEHRIVGPGPYRATRLFLFLRPGAVAHSCNSSTLGG

SEQ ID NO: 27177 - protein, 511 aa, Homo sapiens
  REGION 1..511: note = ENSP00000241051
MATVQEKAAALNLSALHSPAHRPPGFSVAQKPFGATYVWSSIINTLQTQVEVKKRRHRLKRHNDCFVGSEAVDVIFSHLIQNKYFGDVDIPRAKVVRVCQALMDYKVFEAVPTKVFGKDKKPTFEDSSCSLYRFTTIPNQDSQLGKENKLYSPARYADALFKSSDIRSASLEDLWENLSLKPANSPHVNISATLSPQVINEVWQEETIGRLLQLVDLPLLDSLLKQQEAVPKIPQPKRQSTMVNSSNYLDRGILKAYSDSQEDEWLSAAIDCLEYLPDQMVVEISRSFPEQPDRTDLVKELLFDAIGRYYSSREPLLNHLSDVHNGIAELLVNGKTEIALEATQLLLKLLDFQNREEFRRLLYFMAVAANPSEFKLQKESDNRMVVKRIFSKAIVDNKNLSKGKTDLLVLFLMDHQKDVFKIPGTLHKIVSVKLMAIQNGRDPNRDAGYIYCQRIDQRDYSNNTEKTTKDELLNLLKTLDEDSKLSAKEKKKLLGQFYKCHPDIFIEHFGD

SEQ ID NO: 27178 - protein, 502 aa, Homo sapiens
  REGION 1..502: note = ENSP00000308971
MRGLCEFYWQEFGIKGFSVAQKPFGATYVWSSIINTLQTQVEVKKRRHRLKRHNDCFVGSEAVDVIFSHLIQNKYFGDVDIPRAKVVRVCQALMDYKVFEAVPTKVFGKDKKPTFEDSSCSLYRFTTIPNQDSQLGKENKLYSPARYADALFKSSDIRSASLEDLWENLSLKPANSPHVNISATLSPQVINEVWQEETIGRLLQLVDLPLLDSLLKQQEAVPKIPQPKRQSTMVNSSNYLDRGILKAYSDSQEDEWLSAAIDCLEYLPDQMVVEISRSFPEQPDRTDLVKELLFDAIGRYYSSREPLLNHLSDVHNGIAELLVNGKTEIALEATQLLLKLLDFQNREEFRRLLYFMAVAANPSEFKLQKESDNRMVVKRIFSKAIVDNKNLSKGKTDLLVLFLMDHQKDVFKIPGTLHKIVSVKLMAIQNGRDPNRDAGYIYCQRIDQRDYSNNTEKTTKDELLNLLKTLDEDSKLSAKEKKKLLGQFYKCHPDIFIEHFGD

SEQ ID NO: 27179 - protein, 470 aa, Homo sapiens
  REGION 1..470: note = ENSP00000363071
MSQAYSSSQRVSSYRRTFGGAPGFPLGSPLSSPVFPRAGFGSKGSSSSVTSRVYQVSRTSGGAGGLGSLRASRLGTTRTPSSYGAGELLDFSLADAVNQEFLTTRTNEKVELQELNDRFANYIEKVRFLEQQNAALAAEVNRLKGREPTRVAELYEEELRELRRQVEVLTNQRARVDVERDNLLDDLQRLKAKLQEEIQLKEEAENNLAAFRADVDAATLARIDLERRIESLNEEIAFLKKVHEEEIRELQAQLQEQQVQVEMDMSKPDLTAALRDIRAQYETIAAKNISEAEEWYKSKVSDLTQAANKNNDALRQAKQEMMEYRHQIQSYTCEIDALKGTNDSLMRQMRELEDRFASEASGYQDNIARLEEEIRHLKDEMARHLREYQDLLNVKMALDVEIATYRKLLEGEESRINLPIQTYSALNFRETSPEQRGSEVHTKKTVMIKTIETRDGEVVSEATQQQHEVL

SEQ ID NO: 27180 - protein, 496 aa, Homo sapiens
  REGION 1..496: note = ENSP00000339587
MFAKATRNFLREVDADGDLIAVSNLNDSDKLQLLSLVTKKKRFWCWQRPKYQFLSLTLGDVLIEDQFPSPVVVESDFVKYEGKFANHVSGTLETALGKVKLNLGGSSRVESQSSFGTLRKQEVDLQQLIRDSAERTINLRNPVLQQVLEGRNEVLCVLTQKITTMQKCVISEHMQVEEKCGGIVGIQTKTVQVSATEDGNVTKDSNVVLEIPAATTIAYGVIELYVKLDGQFEFCLLRGKQGGFENKKRIDSVYLDPLVFREFAFIDMPDAAHGISSQDGPLSVLKQATLLLERNFHPFAELPEPQQTALSDIFQAVLFDDELLMVLEPVCDDLVSGLSPTVAVLGELKPRQQQDLVAFLQLVGCSLQGGCPGPEDAGSKQLFMTAYFLVSALAEMPDSAAALLGTCCKLQIIPTLCHLLRALSDDGVSDLEDPTLTPLKDTERFGIVQRLFASADISLERLKSSVKAVILKDSKVFPLLLCITLNGLCALGREHS

SEQ ID NO: 27181 - protein, 332 aa, Homo sapiens
  REGION 1..332: note = ENSP00000387119
MQKCVISEHMQVEEKCGGIVGIQTKTVQVSATEDGNVTKDSNVVLEIPAATTIAYGVIELYVKLDGQFEFCLLRGKQGGFENKKRIDSVYLDPLVFREFAFIDMPDAAHGISSQDGPLSVLKQATLLLERNFHPFAELPEPQQTALSDIFQAVLFDDELLMVLEPVCDDLVSGLSPTVAVLGELKPRQQQDLVAFLQLVGCSLQGGCPGPEDAGSKQLFMTAYFLVSALAEMPDSAAALLGTCCKLQIIPTLCHLLRALSDDGVSDLEDPTLTPLKDTERFGIVQRLFASADISLERLKSSVKAVILKDSKVFPLLLCITLNGLCALGREHS

SEQ ID NO: 27182 - protein, 496 aa, Homo sapiens; identical to SEQ ID NO: 27180
  REGION 1..496: note = ENSP00000386670

SEQ ID NO: 27183 - protein, 55 aa, Homo sapiens
  REGION 1..55: note = ENSP00000395540
QLFMTAYFLVSALAEMPDSAAALLGTCCKLQIIPTLCHLVSNLPGGTLEWIGMGK

SEQ ID NO: 27184 - protein, 155 aa, Homo sapiens
  REGION 1..155: note = ENSP00000389874
  VARIANT 1: note = Any amino acid
XAATTIAYGVIELYVKLDGQFEFCLLRGKQGGFENKKRIDSVYLDPLVFREFAFIDMPDAAHGISSQDGPLSVLKQATLLLERNFHPFAELPEPQQTALSDIFQAVLFDDELLMVLEPVKDILGRSSSLTLSCTNGESHTSCQPSSHPDSVSSLS

SEQ ID NO: 27185 - protein, 192 aa, Homo sapiens
  REGION 1..192: note = ENSP00000398445
  VARIANT 1: note = Any amino acid
XEEKCGGIVGIQTKTVQVSATEDGNVTKDSNVVLEIPAATTIAYGVIELYVKLDGQFEFCLLRGKQGGFENKKRIDSVYLDPLVFREFAFIDMPDAAHGISSQDGPLSVLKQATLLLERNFHPFAELPEPQQTALSDIFQAVLFDDELLMVLEPVQKDILGRSSSLTLSCTNGESHTSCQPSSHPDSVSSLS

SEQ ID NO: 27186 - protein, 216 aa, Homo sapiens
  REGION 1..216: note = ENSP00000414090
VKYEGKFANHVSGTLETALGKVKLNLGGSSRVESQSSFGTLRKQEVDLQQLIRDSAERTINLRNPVLQQVLEGRNEVLCVLTQKITTMQKCVISEHMQVEEKCGGIVGIQTKTVQVSATEDGNVTKDSNVVLEIPAATTIAYGVIELYVKLDGQFAPLCLPWWSCPVLLMASGECVTPPQLTESSAFSEGSKVASRTRRELTLSTWTPWSFESLHS

SEQ ID NO: 27187 - protein, 18 aa, Homo sapiens
  REGION 1..18: note = ENSP00000413963
MQKCVISEHMQVEEKCGG

SEQ ID NO: 27188 - protein, 332 aa, Homo sapiens; identical to SEQ ID NO: 27181
  REGION 1..332: note = ENSP00000401332

SEQ ID NO: 27189 - protein, 58 aa, Homo sapiens
  REGION 1..58: note = ENSP00000446515
MAKERGLISPSDFAQLQKYMEYSTKKVSDVLKLFEDGEMAKYVQGDAIGYEGFQQFLK

SEQ ID NO: 27190 - protein, 21 aa, Homo sapiens
  REGION 1..21: note = ENSP00000449178
MAKERGLISPSDFAQLQKYME

SEQ ID NO: 27191 - protein, 735 aa, Homo sapiens
  REGION 1..735: note = ENSP00000328405
MAKERGLISPSDFAQLQKYMEYSTKKVSDVLKLFEDGEMAKYVQGDAIGYEGFQQFLKIYLEVDNVPRHLSLALFQSFETGHCLNETNVTKDVVCLNDVSCYFSLLEGGRPEDKLEFTFKLYDTDRNGILDSSEVDKIILQMMRVAEYLDWDVSELRPILQEMMKEIDYDGSGSVSQAEWVRAGATTVPLLVLLGLEMTLKDDGQHMWRPKRFPRPVYCNLCESSIGLGKQGLSCNLCKYTVHDQCAMKALPCEVSTYAKSRKDIGVQSHVWVRGGCESGRCDRCQKKIRIYHSLTGLHCVWCHLEIHDDCLQAVGHECDCGLLRDHILPPSSIYPSVLASGPDRKNSKTSQKTMDDLNLSTSEALRIDPVPNTHPLLVFVNPKSGGKQGQRVLWKFQYILNPRQVFNLLKDGPEIGLRLFKDVPDSRILVCGGDGTVGWILETIDKANLPVLPPVAVLPLGTGNDLARCLRWGGGYEGQNLAKILKDLEMSKVVHMDRWSVEVIPQQTEEKSDPVPFQIINNYFSIGVDASIAHRFHIMREKYPEKFNSRMKNKLWYFEFATSESIFSTCKKLEESLTVEICGKPLDLSNLSLEGIAVLNIPSMHGGSNLWGDTRRPHGDIYGINQALGATAKVITDPDILKTCVPDLSDKRLEVVGLEGAIEMGQIYTKLKNAGRRLAKCSEITFHTTKTLPMQIDGEPWMQTPCTIKITHKNQMPMLMGPPPRSTNFFGFLS

SEQ ID NO: 27192 - protein, 44 aa, Homo sapiens
  REGION 1..44: note = ENSP00000452353
MAKERGLISPSDFAQLQKYMEYSTKKVSDVLKLFEDGEMAKYVQ

SEQ ID NO: 27193 - protein, 94 aa, Homo sapiens
  REGION 1..94: note = ENSP00000450977
MAKERGLISPSDFAQLQKYMESSSVALSSVLLRCAHDWKWEEWEMGRCQKKIRIYHSLTGLHCARSRLSTHLRYTWTACSSSQRRGVKSDSTKK

SEQ ID NO: 27194 - protein, 545 aa, Homo sapiens
  REGION 1..545: note = ENSP00000451743
MAKERGLISPSDFAQLQKYMEYSTKKGGRPEDKLEFTFKLYDTDRNGILDSSEVDKIILQMMRVAEYLDWDVSELRPILQEMMKEIDYDGSGSVSQAEWVRAGATTVPLLVLLGLEMTLKDDGQHMWRPKRFPRPVYCNLCESSIGLGKQGLSCNLCKYTVHDQCAMKALPCEVSTYAKSRKDIGVQSHVWVRGGCESGRCDRCQKKIRIYHSLTGLHCVWCHLEIHDDCLQAVGHECDCGLLRDHILPPSSIYPSVLASGPDRKNSKTSQKTMDDLNLSTSEALRIDPVPNTHPLLVFVNPKSGGKQGQRVLWKFQYILNPRQVFNLLKDGPEIGLRLFKDVPDSRILVCGGDGTVGWILETIDKANLPVLPPVAVLPLGTGNDLARCLRWGGGYEGQNLAKILKDLEMSKVVHMDRWSVEVIPQQTEEKSDPVPFQIINNYFSIGVDASIAHRFHIMREKYPEKFNSRMKNKLWYFEFATSESIFSTCKKLEESLTVEICGKPLDLSNLSLEGIAVLNIPSMHGGSNLWGDTRRPHGDIYGIN

SEQ ID NO: 27195 - protein, 118 aa, Homo sapiens
  REGION 1..118: note = ENSP00000446605
MAKERGLISPSDFAQLQKYMEYSTKKVSDVLKLFEDGEMAKYVQGDAIGYEGFQQFLKIYLEVDNVPRHLSLALFQSFETGHCLNETNVTKDVVCLNDVSCYFSLLEGGRPEDKLEWS

SEQ ID NO: 27196 - protein, 118 aa, Homo sapiens; identical to SEQ ID NO: 27195
  REGION 1..118: note = ENSP00000448565

SEQ ID NO: 27197 - protein, 147 aa, Homo sapiens
  REGION 1..147: note = ENSP00000447050
MAKERGLISPSDFAQLQKYMEYSTKKVSDVLKLFEDGEMAKYVQGDAIGYEGFQQFLKIYLEVDNVPRHLSLALFQSFETGHCLNETNVTKDVVCLNDVSCYFSLLEGGRPEDKLEFTFKLYDTDRNGILDSSEVDKIILQMMRVAE

SEQ ID NO: 27198 - protein, 44 aa, Homo sapiens; identical to SEQ ID NO: 27192
  REGION 1..44: note = ENSP00000450608

SEQ ID NO: 27199 - protein, 735 aa, Homo sapiens; identical to SEQ ID NO: 27191
  REGION 1..735: note = ENSP00000450359

SEQ ID NO: 27200 - protein, 247 aa, Homo sapiens
  REGION 1..247: note = ENSP00000385792
MAKERGLISPSDFAQLQKYMEYSTKKVSDVLKLFEDGEMAKYVQGDAIGYEGFQQFLKIYLEVDNVPRHLSLALFQSFETGHCLNETNVTKDVVCLNDVSCYFSLLEGGRPEDKLEFTFKLYDTDRNGILDSSEVDKIILQMMRVAEYLDWDVSELRPILQEMMKEIDYDGSGSVSQAEWVRAGATTVPLLVLLGLEMTLKDDGQHMWRPKRFPRPVYCNLCESSIGLGKQGLSCNRPITCVGARRL

SEQ ID NO: 27201 - protein, 107 aa, Homo sapiens
  REGION 1..107: note = ENSP00000450999
MAKERGLISPSDFAQLQKYMEYSTKKVSDVLKLFEDGEMAKYVQGDAIGYEGFQQFLKIYLEVDNVPRHLSLALFQSFETGHCLNETNVTKDVVCLNDVSCYFSLLE

SEQ ID NO: 27202 - protein, 44 aa, Homo sapiens; identical to SEQ ID NO: 27192
  REGION 1..44: note = ENSP00000451814

SEQ ID NO: 27203 - protein, 116 aa, Homo sapiens
  REGION 1..116: note = ENSP00000402307
MAKERGLISPSDFAQLQKYMEYSTKKVSDVLKLFEDGEMAKYVQGDAIGYEGFQQFLKIYLEVDNVPRHLSLALFQSFETGHCLNETNVTKDVVCLNDVSCYFSLLEGGRPEDKLE

SEQ ID NO: 27204 - protein, 133 aa, Homo sapiens
  REGION 1..133: note = ENSP00000451266
MAKERGLISPSDFAQLQKYMEYSTKKVSDVLKLFEDGEMAKYVQGDAIGYEGFQQFLKIYLEVDNVPRHLSLALFQSFETGHCLNETNVTKDVVCLNDVSCYFSLLEGGRPEDKLEFTFKLYDTDRNGILDSS

SEQ ID NO: 27205 - protein, 133 aa, Homo sapiens; identical to SEQ ID NO: 27204
  REGION 1..133: note = ENSP00000447460

SEQ ID NO: 27206 - protein, 116 aa, Homo sapiens; identical to SEQ ID NO: 27203
  REGION 1..116: note = ENSP00000449923

SEQ ID NO: 27207 - protein, 97 aa, Homo sapiens
  REGION 1..97: note = ENSP00000451330
CNLCESSIGLGKQGLSCNLCKYTVHDQCAMKALPCEVSTYAKSRKDIGPLPPLGPAQTLPDKELPFSPRSNHMCGCEEAVSPGAATAVRKRSGSTTV

SEQ ID NO: 27208 - protein, 202 aa, Homo sapiens
  REGION 1..202: note = ENSP00000451518
LRIDPVPNTHPLLVFVNPKSGGKQGQRLRLFKDVPDSRILVCGGDGTVGWILETIDKANLPVLPPVAVLPLGTGNDLARCLRWGGGYEGQNLAKILKDLEMSKVVHMDRWSVEVIPQQTEEKSDPVPFQIINNYFSIGVDASIAHRFHIMREKYPEKFNSRMKNKLWYFEFATSESIFSTCKKLEESLTVEICGKPLDLSNL

SEQ ID NO: 27209 - protein, 735 aa, Homo sapiens; identical to SEQ ID NO: 27191
  REGION 1..735: note = ENSP00000377703

SEQ ID NO: 27210 - protein, 804 aa, Homo sapiens [sequence omitted]

SEQ ID NO: 27211 - protein, 803 aa, Homo sapiens
  REGION 1..803: note = ENSP00000384909
MTNQEKWAHLSPSEFSQLQKYAEYSTKKLKDVLEEFHGNGVLAKYNPEGKQDILNQTIDFEGFKLFMKTFLEAELPDDFTAHLFMSFSNKFPHSSPMVKSKPALLSGGLRMNKGAITPPRTTSPANTCSPEVIHLKDIVCYLSLLERGRPEDKLEFMFRLYDTDGNGFLDSSELENIISQMMHVAEYLEWDVTELNPILHEMMEEIDYDHDGTVSLEEWIQGGMTTIPLLVLLGLENNVKDDGQHVWRLKHFNKPAYCNLCLNMLIGVGKQGLCCSFCKYTVHERCVARAPPSCIKTYVKSKRNTDVMHHYWVEGNCPTKCDKCHKTVKCYQGLTGLHCVWCQITLHNKCASHLKPECDCGPLKDHILPPTTICPVVLTLPTSGVSVPEERQSTVKKEKSGSQQPNKVIDKNKMQRANSVTVDGQGLQVTPVPGTHPLLVFVNPKSGGKQGERIYRKFQYLLNPRQVYSLSGNGPMPGLNFFRDVPDFRVLACGGDGTVGWVLDCIEKANVGKHPPVAILPLGTGNDLARCLRWGGGYEGENLMKILKDIENSTEIMLDRWKFEVIPNDKDEKGDPVPYSIINNYFSIGVDASIAHRFHIMREKHPEKFNSRMKNKFWYFEFGTSETFSATCKKLHESVEIECDGVQIDLINISLEGIAILNIPSMHGGSNLWGESKKRRSHRRIEKKGSDKRTTVTDAKELKFASQDLSDQLLEVVGLEGAMEMGQIYTGLKSAGRRLAQCSCVVIRTSKSLPMQIDGEPWMQTPCTIKITHKNQAPMLMGPPPKTGLFCSLVKRTRNRSKE

SEQ ID NO: 27212 - protein, 796 aa, Homo sapiens
  REGION 1..796: note = ENSP00000385031
MTNQEKWAHLSPSEFSQLQKYAEYSTKKLKDVLEEFHGNGVLAKYNPEGTIDFEGFKLFMKTFLEAELPDDFTAHLFMSFSNKFPHSSPMVKSKPALLSGGLRMNKGAITPPRTTSPANTCSPEVIHLKDIVCYLSLLERGRPEDKLEFMFRLYDTDGNGFLDSSELENIISQMMHVAEYLEWDVTELNPILHEMMEEIDYDHDGTVSLEEWIQGGMTTIPLLVLLGLENNVKDDGQHVWRLKHFNKPAYCNLCLNMLIGVGKQGLCCSFCKYTVHERCVARAPPSCIKTYVKSKRNTDVMHHYWVEGNCPTKCDKCHKTVKCYQGLTGLHCVWCQITLHNKCASHLKPECDCGPLKDHILPPTTICPVVLTLPTSGVSVPEERQSTVKKEKSGSQQPNKVIDKNKMQRANSVTVDGQGLQVTPVPGTHPLLVFVNPKSGGKQGERIYRKFQYLLNPRQVYSLSGNGPMPGLNFFRDVPDFRVLACGGDGTVGWVLDCIEKANVGKHPPVAILPLGTGNDLARCLRWGGGYEGENLMKILKDIENSTEIMLDRWKFEVIPNDKDEKGDPVPYSIINNYFSIGVDASIAHRFHIMREKHPEKFNSRMKNKFWYFEFGTSETFSATCKKLHESVEIECDGVQIDLINISLEGIAILNIPSMHGGSNLWGESKKRRSHRRIEKKGSDKRTTVTDAKELKFASQDLSDQLLEVVGLEGAMEMGQIYTGLKSAGRRLAQCSCVVIRTSKSLPMQIDGEPWMQTPCTIKITHKNQAPMLMGPPPKTGLFCSLVKRTRNRSKE

SEQ ID NO: 27213 - protein, 773 aa, Homo sapiens
  REGION 1..773: note = ENSP00000386066
MTNQEKWAHLSPSEFSQLQKYAEYSTKKLKDVLEEFHGNGVLAKYNPEGKQDILNQTIDFEGFKLFMKTFLEAELPDDFTAHLFMSFSNKFPHSSPMVKSKPALLSGGLRMNKGAITPPRTTSPANTCSPEVIHLKDIVCYLSLLERGRPEDKLEFMFRLYDTDGNGFLDSSELENIISQMMHVAEYLEWDVTELNPILHEMMEEIDYDHDGTVSLEEWIQGGMTTIPLLVLLGLENNVKDDGQHVWRLKHFNKPAYCNLCLNMLIGVGKQGLCCSFCKYTVHERCVARAPPSCIKTYVKSKRNTDVMHHYWVEGNCPTKCDKCHKTVKCYQGLTGLHCVWCQITLHNKCASHLKPECDCGPLKDHILPPTTICPVVLQTLPTSGVSVPEERQSTVKKEKSGSQQPNKVIDKNKMQRANSVTVDGQGLQVTPVPGTHPLLVFVNPKSGGKQGERIYRKFQYLLNPRQVYSLSGNGPMPGLNFFRDVPDFRVLACGGDGTVGWVLDCIEKANVGKHPPVAILPLGTGNDLARCLRWGGGYEGENLMKILKDIENSTEIMLDRWKFEVIPNDKDEKGDPVPYSIINNYFSIGVDASIAHRFHIMREKHPEKFNSRMKNKFWYFEFGTSETFSATCKKLHESVEIECDGVQIDLINISLEGIAILNIPSMHGGSNLWGESKKRRSHRRIEKKGSDKRTTVTDAKELKFASQDLSDQLLEVVGLEGAMEMGQIYTGLKSAGRRLAQCSCVVIRTSKSLPMQIDGEPWMQTPCTVSTE

SEQ ID NO: 27214 - protein, 75 aa, Homo sapiens
  REGION 1..75: note = ENSP00000405569
MTNQEKWAHLSPSEFSQLQKYAEYSTKKLKDVLEEFHGNGVLAKYNPEGKQDILNQTIDFEGFKLFMKTFLEAEL

SEQ ID NO: 27215 - protein, 804 aa, Homo sapiens [sequence omitted]

SEQ ID NO: 27216 - protein, 1220 aa, Homo sapiens
  REGION 1..1220: note = ENSP00000337572
MAGAGGQHHPPGAAGGAAAGAGAAVTSAAASAGPGEDSSDSEAEQEGPQKLIRKVSTSGQIRTKTSIKEGQLLKQTSSFQRWKKRYFKLRGRTLYYAKDSKSLIFDEVDLSDASVAEASTKNANNSFTIITPFRRLMLCAENRKEMEDWISSLKSVQTREPYEVAQFNVEHFSGMHNWYACSHARPTFCNVCRESLSGVTSHGLSCEVCKFKAHKRCAVRATNNCKWTTLASIGKDIIEDEDGVAMPHQWLEGNLPVSAKCAVCDKTCGSVLRLQDWKCLWCKTMVHTACKDLYHPICPLGQCKVSIIPPIALNSTDSDGFCRATFSFCVSPLLVFVNSKSGDNQGVKFLRRFKQLLNPAQVFDLMNGGPHLGLRLFQKFDNFRILVCGGDGSVGWVLSEIDKLNLNKQCQLGVLPLGTGNDLARVLGWGGSYDDDTQLPQILEKLERASTKMLDRWSIMTYELKLPPKASLLPGPPEASEEFYMTIYEDSVATHLTKILNSDEHAVVISSAKTLCETVKDFVAKVEKTYDKTLENAVVADAVASKCSVLNEKLEQLLQALHTDSQAAPVLPGLSPLIVEEDAVESSSEESLGESKEQLGDDVTKPSSQKAVKPREIMLRANSLKKAVRQVIEEAGKVMDDPTVHPCEPANQSSDYDSTETDESKEEAKDDGAKESITVKTAPRSPDARASYGHSQTDSVPGPAVAASKENLPVLNTRIICPGLRAGLAASIAGSSIINKMLLANIDPFGATPFIDPDLDSVDGYSEKCVMNNYFGIGLDAKISLEFNNKREEHPEKCRSRTKNLMWYGVLGTRELLQRSYKNLEQRVQLECDGQYIPLPSLQGIAVLNIPSYAGGTNFWGGTKEDDIFAAPSFDDKILEVVAIFDSMQMAVSRVIKLQHHRIAQCRTVKITIFGDEGVPVQVDGEAWVQPPGIIKIVHKNRAQMLTRDRAFESTLKSWEDKQKCDSGKPVLRTHLYIHHAIDLATEEVSQMQLCSQAAEELITRICDAATIHCLLEQELAHAVNACSHALNKANPRCPESLTRDTATEIAINVKALYNETESLLVGRVPLQLESPHEERVSNALHSVEVELQKLTEIPWLYYILHPNEDEEPPMDCTKRNNRSTVFRIVPKFKKEKVQKQKTSSQPVQKWGTEEVAAWLDLLNLGEYKDIFIRHDIRGAELLHLERRDLKDLGIPKVGHVKRILQGIKELGRSTPQSEV

SEQ ID NO: 27217 - protein, 1164 aa, Homo sapiens
  REGION 1..1164: note = ENSP00000261491
MAGAGGQHHPPGAAGGAAAGAGAAVTSAAASAGPGEDSSDSEAEQEGPQKLIRKVSTSGQIRTKTSIKEGQLLKQTSSFQRWKKRYFKLRGRTLYYAKDSKSLIFDEVDLSDASVAEASTKNANNSFTIITPFRRLMLCAENRKEMEDWISSLKSVQTREPYEVAQFNVEHFSGMHNWYACSHARPTFCNVCRESLSGVTSHGLSCEVCKFKAHKRCAVRATNNCKWTTLASIGKDIIEDEDGVAMPHQWLEGNLPVSAKCAVCDKTCGSVLRLQDWKCLWCKTMVHTACKDLYHPICPLGQCKVSIIPPIALNSTDSDGFCRATFSFCVSPLLVFVNSKSGDNQGVKFLRRFKQLLNPAQVFDLMNGGPHLGLRLFQKFDNFRILVCGGDGSVGWVLSEIDKLNLNKQCQLGVLPLGTGNDLARVLGWGGSYDDDTQLPQILEKLERASTKMLDRWSIMTYELKLPPKASLLPGPPEASEEFYMTIYEDSVATHLTKILNSDEHAVVISSAKTLCETVKDFVAKVEKTYDKTLENAVVADAVASKCSVLNEKLEQLLQALHTDSQAAPVLPGLSPLIVEEDAVESSSEESLGESKEQLGDDVTKPSSQKAVKPREIMLRANSLKKAVRQVIEEAGKVMDDPTVHPCEPANQSSDYDSTETDESKEEAKDDGAKESITVKTAPRSPDARASYGHSQTDSVPGPAVAASKENLPVLNTRIICPGLRAGLAASIAGSSIINKMLLANIDPFGATPFIDPDLDSVDGYSEKCVMNNYFGIGLDAKISLEFNNKREEHPEKCRSRTKNLMWYGVLGTRELLQRSYKNLEQRVQLECDGQYIPLPSLQGIAVLNIPSYAGGTNFWGGTKEDDIFAAPSFDDKILEVVAIFDSMQMAVSRVIKLQHHRIAQCRTVKITIFGDEGVPVQVDGEAWVQPPGIIKIVHKNRAQMLTRDRAFESTLKSWEDKQKCDSGKPVLRTHLYIHHAIDLATEEVSQMQLCSQAAEELITRICDAATIHCLLEQELAHAVNACSHALNKANPRCPESLTRDTATEIAINVKALYNETESLLVGRVPLQLESPHEERVSNALHSVEVELQKLTEIPWLYYILHPNEDEEPPMDCTKRNNRSTVFRIVPKFKKEKVQKQKTSSQPGSGDTESGSCEANSPGN

SEQ ID NO: 27218 - protein, 62 aa, Homo sapiens
  REGION 1..62: note = ENSP00000482250
AAAGAGAAVTSAAASAGPGEDSSDSEAEQEGPQKLIRKVSTSGQIRTKGFIMLARLVTSELK

SEQ ID NO: 27219 - protein, 1084 aa, Homo sapiens
  REGION 1..1084: note = ENSP00000485809
MLCAENRKEMEDWISSLKSVQTREPYEVAQFNVEHFSGMHNWYACSHARPTFCNVCRESLSGVTSHGLSCEVCKFKAHKRCAVRATNNCKWTTLASIGKDIIEDEDGVAMPHQWLEGNLPVSAKCAVCDKTCGSVLRLQDWKCLWCKTMVHTACKDLYHPICPLGQCKVSIIPPIALNSTDSDGFCRATFSFCVSPLLVFVNSKSGDNQGVKFLRRFKQLLNPAQVFDLMNGGPHLGLRLFQKFDNFRILVCGGDGSVGWVLSEIDKLNLNKQCQLGVLPLGTGNDLARVLGWGGSYDDDTQLPQILEKLERASTKMLDRWSIMTYELKLPPKASLLPGPPEASEEFYMTIYEDSVATHLTKILNSDEHAVVISSAKTLCETVKDFVAKVEKTYDKTLENAVVADAVASKCSVLNEKLEQLLQALHTDSQAAPVLPGLSPLIVEEDAVESSSEESLGESKEQLGDDVTKPSSQKAVKPREIMLRANSLKKAVRQVIEEAGKVMDDPTVHPCEPANQSSDYDSTETDESKEEAKDDGAKESITVKTAPRSPDARASYGHSQTDSVPGPAVAASKENLPVLNTRIICPGLRAGLAASIAGSSIINKMLLANIDPFGATPFIDPDLDSVDGYSEKCVMNNYFGIGLDAKISLEFNNKREEHPEKCRSRTKNLMWYGVLGTRELLQRSYKNLEQRVQLECDGQYIPLPSLQGIAVLNIPSYAGGTNFWGGTKEDDIFAAPSFDDKILEVVAIFDSMQMAVSRVIKLQHHRIAQCRTVKITIFGDEGVPVQVDGEAWVQPPGIIKIVHKNRAQMLTRDRAFESTLKSWEDKQKCDSGKPVLRTHLYIHHAIDLATEEVSQMQLCSQAAEELITRICDAATIHCLLEQELAHAVNACSHALNKANPRCPESLTRDTATEIAINVKALYNETESLLVGRVPLQLESPHEERVSNALHSVEVELQKLTEIPWLYYILHPNEDEEPPMDCTKRNNRSTVFRIVPKFKKEKVQKQKTSSQPVQKWGTEEVAAWLDLLNLGEYKDIFIRHDIRGAELLHLERRDLKDLGIPKVGHVKRILQGIKELGRSTPQSEV

SEQ ID NO: 27220 - protein, 1028 aa, Homo sapiens
  REGION 1..1028: note = ENSP00000486838
MLCAENRKEMEDWISSLKSVQTREPYEVAQFNVEHFSGMHNWYACSHARPTFCNVCRESLSGVTSHGLSCEVCKFKAHKRCAVRATNNCKWTTLASIGKDIIEDEDGVAMPHQWLEGNLPVSAKCAVCDKTCGSVLRLQDWKCLWCKTMVHTACKDLYHPICPLGQCKVSIIPPIALNSTDSDGFCRATFSFCVSPLLVFVNSKSGDNQGVKFLRRFKQLLNPAQVFDLMNGGPHLGLRLFQKFDNFRILVCGGDGSVGWVLSEIDKLNLNKQCQLGVLPLGTGNDLARVLGWGGSYDDDTQLPQILEKLERASTKMLDRWSIMTYELKLPPKASLLPGPPEASEEFYMTIYEDSVATHLTKILNSDEHAVVISSAKTLCETVKDFVAKVEKTYDKTLENAVVADAVASKCSVLNEKLEQLLQALHTDSQAAPVLPGLSPLIVEEDAVESSSEESLGESKEQLGDDVTKPSSQKAVKPREIMLRANSLKKAVRQVIEEAGKVMDDPTVHPCEPANQSSDYDSTETDESKEEAKDDGAKESITVKTAPRSPDARASYGHSQTDSVPGPAVAASKENLPVLNTRIICPGLRAGLAASIAGSSIINKMLLANIDPFGATPFIDPDLDSVDGYSEKCVMNNYFGIGLDAKISLEFNNKREEHPEKCRSRTKNLMWYGVLGTRELLQRSYKNLEQRVQLECDGQYIPLPSLQGIAVLNIPSYAGGTNFWGGTKEDDIFAAPSFDDKILEVVAIFDSMQMAVSRVIKLQHHRIAQCRTVKITIFGDEGVPVQVDGEAWVQPPGIIKIVHKNRAQMLTRDRAFESTLKSWEDKQKCDSGKPVLRTHLYIHHAIDLATEEVSQMQLCSQAAEELITRICDAATIHCLLEQELAHAVNACSHALNKANPRCPESLTRDTATEIAINVKALYNETESLLVGRVPLQLESPHEERVSNALHSVEVELQKLTEIPWLYYILHPNEDEEPPMDCTKRNNRSTVFRIVPKFKKEKVQKQKTSSQPALPLHSVLHLLWPTFAL

SEQ ID NO: 27221 - protein, 89 aa, Homo sapiens
  REGION 1..89: note = ENSP00000486329
MLCAENRKEMEDWISSLKSVQTREPYEVAQFNVEHFSGMHNWYACSHARPTFCNVCRESLSGVTSHGLSCEGTHCLQRFIPSNMSTWSM

SEQ ID NO: 27222 - protein, 1100 aa, Homo sapiens
  REGION 1..1100: note = ENSP00000445114
MLCAENRKEMEDWISSLKSVQTREPYEVAQFNVEHFSGMHNWYACSHARPTFCNVCRESLSGVTSHGLSCEVCKFKAHKRCAVRATNNCKWTTLASIGKDIIEDEDGVAMPHQWLEGNLPVSAKCAVCDKTCGSVLRLQDWKCLWCKTMVHTACKDLYHPICPLGQCKVSIIPPIALNSTDSDGFCRATFSFCVSPLLVFVNSKSGDNQGVKFLRRFKQLLNPAQVFDLMNGGPHLGLRLFQKFDNFRILVCGGDGSVGWVLSEIDKLNLNKQCQLGVLPLGTGNDLARVLGWGGSYDDDTQLPQILEKLERASTKMLDRWSIMTYELKLPPKASLLPGPPEASEEFYMTIYEDSVATHLTKILNSDEHAVVISSAKTLCETVKDFVAKVEKTYDKTLENAVVADAVASKCSVLNEKLEQLLQALHTDSQAAPVLPGLSPLIVEEDAVESSSEESLGESKEQLGDDVTKPSSQKAVKPREIMLRANSLKKAVRQVIEEAGKVMDDPTVHPCEPANQSSDYDSTETDESKEEAKDDGAKESITVKTAPRSPDARASYGHSQTDSVPGPAVAASKENLPVLNTRIICPGLRAGLAASIAGSSIINKMLLANIDPFGATPFIDPDLDSVDGYSEKCVMNNYFGIGLDAKISLEFNNKREEHPEKCRSRTKNLMWYGVLGTRELLQRSYKNLEQRVQLECDGQYIPLPSLQGIAVLNIPSYAGGTNFWGGTKEDDIFAAPSFDDKILEVVAIFDSMQMAVSRVIKLQHHRIAQCRTVKITIFGDEGVPVQVDGEAWVQPPGIIKIVHKNRAQMLTRDRAFESTLKSWEDKQKCDSGKPVLRTHLYIHHAIDLATEEVSQMQLCSQAAEELITRICDAATIHCLLEQELAHAVNACSHALNKANPRCPESLTRDTATEIAINVKALYNETESLLVGRVPLQLESPHEERVSNALHSVEVELQKLTEIPWLYYILHPNEDEEPPMDCTKRNNRSTVFRIVPKFKKEKVQKQKTSSQPVQKWGTEEVAAWLDLLNLGEYKDIFIRHDIRGAELLHLERRDLKNTVGEKRDTKENGKHMDLGIPKVGHVKRILQGIKELGRSTPQSEV

SEQ ID NO: 27223 - protein, 1164 aa, Homo sapiens; identical to SEQ ID NO: 27217
  REGION 1..1164: note = ENSP00000368576

SEQ ID NO: 27224 - protein, 734 aa, Homo sapiens
  REGION 1..734: note = ENSP00000392161
MLHHIEEPCSLGAHAAVIVPPTWIIKVKKPQNSLKASNRKKKRTSFKRKASKRGMEQENKGRPFVIKPISSPLMKPLLVFVNPKSGGNQGTKVLQMFMWYLNPRQVFDLSQEGPKDALELYRKVPNLRILACGGDGTVGWILSILDELQLSPQPPVGVLPLGTGNDLARTLNWGGGYTDEPVSKILCQVEDGTVVQLDRWNLHVERNPDLPPEELEDGVCKLPLNVFNNYFSLGFDAHVTLEFHESREANPEKFNSRFRNKMFYAGAAFSDFLQRSSRDLSKHVKVVCDGTDLTPKIQELKFQCIVFLNIPRYCAGTMPWGNPGDHHDFEPQRHDDGYIEVIGFTMASLAALQVGGHGERLHQCREVMLLTYKSIPMQVDGEPCRLAPAMIRISLRNQANMVQKSKRRTSMPLLNDPQSVPDRLRIRVNKISLQDYEGFHYDKEKLREASISDWLRTIAGELVQSFGAIPLGILVVRGDCDLETCRMYIDRLQEDLQSVSSGSQRVHYQDHETSFPRALSAQRLSPRWCFLDATSADRFYRIDRSQEHLHFVMEISQDEIFILDPDMVVSQPAGTPPGMPDLVVEQASGSPVSSEDHAILQAVIAGDLMKLIESYKNGGSLLIQGPDHCSLLHYAAKTGNGEIVKYILDHGPSELLDMADSETGETALHKAACQRNRAVCQLLVDAGASLRKTDSKGKTPQERAQQAGDPDLAAYLESRQNYKVIGHEDLETAV

SEQ ID NO: 27225 - protein, 1065 aa, Homo sapiens
  REGION 1..1065: note = ENSP00000288490
MDAAGRGCHLLPLPAARGPARAPAAAAAAAASPPGPCSGAACAPSAAAGAGAMNPSSSAGEEKGATGGSSSSGSGAGSCCLGAEGGADPRGAGSAAAAGAAALDEPAAAGQKEKDEALEEKLRNLTFRKQVSYRKAISRAGLQHLAPAHPLSLPVANGPAKEPRATLDWSENAVNGEHLWLETNVSGDLCYLGEENCQVRFAKSALRRKCAVCKIVVHTACIEQLEKINFRCKPTFREGGSRSPRENFVRHHWVHRRRQEGKCKQCGKGFQQKFSFHSKEIVAISCSWCKQAFHNKVTCFMLHHIEEPCSLGAHAAVIVPPTWIIKVKKPQNSLKASNRKKKRTSFKRKASKRGMEQENKGRPFVIKPISSPLMKPLLVFVNPKSGGNQGTKVLQMFMWYLNPRQVFDLSQEGPKDALELYRKVPNLRILACGGDGTVGWILSILDELQLSPQPPVGVLPLGTGNDLARTLNWGGGYTDEPVSKILCQVEDGTVVQLDRWNLHVERNPDLPPEELEDGVCKLPLNVFNNYFSLGFDAHVTLEFHESREANPEKFNSRFRNKMFYAGAAFSDFLQRSSRDLSKHVKVVCDGTDLTPKIQELKFQCIVFLNIPRYCAGTMPWGNPGDHHDFEPQRHDDGYIEVIGFTMASLAALQVGGHGERLHQCREVMLLTYKSIPMQVDGEPCRLAPAMIRISLRNQANMVQKSKRRTSMPLLNDPQSVPDRLRIRVNKISLQDYEGFHYDKEKLREASISDWLRTIAGELVQSFGAIPLGILVVRGDCDLETCRMYIDRLQEDLQSVSSGSQRVHYQDHETSFPRALSAQRLSPRWCFLDDRSQEHLHFVMEISQDEIFILDPDMVVSQPAGTPPGMPDLVVEQASGISDWWNPALRKRMLSDSGLGMIAPYYEDSDLKDLSHSRVLQSPVSSEDHAILQAVIAGDLMKLIESYKNGGSLLIQGPDHCSLLHYAAKTGNGEIVKYILDHGPSELLDMADSETGETALHKAACQRNRAVCQLLVDAGASLRKTDSKGKTPQERAQQAGDPDLAAYLESRQNYKVIGHEDLETAV

SEQ ID NO: 27226 - protein, 1047 aa, Homo sapiens
  REGION 1..1047: note = ENSP00000399131
MDAAGRGCHLLPLPAARGPARAPAAAAAAAASPPGPCSGAACAPSAAAGAGAMNPSSSAGEEKGATGGSSSSGSGAGSCCLGAEGGADPRGAGSAAAAGAAALDEPAAAGQKEKDEALEEKLRNLTFRKQVSYRKAISRAGLQHLAPAHPLSLPVANGPAKEPRATLDWSENAVNGEHLWLETNVSGDLCYLGEENCQVRFAKSALRRKCAVCKIVVHTACIEQLEKINFRCKPTFREGGSRSPRENFVRHHWVHRRRQEGKCKQCGKGFQQKFSFHSKEIVAISCSWCKQAFHNKVTCFMLHHIEEPCSLGAHAAVIVPPTWIIKVKKPQNSLKASNRKKKRTSFKRKASKRGMEQENKGRPFVIKPISSPLMKPLLVFVNPKSGGNQGTKVLQMFMWYLNPRQVFDLSQEGPKDALELYRKVPNLRILACGGDGTVGWILSILDELQLSPQPPVGVLPLGTGNDLARTLNWGGGYTDEPVSKILCQVEDGTVVQLDRWNLHVERNPDLPPEELEDGVCKLPLNVFNNYFSLGFDAHVTLEFHESREANPEKFNSRFRNKMFYAGAAFSDFLQRSSRDLSKHVKVVCDGTDLTPKIQELKFQCIVFLNIPRYCAGTMPWGNPGDHHDFEPQRHDDGYIEVIGFTMASLAALQVGGHGERLHQCREVMLLTYKSIPMQVDGEPCRLAPAMIRISLRNQANMVQKSKRRTSMPLLNDPQSVPDRLRIRVNKISLQDYEGFHYDKEKLREASIPLGILVVRGDCDLETCRMYIDRLQEDLQSVSSGSQRVHYQDHETSFPRALSAQRLSPRWCFLDDRSQEHLHFVMEISQDEIFILDPDMVVSQPAGTPPGMPDLVVEQASGISDWWNPALRKRMLSDSGLGMIAPYYEDSDLKDLSHSRVLQSPVSSEDHAILQAVIAGDLMKLIESYKNGGSLLIQGPDHCSLLHYAAKTGNGEIVKYILDHGPSELLDMADSETGETALHKAACQRNRAVCQLLVDAGASLRKTDSKGKTPQERAQQAGDPDLAAYLESRQNYKVIGHEDLETAV

SEQ ID NO: 27227 - protein, 1078 aa, Homo sapiens
  REGION 1..1078: note = ENSP00000396078
MDAAGRGCHLLPLPAARGPARAPAAAAAAAASPPGPCSGAACAPSAAAGAGAMNPSSSAGEEKGATGGSSSSGSGAGSCCLGAEGGADPRGAGSAAAAGAAALDEPAAAGQKEKDEALEEKLRNLTFRKQVSYRKAISRAGLQHLAPAHPLSLPVANGPAKEPRATLDWSENAVNGEHLWLETNVSGDLCYLGEENCQVRFAKSALRRKCAVCKIVVHTACIEQLEKINFRCKPTFREGGSRSPRENFVRHHWVHRRRQEGKCKQCGKGFQQKFSFHSKEIVAISCSWCKQAFHNKVTCFMLHHIEEPCSLGAHAAVIVPPTWIIKVKKPQNSLKASNRKKKRTSFKRKASKRGMEQENKGRPFVIKPISSPLMKPLLVFVNPKSGGNQGTKVLQMFMWYLNPRQVFDLSQEGPKDALELYRKVPNLRILACGGDGTVGWILSILDELQLSPQPPVGVLPLGTGNDLARTLNWGGGYTDEPVSKILCQVEDGTVVQLDRWNLHVERNPDLPPEELEDGVCKLPLNVFNNYFSLGFDAHVTLEFHESREANPEKFNSRFRNKMFYAGAAFSDFLQRSSRDLSKHVKVVCDGTDLTPKIQELKFQCIVFLNIPRYCAGTMPWGNPGDHHDFEPQRHDDGYIEVIGFTMASLAALQVGGHGERLHQCREVMLLTYKSIPMQVDGEPCRLAPAMIRISLRNQANMVQKSKRRTSMPLLNDIHQVQTADLRRVSAPPGSFTIPQSVPDRLRIRVNKISLQDYEGFHYDKEKLREASIPLGILVVRGDCDLETCRMYIDRLQEDLQSVSSGSQRVHYQDHETSFPRALSAQRLSPRWCFLDATSADRFYRIDRSQEHLHFVMEISQDEIFILDPDMVVSQPAGTPPGMPDLVVEQASGISDWWNPALRKRMLSDSGLGMIAPYYEDSDLKDLSHSRVLQSPVSSEDHAILQAVIAGDLMKLIESYKNGGSLLIQGPDHCSLLHYAAKTGNGEIVKYILDHGPSELLDMADSETGETALHKAACQRNRAVCQLLVDAGASLRKTDSKGKTPQERAQQAGDPDLAAYLESRQNYKVIGHEDLETAV

SEQ ID NO: 27228 - protein, 932 aa, Homo sapiens
  REGION 1..932: note = ENSP00000479053
RKAISRAGLQHLAPAHPLSLPVANGPAKEPRATLDWSENAVNGEHLWLETNVSGDLCYLGEENCQVRFAKSALRRKCAVCKIVVHTACIEQLEKINFRCKPTFREGGSRSPRENFVRHHWVHRRRQEGKCKQCGKGFQQKFSFHSKEIVAISCSWCKQAFHNKVTCFMLHHIEEPCSLGAHAAVIVPPTWIIKVKKPQNSLKASNRKKKRTSFKRKASKRGMEQENKGRPFVIKPISSPLMKPLLVFVNPKSGGNQGTKVLQMFMWYLNPRQVFDLSQEGPKDALELYRKVPNLRILACGGDGTVGWILSILDELQLSPQPPVGVLPLGTGNDLARTLNWGGGYTDEPVSKILCQVEDGTVVQLDRWNLHVERNPDLPPEELEDGVCKLPLNVFNNYFSLGFDAHVTLEFHESREANPEKFNSRFRNKMFYAGAAFSDFLQRSSRDLSKHVKVVCDGTDLTPKIQELKFQCIVFLNIPRYCAGTMPWGNPGDHHDFEPQRHDDGYIEVIGFTMASLAALQVGGHGERLHQCREVMLLTYKSIPMQVDGEPCRLAPAMIRISLRNQANMVQKSKRRTSMPLLNDPQSVPDRLRIRVNKISLQDYEGFHYDKEKLREASISDWLRTIAGELVQSFGAIPLGILVVRGDCDLETCRMYIDRLQEDLQSVSSGSQRVHYQDHETSFPRALSAQRLSPRWCFLDDRSQEHLHFVMEISQDEIFILDPDMVVSQPAGTPPGMPDLVVEQASGISDWWNPALRKRMLSDSGLGMIAPYYEDSDLKDLSHSRVLQSPVSSEDHAILQAVIAGDLMKLIESYKNGGSLLIQGPDHCSLLHYAAKTGNGEIVKYILDHGPSELLDMADSETGETALHKAACQRNRAVCQLLVDAGASLRKTDSKGKTPQERAQQAGDPDLAAYLESRQNYKVIGHEDLETAV

SEQ ID NO: 27229 - protein, 73 aa, Homo sapiens
  REGION 1..73: note = ENSP00000403529
MSWIKEGELSLWERFCANIIKAGPMPKHIAFIMDGNRRYAKKCQVERQEGHSQGFNKLAELLAFSPLRLCGGV

SEQ ID NO: 27230 - protein, 198 aa, Homo sapiens
  REGION 1..198: note = ENSP00000399177
MSWIKEGELSLWERFCANIIKAGPMPKHIAFIMDGNRRYAKKCQVERQEGHSQGFNKLAETLRWCLNLGILEVTVYAFSIENFKRSKSEVDGLMDLARQKFSRLMEEKEKLQKHGVCIRVLGDLHLLPLDLQELIAQAVQATKNYNKCFLNVCFAYTSRHEISNAVREMAWGVEQGLLDPSRDRFHHIGQASLELLTS

SEQ ID NO: 27231 - protein, 299 aa, Homo sapiens
  REGION 1..299: note = ENSP00000434984
MSWIKEGELSLWERFCANIIKAGPMPKHIAFIMDGNRRYAKKCQVERQEGHSQGFNKLAETLRWCLNLGILEVTVYAFSIENFKRSKSEVDGLMDLARQKFSRLMEEKEKLQKHGVCIRVLGDLHLLPLDLQELIAQAVQATKNYNNDISESLLDKCLYTNRSPHPDILIRTSGEVRLSDFLLWQTSHSCLVFQPVLWPEYTFWNLFEAILQFQMNHSVLQKARDMYAEERKRQQLERDQATVTEQLLREGLQASGDAQLRRTRLHKLSARREERVQGFLQALELKRADWLARLGTASA

SEQ ID NO: 27232 - protein, 333 aa, Homo sapiens
  REGION 1..333: note = ENSP00000236342
MSWIKEGELSLWERFCANIIKAGPMPKHIAFIMDGNRRYAKKCQVERQEGHSQGFNKLAETLRWCLNLGILEVTVYAFSIENFKRSKSEVDGLMDLARQKFSRLMEEKEKLQKHGVCIRVLGDLHLLPLDLQELIAQAVQATKNYNKCFLNVCFAYTSRHEISNAVREMAWGVEQGLLDPSDISESLLDKCLYTNRSPHPDILIRTSGEVRLSDFLLWQTSHSCLVFQPVLWPEYTFWNLFEAILQFQMNHSVLQKARDMYAEERKRQQLERDQATVTEQLLREGLQASGDAQLRRTRLHKLSARREERVQGFLQALELKRADWLARLGTASA

SEQ ID NO: 27233 - protein, 294 aa, Homo sapiens
  REGION 1..294: note = ENSP00000434219
MSWIKEGELSLWERFCANIIKAGPMPKHIAFIMDGNRRYAKKCQVERQEGHSQGFNKLAETLRWCLNLGILEVTVYAFSIENFKRSKSEVDGLMDLARQKFSRLMEEKCFLNVCFAYTSRHEISNAVREMAWGVEQGLLDPSDISESLLDKCLYTNRSPHPDILIRTSGEVRLSDFLLWQTSHSCLVFQPVLWPEYTFWNLFEAILQFQMNHSVLQKARDMYAEERKRQQLERDQATVTEQLLREGLQASGDAQLRRTRLHKLSARREERVQGFLQALELKRADWLARLGTASA

SEQ ID NO: 27234 - protein, 209 aa, Homo sapiens
  REGION 1..209: note = ENSP00000363300
MSWIKEGELSLWERFCANIIKAGPMPKHIAFIMDGNRRYAKKCQVERQEGHSQGFNKLAETLRWCLNLGILEVTVYAFSIENFKRSKSEVDGLMDLARQKFSRLMEEKEKLQKHGVCIRVLGDLHLLPLDLQELIAQAVQATKNYNKCFLNVCFAYTSRHEISNAVREMAWGVEQGLLDPRYPELFCMVIVKENRPGPAWQLTPVILAH

SEQ ID NO: 27235 - protein, 334 aa, Homo sapiens
  REGION 1..334: note = ENSP00000353104
MSWIKEGELSLWERFCANIIKAGPMPKHIAFIMDGNRRYAKKCQVERQEGHSQGFNKLAETLRWCLNLGILEVTVYAFSIENFKRSKSEVDGLMDLARQKFSRLMEEKEKLQKHGVCIRVLGDLHLLPLDLQELIAQAVQATKNYNKCFLNVCFAYTSRHEISNAVREMAWGVEQGLLDPSDISESLLDKCLYTNRSPHPDILIRTSGEVRLSDFLLWQTSHSCLVFQPVLWPEYTFWNLFEAILQFQMNHSVLQQKARDMYAEERKRQQLERDQATVTEQLLREGLQASGDAQLRRTRLHKLSARREERVQGFLQALELKRADWLARLGTASA

SEQ ID NO: 27236 - protein, 165 aa, Homo sapiens
  REGION 1..165: note = ENSP00000436119
MSWIKEGELSLWERFCANIIKAGPMPKHIAFIMDGNRRYAKKCQVERQEGHSQGFNKLAETLRWCLNLGILEVTVYAFSIENFKRSKSEVDGLMDLARQKFSRLMEEKEKLQKHGVCIRVLGDLHLLPLDLQELIAQAVQATKNYNKCFLNVCFAYTSRHEISNA

SEQ ID NO: 27237 - protein, 130 aa, Homo sapiens
  REGION 1..130: note = ENSP00000436764
MSWIKEGELSLWERFCANIIKAGPMPKHIAFIMDGNRRYAKKCQVERQEGHSQGFNKLAETLRWCLNLGILEVTVYAFSIENFKRSKSEVDGLMDLARQKFSRLMEEKEKLQKHGVCIRVLGDLHLLPLD

SEQ ID NO: 27238 - protein, 122 aa, Homo sapiens
  REGION 1..122: note = ENSP00000434185
MSWIKEGELSLWERFCANIIKAGPMPKHIAFIMDGNRRYAKKCQVERQEGHSQGFNKLAETLRWCLNLGILEVTVYAFSIENFKRSKSEVDGLMDLARQKFSRLMEEKEKLQKHGVCIRVLG

SEQ ID NO: 27239 - protein, 71 aa, Homo sapiens
  REGION 1..71: note = ENSP00000431407
MSWIKEGELSLWERFCANIIKAGPMPKHIAFIMDGNRRYAKKCQVERQEGHSQGFNKLAETLRWCLNLGIL

SEQ ID NO: 27240 - protein, 85 aa, Homo sapiens
  REGION 1..85: note = ENSP00000433976
MSWIKEGELSLWERFCANIIKAGPMPKHIAFIMDGNRRYAKKCQVERQEGHSQGFNKLAETLRWCLNLGILEVTVYAFSIENFKR

SEQ ID NO: 27241 - protein, 173 aa, Homo sapiens
  REGION 1..173: note = ENSP00000405604
MSWIKEGELSLWERFCANIIKAGPMPKHIAFIMDGNRRYAKKCQVERQEGHSQGFNKLAETLRWCLNLGILEVTVYAFSIENFKRSKSEVDGLMDLARQKFSRLMEEKEKLQKHGVCIRVLGDLHLLPLDLQELIAQAVQATKNYNKCFLNVCFAYTSRHEISNAVREMAWGV

SEQ ID NO: 27242 - protein, 60 aa, Homo sapiens
  REGION 1..60: note = ENSP00000433491
MSWIKEGELSLWERFCANIIKAGPMPKHIAFIMDGNRRYAKKCQVERQEGHSQGFNKLAE

SEQ ID NO: 27243 - protein, 216 aa, Homo sapiens
  REGION 1..216: note = ENSP00000397584
MSWIKEGELSLWERFCANIIKAGPMPKHIAFIMDGNRRYAKKCQVERQEGHSQGFNKLAETLRWCLNLGILEVTVYAFSIENFKRSKSEVDGLMDLARQKFSRLMEEKCFLNVCFAYTSRHEISNAVREMAWGVEQGLLDPSDISESLLDKCLYTNRSPHPDILIRTSGEVRLSDFLLWQTSHSCLVFQPVLWPEYTFWNLFEAILQFQMNHSVLQ

SEQ ID NO: 27244 - protein, 169 aa, Homo sapiens
  REGION 1..169: note = ENSP00000399781
LARQKFSRLMEEKEKLQKHGVCIRVLGDLHLLPLDLQELIAQAVQATKNYNNDISESLLDKCLYTNRSPHPDILIRTSGEVRLSDFLLWQQKARDMYAEERKRQQLERDQATVTEQLLREGLQASGDAQLRRTRLHKLSARREERVQGFLQALELKRADWLARLGTASA

SEQ ID NO: 27245 - protein, 162 aa, Homo sapiens
  REGION 1..162: note = ENSP00000393961
  VARIANT 1: note = Any amino acid
XHLLPLDLQELIAQAVQATKNYNKCFLNVCFAYTSRHEISNAVREMAWGVEQGLLDPSDISESLLDKCLYTNRSPHPDILIRTSGEVRLSDFLLWQTSHSCLVFQPVLWPEYTFWNLFEAILQFQMNHSVLQHPGSLLTKAWKKPFQQDGELYGNCSSPKSS

SEQ ID NO: 27246 - protein, 187 aa, Homo sapiens
  REGION 1..187: note = ENSP00000396308
MVGSLNCIVAVSQNMGIGKNGDLPWPPLRNEFRYFQRMTTTSSVEGKQNLVIMGKKTWFSIPEKNRPLKGRINLVLSRELKEPPQGAHFLSRSLDDALKLTEQPELANKVDMVWIVGGSSVYKEAMNHPGHLKLFVTRIMQDFESDTFFPEIDLEKYKLLPEYPGVLSDVQEEKGIKYKFEVYEKND

SEQ ID NO: 27247 - protein, 187 aa, Homo sapiens; identical to SEQ ID NO: 27246
  REGION 1..187: note = ENSP00000426474

SEQ ID NO: 27248 - protein, 129 aa, Homo sapiens
  REGION 1..129: note = ENSP00000422732
MVGSLNCIVAVSQNMGIGKNGDLPWPPLRNEFRYFQRMTTTSSVEGKQNLVIMGKKTWFSIPEKNRPLKGRINLVLSRELKEPPQGAHFLSRSLDDALKLTEQPELANKVDMVWIVGGSSVYKIPRCSL

SEQ ID NO: 27249 - protein, 135 aa, Homo sapiens
  REGION 1..135: note = ENSP00000421334
MGKKTWFSIPEKNRPLKGRINLVLSRELKEPPQGAHFLSRSLDDALKLTEQPELANKVDMVWIVGGSSVYKEAMNHPGHLKLFVTRIMQDFESDTFFPEIDLEKYKLLPEYPGVLSDVQEEKGIKYKFEVYEKND

SEQ ID NO: 27250 - protein, 199 aa, Homo sapiens
  REGION 1..199: note = ENSP00000364919
MPEQSNDYRVAVFGAGGVGKSSLVLRFVKGTFRESYIPTVEDTYRQVISCDKSICTLQITDTTGSHQFPAMQRLSISKGHAFILVYSITSRQSLEELKPIYEQICEIKGDVESIPIMLVGNKCDESPSREVQSSEAEALARTWKCAFMETSAKLNHNVKELFQELLNLEKRRTVSLQIDGKKSKQQKRKEKLKGKCVIM

SEQ ID NO: 27251 - protein, 112 aa, Homo sapiens
  REGION 1..112: note = ENSP00000490457
MPEQSNDYRVAVFGAGGVGKSSLVLRFVKGTFRESYIPTVEDTYRQVISCDKSICTLQITDTTGSHQFPAMQRLSISKGHAFILVYSITSRQSLEELKPIYEQICEIKGDVE

SEQ ID NO: 27252 - protein, 43 aa, Homo sapiens
  REGION 1..43: note = ENSP00000490853
MPEQSNDYRVAVFGAGGVGKSSLVLRFVKGTFRESYIPTVEDT

SEQ ID NO: 27253 - protein, 1401 aa, Homo sapiens
  REGION 1..1401: note = ENSP00000267889
MDGDSSSSSGGSGPAPGPGPEGEQRPEGEPLAPDGGSPDSTQTKAVPPEASPERSCSLHSCPLEDPSSSSGPPPTTSTLQPVGPSSPLAPAHFTYPRALQEYQGGSSLPGLGDRAALCSHGSSLSPSPAPSQRDGTWKPPAVQHHVVSVRQERAFQMPKSYSQLIAEWPVAVLMLCLAVIFLCTLAGLLGARLPDFSKPLLGFEPRDTDIGSKLVVWRALQALTGPRKLLFLSPDLELNSSSSHNTLRPAPRGSAQESAVRPRRMVEPLEDRRQENFFCGPPEKSYAKLVFMSTSSGSLWNLHAIHSMCRMEQDQIRSHTSFGALCQRTAANQCCPSWSLGNYLAVLSNRSSCLDTTQADAARTLALLRTCALYYHSGALVPSCLGPGQNKSPRCAQVPTKCSQSSAIYQLLHFLLDRDFLSPQTTDYQVPSLKYSLLFLPTPKGASLMDIYLDRLATPWGLADNYTSVTGMDLGLKQELLRHFLVQDTVYPLLALVAIFFGMALYLRSLFLTLMVLLGVLGSLLVAFFLYQVAFRMAYFPFVNLAALLLLSSVCANHTLIFFDLWRLSKSQLPSGGLAQRVGRTMHHFGYLLLVSGLTTSAAFYASYLSRLPAVRCLALFMGTAVLVHLALTLVWLPASAVLHERYLARGCARRARGRWEGSAPRRLLLALHRRLRGLRRAAAGTSRLLFQRLLPCGVIKFRYIWICWFAALAAGGAYIAGVSPRLRLPTLPPPGGQVFRPSHPFERFDAEYRQLFLFEQLPQGEGGHMPVVLVWGVLPVDTGDPLDPRSNSSLVRDPAFSASGPEAQRWLLALCHRARNQSFFDTLQEGWPTLCFVETLQRWMESPSCARLGPDLCCGHSDFPWAPQFFLHCLKMMALEQGPDGTQDLGLRFDAHGSLAALVLQFQTNFRNSPDYNQTQLFYNEVSHWLAAELGMAPPGLRRGWFTSRLELYSLQHSLSTEPAVVLGLALALAFATLLLGTWNVPLSLFSVAAVAGTVLLTVGLLVLLEWQLNTAEALFLSASVGLSVDFTVNYCISYHLCPHPDRLSRVAFSLRQTSCATAVGAAALFAAGVLMLPATVLLYRKLGIILMMVKCVSCGFASFFFQSLCCFFGPEKNCGQILWPCAHLPWDAGTGDPGGEKAGRPRPGSVGGMPGSCSEQYELQPLARRRSPSFDTSTATSKLSHRPSVLSEDLQLHDGPCCSRPPPAPASPRELLLDHQAVFSQCPALQTSSPYKQAGPSPKTRARQDSQGEEAEPLPASPEAPAHSPKAKAADPPDGFCSSASTLEGLSVSDETCLSTSEPSARVPDSVGVSPDDLDDTGQPVLERGQLNGKRDTLWLALRETVYDPSLPASHHSSLSWKGRGGPGDGSPVVLPNSQPDLPDVWLRRPSTHTSGYSS

SEQ ID NO: 27254 - protein, 1392 aa, Homo sapiens
  REGION 1..1392: note = ENSP00000294484
MDTEDDPLLQDVWLEEEQEEEEATGETFLGAQKPGPQPGAGGQCCWRHWPLASRPPASGFWSTLGWAFTNPCCAGLVLFLGCSIPMALSAFMFLYYPPLDIDISYNAFEIRNHEASQRFDALTLALKSQFGSWGRNRRDLADFTSETLQRLISEQLQQLHLGNRSRQASRAPRVIPAASLGGPGPYRDTSAAQKPTANRSGRLRRETPPLEDLAANQSEDPRNQRLSKNGRYQPSIPPHAAVAANQSRARRGASRWDYSRAYVSANTQTHAHWRIELIFLARGDAERNIFTSERLVTIHEIERKIMDHPGFREFCWKPHEVLKDLPLGSYSYCSPPSSLMTYFFPTERGGKIYYDGMGQDLADIRGSLELAMTHPEFYWYVDEGLSADNLKSSLLRSEILFGAPLPNYYSVDDRWEEQRAKFQSFVVTYVAMLAKQSTSKVQVLYGGTDLFDYEVRRTFNNDMLLAFISSSCIAALVYILTSCSVFLSFFGIASIGLSCLVALFLYHVVFGIQYLGILNGVAAFVIVGIGVDDVFVFINTYRQATHLEDPQLRMIHTVQTAGKATFFTSLTTAAAYAANVFSQIPAVHDFGLFMSLIVSCCWLAVLVTMPAALGLWSLYLAPLESSCQTSCHQNCSRKTSLHFPGDVFAAPEQVGGSPAQGPIPYLDDDIPLLEVEEEPVSLELGDVSLVSVSPEGLQPASNTGSRGHLIVQLQELLHHWVLWSAVKSRWVIVGLFVSILILSLVFASRLRPASRAPLLFRPDTNIQVLLDLKYNLSAEGISCITCSGLFQEKPHSLQNNIRTSLEKKRRGSGVPWASRPEATLQDFPGTVYISKVKSQGHPAVYRLSLNASLPAPWQAVSPGDGEVPSFQVYRAPFGNFTKKLTACMSTVGLLQAASPSRKWMLTTLACDAKRGWKFDFSFYVATKEQQHTRKLYFAQSHKPPFHGRVCMAPPGCLLSSSPDGPTKGFFFVPSEKVPKARLSATFGFNPCVNTGCGKPAVRPLVDTGAMVFVVFGIIGVNRTRQVDNHVIGDPGSVVYDSSFDLFKEIGHLCHLCKAIAANSELVKPGGAQCLPSGYSISSFLQMLHPECKELPEPNLLPGQLSHGAVGVREGRVQWISMAFESTTYKGKSSFQTYSDYLRWESFLQQQLQALPEGSVLRRGFQTCEHWKQIFMEIVGVQSALCGLVLSLLICVAAVAVFTTHILLLLPVLLSILGIVCLVVTIMYWSGWEMGAVEAISLSILVGSSVDYCVHLVEGYLLAGENLPPHQAEDARTQRQWRTLEAVRHVGVAIVSSALTTVIATVPLFFCIIAPFAKFGKIVALNTGVSILYTLTVSTALLGIMAPSSFTRTRTSFLKALGAVLLAGALGLGACLVLLQSGYKIPLPAGASL

SEQ ID NO: 27255 - protein, 268 aa, Homo sapiens
  REGION 1..268: note = ENSP00000303400
MSRYLKNLLEQDHVQGQILLPDLLGLPALGELPPAAAAGLARGLSPAPGLPDLRALEADIHGNRRGAERPVRPGAIPAHLRGRGGRVHHPHPAPAARAPQHLGHRVPGGDHHVLERLGDGGCGSHLPVHPRWLLRGLLRPPGRGLPAGWREPAPPPGRGRPNAAPVAYAGGRAARGRGHRLQCPHHGHRHSAPLLLHHRPICQVRQDCGTQHGRVHPLHADRQHRPAGHHGAQLFHSDPDFLPQGPGCRAAGRGPGAGCLPRAPAERL

SEQ ID NO: 27256 - protein, 218 aa, Homo sapiens
  REGION 1..218: note = ENSP00000434130
MGTQVVMRFNNSLLPTEPSQQLQAYVAWVNAQLKKRPAVKPVQDLRQDLRDGVILAYLIEIVAGEKLSGVQLSPGNQQEMKNNVEKVLQFVASKKIRMHQTSAKDIVDGNLKSIMRLVLALAAHFKPGSSRTVNQGRDSRAPLQSHRPHCATAVAQGAAAALADVCHDMSRSGRDVFRYRQRNSSMDEEIENPYWSVRALVQQYEGQQRSPSESSCSR

SEQ ID NO: 27257 - protein, 683 aa, Homo sapiens
  REGION 1..683: note = ENSP00000394352
MLACLTRGNLLDVLQEGFNEQQLQAYVAWVNAQLKKRPAVKPVQDLRQDLRDGVILAYLIEIVAGEKLSGVQLSPGNQQEMKNNVEKVLQFVASKKIRMHQTSAKDIVDGNLKSIMRLVLALAAHFKPGSSRTVNQGRDSRAPLQSHRPHCATAVAQGAAAALADVCHDMSRSGRDVFRYRQRNSSMDEEIENPYWSVRALVQQYEGQQRSPSESSCSSLTSPSPIHSAKSESIITQSEEKADFVIIPAEGIENRTEGTDSPLSRDWRPGSPGTYLETSWEEQLLEQQEYLEKEMEEAKKMISGLQALLLNGSLPEDEQERPLALCEPGVNPEEQLIIIQSRLDQSMEENQDLKKELLKCKQEARNLQGIKDALQQRLTQQDTSVLQLKQELLRANMDKDELHNQNVDLQRKLDERNRLLGEYKKELGQKDRLLQQHQAKLEEALRKLSDVSYHQVDLERELEHKDVLLAHCMKREADEATNYNSHNSQSNGFLLPTAGKGATSVSNRGTSDLQLVRDALRSLRNSFSGHDPQHHTIDSLEQGISSLMERLHVMETQKKQERKVRVKSPRTQVGSEYRESWPPNSKLPHSQSSPTVSSTCTKVLYFTDRSLTPFMVNIPKRLEEVTLKDFKAAIDREGNHRYHFKALDPEFGTVKEEIFHDDDAIPGWEGKIVAWVEEDHGEN

SEQ ID NO: 27258 - protein, 77 aa, Homo sapiens
  REGION 1..77: note = ENSP00000479434
MEEAKKMISGLQALLLNGSLPEDEQERPLALCEPGVNPEEQLIIIQSRLDQSMEENQDLKKELLKCKQEARNLQGIK

SEQ ID NO: 27259 - protein, 472 aa, Homo sapiens
  REGION 1..472: note = ENSP00000480808
MGGTQVKCLTSPSPIHSAKSESIITQSEEKADFVIIPAEGIENRTEGTDSPLSRDWRPGSPGTYLETSWEEQLLEQQEYLEKEMEEAKKMISGLQALLLNGSLPEDEQERPLALCEPGVNPEEQLIIIQSRLDQSMEENQDLKKELLKCKQEARNLQGIKDALQQRLTQQDTSVLQLKQELLRANMDKDELHNQNVDLQRKLDERNRLLGEYKKELGQKDRLLQQHQAKLEEALRKLSDVSYHQVDLERELEHKDVLLAHCMKREADEATNYNSHNSQSNGFLLPTAGKGATSVSNRGTSDLQLVRDALRSLRNSFSGHDPQHHTIDSLEQGISSLMERLHVMETQKKQERKVRVKSPRTQVGSEYRESWPPNSKLPHSQSSPTVSSTCTKVLYFTDRSLTPFMVNIPKRLEEVTLKDFKAAIDREGNHRYHFKALDPEFGTVKEEIFHDDDAIPGWEGKIVAWVEEDHGEN

SEQ ID NO: 27260 - protein, 224 aa, Homo sapiens
  REGION 1..224: note = ENSP00000220812
MVAAVLLGLSWLCSPLGALVLDFNNIRSSADLHGARKGSQCLSDTDCNTRKFCLQPRDEKPFCATCRGLRRRCQRDAMCCPGTLCVNDVCTTMEDATPILERQLDEQDGTHAEGTTGHPVQENQPKRKPSIKKSQGRKGQEGESCLRTFDCGPGLCCARHFWTKICKPVLLEGQVCSRRGHKDTAQAPEIFQRCDCGPGLLCRSQLTSNRQHARLRVCQKIEKL

SEQ ID NO: 27261 - protein, 1528 aa, Homo sapiens
  REGION 1..1528: note = ENSP00000276297
MSVAIRKRSWEEHVTHWMGQPFNSDDRNTACHHGLVADSLQASMEKDATLNVDRKEKCVSLPDCCHGSELRDFPGRPMGHLSKDVDENDSHEGEDQFLSLEASTETLVHVSDEDNNADLCLTDDKQVLNTQGQKTSGQHMIQGAGSLEKALPIIQSNQVSSNSWGIAGETELALVKESGERKVTDSISKSLELCNEISLSEIKDAPKVNAVDTLNVKDIAPEKQLLNSAVIAQQRRKPDPPKDENERSTCNVVQNEFLDTPCTNRGLPLLKTDFGSCLLQPPSCPNGMSAENGLEKSGFSQHQNKSPPKVKAEDGMQCLQLKETLATQEPTDNQVRLRKRKEIREDRDRARLDSMVLLIMKLDQLDQDIENALSTSSSPSGTPTNLRRHVPDLESGSESGADTISVNQTRVNLSSDTESTDLPSSTPVANSGTKPKTTAIQGISEKEKAEIEAKEACDWLRATGFPQYAQLYEDFLFPIDISLVKREHDFLDRDAIEALCRRLNTLNKCAVMKLEISPHRKRSDDSDEDEPCAISGKWTFQRDSKRWSRLEEFDVFSPKQDLVPGSPDDSHPKDGPSPGGTLMDLSERQEVSSVRSLSSTGSLPSHAPPSEDAATPRTNSVISVCSSSNLAGNDDSFGSLPSPKELSSFSFSMKGHEKTAKSKTRSLLKRMESLKLKSSHHSKHKAPSKLGLIISGPILQEGMDEEKLKQLNCVEISALNGNRINVPMVRKRSVSNSTQTSSSSSQSETSSAVSTPSPVTRTRSLSACNKRVGMYLEGFDPFNQSTFNNVVEQNFKNRESYPEDTVFYIPEDHKPGTFPKALTNGSFSPSGNNGSVNWRTGSFHGPGHISLRRENSSDSPKELKRRNSSSSMSSRLSIYDNVPGSILYSSSGDLADLENEDIFPELDDILYHVKGMQRIVNQWSEKFSDEGDSDSALDSVSPCPSSPKQIHLDVDNDRTTPSDLDSTGNSLNEPEEPSEIPERRDSGVGASLTRSNRHRLRWHSFQSSHRPSLNSVSLQINCQSVAQMNLLQKYSLLKLTALLEKYTPSNKHGFSWAVPKFMKRIKVPDYKDRSVFGVPLTVNVQRTGQPLPQSIQQAMRYLRNHCLDQVGLFRKSGVKSRIQALRQMNEGAIDCVNYEGQSAYDVADMLKQYFRDLPEPLMTNKLSETFLQIYQYVPKDQRLQAIKAAIMLLPDENREVLQTLLYFLSDVTAAVKENQMTPTNLAVCLAPSLFHLNTLKRENSSPRVMQRKQSLGKPDQKDLNENLAATQGLAHMIAECKKLFQVPEEMSRCRNSYTEQELKPLTLEALGHLGNDDSADYQHFLQDCVDGLFKEVKEKFKGWVSYSTSEQAELSYKKVSEGPPLRLWRSVIEVPAVPEEILKRLLKEQHLWDVDLLDSKVIEILDSQTEIYQYVQNSMAPHPARDYVVLRTWRTNLPKGACALLLTSVDHDRAPVVGVRVNVLLSRYLIEPCGPGKSKLTYMCRVDLRGHMPEWYTKSFGHLCAAEVVKIRDSFSNQNTETKDTKSR

SEQ ID NO: 27262 - protein, 1091 aa, Homo sapiens
  REGION 1..1091: note = ENSP00000351797
MCRKKPDTMILTQIEAKEACDWLRATGFPQYAQLYEDFLFPIDISLVKREHDFLDRDAIEALCRRLNTLNKCAVMKLEISPHRKRSDDSDEDEPCAISGKWTFQRDSKRWSRLEEFDVFSPKQDLVPGSPDDSHPKDGPSPGGTLMDLSERQEVSSVRSLSSTGSLPSHAPPSEDAATPRTNSVISVCSSSNLAGNDDSFGSLPSPKELSSFSFSMKGHEKTAKSKTRSLLKRMESLKLKSSHHSKHKAPSKLGLIISGPILQEGMDEEKLKQLNCVEISALNGNRINVPMVRKRSVSNSTQTSSSSSQSETSSAVSTPSPVTRTRSLSACNKRVGMYLEGFDPFNQSTFNNVVEQNFKNRESYPEDTVFYIPEDHKPGTFPKALTNGSFSPSGNNGSVNWRTGSFHGPGHISLRRENSSDSPKELKRRNSSSSMSSRLSIYDNVPGSILYSSSGDLADLENEDIFPELDDILYHVKGMQRIVNQWSEKFSDEGDSDSALDSVSPCPSSPKQIHLDVDNDRTTPSDLDSTGNSLNEPEEPSEIPERRDSGVGASLTRSNRHRLRWHSFQSSHRPSLNSVSLQINCQSVAQMNLLQKYSLLKLTALLEKYTPSNKHGFSWAVPKFMKRIKVPDYKDRSVFGVPLTVNVQRTGQPLPQSIQQAMRYLRNHCLDQVGLFRKSGVKSRIQALRQMNEGAIDCVNYEGQSAYDVADMLKQYFRDLPEPLMTNKLSETFLQIYQYVPKDQRLQAIKAAIMLLPDENREVLQTLLYFLSDVTAAVKENQMTPTNLAVCLAPSLFHLNTLKRENSSPRVMQRKQSLGKPDQKDLNENLAATQGLAHMIAECKKLFQVPEEMSRCRNSYTEQELKPLTLEALGHLGNDDSADYQHFLQDCVDGLFKEVKEKFKGWVSYSTSEQAELSYKKVSEGPPLRLWRSVIEVPAVPEEILKRLLKEQHLWDVDLLDSKVIEILDSQTEIYQYVQNSMAPHPARDYVVLRTWRTNLPKGACALLLTSVDHDRAPVVGVRVNVLLSRYLIEPCGPGKSKLTYMCRVDLRGHMPEWYTKSFGHLCAAEVVKIRDSFSNQNTETKDTKSR

SEQ ID NO: 27263 - protein, 1125 aa, Homo sapiens
  REGION 1..1125: note = ENSP00000422595
MGDPKAHVMARPLRAPLRRSFSDHIRDSTARALDVIWKNTRDRRLAEIEAKEACDWLRATGFPQYAQLYEDFLFPIDISLVKREHDFLDRDAIEALCRRLNTLNKCAVMKLEISPHRKRSDDSDEDEPCAISGKWTFQRDSKRWSRLEEFDVFSPKQDLVPGSPDDSHPKDGPSPGGTLMDLSERQEVSSVRSLSSTGSLPSHAPPSEDAATPRTNSVISVCSSSNLAGNDDSFGSLPSPKELSSFSFSMKGHEKTAKSKTRSLLKRMESLKLKSSHHSKHKAPSKLGLIISGPILQEGMDEEKLKQLNCVEISALNGNRINVPMVRKRSVSNSTQTSSSSSQSETSSAVSTPSPVTRTRSLSACNKRVGMYLEGFDPFNQSTFNNVVEQNFKNRESYPEDTVFYIPEDHKPGTFPKALTNGSFSPSGNNGSVNWRTGSFHGPGHISLRRENSSDSPKELKRRNSSSSMSSRLSIYDNVPGSILYSSSGDLADLENEDIFPELDDILYHVKGMQRIVNQWSEKFSDEGDSDSALDSVSPCPSSPKQIHLDVDNDRTTPSDLDSTGNSLNEPEEPSEIPERRDSGVGASLTRSNRHRLRWHSFQSSHRPSLNSVSLQINCQSVAQMNLLQKYSLLKLTALLEKYTPSNKHGFSWAVPKFMKRIKVPDYKDRSVFGVPLTVNVQRTGQPLPQSIQQAMRYLRNHCLDQVGLFRKSGVKSRIQALRQMNEGAIDCVNYEGQSAYDVADMLKQYFRDLPEPLMTNKLSETFLQIYQYVPKDQRLQAIKAAIMLLPDENREVLQTLLYFLSDVTAAVKENQMTPTNLAVCLAPSLFHLNTLKRENSSPRVMQRKQSLGKPDQKDLNENLAATQGLAHMIAECKKLFQVPEEMSRCRNSYTEQELKPLTLEALGHLGNDDSADYQHFLQDCVDGLFKEVKEKFKGWVSYSTSEQAELSYKKVSEGPPLRLWRSVIEVPAVPEEILKRLLKEQHLWDVDLLDSKVIEILDSQTEIYQYVQNSMAPHPARDYVVLRTWRTNLPKGACALLLTSVDHDRAPVVGVRVNVLLSRYLIEPCGPGKSKLTYMCRVDLRGHMPEWYTKSFGHLCAAEVVKIRDSFSNQNTETKDTKSR

SEQ ID NO: 27264 - protein, 1017 aa, Homo sapiens
  REGION 1..1017: note = ENSP00000428028
MKLEISPHRKRSDDSDEDEPCAISGKWTFQRDSKRWSRLEEFDVFSPKQDLVPGSPDDSHPKDGPSPGGTLMDLSERQEVSSVRSLSSTGSLPSHAPPSEDAATPRTNSVISVCSSSNLAGNDDSFGSLPSPKELSSFSFSMKGHEKTAKSKTRSLLKRMESLKLKSSHHSKHKAPSKLGLIISGPILQEGMDEEKLKQLNCVEISALNGNRINVPMVRKRSVSNSTQTSSSSSQSETSSAVSTPSPVTRTRSLSACNKRVGMYLEGFDPFNQSTFNNVVEQNFKNRESYPEDTVFYIPEDHKPGTFPKALTNGSFSPSGNNGSVNWRTGSFHGPGHISLRRENSSDSPKELKRRNSSSSMSSRLSIYDNVPGSILYSSSGDLADLENEDIFPELDDILYHVKGMQRIVNQWSEKFSDEGDSDSALDSVSPCPSSPKQIHLDVDNDRTTPSDLDSTGNSLNEPEEPSEIPERRDSGVGASLTRSNRHRLRWHSFQSSHRPSLNSVSLQINCQSVAQMNLLQKYSLLKLTALLEKYTPSNKHGFSWAVPKFMKRIKVPDYKDRSVFGVPLTVNVQRTGQPLPQSIQQAMRYLRNHCLDQVGLFRKSGVKSRIQALRQMNEGAIDCVNYEGQSAYDVADMLKQYFRDLPEPLMTNKLSETFLQIYQYVPKDQRLQAIKAAIMLLPDENREVLQTLLYFLSDVTAAVKENQMTPTNLAVCLAPSLFHLNTLKRENSSPRVMQRKQSLGKPDQKDLNENLAATQGLAHMIAECKKLFQVPEEMSRCRNSYTEQELKPLTLEALGHLGNDDSADYQHFLQDCVDGLFKEVKEKFKGWVSYSTSEQAELSYKKVSEGPPLRLWRSVIEVPAVPEEILKRLLKEQHLWDVDLLDSKVIEILDSQTEIYQYVQNSMAPHPARDYVVLRTWRTNLPKGACALLLTSVDHDRAPVVGVRVNVLLSRYLIEPCGPGKSKLTYMCRVDLRGHMPEWYTKSFGHLCAAEVVKIRDSFSNQNTETKDTKSR

SEQ ID NO: 27265 - protein, 48 aa, Homo sapiens
  REGION 1..48: note = ENSP00000429537
MSLVPSVANGLSKGTARGGPGLKSLMSFLQNKTWSLGPQTTPTRRTAP

SEQ ID NO: 27266 - protein, 498 aa, Homo sapiens
  REGION 1..498: note = ENSP00000321034
MSVAIRKRSWEEHVTHWMGQPFNSDDRNTACHHGLVADSLQASMEKDATLNVDRKEKCVSLPDCCHGSELRDFPGRPMGHLSKDVDENDSHEGEDQFLSLEASTETLVHVSDEDNNADLCLTDDKQVLNTQGQKTSGQHMIQGAGSLEKALPIIQSNQVSSNSWGIAGETELALVKESGERKVTDSISKSLELCNEISLSEIKDAPKVNAVDTLNVKDIAPEKQLLNSAVIAQQRRKPDPPKDENERSTCNVVQNEFLDTPCTNRGLPLLKTDFGSCLLQPPSCPNGMSAENGLEKSGFSQHQNKSPPKVKAEDGMQCLQLKETLATQEPTDNQVRLRKRKEIREDRDRARLDSMVLLIMKLDQLDQDIENALSTSSSPSGTPTNLRRHVPDLESGSESGADTISVNQTRVNLSSDTESTDLPSSTPVANSGTKPKTTAIQGISEKEKAAVKSVKLEVDEDKSTKGSNFSNSEVAIGLSPYTFPQKRLFHVAGEENIT

SEQ ID NO: 27267 - protein, 463 aa, Homo sapiens
  REGION 1..463: note = ENSP00000425878
MSVAIRKRSWEEHVTHWMGQPFNSDDRNTACHHGLVADSLQASMEKDATLNVDRKEKCVSLPDCCHGSELRDFPGRPMGHLSKDVDENDSHEGEDQFLSLEASTETLVHVSDEDNNADLCLTDDKQVLNTQGQKTSGQHMIQGAGSLEKALPIIQSNQVSSNSWGIAGETELALVKESGERKVTDSISKSLELCNEISLSEIKDAPKVNAVDTLNVKDIAPEKQLLNSAVIAQQRRKPDPPKDENERSTCNVVQNEFLDTPCTNRGLPLLKTDFGSCLLQPPSCPNGMSAENGLEKSGFSQHQNKSPPKVKAEDGMQCLQLKETLATQEPTDNQVRLRKRKEIREDRDRARLDSMVLLIMKLDQLDQDIENALSTSSSPSGTPTNLRRHVPDLESGSESGADTISVNQTRVNLSSDTESTDLPSSTPVANSGTKPKTTAIQGISEKEKAGKLTFWFCFLANLF

SEQ ID NO: 27268 - protein, 75 aa, Homo sapiens
  REGION 1..75: note = ENSP00000473289
  VARIANT 1: note = Any amino acid
XLLQPPSCPNGMSAENGLEKSGFSQHQNKSPPKVKAEDGMQCLQLKETLATQEPTDNQVRLRKRKVRHMHRFSGF

SEQ ID NO: 27269 - protein, 122 aa, Homo sapiens
  REGION 1..122: note = ENSP00000488100
MSVAIRKRSWEEHVTHWMGQPFNSDDRNTACHHGLVADSLQASMEKDATLNVDRKEKCVSLPDCCHGSELRDFPGRPMGHLSKDVDENDSHEGEDQFLSLEASTETLVHVSDEDNNADLCLT

SEQ ID NO: 27270 - protein, 926 aa, Homo sapiens
  REGION 1..926: note = ENSP00000345731
MPVRKQDTQRALHLLEEYRSKLSQTEDRQLRSSIERVINIFQSNLFQALIDIQEFYEVTLLDNPKCIDRSKPSEPIQPVNTWEISSLPSSTVTSETLPSSLSPSVEKYRYQDEDTPPQEHISPQITNEVIGPELVHVSEKNLSEIENVHGFVSHSHISPIKPTEAVLPSPPTVPVIPVLPVPAENTVILPTIPQANPPPVLVNTDSLETPTYVNGTDADYEYEEITLERGNSGLGFSIAGGTDNPHIGDDSSIFITKIITGGAAAQDGRLRVNDCILRVNEVDVRDVTHSKAVEALKEAGSIVRLYVKRRKPVSEKIMEIKLIKGPKGLGFSIAGGVGNQHIPGDNSIYVTKIIEGGAAHKDGKLQIGDKLLAVNNVCLEEVTHEEAVTALKNTSDFVYLKVAKPTSMYMNDGYAPPDITNSSSQPVDNHVSPSSFLGQTPASPARYSPVSKAVLGDDEITREPRKVVLHRGSTGLGFNIVGGEDGEGIFISFILAGGPADLSGELRKGDRIISVNSVDLRAASHEQAAAALKNAGQAVTIVAQYRPEEYSRFEAKIHDLREQMMNSSISSGSGSLRTSQKRSLYVRALFDYDKTKDSGLPSQGLNFKFGDILHVINASDDEWWQARQVTPDGESDEVGVIPSKRRVEKKERARLKTVKFNSKTRDKGQSFNDKRKKNLFSRKFPFYKNKDQSEQETSDADQHVTSNASDSESSYRGQEEYVLSYEPVNQQEVNYTRPVIILGPMKDRINDDLISEFPDKFGSCVPHTTRPKRDYEVDGRDYHFVTSREQMEKDIQEHKFIEAGQYNNHLYGTSVQSVREVAEKGKHCILDVSGNAIKRLQIAQLYPISIFIKPKSMENIMEMNKRLTEEQARKTFERAMKLEQEFTEHFTAIVQGDTLEDIYNQVKQIIEEQSGSYIWVPAKEKL

SEQ ID NO: 27271 - protein, 904 aa, Homo sapiens
  REGION 1..904: note = ENSP00000407531
MPVRKQDTQRALHLLEEYRSKLSQTEDRQLRSSIERVINIFQSNLFQALIDIQEFYEVTLLDNPKCIDRSKPSEPIQPVNTWEISSLPSSTVTSETLPSSLSPSVEKYRYQDEDTPPQEHISPQITNEVIGPELVHVSEKNLSEIENVHGFVSHSHISPIKPTEAVLPSPPTVPVIPVLPVPAENTVILPTIPQANPPPVLVNTDSLETPTYVNGTDADYEYEEITLERGNSGLGFSIAGGTDNPHIGDDSSIFITKIITGGAAAQDGRLRVNDCILRVNEVDVRDVTHSKAVEALKEAGSIVRLYVKRRKPVSEKIMEIKLIKGPKGLGFSIAGGVGNQHIPGDNSIYVTKIIEGGAAHKDGKLQIGDKLLAVNNVCLEEVTHEEAVTALKNTSDFVYLKVAKPTSMYMNDGYAPPDITNSSSQPVDNHVSPSSFLGQTPASPARYSPVSKAVLGDDEITREPRKVVLHRGSTGLGFNIVGGEDGEGIFISFILAGGPADLSGELRKGDRIISVNSVDLRAASHEQAAAALKNAGQAVTIVAQYRPEEYSRFEAKIHDLREQMMNSSISSGSGSLRTSQKRSLYVRALFDYDKTKDSGLPSQGLNFKFGDILHVINASDDEWWQARQVTPDGESDEVGVIPSKRRVEKKERARLKTVKFNSKTRDKGEIPDDMGSKGLKHVTSNASDSESSYRGQEEYVLSYEPVNQQEVNYTRPVIILGPMKDRINDDLISEFPDKFGSCVPHTTRPKRDYEVDGRDYHFVTSREQMEKDIQEHKFIEAGQYNNHLYGTSVQSVREVAEKGKHCILDVSGNAIKRLQIAQLYPISIFIKPKSMENIMEMNKRLTEEQARKTFERAMKLEQEFTEHFTAIVQGDTLEDIYNQVKQIIEEQSGSYIWVPAKEKL

SEQ ID NO: 27272 - protein, 788 aa, Homo sapiens
  REGION 1..788: note = ENSP00000398939
MNYIFGNNTLLYSRGSRGGNTSSSHGSAGPKQKHWAKKGSSDELQAEPEPSRWQQIVAFFTRRHSFIDCISVATSSTQANPPPVLVNTDSLETPTYVNGTDADYEYEEITLERGNSGLGFSIAGGTDNPHIGDDSSIFITKIITGGAAAQDGRLRVNDCILRVNEVDVRDVTHSKAVEALKEAGSIVRLYVKRRKPVSEKIMEIKLIKGPKGLGFSIAGGVGNQHIPGDNSIYVTKIIEGGAAHKDGKLQIGDKLLAVNNVCLEEVTHEEAVTALKNTSDFVYLKVAKPTSMYMNDGYAPPDITNSSSQPVDNHVSPSSFLGQTPASPARYSPVSKAVLGDDEITREPRKVVLHRGSTGLGFNIVGGEDGEGIFISFILAGGPADLSGELRKGDRIISVNSVDLRAASHEQAAAALKNAGQAVTIVAQYRPEEYSRFEAKIHDLREQMMNSSISSGSGSLRTSQKRSLYVRALFDYDKTKDSGLPSQGLNFKFGDILHVINASDDEWWQARQVTPDGESDEVGVIPSKRRVEKKERARLKTVKFNSKTRDKGEIPDDMGSKGLKHVTSNASDSESSYRGQEEYVLSYEPVNQQEVNYTRPVIILGPMKDRINDDLISEFPDKFGSCVPHTTRPKRDYEVDGRDYHFVTSREQMEKDIQEHKFIEAGQYNNHLYGTSVQSVREVAEKGKHCILDVSGNAIKRLQIAQLYPISIFIKPKSMENIMEMNKRLTEEQARKTFERAMKLEQEFTEHFTAIVQGDTLEDIYNQVKQIIEEQSGSYIWVPAKEKL

SEQ ID NO: 27273 - protein, 853 aa, Homo sapiens
  REGION 1..853: note = ENSP00000413238
MPVRKQDTQRALHLLEEYRSKLSQTEDRQLRSSIERVINIFQSNLFQALIDIQEFYEVTLLDNPKCIDRSKPSEPIQPVNTWEISSLPSSTVTSETLPSSLSPSVEKYRYQDEDTPPQEHISPQITNEVIGPELVHVSEKNLSEIENVHGFVSHSHISPIKVNGTDADYEYEEITLERGNSGLGFSIAGGTDNPHIGDDSSIFITKIITGGAAAQDGRLRVNDCILRVNEVDVRDVTHSKAVEALKEAGSIVRLYVKRRKPVSEKIMEIKLIKGPKGLGFSIAGGVGNQHIPGDNSIYVTKIIEGGAAHKDGKLQIGDKLLAVNNVCLEEVTHEEAVTALKNTSDFVYLKVAKPTSMYMNDGYAPPDITNSSSQPVDNHVSPSSFLGQTPASPARYSPVSKAVLGDDEITREPRKVVLHRGSTGLGFNIVGGEDGEGIFISFILAGGPADLSGELRKGDRIISVNSVDLRAASHEQAAAALKNAGQAVTIVAQYRPEEYSRFEAKIHDLREQMMNSSISSGSGSLRTSQKRSLYVRALFDYDKTKDSGLPSQGLNFKFGDILHVINASDDEWWQARQVTPDGESDEVGVIPSKRRVEKKERARLKTVKFNSKTRDKGEIPDDMGSKGLKHVTSNASDSESSYRGQEEYVLSYEPVNQQEVNYTRPVIILGPMKDRINDDLISEFPDKFGSCVPHTTRPKRDYEVDGRDYHFVTSREQMEKDIQEHKFIEAGQYNNHLYGTSVQSVREVAEKGKHCILDVSGNAIKRLQIAQLYPISIFIKPKSMENIMEMNKRLTEEQARKTFERAMKLEQEFTEHFTAIVQGDTLEDIYNQVKQIIEEQSGSYIWVPAKEKL

SEQ ID NO: 27274 - protein, 904 aa, Homo sapiens; identical to SEQ ID NO: 27271
  REGION 1..904: note = ENSP00000391732

SEQ ID NO: 27275 - protein, 800 aa, Homo sapiens
  REGION 1..800: note = ENSP00000396658
MNYIFGNNTLLYSRGSRGGNTSSSHGSAGPKQKHWAKKGSSDELQAEPEPSRWQQIVAFFTRRHSFIDCISVATSSTQANPPPVLVNTDSLETPTYVNGTDADYEYEEITLERGNSGLGFSIAGGTDNPHIGDDSSIFITKIITGGAAAQDGRLRVNDCILRVNEVDVRDVTHSKAVEALKEAGSIVRLYVKRRKPVSEKIMEIKLIKGPKGLGFSIAGGVGNQHIPGDNSIYVTKIIEGGAAHKDGKLQIGDKLLAVNNVCLEEVTHEEAVTALKNTSDFVYLKVAKPTSMYMNDGYAPPDITNSSSQPVDNHVSPSSFLGQTPASPARYSPVSKAVLGDDEITREPRKVVLHRGSTGLGFNIVGGEDGEGIFISFILAGGPADLSGELRKGDRIISVNSVDLRAASHEQAAAALKNAGQAVTIVAQYRPEEYSRFEAKIHDLREQMMNSSISSGSGSLRTSQKRSLYVRALFDYDKTKDSGLPSQGLNFKFGDILHVINASDDEWWQARQVTPDGESDEVGVIPSKRRVEKKERARLKTVKFNSKTRDKGEIPDDMGSKGLKHVTSNASDSESSYLILITDEYGCSKGGQEEYVLSYEPVNQQEVNYTRPVIILGPMKDRINDDLISEFPDKFGSCVPHTTRPKRDYEVDGRDYHFVTSREQMEKDIQEHKFIEAGQYNNHLYGTSVQSVREVAEKGKHCILDVSGNAIKRLQIAQLYPISIFIKPKSMENIMEMNKRLTEEQARKTFERAMKLEQEFTEHFTAIVQGDTLEDIYNQVKQIIEEQSGSYIWVPAKEKL

SEQ ID NO: 27276 - protein, 893 aa, Homo sapiens
  REGION 1..893: note = ENSP00000411278
MPVRKQDTQRALHLLEEYRSKLSQTEDRQLRSSIERVINIFQSNLFQALIDIQEFYEVTLLDNPKCIDRSKPSEPIQPVNTWEISSLPSSTVTSETLPSSLSPSVEKYRYQDEDTPPQEHISPQITNEVIGPELVHVSEKNLSEIENVHGFVSHSHISPIKANPPPVLVNTDSLETPTYVNGTDADYEYEEITLERGNSGLGFSIAGGTDNPHIGDDSSIFITKIITGGAAAQDGRLRVNDCILRVNEVDVRDVTHSKAVEALKEAGSIVRLYVKRRKPVSEKIMEIKLIKGPKGLGFSIAGGVGNQHIPGDNSIYVTKIIEGGAAHKDGKLQIGDKLLAVNNVCLEEVTHEEAVTALKNTSDFVYLKVAKPTSMYMNDGYAPPDITNSSSQPVDNHVSPSSFLGQTPASPARYSPVSKAVLGDDEITREPRKVVLHRGSTGLGFNIVGGEDGEGIFISFILAGGPADLSGELRKGDRIISVNSVDLRAASHEQAAAALKNAGQAVTIVAQYRPEEYSRFEAKIHDLREQMMNSSISSGSGSLRTSQKRSLYVRALFDYDKTKDSGLPSQGLNFKFGDILHVINASDDEWWQARQVTPDGESDEVGVIPSKRRVEKKERARLKTVKFNSKTRDKGQSFNDKRKKNLFSRKFPFYKNKDQSEQETSDADQHVTSNASDSESSYRGQEEYVLSYEPVNQQEVNYTRPVIILGPMKDRINDDLISEFPDKFGSCVPHTTRPKRDYEVDGRDYHFVTSREQMEKDIQEHKFIEAGQYNNHLYGTSVQSVREVAEKGKHCILDVSGNAIKRLQIAQLYPISIFIKPKSMENIMEMNKRLTEEQARKTFERAMKLEQEFTEHFTAIVQGDTLEDIYNQVKQIIEEQSGSYIWVPAKEKL

SEQ ID NO: 27277 - protein, 871 aa, Homo sapiens
  REGION 1..871: note = ENSP00000376187
MPVRKQDTQRALHLLEEYRSKLSQTEDRQLRSSIERVINIFQSNLFQALIDIQEFYEVTLLDNPKCIDRSKPSEPIQPVNTWEISSLPSSTVTSETLPSSLSPSVEKYRYQDEDTPPQEHISPQITNEVIGPELVHVSEKNLSEIENVHGFVSHSHISPIKANPPPVLVNTDSLETPTYVNGTDADYEYEEITLERGNSGLGFSIAGGTDNPHIGDDSSIFITKIITGGAAAQDGRLRVNDCILRVNEVDVRDVTHSKAVEALKEAGSIVRLYVKRRKPVSEKIMEIKLIKGPKGLGFSIAGGVGNQHIPGDNSIYVTKIIEGGAAHKDGKLQIGDKLLAVNNVCLEEVTHEEAVTALKNTSDFVYLKVAKPTSMYMNDGYAPPDITNSSSQPVDNHVSPSSFLGQTPASPARYSPVSKAVLGDDEITREPRKVVLHRGSTGLGFNIVGGEDGEGIFISFILAGGPADLSGELRKGDRIISVNSVDLRAASHEQAAAALKNAGQAVTIVAQYRPEEYSRFEAKIHDLREQMMNSSISSGSGSLRTSQKRSLYVRALFDYDKTKDSGLPSQGLNFKFGDILHVINASDDEWWQARQVTPDGESDEVGVIPSKRRVEKKERARLKTVKFNSKTRDKGEIPDDMGSKGLKHVTSNASDSESSYRGQEEYVLSYEPVNQQEVNYTRPVIILGPMKDRINDDLISEFPDKFGSCVPHTTRPKRDYEVDGRDYHFVTSREQMEKDIQEHKFIEAGQYNNHLYGTSVQSVREVAEKGKHCILDVSGNAIKRLQIAQLYPISIFIKPKSMENIMEMNKRLTEEQARKTFERAMKLEQEFTEHFTAIVQGDTLEDIYNQVKQIIEEQSGSYIWVPAKEKL

SEQ ID NO: 27278 - protein, 370 aa, Homo sapiens
  REGION 1..370: note = ENSP00000396768
MPVRKQDTQRALHLLEEYRSKLSQTEDRQLRSSIERVINIFQSNLFQALIDIQEFYEVTLLDNPKCIDRSKPSEPIQPVNTWEISSLPSSTVTSETLPSSLSPSVEKYRYQDEDTPPQEHISPQITNEVIGPELVHVSEKNLSEIENVHGFVSHSHISPIKVNGTDADYEYEEITLERGNSGLGFSIAGGTDNPHIGDDSSIFITKIITGGAAAQDGRLRVNDCILRVNEVDVRDVTHSKAVEALKEAGSIVRLYVKRRKPVSEKIMEIKLIKGPKGLGFSIAGGVGNQHIPGDNSIYVTKIIEGGAAHKDGKLQIGDKLLAVNNVCLEEVTHEEAVTALKNTSDFVYLKVAKPTSMYMNDGYAPPDITN

SEQ ID NO: 27279 - protein, 658 aa, Homo sapiens
  REGION 1..658: note = ENSP00000376186
MPVRKQDTQRALHLLEEYRSKLSQTEDRQLRSSIERVINIFQSNLFQALIDIQEFYEVTLLDNPKCIDRSKPSEPIQPVNTWEISSLPSSTVTSETLPSSLSPSVEKYRYQDEDTPPQEHISPQITNEVIGPELVHVSEKNLSEIENVHGFVSHSHISPIKPTEAVLPSPPTVPVIPVLPVPAENTVILPTIPQANPPPVLVNTDSLETPTYVNGTDADYEYEEITLERGNSGLGFSIAGGTDNPHIGDDSSIFITKIITGGAAAQDGRLRVNDCILRVNEVDVRDVTHSKAVEALKEAGSIVRLYVKRRKPVSEKIMEIKLIKGPKGLGFSIAGGVGNQHIPGDNSIYVTKIIEGGAAHKDGKLQIGDKLLAVNNVCLEEVTHEEAVTALKNTSDFVYLKVAKPTSMYMNDGYAPPDITNSSSQPVDNHVSPSSFLGQTPASPARYSPVSKAVLGDDEITREPRKVVLHRGSTGLGFNIVGGEDGEGIFISFILAGGPADLSGELRKGDRIISVNSVDLRAASHEQAAAALKNAGQAVTIVAQYRPEEYSRFEAKIHDLREQMMNSSISSGSGSLRTSQKRSLYVRALFDYDKTKDSGLPSQGLNFKFGDILHVINASDDEWWQARQVTPDGESDEVGVIPSKRRYACFLPLECEAT

SEQ ID NO: 27280 - protein, 286 aa, Homo sapiens
  REGION 1..286: note = ENSP00000398702
FFTRRHSFIDCISVATSSTQANPPPVLVNTDSLETPTYGNSGLGFSIAGGTDNPHIGDDSSIFITKIITGGAAAQDGRLRVNDCILRVNEVDVRDVTHSKAVEALKEAGSIVRLYVKRRKPVSEKIMEIKLIKGPKGLGFSIAGGVGNQHIPGDNSIYVTKIIEGGAAHKDGKLQIGDKLLAVNNVCLEEVTHEEAVTALKNTSDFVYLKVAKPTSMYMNDGYAPPDITNSSSQPVDNHVSPSSFLGQTPASPARYSPVSKAVLGDDEITREPRKVVLHRGSTGLG

SEQ ID NO: 27281 - protein, 122 aa, Homo sapiens
  REGION 1..122: note = ENSP00000412579
MDCLCIVTTKKYRYQDEDTPPQEHISPQITNEVIGPELVHVSEKNLSEIENVHGFVSHSHISPIKVNGTDADYEYEEITLERGNSGLGFSIAGGTDNPHIGDDSSIFITKIITGGAAAQDGR

SEQ ID NO: 27282 - protein, 179 aa, Homo sapiens
  REGION 1..179: note = ENSP00000396474
MPVRKQDTQRALHLLEEYRSKLSQTEDRQLRSSIERVINIFQSNLFQALIDIQEFYEVTLLDNPKCIDRSKPSEPIQPVNTWEISSLPSSTVTSETLPSSLSPSVEKYRYQDEDTPPQEHISPQITNEVIGPELVHVSEKNLSEIENVHGFVSHSHISPIKANPPPVLVNTDSLETPTY

SEQ ID NO: 27283 - protein, 208 aa, Homo sapiens
  REGION 1..208: note = ENSP00000376185
MPVRKQDTQRALHLLEEYRSKLSQTEDRQLRSSIERVINIFQSNLFQALIDIQEFYEVTLLDNPKCIDRSKPSEPIQPVNTWEISSLPSSTVTSETLPSSLSPSVEKYRYQDEDTPPQEHISPQITNEVIGPELVHVSEKNLSEIENVHGFVSHSHISPIKPTEAVLPSPPTVPVIPVLPVPAENTVILPTIPQANPPPVLVNTDSLE

SEQ ID NO: 27284 - protein, 154 aa, Homo sapiens
  REGION 1..154: note = ENSP00000414189
MPVRKQDTQRALHLLEEYRSKLSQTEDRQLRSSIERVINIFQSNLFQALIDIQEFYEVTLLDNPKCIDRSKPSEPIQPVNTWEISSLPSSTVTSETLPSSLSPSVEKYRYQDEDTPPQEHISPQITNEVIGPELVHVSEKNLSEIENVHGFVSH

SEQ ID NO: 27285 - protein, 123 aa, Homo sapiens
  REGION 1..123: note = ENSP00000393771
MPVRKQDTQRALHLLEEYRSKLSQTEDRQLRSSIERVINIFQSNLFQALIDIQEFYEVTLLDNPKCIDRSKPSEPIQPVNTWEISSLPSSTVTSETLPSSLSPSVEKYRYQDEDTPPQEHISP

SEQ ID NO: 27286 - protein, 106 aa, Homo sapiens
  REGION 1..106: note = ENSP00000390403
MPVRKQDTQRALHLLEEYRSKLSQTEDRQLRSSIERVINIFQSNLFQALIDIQEFYEVTLLDNPKCIDRSKPSEPIQPVNTWEISSLPSSTVTSETLPSSLSPSVE

SEQ ID NO: 27287 - protein, 35 aa, Homo sapiens
  REGION 1..35: note = ENSP00000400169
MPVRKQDTQRALHLLEEYRSKLSQTEDRQLRSSIE

SEQ ID NO: 27288 - protein, 892 aa, Homo sapiens
  REGION 1..892: note = ENSP00000350303
MPVRKQDTQRALHLLEEYRSKLSQTEDRQLRSSIERVINIFQSNLFQALIDIQEFYEVTLLDNPKCIDRSKPSEPIQPVNTWEISSLPSSTVTSETLPSSLSPSVEKYRYQDEDTPPQEHISPQITNEVIGPELVHVSEKNLSEIENVHGFVSHSHISPIKANPPPVLVNTDSLETPTYVNGTDADYEYEEITLERGNSGLGFSIAGGTDNPHIGDDSSIFITKIITGGAAAQDGRLRVNDCILRVNEVDVRDVTHSKAVEALKEAGSIVRLYVKRRKPVSEKIMEIKLIKGPKGLGFSIAGGVGNQHIPGDNSIYVTKIIEGGAAHKDGKLQIGDKLLAVNNVCLEEVTHEEAVTALKNTSDFVYLKVAKPTSMYMNDGYAPPDITNSSSQPVDNHVSPSSFLGQTPASPARYSPVSKAVLGDDEITREPRKVVLHRGSTGLGFNIVGGEDGEGIFISFILAGGPADLSGELRKGDRIISVNSVDLRAASHEQAAAALKNAGQAVTIVAQYRPEEYSRFEAKIHDLREQMMNSSISSGSGSLRTSQKRSLYVRALFDYDKTKDSGLPSQGLNFKFGDILHVINASDDEWWQARQVTPDGESDEVGVIPSKRRVEKKERARLKTVKFNSKTRDKGSFNDKRKKNLFSRKFPFYKNKDQSEQETSDADQHVTSNASDSESSYRGQEEYVLSYEPVNQQEVNYTRPVIILGPMKDRINDDLISEFPDKFGSCVPHTTRPKRDYEVDGRDYHFVTSREQMEKDIQEHKFIEAGQYNNHLYGTSVQSVREVAEKGKHCILDVSGNAIKRLQIAQLYPISIFIKPKSMENIMEMNKRLTEEQARKTFERAMKLEQEFTEHFTAIVQGDTLEDIYNQVKQIIEEQSGSYIWVPAKEKL

SEQ ID NO: 27289 - protein, 724 aa, Homo sapiens
  REGION 1..724: note = ENSP00000382425
MDCLCIVTTKKYRYQDEDTPPLEHSPAHLPNQANSPPVIVNTDTLEAPGYELQVNGTEGEMEYEEITLERGNSGLGFSIAGGTDNPHIGDDPSIFITKIIPGGAAAQDGRLRVNDSILFVNEVDVREVTHSAAVEALKEAGSIVRLYVMRRKPPAEKVMEIKLIKGPKGLGFSIAGGVGNQHIPGDNSIYVTKIIEGGAAHKDGRLQIGDKILAVNSVGLEDVMHEDAVAALKNTYDVVYLKVAKPSNAYLSDSYAPPDITTSYSQHLDNEISHSSYLGTDYPTAMTPTSPRRYSPVAKDLLGEEDIPREPRRIVIHRGSTGLGFNIVGGEDGEGIFISFILAGGPADLSGELRKGDQILSVNGVDLRNASHEQAAIALKNAGQTVTIIAQYKPEEYSRFEAKIHDLREQLMNSSLGSGTASLRSNPKRGFYIRALFDYDKTKDCGFLSQALSFRFGDVLHVIDASDEEWWQARRVHSDSETDDIGFIPSKRRVERREWSRLKAKDWGSSSGSQGREDSVLSYETVTQMEVHYARPIIILGPTKDRANDDLLSEFPDKFGSCVPHTTRPKREYEIDGRDYHFVSSREKMEKDIQAHKFIEAGQYNSHLYGTSVQSVREVAEQGKHCILDVSANAVRRLQAAHLHPIAIFIRPRSLENVLEINKRITEEQARKAFDRATKLEQEFTECFSAIVEGDSFEEIYHKVKRVIEDLSGPYIWVPARERL

SEQ ID NO: 27290 - protein, 721 aa, Homo sapiens
  REGION 1..721: note = ENSP00000307471
MDCLCIVTTKKYRYQDEDTPPLEHSPAHLPNQANSPPVIVNTDTLEAPGYVNGTEGEMEYEEITLERGNSGLGFSIAGGTDNPHIGDDPSIFITKIIPGGAAAQDGRLRVNDSILFVNEVDVREVTHSAAVEALKEAGSIVRLYVMRRKPPAEKVMEIKLIKGPKGLGFSIAGGVGNQHIPGDNSIYVTKIIEGGAAHKDGRLQIGDKILAVNSVGLEDVMHEDAVAALKNTYDVVYLKVAKPSNAYLSDSYAPPDITTSYSQHLDNEISHSSYLGTDYPTAMTPTSPRRYSPVAKDLLGEEDIPREPRRIVIHRGSTGLGFNIVGGEDGEGIFISFILAGGPADLSGELRKGDQILSVNGVDLRNASHEQAAIALKNAGQTVTIIAQYKPEEYSRFEAKIHDLREQLMNSSLGSGTASLRSNPKRGFYIRALFDYDKTKDCGFLSQALSFRFGDVLHVIDASDEEWWQARRVHSDSETDDIGFIPSKRRVERREWSRLKAKDWGSSSGSQGREDSVLSYETVTQMEVHYARPIIILGPTKDRANDDLLSEFPDKFGSCVPHTTRPKREYEIDGRDYHFVSSREKMEKDIQAHKFIEAGQYNSHLYGTSVQSVREVAEQGKHCILDVSANAVRRLQAAHLHPIAIFIRPRSLENVLEINKRITEEQARKAFDRATKLEQEFTECFSAIVEGDSFEEIYHKVKRVIEDLSGPYIWVPARERL

SEQ ID NO: 27291 - protein, 767 aa, Homo sapiens
  REGION 1..767: note = ENSP00000382428
MSQRPRAPRSALWLLAPPLLRWAPPLLTVLHSDLFQALLDILDYYEASLSESQKYRYQDEDTPPLEHSPAHLPNQANSPPVIVNTDTLEAPGYELQVNGTEGEMEYEEITLERGNSGLGFSIAGGTDNPHIGDDPSIFITKIIPGGAAAQDGRLRVNDSILFVNEVDVREVTHSAAVEALKEAGSIVRLYVMRRKPPAEKVMEIKLIKGPKGLGFSIAGGVGNQHIPGDNSIYVTKIIEGGAAHKDGRLQIGDKILAVNSVGLEDVMHEDAVAALKNTYDVVYLKVAKPSNAYLSDSYAPPDITTSYSQHLDNEISHSSYLGTDYPTAMTPTSPRRYSPVAKDLLGEEDIPREPRRIVIHRGSTGLGFNIVGGEDGEGIFISFILAGGPADLSGELRKGDQILSVNGVDLRNASHEQAAIALKNAGQTVTIIAQYKPEEYSRFEAKIHDLREQLMNSSLGSGTASLRSNPKRGFYIRALFDYDKTKDCGFLSQALSFRFGDVLHVIDASDEEWWQARRVHSDSETDDIGFIPSKRRVERREWSRLKAKDWGSSSGSQGREDSVLSYETVTQMEVHYARPIIILGPTKDRANDDLLSEFPDKFGSCVPHTTRPKREYEIDGRDYHFVSSREKMEKDIQAHKFIEAGQYNSHLYGTSVQSVREVAEQGKHCILDVSANAVRRLQAAHLHPIAIFIRPRSLENVLEINKRITEEQARKAFDRATKLEQEFTECFSAIVEGDSFEEIYHKVKRVIEDLSGPYIWVPARERL

SEQ ID NO: 27292 - protein, 85 aa, Homo sapiens
  REGION 1..85: note = ENSP00000467897
  VARIANT 1: note = Any amino acid
XGPTKDRANDDLLSEFPDKFGSCVPHTTRPKREYEIDGRDYHFVSSREKMEKDIQAHKFIEAGQYNSHLYGTSVQSVREVAEQRD

SEQ ID NO: 27293 - protein, 296 aa, Homo sapiens
  REGION 1..296: note = ENSP00000460625
MDCLCIVTTKKYRYQDEDTPPLEHSPAHLPNQANSPPVIVNTDTLEAPGYVNGTEGEMEYEEITLERGNSGLGFSIAGGTDNPHIGDDPSIFITKIIPGGAAAQDGRLRVNDSILFVNEVDVREVTHSAAVEALKEAGSIVRLYVMRRKPPAEKVMEIKLIKGPKGLGFSIAGGVGNQHIPGDNSIYVTKIIEGGAAHKDGRLQIGDKILAVNSVGLEDVMHEDAVAALKNTYDVVYLKVAKPSNAYLSDSYAPPDITTCESPSNTKVPHDPSRLTHDMQSHDIPVAVPLQIFPMK

SEQ ID NO: 27294 - protein, 281 aa, Homo sapiens
  REGION 1..281: note = ENSP00000407918
MPINGVNLAWKYRYQDEDTPPLEHSPAHLPNQVNAPELVHVAERNLSHLEAGHGVVGHAHLSPFKANSPPVIVNTDTLEAPGYELQVNGTEGEMEYEEITLERGNSGLGFSIAGGTDNPHIGDDPSIFITKIIPGGAAAQDGRLRVNDSILFVNEVDVREVTHSAAVEALKEAGSIVRLYVMRRKPPAEKVMEIKLIKGPKGLGFSIAGGVGNQHIPGDNSIYVTKIIEGGAAHKDGRLQIGDKILAVNSVGLEDVMHEDAVAALKNTYDVVYLKVAKPSN

SEQ ID NO: 27295 - protein, 234 aa, Homo sapiens
  REGION 1..234: note = ENSP00000388122
MDCLCIVTTKKYRYQDEDTPPLEHSPAHLPNQVNAPELVHVAERNLSHLEAGHGVVGHAHLSPFKANSPPVIVNTDTLEAPGYVNGTEGEMEYEEITLERGNSGLGFSIAGGTDNPHIGDDPSIFITKIIPGGAAAQDGRLRVNDSILFVNEVDVREVTHSAAVEALKEAGSIVRLYVMRRKPPAEKVMEIKLIKGPKGLGFSIAGGVGNQHIPGDNSIYVTKIIEGGAAHKDG

SEQ ID NO: 27296 - protein, 115 aa, Homo sapiens
  REGION 1..115: note = ENSP00000465720
MEYEEITLERGNSGLGFSIAGGTDNPHIGDDPSIFITKIIPGGAAAQDGRLRVNDSILFVNEVDVREVTHSAAVEALKEAGSIVRLYVMRRKPPAEKVMEIKLIKGPKGLGFSIA

SEQ ID NO: 27297 - protein, 91 aa, Homo sapiens
  REGION 1..91: note = ENSP00000465789
MEYEEITLERGNSGLGFSIAGGTDNPHIGDDPSIFITKIIPGGAAAQDGRLRVNDSILFVNEVDVREVTHSAAVEALKEAGSIVRLYVMRR

SEQ ID NO: 27298 - protein, 975 aa, Homo sapiens
  REGION 1..975: note = ENSP00000478085
MKGLSGSRTQPPLCSGHTCGLAPPEDCEHLHHGPDARPPYLLSPADSCPGGRHRCSPRSSVHSECVMMPVVLGDHVSSSTFPRMHYSSHYDTRDDCAVAHAGAKINRIPANLLDQFEKQLPLHRDGFHTLQYQRTSAAAEQRSESPGRIRHLVHSVQKLFTKSHSLEGSSKSNANGTKADGRADDHHHAHHAKHSKRSKSKERKPEGKPRPGMSSWWSSDDNLDSDSTYRTPSVLNRHHLGPVAHCYPDALQSPFGDLSLKTSKSNNDVKCSACEGLALTPDAKYLKRSSWSTLTVSQAKEAYRKSSLNLDKPLLHQDAKPALRPCHYLQVPQDEWGGYPTGGKDEEIPCRRMRSGSYIKAMGDEESGESDSSPKTSPKSAILQEPLLKSIGQRPLGEHQTQTYLQAASDVPVGHSLDPAANYNSPKFRSRNQSYMRAVSTLSQASCVSQVSEAEINGQFESVCESVFSEVESQAMDALDLPGCFRTRSHSYLRAIQAGYSQDDECIPMMTPSDITSTIRSTAAVSYTNYKKTPPPVPPRTTSKPLISVTAQSSTESTQDAYQDSRAQRMSPWPQDSRGLYNSTDSLDSNKAMNLALETAAAQRHLPESQSSSVRTSDKAILVSKAEELLKSRCSSIGIQDSEFPEHQPYPRSDVETATDSDTESRGLREYHSVGVQVEDEKRHGRFKRSNSVTAAVQADLELEGFPGHITTEDKGLQFGSSFQRHSEPSTPTQYSAVRTVRTQGLFSYREDYRTQVDTSTLPPPDPWLEPAIDTVETGRMSPCRRDGSWFLKLLHAETKRMEGWCKEMEREAEENDLSEEILGKIRSAVGSAQLLMSQKFQQFYWLCQQNMDPSAMPRPTSQDLAGYWDMLQLSIEDVSMKFDELQRLRLNDWKMMESPERKEERKVPPPIPKKPPKGKFPITREKSLDLPDRQRQEARRRLMAAKRAASFRQNSASERADSIEIYIPEAQTRL

SEQ ID NO: 27299 - protein, 961 aa, Homo sapiens
  REGION 1..961: note = ENSP00000488195
MKGLSGSRTQPPLCSGHTCGLAPPEDCEHLHHGPDARPPYLLSPADSCPGGRHRCSPRSSVHSECVMMPVVLGDHVSSSTFPRMHYSSHYDTRDDCAVAHAGAKINRIPANLLDQFEKQLPLHRDGFHTLQYQRTSAAAEQRSESPGRIRHLVHSVQKLFTKSHSLEGSSKSNANGTKADGRADDHHHAHHAKHSKRSKSKERKPEGKPRPGMSSWWSSDDNLDSDSTYRTPSVLNRHHLGPVAHCYPDALQSPFGDLSLKTSKSNNDVKCSACEGLALTPDAKYLKRSSWSTLTVSQAKEAYRKSSLNLDKPLLHQDAKPALRPCHYLQVPQDEWGGYPTGGKDEEIPCRRMRSGSYIKAMGDEESGESDSSPKTSPKSAILQEPLLKSIGQRPLGEHQTQTYLQAASDVPVGHSLDPAANYNSPKFRSRNQSYMRAVSTLSQASCVSQVSEAEINGQFESVCESVFSEVESQAMDALDLPGCFRTRSHSYLRAIQAGYSQDDECIPMMTPSDITSTIRSTAAVSYTNYKKTPPPVPPRTTSKPLISVTAQSSTESTQDAYQDSRAQRMSPWPQDSRGLYNSTDSLDSNKAMNLALETAAAQRHLPESQSSSVRTSDKAILVSKAEELLKSRCSSIGIQVETATDSDTESRGLREYHSVGVQVEDEKRHGRFKRSNSVTAAVQADLELEGFPGHITTEDKGLQFGSSFQRHSEPSTPTQYSAVRTVRTQGLFSYREDYRTQVDTSTLPPPDPWLEPAIDTVETGRMSPCRRDGSWFLKLLHAETKRMEGWCKEMEREAEENDLSEEILGKIRSAVGSAQLLMSQKFQQFYWLCQQNMDPSAMPRPTSQDLAGYWDMLQLSIEDVSMKFDELQRLRLNDWKMMESPERKEERKVPPPIPKKPPKGKFPITREKSLDLPDRQRQEARRRLMAAKRAASFRQNSASERADSIEIYIPEAQTRL

SEQ ID NO: 27300 - protein, 961 aa, Homo sapiens; identical to SEQ ID NO: 27299
  REGION 1..961: note = ENSP00000483427

SEQ ID NO: 27301 - protein, 561 aa, Homo sapiens
  REGION 1..561: note = ENSP00000488273
  VARIANT 1: note = Any amino acid
XQTYLQAASDVPVGHSLDPAANYNSPKFRSRNQSYMRAVSTLSQASCVSQVSEAEINGQFESVCESVFSEVESQAMDALDLPGCFRTRSHSYLRAIQAGYSQDDECIPMMTPSDITSTIRSTAAVSYTNYKKTPPPVPPRTTSKPLISVTAQSSTESTQDAYQDSRAQRMSPWPQDSRGLYNSTDSLDSNKAMNLALETAAAQRHLPESQSSSVRTSDKAILVSKAEELLKSRCSSIGIQVETATDSDTESRGLREYHSVGVQVEDEKRHGRFKRSNSVTAAVQADLELEGFPGHITTEDKGLQFGSSFQRHSEPSTPTQYSAVRTVRTQGLFSYREDYRTQVDTSTLPPPDPWLEPAIDTVETGRMSPCRRDGSWFLKLLHAETKRMEGWCKEMEREAEENDLSEEILGKIRSAVGSAQLLMSQKFQQFYWLCQQNMDPSAMPRPTSQDLAGYWDMLQLSIEDVSMKFDELQRLRLNDWKMMESPERKEERKVPPPIPKKPPKGKFPITREKSLDLPDRQRQEARRRLMAAKRAASFRQNSASERADSIEIYIPEAQTRL

SEQ ID NO: 27302 - protein, 575 aa, Homo sapiens
  REGION 1..575: note = ENSP00000488705
  VARIANT 1: note = Any amino acid
XQTYLQAASDVPVGHSLDPAANYNSPKFRSRNQSYMRAVSTLSQASCVSQVSEAEINGQFESVCESVFSEVESQAMDALDLPGCFRTRSHSYLRAIQAGYSQDDECIPMMTPSDITSTIRSTAAVSYTNYKKTPPPVPPRTTSKPLISVTAQSSTESTQDAYQDSRAQRMSPWPQDSRGLYNSTDSLDSNKAMNLALETAAAQRHLPESQSSSVRTSDKAILVSKAEELLKSRCSSIGIQDSEFPEHQPYPRSDVETATDSDTESRGLREYHSVGVQVEDEKRHGRFKRSNSVTAAVQADLELEGFPGHITTEDKGLQFGSSFQRHSEPSTPTQYSAVRTVRTQGLFSYREDYRTQVDTSTLPPPDPWLEPAIDTVETGRMSPCRRDGSWFLKLLHAETKRMEGWCKEMEREAEENDLSEEILGKIRSAVGSAQLLMSQKFQQFYWLCQQNMDPSAMPRPTSQDLAGYWDMLQLSIEDVSMKFDELQRLRLNDWKMMESPERKEERKVPPPIPKKPPKGKFPITREKSLDLPDRQRQEARRRLMAAKRAASFRQNSASERADSIEIYIPEAQTRL

SEQ ID NO: 27303 - protein, 176 aa, Homo sapiens
  REGION 1..176: note = ENSP00000487701
  VARIANT 1: note = Any amino acid
XTATDSDTESRGLREYHSVGVQVEDEKRHGRFKRSNSVTAAVQADLELEGFPGHITTEDKGLQFGSSFQRHSEPSTPTQYSAVRTVRTQGLFSYREDYRTQVDTSTLPPPDPWLEPAIDTVETGRMSPCRRDGSWFLKLLHAETKRMEGWCKEMEREAEENDLSEESKSSGFPRAS

SEQ ID NO: 27304 - protein, 158 aa, Homo sapiens
  REGION 1..158: note = ENSP00000488020
SAVRTVRTQGLFSYREDYRTQVDTSTLPPPDPWLEPAIDTVETGRMSPCRRDGSWFLKLLHAETKRMEGWCKEMEREAEENDLSEEKLLPAHALQENALALCQREVDGGDDGRRMLGRCCLPRDPQSPQHGCMGLVQVSTAVFRSFTRRLHFSWLGYI

SEQ ID NO: 27305 - protein, 400 aa, Homo sapiens
  REGION 1..400: note = ENSP00000487728
MKGLSGSRTQPPLCSGHTCGLAPPEDCEHLHHGPDARPPYLLSPADSCPGGRHRCSPRSSVHSECVMMPVVLGDHVSSSTFPRMHYSSHYDTRDDCAVAHAGAKINRIPANLLDQFEKQLPLHRDGFHTLQYQRTSAAAEQRSESPGRIRHLVHSVQKLFTKSHSLEGSSKSNANGTKADGRADDHHHAHHAKHSKRSKSKERKPEGKPRPGMSSWWSSDDNLDSDSTYRTPSVLNRHHLGPVAHCYPDALQSPFGDLSLKTSKSNNDVKCSACEGLALTPDAKYLKRSSWSTLTVSQAKEAYRKSSLNLDKPLLHQDAKPALRPCHYLQVPQDEWGGYPTGGKDEEIPCRRMRSGSYIKAMGDEESGESDSSPKTSPKSAILPEPLLKSIGQRPLGEHQ

SEQ ID NO: 27306 - protein, 400 aa, Homo sapiens; identical to SEQ ID NO: 27305
  REGION 1..400: note = ENSP00000488908

SEQ ID NO: 27307 - protein, 1055 aa, Homo sapiens
  REGION 1..1055: note = ENSP00000489774
MSALRKVLPGILQKHCCILPDRNTESQCTLCGEPEEEEAGDLVQPGISFPGPAEEDLDPQYSWSPTQHFNEERYSPAPRSMKGLSGSRTQPPLCSGHTCGLAPPEDCEHLHHGPDARPPYLLSPADSCPGGRHRCSPRSSVHSECVMMPVVLGDHVSSSTFPRMHYSSHYDTRDDCAVAHAGAKINRIPANLLDQFEKQLPLHRDGFHTLQYQRTSAAAEQRSESPGRIRHLVHSVQKLFTKSHSLEGSSKSNANGTKADGRADDHHHAHHAKHSKRSKSKERKPEGKPRPGMSSWWSSDDNLDSDSTYRTPSVLNRHHLGPVAHCYPDALQSPFGDLSLKTSKSNNDVKCSACEGLALTPDAKYLKRSSWSTLTVSQAKEAYRKSSLNLDKPLLHQDAKPALRPCHYLQVPQDEWGGYPTGGKDEEIPCRRMRSGSYIKAMGDEESGESDSSPKTSPKSAILPEPLLKSIGQRPLGEHQTQTYLQAASDVPVGHSLDPAANYNSPKFRSRNQSYMRAVSTLSQASCVSQVSEAEINGQFESVCESVFSEVESQAMDALDLPGCFRTRSHSYLRAIQAGYSQDDECIPMMTPSDITSTIRSTAAVSYTNYKKTPPPVPPRTTSKPLISVTAQSSTESTQDAYQDSRAQRMSPWPQDSRGLYNSTDSLDSNKAMNLALETAAAQRHLPESQSSSVRTSDKAILVSKAEELLKSRCSSIGIQDSEFPEHQPYPRSDVETATDSDTESRGLREYHSVGVQVEDEKRHGRFKRSNSVTAAVQADLELEGFPGHITTEDKGLQFGSSFQRHSEPSTPTQYSAVRTVRTQGLFSYREDYRTQVDTSTLPPPDPWLEPAIDTVETGRMSPCRRDGSWFLKLLHAETKRMEGWCKEMEREAEENDLSEEILGKIRSAVGSAQLLMSQKFQQFYWLCQQNMDPSAMPRPTSQDLAGYWDMLQLSIEDVSMKFDELQRLRLNDWKMMESPERKEERKVPPPIPKKPPKGKFPITREKSLDLPDRQRQEARRRLMAAKRAASFRQNSASERADSIEIYIPEAQTRL

SEQ ID NO: 27308 - protein, 1054 aa, Homo sapiens
  REGION 1..1054: note = ENSP00000400258
MGTAQVLPGILQKHCCILPDRNTESQCTLCGEPEEEEAGDLVQPGISFPGPAEEDLDPQYSWSPTQHFNEERYSPAPRSMKGLSGSRTQPPLCSGHTCGLAPPEDCEHLHHGPDARPPYLLSPADSCPGGRHRCSPRSSVHSECVMMPVVLGDHVSSSTFPRMHYSSHYDTRDDCAVAHAGAKINRIPANLLDQFEKQLPLHRDGFHTLQYQRTSAAAEQRSESPGRIRHLVHSVQKLFTKSHSLEGSSKSNANGTKADGRADDHHHAHHAKHSKRSKSKERKPEGKPRPGMSSWWSSDDNLDSDSTYRTPSVLNRHHLGPVAHCYPDALQSPFGDLSLKTSKSNNDVKCSACEGLALTPDAKYLKRSSWSTLTVSQAKEAYRKSSLNLDKPLLHQDAKPALRPCHYLQVPQDEWGGYPTGGKDEEIPCRRMRSGSYIKAMGDEESGESDSSPKTSPKSAILPEPLLKSIGQRPLGEHQTQTYLQAASDVPVGHSLDPAANYNSPKFRSRNQSYMRAVSTLSQASCVSQVSEAEINGQFESVCESVFSEVESQAMDALDLPGCFRTRSHSYLRAIQAGYSQDDECIPMMTPSDITSTIRSTAAVSYTNYKKTPPPVPPRTTSKPLISVTAQSSTESTQDAYQDSRAQRMSPWPQDSRGLYNSTDSLDSNKAMNLALETAAAQRHLPESQSSSVRTSDKAILVSKAEELLKSRCSSIGIQDSEFPEHQPYPRSDVETATDSDTESRGLREYHSVGVQVEDEKRHGRFKRSNSVTAAVQADLELEGFPGHITTEDKGLQFGSSFQRHSEPSTPTQYSAVRTVRTQGLFSYREDYRTQVDTSTLPPPDPWLEPAIDTVETGRMSPCRRDGSWFLKLLHAETKRMEGWCKEMEREAEENDLSEEILGKIRSAVGSAQLLMSQKFQQFYWLCQQNMDPSAMPRPTSQDLAGYWDMLQLSIEDVSMKFDELQRLRLNDWKMMESPERKEERKVPPPIPKKPPKGKFPITREKSLDLPDRQRQEARRRLMAAKRAASFRQNSASERADSIEIYIPEAQTRL

SEQ ID NO: 27309 - protein, 978 aa, Homo sapiens
  REGION 1..978: note = ENSP00000430563
  VARIANT 1: note = Any amino acid
XPTQHFNEERYSPAPRSMKGLSGSRTQPPLCSGHTCGLAPPEDCEHLHHGPDARPPYLLSPADSCPGGRHRCSPRSSVHSECVMMPVVLGDHVSSSTFPRMHYSSHYDTRDDCAVAHAGAKINRIPANLLDQFEKQLPLHRDGFHTLQYQRTSAAAEQRSESPGRIRHLVHSVQKLFTKSHSLEGSSKSNANGTKADGRADDHHHAHHAKHSKRSKSKERKPEGKPRPGMSSWWSSDDNLDSDSTYRTPSVLNRHHLGPVAHCYPDALQSPFGDLSLKTSKSNNDVKCSACEGLALTPDAKYLKRSSWSTLTVSQAKEAYRKSSLNLDKPLLHQDAKPALRPCHYLQVPQDEWGGYPTGGKDEEIPCRRMRSGSYIKAMGDEESGESDSSPKTSPKSAILPEPLLKSIGQRPLGEHQTQTYLQAASDVPVGHSLDPAANYNSPKFRSRNQSYMRAVSTLSQASCVSQVSEAEINGQFESVCESVFSEVESQAMDALDLPGCFRTRSHSYLRAIQAGYSQDDECIPMMTPSDITSTIRSTAAVSYTNYKKTPPPVPPRTTSKPLISVTAQSSTESTQDAYQDSRAQRMSPWPQDSRGLYNSTDSLDSNKAMNLALETAAAQRHLPESQSSSVRTSDKAILVSKAEELLKSRCSSIGIQVETATDSDTESRGLREYHSVGVQVEDEKRHGRFKRSNSVTAAVQADLELEGFPGHITTEDKGLQFGSSFQRHSEPSTPTQYSAVRTVRTQGLFSYREDYRTQVDTSTLPPPDPWLEPAIDTVETGRMSPCRRDGSWFLKLLHAETKRMEGWCKEMEREAEENDLSEEILGKIRSAVGSAQLLMSQKFQQFYWLCQQNMDPSAMPRPTSQDLAGYWDMLQLSIEDVSMKFDELQRLRLNDWKMMESPERKEERKVPPPIPKKPPKGKFPITREKSLDLPDRQRQEARRRLMAAKRAASFRQNSASERADSIEIYIPEAQTRL

SEQ ID NO: 27310 - protein, 176 aa, Homo sapiens; identical to SEQ ID NO: 27303
  REGION 1..176: note = ENSP00000488645
  VARIANT 1: note = Any amino acid

SEQ ID NO: 27311 - protein, 158 aa, Homo sapiens; identical to SEQ ID NO: 27304
  REGION 1..158: note = ENSP00000488445

SEQ ID NO: 27312 - protein, 961 aa, Homo sapiens
  REGION 1..961: note = ENSP00000484215
MKGLSGSRTQPPLCSGHTCGLAPPEDCEHLHHGPDARPPYLLSPADSCPGGRHRCSPRSSVHSECVMMPVVLGDHVSSSTFPRMHYSSHYDTRDDCAVAHAGAKINRIPANLLDQFEKQLPLHRDGFHTLQYQRTSAAAEQRSESPGRIRHLVHSVQKLFTKSHSLEGSSKSNANGTKADGRADDHHHAHHAKHSKRSKSKERKPEGKPRPGMSSWWSSDDNLDSDSTYRTPSVLNRHHLGPVAHCYPDALQSPFGDLSLKTSKSNNDVKCSACEGLALTPDAKYLKRSSWSTLTVSQAKEAYRKSSLNLDKPLLHQDAKPALRPCHYLQVPQDEWGGYPTGGKDEEIPCRRMRSGSYIKAMGDEESGESDSSPKTSPKSAILPEPLLKSIGQRPLGEHQTQTYLQAASDVPVGHSLDPAANYNSPKFRSRNQSYMRAVSTLSQASCVSQVSEAEINGQFESVCESVFSEVESQAMDALDLPGCFRTRSHSYLRAIQAGYSQDDECIPMMTPSDITSTIRSTAAVSYTNYKKTPPPVPPRTTSKPLISVTAQSSTESTQDAYQDSRAQRMSPWPQDSRGLYNSTDSLDSNKAMNLALETAAAQRHLPESQSSSVRTSDKAILVSKAEELLKSRCSSIGIQVETATDSDTESRGLREYHSVGVQVEDEKRHGRFKRSNSVTAAVQADLELEGFPGHITTEDKGLQFGSSFQRHSEPSTPTQYSAVRTVRTQGLFSYREDYRTQVDTSTLPPPDPWLEPAIDTVETGRMSPCRRDGSWFLKLLHAETKRMEGWCKEMEREAEENDLSEEILGKIRSAVGSAQLLMSQKFQQFYWLCQQNMDPSAMPRPTSQDLAGYWDMLQLSIEDVSMKFDELQRLRLNDWKMMESPERKEERKVPPPIPKKPPKGKFPITREKSLDLPDRQRQEARRRLMAAKRAASFRQNSASERADSIEIYIPEAQTRL

SEQ ID NO: 27313 - protein, 989 aa, Homo sapiens
  REGION 1..989: note = ENSP00000363023
MKGLGDSRPRHLSDSLDPPHEPLFAGTDRNPYLLSPTEAFAREARFPGQNTLPGDGLFPLNNQLPPPSSTFPRIHYNSHFEVPEESPFPSHAQATKINRLPANLLDQFEKQLPIHRDGFSTLQFPRGEAKARGESPGRIRHLVHSVQRLFFTKAPSLEGTAGKVGGNGSKKGGMEDGKGRRAKSKERAKAGEPKRRSRSNISGWWSSDDNLDGEAGAFRSSGPASGLMTLGRQAERSQPRYFMHAYNTISGHMLKTTKNNTTELTAPPPPPAPPATCPSLGVGTDTNYVKRGSWSTLTLSHAHEVCQKTSATLDKSLLKSKSCHQGLAYHYLQVPGGGGEWSTTLLSPRETDAAAEGPIPCRRMRSGSYIKAMGDEDSDESGGSPKPSPKTAARRQSYLRATQQSLGEQSNPRRSLDRLDSVDMLLPSKCPSWEEDYTPVSDSLNDSSCISQIFGQASLIPQLFGHEQQVREAELSDQYEAACESACSEAESTAAETLDLPLPSYFRSRSHSYLRAIQAGCSQEEDSVSLQSLSPPPSTGSLSNSRTLPSSSCLVAYKKTPPPVPPRTTSKPFISVTVQSSTESAQDTYLDSQDHKSEVTSQSGLSNSSDSLDSSTRPPSVTRGGVAPAPEAPEPPPKHAALKSEQGTLTSSESHPEAAPKRKLSSIGIQERTRRNGSHLSEDNGPKAIDVMAPSSESSVPSHSMSSRRDTDSDTQDANDSSCKSSERSLPDCTPHPNSISIDAGPRQAPKIAQIKRNLSYGDNSDPALEASSLPPPDPWLETSSSSPAEPAQPGACRRDGYWFLKLLQAETERLEGWCCQMDKETKENNLSEEVLGKVLSAVGSAQLLMSQKFQQFRGLCEQNLNPDANPRPTAQDLAGFWDLLQLSIEDISMKFDELYHLKANSWQLVETPEKRKEEKKPPPPVPKKPAKSKPAVSRDKASDASDKQRQEARKRLLAAKRAASVRQNSATESADSIEIYVPEAQTRL

SEQ ID NO: 27314 - protein, 992 aa, Homo sapiens
  REGION 1..992: note = ENSP00000363014
MKGLGDSRPRHLSDSLDPPHEPLFAGTDRNPYLLSPTEAFAREARFPGQNTLPGDGLFPLNNQLPPPSSTFPRIHYNSHFEVPEESPFPSHAQATKINRLPANLLDQFEKQLPIHRDGFSTLQFPRGEAKARGESPGRIRHLVHSVQRLFFTKAPSLEGTAGKVGGNGSKKGGMEDGKGRRAKSKERAKAGEPKRRSRSNISGWWSSDDNLDGEAGAFRSSGPASGLMTLGRQAERSQPRYFMHAYNTISGHMLKTTKNNTTELTAPPPPPAPPATCPSLGVGTDTNYVKRGSWSTLTLSHAHEVCQKTSATLDKSLLKSKSCHQGLAYHYLQVPGGGGEWSTTLLSPRETDAAAEGPIPCRRMRSGSYIKAMGDEDSDESGGSPKPSPKTAARRQSYLRATQQSLGEQSNPRRSLDRLDSVDMLLPSKCPSWEEDYTPVSDSLNDSSCISQIFGQASLIPQLFGHEQQVREAELSDQYEAACESACSEAESTAAETLDLPLPSYFRSRSHSYLRAIQAGCSQEEDSVSLQSLSPPPSTGSLSNSRTLPSSSCLVAYKKTPPPVPPRTTSKPFISVTVQSSTESAQDTYLDSQDHKSEVTSQSGLSNSSDSLDSSTRPPSVTRGGVAPAPEAPEPPPKHAALKSEQGTLTSSESHPEAAPKRKLSSIGIQVDCIQPVPKEEPSPATKFQSIGVQVEDDWRSSVPSHSMSSRRDTDSDTQDANDSSCKSSERSLPDCTPHPNSISIDAGPRQAPKIAQIKRNLSYGDNSDPALEASSLPPPDPWLETSSSSPAEPAQPGACRRDGYWFLKLLQAETERLEGWCCQMDKETKENNLSEEVLGKVLSAVGSAQLLMSQKFQQFRGLCEQNLNPDANPRPTAQDLAGFWDLLQLSIEDISMKFDELYHLKANSWQLVETPEKRKEEKKPPPPVPKKPAKSKPAVSRDKASDASDKQRQEARKRLLAAKRAASVRQNSATESADSIEIYVPEAQTRL

SEQ ID NO: 27315 - protein, 285 aa, Homo sapiens
  REGION 1..285: note = ENSP00000477723
MSSRRDTDSDTQDANDSSCKSSERSLPDCTPHPNSISIDAGPRQAPKIAQIKRNLSYGDNSDPALEASSLPPPDPWLETSSSSPAEPAQPGACRRDGYWFLKLLQAETERLEGWCCQMDKETKENNLSEEVLGKVLSAVGSAQLLMSQKFQQFRGLCEQNLNPDANPRPTAQDLAGFWDLLQLSIEDISMKFDELYHLKANSWQLVETPEKRKEEKKPPPPVPKKPAKSKPAVSRDKASDASDKQRQEARKRLLAAKRAASVRQNSATESADSIEIYVPEAQTRL

SEQ ID NO: 27316 - protein, 46 aa, Homo sapiens
  REGION 1..46: note = ENSP00000480166
MSSRRDTDSDTQDANDSSCKSSERSLPDCTPHPNSISIDAGPRQAP

SEQ ID NO: 27317 - protein, 125 aa, Homo sapiens
  REGION 1..125: note = ENSP00000484696
MSSRRDTDSDTQDANDSSCKSSERSLPDCTPHPNSISIDAGPRQAPKIAQIKRNLSYGDNSDPALEASSLPPPDPWLETSSSSPAEPAQPGACRRDGYWFLKLLQAETERLEGWCCQMDKETKEN

SEQ ID NO: 27318 - protein, 453 aa, Homo sapiens
  REGION 1..453: note = ENSP00000345700
MALCLELLKQCSSCLVAYKKTPPPVPPRTTSKPFISVTVQSSTESAQDTYLDSQDHKSEVTSQSGLSNSSDSLDSSTRPPSVTRGGVAPAPEAPEPPPKHAALKSEQGTLTSSESHPEAAPKRKLSSIGIQVDCIQPVPKEEPSPATKFQSIGVQVEDDWRSSVPSHSMSSRRDTDSDTQDANDSSCKSSERSLPDCTPHPNSISIDAGPRQAPKIAQIKRNLSYGDNSDPALEASSLPPPDPWLETSSSSPAEPAQPGACRRDGYWFLKLLQAETERLEGWCCQMDKETKENNLSEEVLGKVLSAVGSAQLLMSQKFQQFRGLCEQNLNPDANPRPTAQDLAGFWDLLQLSIEDISMKFDELYHLKANSWQLVETPEKRKEEKKPPPPVPKKPAKSKPAVSRDKASDASDKQRQEARKRLLAAKRAASVRQNSATESADSIEIYVPEAQTRL

SEQ ID NO: 27319 - protein, 244 aa, Homo sapiens
  REGION 1..244: note = ENSP00000419311
MAPSSESSVPSHSMSSRRDTDSDTQDANDSSCKSSERSLPDCTPHPNSISIDAGPRQAPKIAQIKRNLSYGDNSDPALEASSLPPPDPWLETSSSSPAEPAQPGACRRDGYWFLKLLQAETERLEGWCCQMDKETKENNLSEEVLGKVLSAVGSAQLLMSQKFQQFRGLCEQNLNPDANPRPTAQDLAGFWDLLQLSIEDISMKFDELYHLKANSWQLVETPEKRKVSMEQCGGEVQGQIPGRQ

SEQ ID NO: 27320 - protein, 989 aa, Homo sapiens; identical to SEQ ID NO: 27313
  REGION 1..989: note = ENSP00000384954

SEQ ID NO: 27321 - protein, 992 aa, Homo sapiens; identical to SEQ ID NO: 27314
  REGION 1..992: note = ENSP00000341633

SEQ ID NO: 27322 - protein, 635 aa, Homo sapiens
  REGION 1..635: note = ENSP00000367997
MREQLKGHETQTTCWDHPKMTELYQSLADLNNVRFSAYRTAMKLRRLQKALCLDLLSLSAACDALDQHNLKQNDQPMDILQIINCLTTIYDRLEQEHNNLVNVPLCVDMCLNWLLNVYDTGRTGRIRVLSFKTGIISLCKAHLEDKYRYLFKQVASSTGFCDQRRLGLLLHDSIQIPRQLGEVASFGGSNIEPSVRSCFQFANNKPEIEAALFLDWMRLEPQSMVWLPVLHRVAAAETAKHQAKCNICKECPIIGFRYRSLKHFNYDICQSCFFSGRVAKGHKMHYPMVEYCTPTTSGEDVRDFAKVLKNKFRTKRYFAKHPRMGYLPVQTVLEGDNMETPVTLINFWPVDSAPASSPQLSHDDTHSRIEHYASRLAEMENSNGSYLNDSISPNESIDDEHLLIQHYCQSLNQDSPLSQPRSPAQILISLESEERGELERILADLEEENRNLQAEYDRLKQQHEHKGLSPLPSPPEMMPTSPQSPRDAELIAEAKLLRQHKGRLEARMQILEDHNKQLESQLHRLRQLLEQPQAEAKVNGTTVSSPSTSLQRSDSSQPMLLRVVGSQTSDSMGEEDLLSPPQDTSTGLEEVMEQLNNSFPSSRGHNVGSLFHMADDLGRAMESLVSVMTDEEGAE

SEQ ID NO: 27323 - protein, 1386 aa, Homo sapiens
  REGION 1..1386: note = ENSP00000350765
VSRALPEKQGEIEAQIKDLGQLEKKLEDLEEQLNHLLLWLSPIRNQLEIYNQPNQEGPFDVKETEIAVQAKQPDVEEILSKGQHLYKEKPATQPVKRKLEDLSSEWKAVNRLLQELRAKQPDLAPGLTTIGASPTQTVTLVTQPVVTKETAISKLEMPSSLMLEVPALADFNRAWTELTDWLSLLDQVIKSQRVMVGDLEDINEMIIKQKATMQDLEQRRPQLEELITAAQNLKNKTSNQEARTIITDRIERIQNQWDEVQEHLQNRRQQLNEMLKDSTQWLEAKEEAEQVLGQARAKLESWKEGPYTVDAIQKKITETKQLAKDLRQWQTNVDVANDLALKLLRDYSADDTRKVHMITENINASWRSIHKRVSEREAALEETHRLLQQFPLDLEKFLAWLTEAETTANVLQDATRKERLLEDSKGVKELMKQWQDLQGEIEAHTDVYHNLDENSQKILRSLEGSDDAVLLQRRLDNMNFKWSELRKKSLNIRSHLEASSDQWKRLHLSLQELLVWLQLKDDELSRQAPIGGDFPAVQKQNDVHRAFKRELKTKEPVIMSTLETVRIFLTEQPLEGLEKLYQEPRELPPEERAQNVTRLLRKQAEEVNTEWEKLNLHSADWQRKIDETLERLRELQEATDELDLKLRQAEVIKGSWQPVGDLLIDSLQDHLEKVKALRGEIAPLKENVSHVNDLARQLTTLGIQLSPYNLSTLEDLNTRWKLLQVAVEDRVRQLHEAHRDFGPASQHFLSTSVQGPWERAISPNKVPYYINHETQTTCWDHPKMTELYQSLADLNNVRFSAYRTAMKLRRLQKALCLDLLSLSAACDALDQHNLKQNDQPMDILQIINCLTTIYDRLEQEHNNLVNVPLCVDMCLNWLLNVYDTGRTGRIRVLSFKTGIISLCKAHLEDKYRYLFKQVASSTGFCDQRRLGLLLHDSIQIPRQLGEVASFGGSNIEPSVRSCFQFANNKPEIEAALFLDWMRLEPQSMVWLPVLHRVAAAETAKHQAKCNICKECPIIGFRYRSLKHFNYDICQSCFFSGRVAKGHKMHYPMVEYCTPTTSGEDVRDFAKVLKNKFRTKRYFAKHPRMGYLPVQTVLEGDNMETPASSPQLSHDDTHSRIEHYASRLAEMENSNGSYLNDSISPNESIDDEHLLIQHYCQSLNQDSPLSQPRSPAQILISLESEERGELERILADLEEENRNLQAEYDRLKQQHEHKGLSPLPSPPEMMPTSPQSPRDAELIAEAKLLRQHKGRLEARMQILEDHNKQLESQLHRLRQLLEQPQAEAKVNGTTVSSPSTSLQRSDSSQPMLLRVVGSQTSDSMGEEDLLSPPQDTSTGLEEVMEQLNNSFPSSRGHNVGSLFHMADDLGRAMESLVSVMTDEEGAE

SEQ ID NO: 27324 - protein, 3681 aa, Homo sapiens
  REGION 1..3681: note = ENSP00000367948
MSEVSSDEREDVQKKTFTKWVNAQFSKFGKQHIENLFSDLQDGRRLLDLLEGLTGQKLPKEKGSTRVHALNNVNKALRVLQNNNVDLVNIGSTDIVDGNHKLTLGLIWNIILHWQVKNVMKNIMAGLQQTNSEKILLSWVRQSTRNYPQVNVINFTTSWSDGLALNALIHSHRPDLFDWNSVVCQQSATQRLEHAFNIARYQLGIEKLLDPEDVDTTYPDKKSILMYITSLFQVLPQQVSIEAIQEVEMLPRPPKVTKEEHFQLHHQMHYSQQITVSLAQGYERTSSPKPRFKSYAYTQAAYVTTSDPTRSPFPSQHLEAPEDKSFGSSLMESEVNLDRYQTALEEVLSWLLSAEDTLQAQGEISNDVEVVKDQFHTHEGYMMDLTAHQGRVGNILQLGSKLIGTGKLSEDEETEVQEQMNLLNSRWECLRVASMEKQSNLHRVLMDLQNQKLKELNDWLTKTEERTRKMEEEPLGPDLEDLKRQVQQHKVLQEDLEQEQVRVNSLTHMVVVVDESSGDHATAALEEQLKVLGDRWANICRWTEDRWVLLQDILLKWQRLTEEQCLFSAWLSEKEDAVNKIHTTGFKDQNEMLSSLQKLAVLKADLEKKKQSMGKLYSLKQDLLSTLKNKSVTQKTEAWLDNFARCWDNLVQKLEKSTAQISQAVTTTQPSLTQTTVMETVTTVTTREQILVKHAQEELPPPPPQKKRQITVDSEIRKRLDVDITELHSWITRSEAVLQSPEFAIFRKEGNFSDLKEKVNAIEREKAEKFRKLQDASRSAQALVEQMVNEGVNADSIKQASEQLNSRWIEFCQLLSERLNWLEYQNNIIAFYNQLQQLEQMTTTAENWLKIQPTTPSEPTAIKSQLKICKDEVNRLSDLQPQIERLKIQSIALKEKGQGPMFLDADFVAFTNHFKQVFSDVQAREKELQTIFDTLPPMRYQETMSAIRTWVQQSETKLSIPQLSVTDYEIMEQRLGELQALQSSLQEQQSGLYYLSTTVKEMSKKAPSEISRKYQSEFEEIEGRWKKLSSQLVEHCQKLEEQMNKLRKIQNHIQTLKKWMAEVDVFLKEEWPALGDSEILKKQLKQCRLLVSDIQTIQPSLNSVNEGGQKIKNEAEPEFASRLETELKELNTQWDHMCQQVYARKEALKGGLEKTVSLQKDLSEMHEWMTQAEEEYLERDFEYKTPDELQKAVEEMKRAKEEAQQKEAKVKLLTESVNSVIAQAPPVAQEALKKELETLTTNYQWLCTRLNGKCKTLEEVWACWHELLSYLEKANKWLNEVEFKLKTTENIPGGAEEISEVLDSLENLMRHSEDNPNQIRILAQTLTDGGVMDELINEELETFNSRWRELHEEAVRRQKLLEQSIQSAQETEKSLHLIQESLTFIDKQLAAYIADKVDAAQMPQEAQKIQSDLTSHEISLEEMKKHNQGKEAAQRVLSQIDVAQKKLQDVSMKFRLFQKPANFEQRLQESKMILDEVKMHLPALETKSVEQEVVQSQLNHCVNLYKSLSEVKSEVEMVIKTGRQIVQKKQTENPKELDERVTALKLHYNELGAKVTERKQQLEKCLKLSRKMRKEMNVLTEWLAATDMELTKRSAVEGMPSNLDSEVAWGKATQKEIEKQKVHLKSITEVGEALKTVLGKKETLVEDKLSLLNSNWIAVTSRAEEWLNLLLEYQKHMETFDQNVDHITKWIIQADTLLDESEKKKPQQKEDVLKRLKAELNDIRPKVDSTRDQAANLMANRGDHCRKLVEPQISELNHRFAAISHRIKTGKASIPLKELEQFNSDIQKLLEPLEAEIQQGVNLKEEDFNKDMNEDNEGTVKELLQRGDNLQQRITDERKREEIKIKQQLLQTKHNALKDLRSQRRKKALEISHQWYQYKRQADDLLKCLDDIEKKLASLPEPRDERKIKEIDRELQKKKEELNAVRRQAEGLSEDGAAMAVEPTQIQLSKRWREIESKFAQFRRLNFAQIHTVREETMMVMTEDMPLEISYVPSTYLTEITHVSQALLEVEQLLNAPDLCAKDFEDLFKQEESLKNIKDSLQQSSGRIDIIHSKKTAALQSATPVERVKLQEALSQLDFQWEKVNKMYKDRQGRFDRSVEKWRRFHYDIKIFNQWLTEAEQFLRKTQIPENWEHAKYKWYLKELQDGIGQRQTVVRTLNATGEEIIQQSSKTDASILQEKLGSLNLRWQEVCKQLSDRKKRLEEQKNILSEFQRDLNEFVLWLEEADNIASIPLEPGKEQQLKEKLEQVKLLVEELPLRQGILKQLNETGGPVLVSAPISPEEQDKLENKLKQTNLQWIKVSRALPEKQGEIEAQIKDLGQLEKKLEDLEEQLNHLLLWLSPIRNQLEIYNQPNQEGPFDVKETEIAVQAKQPDVEEILSKGQHLYKEKPATQPVKRKLEDLSSEWKAVNRLLQELRAKQPDLAPGLTTIGASPTQTVTLVTQPVVTKETAISKLEMPSSLMLEVPALADFNRAWTELTDWLSLLDQVIKSQRVMVGDLEDINEMIIKQKATMQDLEQRRPQLEELITAAQNLKNKTSNQEARTIITDRIERIQNQWDEVQEHLQNRRQQLNEMLKDSTQWLEAKEEAEQVLGQARAKLESWKEGPYTVDAIQKKITETKQLAKDLRQWQTNVDVANDLALKLLRDYSADDTRKVHMITENINASWRSIHKRVSEREAALEETHRLLQQFPLDLEKFLAWLTEAETTANVLQDATRKERLLEDSKGVKELMKQWQDLQGEIEAHTDVYHNLDENSQKILRSLEGSDDAVLLQRRLDNMNFKWSELRKKSLNIRSHLEASSDQWKRLHLSLQELLVWLQLKDDELSRQAPIGGDFPAVQKQNDVHRAFKRELKTKEPVIMSTLETVRIFLTEQPLEGLEKLYQEPRELPPEERAQNVTRLLRKQAEEVNTEWEKLNLHSADWQRKIDETLERLRELQEATDELDLKLRQAEVIKGSWQPVGDLLIDSLQDHLEKVKALRGEIAPLKENVSHVNDLARQLTTLGIQLSPYNLSTLEDLNTRWKLLQVAVEDRVRQLHEAHRDFGPASQHFLSTSVQGPWERAISPNKVPYYINHETQTTCWDHPKMTELYQSLADLNNVRFSAYRTAMKLRRLQKALCLDLLSLSAACDALDQHNLKQNDQPMDILQIINCLTTIYDRLEQEHNNLVNVPLCVDMCLNWLLNVYDTGRTGRIRVLSFKTGIISLCKAHLEDKYRYLFKQVASSTGFCDQRRLGLLLHDSIQIPRQLGEVASFGGSNIEPSVRSCFQFANNKPEIEAALFLDWMRLEPQSMVWLPVLHRVAAAETAKHQAKCNICKECPIIGFRYRSLKHFNYDICQSCFFSGRVAKGHKMHYPMVEYCTPTTSGEDVRDFAKVLKNKFRTKRYFAKHPRMGYLPVQTVLEGDNMETPVTLINFWPVDSAPASSPQLSHDDTHSRIEHYASRLAEMENSNGSYLNDSISPNESIDDEHLLIQHYCQSLNQDSPLSQPRSPAQILISLESEERGELERILADLEEENRNLQAEYDRLKQQHEHKGLSPLPSPPEMMPTSPQSPRDAELIAEAKLLRQHKGRLEARMQILEDHNKQLESQLHRLRQLLEQPQAEAKVNGTTVSSPSTSLQRSDSSQPMLLRVVGSQTSDSMGEEDLLSPPQDTSTGLEEVMEQLNNSFPSSRGRNTPGKPMREDTM

SEQ ID NO: 27325 - protein, 3685 aa, Homo sapiens
  REGION 1..3685: note = ENSP00000354923
MLWWEEVEDCYEREDVQKKTFTKWVNAQFSKFGKQHIENLFSDLQDGRRLLDLLEGLTGQKLPKEKGSTRVHALNNVNKALRVLQNNNVDLVNIGSTDIVDGNHKLTLGLIWNIILHWQVKNVMKNIMAGLQQTNSEKILLSWVRQSTRNYPQVNVINFTTSWSDGLALNALIHSHRPDLFDWNSVVCQQSATQRLEHAFNIARYQLGIEKLLDPEDVDTTYPDKKSILMYITSLFQVLPQQVSIEAIQEVEMLPRPPKVTKEEHFQLHHQMHYSQQITVSLAQGYERTSSPKPRFKSYAYTQAAYVTTSDPTRSPFPSQHLEAPEDKSFGSSLMESEVNLDRYQTALEEVLSWLLSAEDTLQAQGEISNDVEVVKDQFHTHEGYMMDLTAHQGRVGNILQLGSKLIGTGKLSEDEETEVQEQMNLLNSRWECLRVASMEKQSNLHRVLMDLQNQKLKELNDWLTKTEERTRKMEEEPLGPDLEDLKRQVQQHKVLQEDLEQEQVRVNSLTHMVVVVDESSGDHATAALEEQLKVLGDRWANICRWTEDRWVLLQDILLKWQRLTEEQCLFSAWLSEKEDAVNKIHTTGFKDQNEMLSSLQKLAVLKADLEKKKQSMGKLYSLKQDLLSTLKNKSVTQKTEAWLDNFARCWDNLVQKLEKSTAQISQAVTTTQPSLTQTTVMETVTTVTTREQILVKHAQEELPPPPPQKKRQITVDSEIRKRLDVDITELHSWITRSEAVLQSPEFAIFRKEGNFSDLKEKVNAIEREKAEKFRKLQDASRSAQALVEQMVNEGVNADSIKQASEQLNSRWIEFCQLLSERLNWLEYQNNIIAFYNQLQQLEQMTTTAENWLKIQPTTPSEPTAIKSQLKICKDEVNRLSDLQPQIERLKIQSIALKEKGQGPMFLDADFVAFTNHFKQVFSDVQAREKELQTIFDTLPPMRYQETMSAIRTWVQQSETKLSIPQLSVTDYEIMEQRLGELQALQSSLQEQQSGLYYLSTTVKEMSKKAPSEISRKYQSEFEEIEGRWKKLSSQLVEHCQKLEEQMNKLRKIQNHIQTLKKWMAEVDVFLKEEWPALGDSEILKKQLKQCRLLVSDIQTIQPSLNSVNEGGQKIKNEAEPEFASRLETELKELNTQWDHMCQQVYARKEALKGGLEKTVSLQKDLSEMHEWMTQAEEEYLERDFEYKTPDELQKAVEEMKRAKEEAQQKEAKVKLLTESVNSVIAQAPPVAQEALKKELETLTTNYQWLCTRLNGKCKTLEEVWACWHELLSYLEKANKWLNEVEFKLKTTENIPGGAEEISEVLDSLENLMRHSEDNPNQIRILAQTLTDGGVMDELINEELETFNSRWRELHEEAVRRQKLLEQSIQSAQETEKSLHLIQESLTFIDKQLAAYIADKVDAAQMPQEAQKIQSDLTSHEISLEEMKKHNQGKEAAQRVLSQIDVAQKKLQDVSMKFRLFQKPANFEQRLQESKMILDEVKMHLPALETKSVEQEVVQSQLNHCVNLYKSLSEVKSEVEMVIKTGRQIVQKKQTENPKELDERVTALKLHYNELGAKVTERKQQLEKCLKLSRKMRKEMNVLTEWLAATDMELTKRSAVEGMPSNLDSEVAWGKATQKEIEKQKVHLKSITEVGEALKTVLGKKETLVEDKLSLLNSNWIAVTSRAEEWLNLLLEYQKHMETFDQNVDHITKWIIQADTLLDESEKKKPQQKEDVLKRLKAELNDIRPKVDSTRDQAANLMANRGDHCRKLVEPQISELNHRFAAISHRIKTGKASIPLKELEQFNSDIQKLLEPLEAEIQQGVNLKEEDFNKDMNEDNEGTVKELLQRGDNLQQRITDERKREEIKIKQQLLQTKHNALKDLRSQRRKKALEISHQWYQYKRQADDLLKCLDDIEKKLASLPEPRDERKIKEIDRELQKKKEELNAVRRQAEGLSEDGAAMAVEPTQIQLSKRWREIESKFAQFRRLNFAQIHTVREETMMVMTEDMPLEISYVPSTYLTEITHVSQALLEVEQLLNAPDLCAKDFEDLFKQEESLKNIKDSLQQSSGRIDIIHSKKTAALQSATPVERVKLQEALSQLDFQWEKVNKMYKDRQGRFDRSVEKWRRFHYDIKIFNQWLTEAEQFLRKTQIPENWEHAKYKWYLKELQDGIGQRQTVVRTLNATGEEIIQQSSKTDASILQEKLGSLNLRWQEVCKQLSDRKKRLEEQKNILSEFQRDLNEFVLWLEEADNIASIPLEPGKEQQLKEKLEQVKLLVEELPLRQGILKQLNETGGPVLVSAPISPEEQDKLENKLKQTNLQWIKVSRALPEKQGEIEAQIKDLGQLEKKLEDLEEQLNHLLLWLSPIRNQLEIYNQPNQEGPFDVKETEIAVQAKQPDVEEILSKGQHLYKEKPATQPVKRKLEDLSSEWKAVNRLLQELRAKQPDLAPGLTTIGASPTQTVTLVTQPVVTKETAISKLEMPSSLMLEVPALADFNRAWTELTDWLSLLDQVIKSQRVMVGDLEDINEMIIKQKATMQDLEQRRPQLEELITAAQNLKNKTSNQEARTIITDRIERIQNQWDEVQEHLQNRRQQLNEMLKDSTQWLEAKEEAEQVLGQARAKLESWKEGPYTVDAIQKKITETKQLAKDLRQWQTNVDVANDLALKLLRDYSADDTRKVHMITENINASWRSIHKRVSEREAALEETHRLLQQFPLDLEKFLAWLTEAETTANVLQDATRKERLLEDSKGVKELMKQWQDLQGEIEAHTDVYHNLDENSQKILRSLEGSDDAVLLQRRLDNMNFKWSELRKKSLNIRSHLEASSDQWKRLHLSLQELLVWLQLKDDELSRQAPIGGDFPAVQKQNDVHRAFKRELKTKEPVIMSTLETVRIFLTEQPLEGLEKLYQEPRELPPEERAQNVTRLLRKQAEEVNTEWEKLNLHSADWQRKIDETLERLRELQEATDELDLKLRQAEVIKGSWQPVGDLLIDSLQDHLEKVKALRGEIAPLKENVSHVNDLARQLTTLGIQLSPYNLSTLEDLNTRWKLLQVAVEDRVRQLHEAHRDFGPASQHFLSTSVQGPWERAISPNKVPYYINHETQTTCWDHPKMTELYQSLADLNNVRFSAYRTAMKLRRLQKALCLDLLSLSAACDALDQHNLKQNDQPMDILQIINCLTTIYDRLEQEHNNLVNVPLCVDMCLNWLLNVYDTGRTGRIRVLSFKTGIISLCKAHLEDKYRYLFKQVASSTGFCDQRRLGLLLHDSIQIPRQLGEVASFGGSNIEPSVRSCFQFANNKPEIEAALFLDWMRLEPQSMVWLPVLHRVAAAETAKHQAKCNICKECPIIGFRYRSLKHFNYDICQSCFFSGRVAKGHKMHYPMVEYCTPTTSGEDVRDFAKVLKNKFRTKRYFAKHPRMGYLPVQTVLEGDNMETPVTLINFWPVDSAPASSPQLSHDDTHSRIEHYASRLAEMENSNGSYLNDSISPNESIDDEHLLIQHYCQSLNQDSPLSQPRSPAQILISLESEERGELERILADLEEENRNLQAEYDRLKQQHEHKGLSPLPSPPEMMPTSPQSPRDAELIAEAKLLRQHKGRLEARMQILEDHNKQLESQLHRLRQLLEQPQAEAKVNGTTVSSPSTSLQRSDSSQPMLLRVVGSQTSDSMGEEDLLSPPQDTSTGLEEVMEQLNNSFPSSRGRNTPGKPMREDTM

SEQ ID NO: 27326 - protein, 617 aa, Homo sapiens
  REGION 1..617: note = ENSP00000367974
MREQLKGHETQTTCWDHPKMTELYQSLADLNNVRFSAYRTAMKLRRLQKALCLDLLSLSAACDALDQHNLKQNDQPMDILQIINCLTTIYDRLEQEHNNLVNVPLCVDMCLNWLLNVYDTGRTGRIRVLSFKTGIISLCKAHLEDKYRYLFKQVASSTGFCDQRRLGLLLHDSIQIPRQLGEVASFGGSNIEPSVRSCFQFANNKPEIEAALFLDWMRLEPQSMVWLPVLHRVAAAETAKHQAKCNICKECPIIGFRYRSLKHFNYDICQSCFFSGRVAKGHKMHYPMVEYCTPTTSGEDVRDFAKVLKNKFRTKRYFAKHPRMGYLPVQTVLEGDNMETPVTLINFWPVDSAPASSPQLSHDDTHSRIEHYASRLAEMENSNGSYLNDSISPNESIDDEHLLIQHYCQSLNQDSPLSQPRSPAQILISLESEERGELERILADLEEENRNLQAEYDRLKQQHEHKGLSPLPSPPEMMPTSPQSPRDAELIAEAKLLRQHKGRLEARMQILEDHNKQLESQLHRLRQLLEQPQAEAKVNGTTVSSPSTSLQRSDSSQPMLLRVVGSQTSDSMGEEDLLSPPQDTSTGLEEVMEQLNNSFPSSRGRNTPGKPMREDTM

SEQ ID NO: 27327 - protein, 1243 aa, Homo sapiens
  REGION 1..1243: note = ENSP00000417123
MPSSLMLEVPALADFNRAWTELTDWLSLLDQVIKSQRVMVGDLEDINEMIIKQKATMQDLEQRRPQLEELITAAQNLKNKTSNQEARTIITDRIERIQNQWDEVQEHLQNRRQQLNEMLKDSTQWLEAKEEAEQVLGQARAKLESWKEGPYTVDAIQKKITETKQLAKDLRQWQTNVDVANDLALKLLRDYSADDTRKVHMITENINASWRSIHKRVSEREAALEETHRLLQQFPLDLEKFLAWLTEAETTANVLQDATRKERLLEDSKGVKELMKQWQDLQGEIEAHTDVYHNLDENSQKILRSLEGSDDAVLLQRRLDNMNFKWSELRKKSLNIRSHLEASSDQWKRLHLSLQELLVWLQLKDDELSRQAPIGGDFPAVQKQNDVHRAFKRELKTKEPVIMSTLETVRIFLTEQPLEGLEKLYQEPRELPPEERAQNVTRLLRKQAEEVNTEWEKLNLHSADWQRKIDETLERLRELQEATDELDLKLRQAEVIKGSWQPVGDLLIDSLQDHLEKVKALRGEIAPLKENVSHVNDLARQLTTLGIQLSPYNLSTLEDLNTRWKLLQVAVEDRVRQLHEAHRDFGPASQHFLSTSVQGPWERAISPNKVPYYINHETQTTCWDHPKMTELYQSLADLNNVRFSAYRTAMKLRRLQKALCLDLLSLSAACDALDQHNLKQNDQPMDILQIINCLTTIYDRLEQEHNNLVNVPLCVDMCLNWLLNVYDTGRTGRIRVLSFKTGIISLCKAHLEDKYRYLFKQVASSTGFCDQRRLGLLLHDSIQIPRQLGEVASFGGSNIEPSVRSCFQFANNKPEIEAALFLDWMRLEPQSMVWLPVLHRVAAAETAKHQAKCNICKECPIIGFRYRSLKHFNYDICQSCFFSGRVAKGHKMHYPMVEYCTPTTSGEDVRDFAKVLKNKFRTKRYFAKHPRMGYLPVQTVLEGDNMETPVTLINFWPVDSAPASSPQLSHDDTHSRIEHYASRLAEMENSNGSYLNDSISPNESIDDEHLLIQHYCQSLNQDSPLSQPRSPAQILISLESEERGELERILADLEEENRNLQAEYDRLKQQHEHKGLSPLPSPPEMMPTSPQSPRDAELIAEAKLLRQHKGRLEARMQILEDHNKQLESQLHRLRQLLEQPQAEAKVNGTTVSSPSTSLQRSDSSQPMLLRVVGSQTSDSMGEEDLLSPPQDTSTGLEEVMEQLNNSFPSSRGHNVGSLFHMADDLGRAMESLVSVMTDEEGAE

SEQ ID NO: 27328 - protein, 622 aa, Homo sapiens
  REGION 1..622: note = ENSP00000354464
MREQLKGHETQTTCWDHPKMTELYQSLADLNNVRFSAYRTAMKLRRLQKALCLDLLSLSAACDALDQHNLKQNDQPMDILQIINCLTTIYDRLEQEHNNLVNVPLCVDMCLNWLLNVYDTGRTGRIRVLSFKTGIISLCKAHLEDKYRYLFKQVASSTGFCDQRRLGLLLHDSIQIPRQLGEVASFGGSNIEPSVRSCFQFANNKPEIEAALFLDWMRLEPQSMVWLPVLHRVAAAETAKHQAKCNICKECPIIGFRYRSLKHFNYDICQSCFFSGRVAKGHKMHYPMVEYCTPTTSGEDVRDFAKVLKNKFRTKRYFAKHPRMGYLPVQTVLEGDNMETPASSPQLSHDDTHSRIEHYASRLAEMENSNGSYLNDSISPNESIDDEHLLIQHYCQSLNQDSPLSQPRSPAQILISLESEERGELERILADLEEENRNLQAEYDRLKQQHEHKGLSPLPSPPEMMPTSPQSPRDAELIAEAKLLRQHKGRLEARMQILEDHNKQLESQLHRLRQLLEQPQAEAKVNGTTVSSPSTSLQRSDSSQPMLLRVVGSQTSDSMGEEDLLSPPQDTSTGLEEVMEQLNNSFPSSRGHNVGSLFHMADDLGRAMESLVSVMTDEEGAE

SEQ ID NO: 27329 - protein, 525 aa, Homo sapiens
  REGION 1..525: note = ENSP00000367951
MREQLKGHETQTTCWDHPKMTELYQSLADLNNVRFSAYRTAMKLRRLQKALCLDLLSLSAACDALDQHNLKQNDQPMDILQIINCLTTIYDRLEQEHNNLVNVPLCVDMCLNWLLNVYDTGRTGRIRVLSFKTGIISLCKAHLEDKYRYLFKQVASSTGFCDQRRLGLLLHDSIQIPRQLGEVASFGGSNIEPSVRSCFQFANNKPEIEAALFLDWMRLEPQSMVWLPVLHRVAAAETAKHQAKCNICKECPIIGFRYRSLKHFNYDICQSCFFSGRVAKGHKMHYPMVEYCTPTTSGEDVRDFAKVLKNKFRTKRYFAKHPRMGYLPVQTVLEGDNMETNLQAEYDRLKQQHEHKGLSPLPSPPEMMPTSPQSPRDAELIAEAKLLRQHKGRLEARMQILEDHNKQLESQLHRLRQLLEQPQAEAKVNGTTVSSPSTSLQRSDSSQPMLLRVVGSQTSDSMGEEDLLSPPQDTSTGLEEVMEQLNNSFPSSRGHNVGSLFHMADDLGRAMESLVSVMTDEEGAE

SEQ ID NO: 27330 - protein, 238 aa, Homo sapiens
  REGION 1..238: note = ENSP00000367977
LEDKYRYLFKQVASSTGFCDQRRLGLLLHDSIQIPRQLGEVASFGGSNIEPSVRSCFQFANNKPEIEAALFLDWMRLEPQSMVWLPVLHRVAAAETAKHQAKCNICKECPIIGFRYRSLKHFNYDICQSCFFSGRVAKGHKMHYPMVEYCTPTTSGEDVRDFAKVLKNKFRTKRYFAKHPRMGYLPVQTVLEGDNMETPVTLINFWPVDSAPASSPQLSHDDTHSRIEHYASRDDEHL

SEQ ID NO: 27331 - protein, 30 aa, Homo sapiens
  REGION 1..30: note = ENSP00000417075
VEEILSKGQHLYKEKPATQPVKLLLRLLLW

SEQ ID NO: 27332 - protein, 134 aa, Homo sapiens
  REGION 1..134: note = ENSP00000417725
ELEQFNSDIQKLLEPLEAEIQQGVNLKEEDFNKDMNEDNEGTVKELLQRGDNLQQRITDERKREEIKIKQQLLQTKHNALKDLRSQRRKKALEISHQWYQYKRQADDLLKCLDDIEKKLASLPEPRDERKIKMN

SEQ ID NO: 27333 - protein, 101 aa, Homo sapiens
  REGION 1..101: note = ENSP00000399897
MLWWEEVEDCYEREDVQKKTFTKWVNAQFSKATQKEIEKQKVHLKSITEVGEALKTVLGKKETLVEDKLSLLNSNWIAVTSRAEEWLNLLLEYQKHMETFD

SEQ ID NO: 27334 - protein, 41 aa, Homo sapiens
  REGION 1..41: note = ENSP00000388559
MLWWEEVEDCYEREDVQKKTFTKWVNAQFSKEYQKHMETFD

SEQ ID NO: 27335 - protein, 772 aa, Homo sapiens
  REGION 1..772: note = ENSP00000288447
MEDEREDVQKKTFTKWVNAQFSKFGKQHIENLFSDLQDGRRLLDLLEGLTGQKLPKEKGSTRVHALNNVNKALRVLQNNNVDLVNIGSTDIVDGNHKLTLGLIWNIILHWQVKNVMKNIMAGLQQTNSEKILLSWVRQSTRNYPQVNVINFTTSWSDGLALNALIHSHRPDLFDWNSVVCQQSATQRLEHAFNIARYQLGIEKLLDPEDVDTTYPDKKSILMYITSLFQVLPQQVSIEAIQEVEMLPRPPKVTKEEHFQLHHQMHYSQQITVSLAQGYERTSSPKPRFKSYAYTQAAYVTTSDPTRSPFPSQHLEAPEDKSFGSSLMESEVNLDRYQTALEEVLSWLLSAEDTLQAQGEISNDVEVVKDQFHTHEGYMMDLTAHQGRVGNILQLGSKLIGTGKLSEDEETEVQEQMNLLNSRWECLRVASMEKQSNLHRVLMDLQNQKLKELNDWLTKTEERTRKMEEEPLGPDLEDLKRQVQQHKVLQEDLEQEQVRVNSLTHMVVVVDESSGDHATAALEEQLKVLGDRWANICRWTEDRWVLLQDILLKWQRLTEEQCLFSAWLSEKEDAVNKIHTTGFKDQNEMLSSLQKLAVLKADLEKKKQSMGKLYSLKQDLLSTLKNKSVTQKTEAWLDNFARCWDNLVQKLEKSTAQISQAVTTTQPSLTQTTVMETVTTVTTREQILVKHAQEELPPPPPQKKRQITVDSEIRKRLDVDITELHSWITRSEAVLQSPEFAIFRKEGNFSDLKEKVNVGYALIFISVLILCCL

SEQ ID NO: 27336 - protein, 125 aa, Homo sapiens
  REGION 1..125: note = ENSP00000395904
ENLFSDLQDGRRLLDLLEGLTGQKLPKEKGSTRVHALNNVNKALRVLQNNNVDLVNIGSTDIVDGNHKLTLGLIWNIILHWQVLGDRWANICRWTEDRWVLLQDILLKWQRLTEEQCLFSAWLSE

SEQ ID NO: 27337 - protein, 1225 aa, Homo sapiens
  REGION 1..1225: note = ENSP00000367979
MPSSLMLEVPALADFNRAWTELTDWLSLLDQVIKSQRVMVGDLEDINEMIIKQKATMQDLEQRRPQLEELITAAQNLKNKTSNQEARTIITDRIERIQNQWDEVQEHLQNRRQQLNEMLKDSTQWLEAKEEAEQVLGQARAKLESWKEGPYTVDAIQKKITETKQLAKDLRQWQTNVDVANDLALKLLRDYSADDTRKVHMITENINASWRSIHKRVSEREAALEETHRLLQQFPLDLEKFLAWLTEAETTANVLQDATRKERLLEDSKGVKELMKQWQDLQGEIEAHTDVYHNLDENSQKILRSLEGSDDAVLLQRRLDNMNFKWSELRKKSLNIRSHLEASSDQWKRLHLSLQELLVWLQLKDDELSRQAPIGGDFPAVQKQNDVHRAFKRELKTKEPVIMSTLETVRIFLTEQPLEGLEKLYQEPRELPPEERAQNVTRLLRKQAEEVNTEWEKLNLHSADWQRKIDETLERLRELQEATDELDLKLRQAEVIKGSWQPVGDLLIDSLQDHLEKVKALRGEIAPLKENVSHVNDLARQLTTLGIQLSPYNLSTLEDLNTRWKLLQVAVEDRVRQLHEAHRDFGPASQHFLSTSVQGPWERAISPNKVPYYINHETQTTCWDHPKMTELYQSLADLNNVRFSAYRTAMKLRRLQKALCLDLLSLSAACDALDQHNLKQNDQPMDILQIINCLTTIYDRLEQEHNNLVNVPLCVDMCLNWLLNVYDTGRTGRIRVLSFKTGIISLCKAHLEDKYRYLFKQVASSTGFCDQRRLGLLLHDSIQIPRQLGEVASFGGSNIEPSVRSCFQFANNKPEIEAALFLDWMRLEPQSMVWLPVLHRVAAAETAKHQAKCNICKECPIIGFRYRSLKHFNYDICQSCFFSGRVAKGHKMHYPMVEYCTPTTSGEDVRDFAKVLKNKFRTKRYFAKHPRMGYLPVQTVLEGDNMETPVTLINFWPVDSAPASSPQLSHDDTHSRIEHYASRLAEMENSNGSYLNDSISPNESIDDEHLLIQHYCQSLNQDSPLSQPRSPAQILISLESEERGELERILADLEEENRNLQAEYDRLKQQHEHKGLSPLPSPPEMMPTSPQSPRDAELIAEAKLLRQHKGRLEARMQILEDHNKQLESQLHRLRQLLEQPQAEAKVNGTTVSSPSTSLQRSDSSQPMLLRVVGSQTSDSMGEEDLLSPPQDTSTGLEEVMEQLNNSFPSSRGRNTPGKPMREDTM

SEQ ID NO: 27338 - protein, 956 aa, Homo sapiens
  REGION 1..956: note = ENSP00000340057
MLHRKTYHVKDLQGEIEAHTDVYHNLDENSQKILRSLEGSDDAVLLQRRLDNMNFKWSELRKKSLNIRSHLEASSDQWKRLHLSLQELLVWLQLKDDELSRQAPIGGDFPAVQKQNDVHRAFKRELKTKEPVIMSTLETVRIFLTEQPLEGLEKLYQEPRELPPEERAQNVTRLLRKQAEEVNTEWEKLNLHSADWQRKIDETLERLRELQEATDELDLKLRQAEVIKGSWQPVGDLLIDSLQDHLEKVKALRGEIAPLKENVSHVNDLARQLTTLGIQLSPYNLSTLEDLNTRWKLLQVAVEDRVRQLHEAHRDFGPASQHFLSTSVQGPWERAISPNKVPYYINHETQTTCWDHPKMTELYQSLADLNNVRFSAYRTAMKLRRLQKALCLDLLSLSAACDALDQHNLKQNDQPMDILQIINCLTTIYDRLEQEHNNLVNVPLCVDMCLNWLLNVYDTGRTGRIRVLSFKTGIISLCKAHLEDKYRYLFKQVASSTGFCDQRRLGLLLHDSIQIPRQLGEVASFGGSNIEPSVRSCFQFANNKPEIEAALFLDWMRLEPQSMVWLPVLHRVAAAETAKHQAKCNICKECPIIGFRYRSLKHFNYDICQSCFFSGRVAKGHKMHYPMVEYCTPTTSGEDVRDFAKVLKNKFRTKRYFAKHPRMGYLPVQTVLEGDNMETPVTLINFWPVDSAPASSPQLSHDDTHSRIEHYASRLAEMENSNGSYLNDSISPNESIDDEHLLIQHYCQSLNQDSPLSQPRSPAQILISLESEERGELERILADLEEENRNLQAEYDRLKQQHEHKGLSPLPSPPEMMPTSPQSPRDAELIAEAKLLRQHKGRLEARMQILEDHNKQLESQLHRLRQLLEQPQAEAKVNGTTVSSPSTSLQRSDSSQPMLLRVVGSQTSDSMGEEDLLSPPQDTSTGLEEVMEQLNNSFPSSRGRNTPGKPMREDTM

SEQ ID NO: 27339 - protein, 1115 aa, Homo sapiens
  REGION 1..1115: note = ENSP00000444119
MPSSLMLEVPALADFNRAWTELTDWLSLLDQVIKSQRVMVGDLEDINEMIIKQKATMQDLEQRRPQLEELITAAQNLKNKTSNQEARTIITDRIERIQNQWDEVQEHLQNRRQQLNEMLKDSTQWLEAKEEAEQVLGQARAKLESWKEGPYTVDAIQKKITETKQLAKDLRQWQTNVDVANDLALKLLRDYSADDTRKVHMITENINASWRSIHKRVSEREAALEETHRLLQQFPLDLEKFLAWLTEAETTANVLQDATRKERLLEDSKGVKELMKQWQDLQGEIEAHTDVYHNLDENSQKILRSLEGSDDAVLLQRRLDNMNFKWSELRKKSLNIRSHLEASSDQWKRLHLSLQELLVWLQLKDDELSRQAPIGGDFPAVQKQNDVHRAFKRELKTKEPVIMSTLETVRIFLTEQPLEGLEKLYQEPRELPPEERAQNVTRLLRKQAEEVNTEWEKLNLHSADWQRKIDETLERLRELQEATDELDLKLRQAEVIKGSWQPVGDLLIDSLQDHLEKVKALRGEIAPLKENVSHVNDLARQLTTLGIQLSPYNLSTLEDLNTRWKLLQVAVEDRVRQLHEAHRDFGPASQHFLSTSVQGPWERAISPNKVPYYINHETQTTCWDHPKMTELYQSLADLNNVRFSAYRTAMKLRRLQKALCLDLLSLSAACDALDQHNLKQNDQPMDILQIINCLTTIYDRLEQEHNNLVNVPLCVDMCLNWLLNVYDTGRTGRIRVLSFKTGIISLCKAHLEDKYRYLFKQVASSTGFCDQRRLGLLLHDSIQIPRQLGEVASFGGSNIEPSVRSCFQFANNKPEIEAALFLDWMRLEPQSMVWLPVLHRVAAAETAKHQAKCNICKECPIIGFRYRSLKHFNYDICQSCFFSGRVAKGHKMHYPMVEYCTPTTSGEDVRDFAKVLKNKFRTKRYFAKHPRMGYLPVQTVLEGDNMETNLQAEYDRLKQQHEHKGLSPLPSPPEMMPTSPQSPRDAELIAEAKLLRQHKGRLEARMQILEDHNKQLESQLHRLRQLLEQPQAEAKVNGTTVSSPSTSLQRSDSSQPMLLRVVGSQTSDSMGEEDLLSPPQDTSTGLEEVMEQLNNSFPSSRGRNTPGKPMREDTM

SEQ ID NO: 27340 - protein, 1230 aa, Homo sapiens
  REGION 1..1230: note = ENSP00000352894
MPSSLMLEVPALADFNRAWTELTDWLSLLDQVIKSQRVMVGDLEDINEMIIKQKATMQDLEQRRPQLEELITAAQNLKNKTSNQEARTIITDRIERIQNQWDEVQEHLQNRRQQLNEMLKDSTQWLEAKEEAEQVLGQARAKLESWKEGPYTVDAIQKKITETKQLAKDLRQWQTNVDVANDLALKLLRDYSADDTRKVHMITENINASWRSIHKRVSEREAALEETHRLLQQFPLDLEKFLAWLTEAETTANVLQDATRKERLLEDSKGVKELMKQWQDLQGEIEAHTDVYHNLDENSQKILRSLEGSDDAVLLQRRLDNMNFKWSELRKKSLNIRSHLEASSDQWKRLHLSLQELLVWLQLKDDELSRQAPIGGDFPAVQKQNDVHRAFKRELKTKEPVIMSTLETVRIFLTEQPLEGLEKLYQEPRELPPEERAQNVTRLLRKQAEEVNTEWEKLNLHSADWQRKIDETLERLRELQEATDELDLKLRQAEVIKGSWQPVGDLLIDSLQDHLEKVKALRGEIAPLKENVSHVNDLARQLTTLGIQLSPYNLSTLEDLNTRWKLLQVAVEDRVRQLHEAHRDFGPASQHFLSTSVQGPWERAISPNKVPYYINHETQTTCWDHPKMTELYQSLADLNNVRFSAYRTAMKLRRLQKALCLDLLSLSAACDALDQHNLKQNDQPMDILQIINCLTTIYDRLEQEHNNLVNVPLCVDMCLNWLLNVYDTGRTGRIRVLSFKTGIISLCKAHLEDKYRYLFKQVASSTGFCDQRRLGLLLHDSIQIPRQLGEVASFGGSNIEPSVRSCFQFANNKPEIEAALFLDWMRLEPQSMVWLPVLHRVAAAETAKHQAKCNICKECPIIGFRYRSLKHFNYDICQSCFFSGRVAKGHKMHYPMVEYCTPTTSGEDVRDFAKVLKNKFRTKRYFAKHPRMGYLPVQTVLEGDNMETPASSPQLSHDDTHSRIEHYASRLAEMENSNGSYLNDSISPNESIDDEHLLIQHYCQSLNQDSPLSQPRSPAQILISLESEERGELERILADLEEENRNLQAEYDRLKQQHEHKGLSPLPSPPEMMPTSPQSPRDAELIAEAKLLRQHKGRLEARMQILEDHNKQLESQLHRLRQLLEQPQAEAKVNGTTVSSPSTSLQRSDSSQPMLLRVVGSQTSDSMGEEDLLSPPQDTSTGLEEVMEQLNNSFPSSRGHNVGSLFHMADDLGRAMESLVSVMTDEEGAE

SEQ ID NO: 27341 - protein, 3680 aa, Homo sapiens
  REGION 1..3680: note = ENSP00000479270
MSEVSSDEREDVQKKTFTKWVNAQFSKFGKQHIENLFSDLQDGRRLLDLLEGLTGQKLPKEKGSTRVHALNNVNKALRVLQNNNVDLVNIGSTDIVDGNHKLTLGLIWNIILHWQVKNVMKNIMAGLQQTNSEKILLSWVRQSTRNYPQVNVINFTTSWSDGLALNALIHSHRPDLFDWNSVVCQQSATQRLEHAFNIARYQLGIEKLLDPEDVDTTYPDKKSILMYITSLFQVLPQQVSIEAIQEVEMLPRPPKVTKEEHFQLHHQMHYSQQITVSLAQGYERTSSPKPRFKSYAYTQAAYVTTSDPTRSPFPSQHLEAPEDKSFGSSLMESEVNLDRYQTALEEVLSWLLSAEDTLQAQGEISNDVEVVKDQFHTHEGYMMDLTAHQGRVGNILQLGSKLIGTGKLSEDEETEVQEQMNLLNSRWECLRVASMEKQSNLHRVLMDLQNQKLKELNDWLTKTEERTRKMEEEPLGPDLEDLKRQVQQHKVLQEDLEQEQVRVNSLTHMVVVVDESSGDHATAALEEQLKVLGDRWANICRWTEDRWVLLQDILLKWQRLTEEQCLFSAWLSEKEDAVNKIHTTGFKDQNEMLSSLQKLAVLKADLEKKKQSMGKLYSLKQDLLSTLKNKSVTQKTEAWLDNFARCWDNLVQKLEKSTAQISQAVTTTQPSLTQTTVMETVTTVTTREQILVKHAQEELPPPPPQKKRQITVDSEIRKRLDVDITELHSWITRSEAVLQSPEFAIFRKEGNFSDLKEKVNAIEREKAEKFRKLQDASRSAQALVEQMVNEGVNADSIKQASEQLNSRWIEFCQLLSERLNWLEYQNNIIAFYNQLQQLEQMTTTAENWLKIQPTTPSEPTAIKSQLKICKDEVNRLSDLQPQIERLKIQSIALKEKGQGPMFLDADFVAFTNHFKQVFSDVQAREKELQTIFDTLPPMRYQETMSAIRTWVQQSETKLSIPQLSVTDYEIMEQRLGELQALQSSLQEQQSGLYYLSTTVKEMSKKAPSEISRKYQSEFEEIEGRWKKLSSQLVEHCQKLEEQMNKLRKIQNHIQTLKKWMAEVDVFLKEEWPALGDSEILKKQLKQCRLLVSDIQTIQPSLNSVNEGGQKIKNEAEPEFASRLETELKELNTQWDHMCQQVYARKEALKGGLEKTVSLQKDLSEMHEWMTQAEEEYLERDFEYKTPDELQKAVEEMKRAKEEAQQKEAKVKLLTESVNSVIAQAPPVAQEALKKELETLTTNYQWLCTRLNGKCKTLEEVWACWHELLSYLEKANKWLNEVEFKLKTTENIPGGAEEISEVLDSLENLMRHSEDNPNQIRILAQTLTDGGVMDELINEELETFNSRWRELHEEAVRRQKLLEQSIQSAQETEKSLHLIQESLTFIDKQLAAYIADKVDAAQMPQEAQKIQSDLTSHEISLEEMKKHNQGKEAAQRVLSQIDVAQKKLQDVSMKFRLFQKPANFEQRLQESKMILDEVKMHLPALETKSVEQEVVQSQLNHCVNLYKSLSEVKSEVEMVIKTGRQIVQKKQTENPKELDERVTALKLHYNELGAKVTERKQQLEKCLKLSRKMRKEMNVLTEWLAATDMELTKRSAVEGMPSNLDSEVAWGKATQKEIEKQKVHLKSITEVGEALKTVLGKKETLVEDKLSLLNSNWIAVTSRAEEWLNLLLEYQKHMETFDQNVDHITKWIIQADTLLDESEKKKPQQKEDVLKRLKAELNDIRPKVDSTRDQAANLMANRGDHCRKLVEPQISELNHRFAAISHRIKTGKASIPLKELEQFNSDIQKLLEPLEAEIQQGVNLKEEDFNKDMNEDNEGTVKELLQRGDNLQQRITDERKREEIKIKQQLLQTKHNALKDLRSQRRKKALEISHQWYQYKRQADDLLKCLDDIEKKLASLPEPRDERKIKEIDRELQKKKEELNAVRRQAEGLSEDGAAMAVEPTQIQLSKRWREIESKFAQFRRLNFAQIHTVREETMMVMTEDMPLEISYVPSTYLTEITHVSQALLEVEQLLNAPDLCAKDFEDLFKQEESLKNIKDSLQQSSGRIDIIHSKKTAALQSATPVERVKLQEALSQLDFQWEKVNKMYKDRQGRFDRSVEKWRRFHYDIKIFNQWLTEAEQFLRKTQIPENWEHAKYKWYLKVSLFVFSKHTFCLQRQKTGEEIIQQSSKTDASILQEKLGSLNLRWQEVCKQLSDRKKRLEEQKNILSEFQRDLNEFVLWLEEADNIASIPLEPGKEQQLKEKLEQVKLLVEELPLRQGILKQLNETGGPVLVSAPISPEEQDKLENKLKQTNLQWIKVSRALPEKQGEIEAQIKDLGQLEKKLEDLEEQLNHLLLWLSPIRNQLEIYNQPNQEGPFDVKETEIAVQAKQPDVEEILSKGQHLYKEKPATQPVKRKLEDLSSEWKAVNRLLQELRAKQPDLAPGLTTIGASPTQTVTLVTQPVVTKETAISKLEMPSSLMLEVPALADFNRAWTELTDWLSLLDQVIKSQRVMVGDLEDINEMIIKQKATMQDLEQRRPQLEELITAAQNLKNKTSNQEARTIITDRIERIQNQWDEVQEHLQNRRQQLNEMLKDSTQWLEAKEEAEQVLGQARAKLESWKEGPYTVDAIQKKITETKQLAKDLRQWQTNVDVANDLALKLLRDYSADDTRKVHMITENINASWRSIHKRVSEREAALEETHRLLQQFPLDLEKFLAWLTEAETTANVLQDATRKERLLEDSKGVKELMKQWQDLQGEIEAHTDVYHNLDENSQKILRSLEGSDDAVLLQRRLDNMNFKWSELRKKSLNIRSHLEASSDQWKRLHLSLQELLVWLQLKDDELSRQAPIGGDFPAVQKQNDVHRAFKRELKTKEPVIMSTLETVRIFLTEQPLEGLEKLYQEPRELPPEERAQNVTRLLRKQAEEVNTEWEKLNLHSADWQRKIDETLERLRELQEATDELDLKLRQAEVIKGSWQPVGDLLIDSLQDHLEKVKALRGEIAPLKENVSHVNDLARQLTTLGIQLSPYNLSTLEDLNTRWKLLQVAVEDRVRQLHEAHRDFGPASQHFLSTSVQGPWERAISPNKVPYYINHETQTTCWDHPKMTELYQSLADLNNVRFSAYRTAMKLRRLQKALCLDLLSLSAACDALDQHNLKQNDQPMDILQIINCLTTIYDRLEQEHNNLVNVPLCVDMCLNWLLNVYDTGRTGRIRVLSFKTGIISLCKAHLEDKYRYLFKQVASSTGFCDQRRLGLLLHDSIQIPRQLGEVASFGGSNIEPSVRSCFQFANNKPEIEAALFLDWMRLEPQSMVWLPVLHRVAAAETAKHQAKCNICKECPIIGFRYRSLKHFNYDICQSCFFSGRVAKGHKMHYPMVEYCTPTTSGEDVRDFAKVLKNKFRTKRYFAKHPRMGYLPVQTVLEGDNMETPVTLINFWPVDSAPASSPQLSHDDTHSRIEHYASRLAEMENSNGSYLNDSISPNESIDDEHLLIQHYCQSLNQDSPLSQPRSPAQILISLESEERGELERILADLEEENRNLQAEYDRLKQQHEHKGLSPLPSPPEMMPTSPQSPRDAELIAEAKLLRQHKGRLEARMQILEDHNKQLESQLHRLRQLLEQPQAEAKVNGTTVSSPSTSLQRSDSSQPMLLRVVGSQTSDSMGEEDLLSPPQDTSTGLEEVMEQLNNSFPSSRGRNTPGKPMREDTM

SEQ ID NO: 27342 - protein, 3684 aa, Homo sapiens
  REGION 1..3684: note = ENSP00000478150
MLWWEEVEDCYEREDVQKKTFTKWVNAQFSKFGKQHIENLFSDLQDGRRLLDLLEGLTGQKLPKEKGSTRVHALNNVNKALRVLQNNNVDLVNIGSTDIVDGNHKLTLGLIWNIILHWQVKNVMKNIMAGLQQTNSEKILLSWVRQSTRNYPQVNVINFTTSWSDGLALNALIHSHRPDLFDWNSVVCQQSATQRLEHAFNIARYQLGIEKLLDPEDVDTTYPDKKSILMYITSLFQVLPQQVSIEAIQEVEMLPRPPKVTKEEHFQLHHQMHYSQQITVSLAQGYERTSSPKPRFKSYAYTQAAYVTTSDPTRSPFPSQHLEAPEDKSFGSSLMESEVNLDRYQTALEEVLSWLLSAEDTLQAQGEISNDVEVVKDQFHTHEGYMMDLTAHQGRVGNILQLGSKLIGTGKLSEDEETEVQEQMNLLNSRWECLRVASMEKQSNLHRVLMDLQNQKLKELNDWLTKTEERTRKMEEEPLGPDLEDLKRQVQQHKVLQEDLEQEQVRVNSLTHMVVVVDESSGDHATAALEEQLKVLGDRWANICRWTEDRWVLLQDILLKWQRLTEEQCLFSAWLSEKEDAVNKIHTTGFKDQNEMLSSLQKLAVLKADLEKKKQSMGKLYSLKQDLLSTLKNKSVTQKTEAWLDNFARCWDNLVQKLEKSTAQISQAVTTTQPSLTQTTVMETVTTVTTREQILVKHAQEELPPPPPQKKRQITVDSEIRKRLDVDITELHSWITRSEAVLQSPEFAIFRKEGNFSDLKEKVNAIEREKAEKFRKLQDASRSAQALVEQMVNEGVNADSIKQASEQLNSRWIEFCQLLSERLNWLEYQNNIIAFYNQLQQLEQMTTTAENWLKIQPTTPSEPTAIKSQLKICKDEVNRLSDLQPQIERLKIQSIALKEKGQGPMFLDADFVAFTNHFKQVFSDVQAREKELQTIFDTLPPMRYQETMSAIRTWVQQSETKLSIPQLSVTDYEIMEQRLGELQALQSSLQEQQSGLYYLSTTVKEMSKKAPSEISRKYQSEFEEIEGRWKKLSSQLVEHCQKLEEQMNKLRKIQNHIQTLKKWMAEVDVFLKEEWPALGDSEILKKQLKQCRLLVSDIQTIQPSLNSVNEGGQKIKNEAEPEFASRLETELKELNTQWDHMCQQVYARKEALKGGLEKTVSLQKDLSEMHEWMTQAEEEYLERDFEYKTPDELQKAVEEMKRAKEEAQQKEAKVKLLTESVNSVIAQAPPVAQEALKKELETLTTNYQWLCTRLNGKCKTLEEVWACWHELLSYLEKANKWLNEVEFKLKTTENIPGGAEEISEVLDSLENLMRHSEDNPNQIRILAQTLTDGGVMDELINEELETFNSRWRELHEEAVRRQKLLEQSIQSAQETEKSLHLIQESLTFIDKQLAAYIADKVDAAQMPQEAQKIQSDLTSHEISLEEMKKHNQGKEAAQRVLSQIDVAQKKLQDVSMKFRLFQKPANFEQRLQESKMILDEVKMHLPALETKSVEQEVVQSQLNHCVNLYKSLSEVKSEVEMVIKTGRQIVQKKQTENPKELDERVTALKLHYNELGAKVTERKQQLEKCLKLSRKMRKEMNVLTEWLAATDMELTKRSAVEGMPSNLDSEVAWGKATQKEIEKQKVHLKSITEVGEALKTVLGKKETLVEDKLSLLNSNWIAVTSRAEEWLNLLLEYQKHMETFDQNVDHITKWIIQADTLLDESEKKKPQQKEDVLKRLKAELNDIRPKVDSTRDQAANLMANRGDHCRKLVEPQISELNHRFAAISHRIKTGKASIPLKELEQFNSDIQKLLEPLEAEIQQGVNLKEEDFNKDMNEDNEGTVKELLQRGDNLQQRITDERKREEIKIKQQLLQTKHNALKDLRSQRRKKALEISHQWYQYKRQADDLLKCLDDIEKKLASLPEPRDERKIKEIDRELQKKKEELNAVRRQAEGLSEDGAAMAVEPTQIQLSKRWREIESKFAQFRRLNFAQIHTVREETMMVMTEDMPLEISYVPSTYLTEITHVSQALLEVEQLLNAPDLCAKDFEDLFKQEESLKNIKDSLQQSSGRIDIIHSKKTAALQSATPVERVKLQEALSQLDFQWEKVNKMYKDRQGRFDRSVEKWRRFHYDIKIFNQWLTEAEQFLRKTQIPENWEHAKYKWYLKVSLFVFSKHTFCLQRQKTGEEIIQQSSKTDASILQEKLGSLNLRWQEVCKQLSDRKKRLEEQKNILSEFQRDLNEFVLWLEEADNIASIPLEPGKEQQLKEKLEQVKLLVEELPLRQGILKQLNETGGPVLVSAPISPEEQDKLENKLKQTNLQWIKVSRALPEKQGEIEAQIKDLGQLEKKLEDLEEQLNHLLLWLSPIRNQLEIYNQPNQEGPFDVKETEIAVQAKQPDVEEILSKGQHLYKEKPATQPVKRKLEDLSSEWKAVNRLLQELRAKQPDLAPGLTTIGASPTQTVTLVTQPVVTKETAISKLEMPSSLMLEVPALADFNRAWTELTDWLSLLDQVIKSQRVMVGDLEDINEMIIKQKATMQDLEQRRPQLEELITAAQNLKNKTSNQEARTIITDRIERIQNQWDEVQEHLQNRRQQLNEMLKDSTQWLEAKEEAEQVLGQARAKLESWKEGPYTVDAIQKKITETKQLAKDLRQWQTNVDVANDLALKLLRDYSADDTRKVHMITENINASWRSIHKRVSEREAALEETHRLLQQFPLDLEKFLAWLTEAETTANVLQDATRKERLLEDSKGVKELMKQWQDLQGEIEAHTDVYHNLDENSQKILRSLEGSDDAVLLQRRLDNMNFKWSELRKKSLNIRSHLEASSDQWKRLHLSLQELLVWLQLKDDELSRQAPIGGDFPAVQKQNDVHRAFKRELKTKEPVIMSTLETVRIFLTEQPLEGLEKLYQEPRELPPEERAQNVTRLLRKQAEEVNTEWEKLNLHSADWQRKIDETLERLRELQEATDELDLKLRQAEVIKGSWQPVGDLLIDSLQDHLEKVKALRGEIAPLKENVSHVNDLARQLTTLGIQLSPYNLSTLEDLNTRWKLLQVAVEDRVRQLHEAHRDFGPASQHFLSTSVQGPWERAISPNKVPYYINHETQTTCWDHPKMTELYQSLADLNNVRFSAYRTAMKLRRLQKALCLDLLSLSAACDALDQHNLKQNDQPMDILQIINCLTTIYDRLEQEHNNLVNVPLCVDMCLNWLLNVYDTGRTGRIRVLSFKTGIISLCKAHLEDKYRYLFKQVASSTGFCDQRRLGLLLHDSIQIPRQLGEVASFGGSNIEPSVRSCFQFANNKPEIEAALFLDWMRLEPQSMVWLPVLHRVAAAETAKHQAKCNICKECPIIGFRYRSLKHFNYDICQSCFFSGRVAKGHKMHYPMVEYCTPTTSGEDVRDFAKVLKNKFRTKRYFAKHPRMGYLPVQTVLEGDNMETPVTLINFWPVDSAPASSPQLSHDDTHSRIEHYASRLAEMENSNGSYLNDSISPNESIDDEHLLIQHYCQSLNQDSPLSQPRSPAQILISLESEERGELERILADLEEENRNLQAEYDRLKQQHEHKGLSPLPSPPEMMPTSPQSPRDAELIAEAKLLRQHKGRLEARMQILEDHNKQLESQLHRLRQLLEQPQAEAKVNGTTVSSPSTSLQRSDSSQPMLLRVVGSQTSDSMGEEDLLSPPQDTSTGLEEVMEQLNNSFPSSRGRNTPGKPMREDTM

SEQ ID NO: 27343 - protein, 866 aa, Homo sapiens
  REGION 1..866: note = ENSP00000255189
MLRPGAQLLRGLLLRSCPLQGSPGRPRSVCGREGEEKPPLSAETQWKDRAETVIIGGGCVGVSLAYHLAKAGMKDVVLLEKSELTAGSTWHAAGLTTYFHPGINLKKIHYDSIKLYEKLEEETGQVVGFHQPGSIRLATTPVRVDEFKYQMTRTGWHATEQYLIEPEKIQEMFPLLNMNKVLAGLYNPGDGHIDPYSLTMALAAGARKCGALLKYPAPVTSLKARSDGTWDVETPQGSMRANRIVNAAGFWAREVGKMIGLEHPLIPVQHQYVVTSTISEVKALKRELPVLRDLEGSYYLRQERDGLLFGPYESQEKMKVQDSWVTNGVPPGFGKELFESDLDRIMEHIKAAMEMVPVLKKADIINVVNGPITYSPDILPMVGPHQGVRNYWVAIGFGYGIIHAGGVGKYLSDWILHGEPPFDLIELDPNRYGKWTTTQYTEAKARESYGFNNIVGYPKEERFAGRPTQRVSGLYQRLESKCSMGFHAGWEQPHWFYKPGQDTQYRPSFRRTNWFEPVGSEYKQVMQRVAVTDLSPFGKFNIKGQDSIRLLDHLFANVIPKVGFTNISHMLTPKGRVYAELTVSHQSPGEFLLITGSGSELHDLRWIEEEAVKGGYDVEIKNITDELGVLGVAGPQARKVLQKLTSEDLSDDVFKFLQTKSLKVSNIPVTAIRISYTGELGWELYHRREDSVALYDAIMNAGQEEGIDNFGTYAMNALRLEKAFRAWGLEMNCDTNPLEAGLEYFVKLNKPADFIGKQALKQIKAKGLKRRLVCLTLATDDVDPEGNESIWYNGKVVGNTTSGSYSYSIQKSLAFAYVPVQLSEVGQQVEVELLGKNYPAVIIQEPLVLTEPTRNRLQKKGGKDKT

SEQ ID NO: 27344 - protein, 613 aa, Homo sapiens
  REGION 1..613: note = ENSP00000430972
YLIEPEKIQEMFPLLNMNKVLAGLYNPGDGHIDPYSLTMALAAGARKCGALLKYPAPVTSLKARSDGTWDVETPQGSMRANRIVNAAGFWAREVGKMIGLEHPLIPVQHQYVVTSTISEVKALKRELPVLRDLEGSYYLRQERDGLLFGPYESQEKMKVQDSWVTNGVPPGFGKELFESDLDRIMEHIKAAMEMVPVLKKADIINVVNGPITYSPDILPMVGPHQGVRNYWVAIGFGYGIIHAGGVGKYLSDWILHGEPPFDLIELDPNRYGKWTTTQYTEAKARESYGFNNIVGYPKEERFAGRPTQRVSGLYQRLESKCSMGFHAGWEQPHWFYKPGQDTQYRPSFRRTNWFEPVGSEYKQVMQRVAVTDLSPFGKFNIKGQDSIRLLDHLFANVIPKVGFTNISHMLTPKGRVYAELTVSHQSPGEFLLITGSGSELHDLRWIEEEAVKGGYDVEIKNITDELGVLGVAGPQARKVLQKLTSEDLSDDVFKFLQTKSLKVSNIPVTAIRISYTGELGWELYHRREDSVALYDAIMNAGQEEGIDNFGTYAMNALRLEKAFRAWGLEMNCDTNPLEAGLEYFVKLNKDQNSCFAHFKEENGWVSRWAIRPY

SEQ ID NO: 27345 - protein, 98 aa, Homo sapiens
  REGION 1..98: note = ENSP00000427834
MLRPGAQLLRGLLLRSCPLQGSPGRPRSVCGREGEEKPPLSAETQWKDRAETVIIGGGCVGVSLAYHLAKAGMKDVVLLEKSELTAGSTWHADFGLVK

SEQ ID NO: 27346 - protein, 106 aa, Homo sapiens
  REGION 1..106: note = ENSP00000428995
MLRPGAQLLRGLLLRSCPLQGSPGRPRSVCGREGEEKPPLSAETQWKDRAETVIIGGGCVGVSLAYHLAKAGMKDVVLLEKSELTAGSTWHAIWHNPRWWGREISQ

SEQ ID NO: 27347 - protein, 50 aa, Homo sapiens
  REGION 1..50: note = ENSP00000430133
MLRPGAQLLRGLLLRSCPLQGSPGRPRSVCGREGFNNLLSSWNKLEENTL

SEQ ID NO: 27348 - protein, 50 aa, Homo sapiens; identical to SEQ ID NO: 27347
  REGION 1..50: note = ENSP00000428092

SEQ ID NO: 27349 - protein, 513 aa, Homo sapiens
  REGION 1..513: note = ENSP00000340935
MKISILLMFLWGLSCALPVTRYQNNESEDSEEWKGHLAQAPTPPLESSESSEGSKVSSEEQANEDPSDSTQSEEGLGSDDHQYIYRLAGGFSRSTGKGGDDKDDDEDDSGDDTFGDDDSGPGPKDRQEGGNSRLGSDEDSDDTIQASEESAPQGQDSAQDTTSESRELDNEDRVDSKPEGGDSTQESESEEHWVGGGSDGESSHGDGSELDDEGMQSDDPESIRSERGNSRMNSAGMKSKESGENSEQANTQDSGGSQLLEHPSRKIFRKSRISEEDDRSELDDNNTMEEVKSDSTENSNSRDTGLSQPRRDSKGDSQEDSKENLSQEESQNVDGPSSESSQEANLSSQENSSESQEEVVSESRGDNPDPTTSYVEDQEDSDSSEEDSSHTLSHSKSESREEQADSESSESLNFSEESPESPEDENSSSQEGLQSHSSSAESQSEESHSEEDDSDSQDSSRSKEDSNSTESKSSSEEDGQLKNIEIESRKLTVDAYHNKPIGDQDDNDCQDGY

SEQ ID NO: 27350 - protein, 497 aa, Homo sapiens
  REGION 1..497: note = ENSP00000282479
MKISILLMFLWGLSCALPVTRYQNNESEDSEEWKGHLAQAPTPPLANEDPSDSTQSEEGLGSDDHQYIYRLAGGFSRSTGKGGDDKDDDEDDSGDDTFGDDDSGPGPKDRQEGGNSRLGSDEDSDDTIQASEESAPQGQDSAQDTTSESRELDNEDRVDSKPEGGDSTQESESEEHWVGGGSDGESSHGDGSELDDEGMQSDDPESIRSERGNSRMNSAGMKSKESGENSEQANTQDSGGSQLLEHPSRKIFRKSRISEEDDRSELDDNNTMEEVKSDSTENSNSRDTGLSQPRRDSKGDSQEDSKENLSQEESQNVDGPSSESSQEANLSSQENSSESQEEVVSESRGDNPDPTTSYVEDQEDSDSSEEDSSHTLSHSKSESREEQADSESSESLNFSEESPESPEDENSSSQEGLQSHSSSAESQSEESHSEEDDSDSQDSSRSKEDSNSTESKSSSEEDGQLKNIEIESRKLTVDAYHNKPIGDQDDNDCQDGY

SEQ ID NO: 27351 - protein, 4624 aa, Homo sapiens
  REGION 1..4624: note = ENSP00000265104
MFRIGRRQLWKHSVTRVLTQRLKGEKEAKRALLDARHNYLFAIVASCLDLNKTEVEDAILEGNQIERIDQLFAVGGLRHLMFYYQDVEEAETGQLGSLGGVNLVSGKIKKPKVFVTEGNDVALTGVCVFFIRTDPSKAITPDNIHQEVSFNMLDAADGGLLNSVRRLLSDIFIPALRATSHGWGELEGLQDAANIRQEFLSSLEGFVNVLSGAQESLKEKVNLRKCDILELKTLKEPTDYLTLANNPETLGKIEDCMKVWIKQTEQVLAENNQLLKEADDVGPRAELEHWKKRLSKFNYLLEQLKSPDVKAVLAVLAAAKSKLLKTWREMDIRITDATNEAKDNVKYLYTLEKCCDPLYSSDPLSMMDAIPTLINAIKMIYSISHYYNTSEKITSLFVKVTNQIISACKAYITNNGTASIWNQPQDVVEEKILSAIKLKQEYQLCFHKTKQKLKQNPNAKQFDFSEMYIFGKFETFHRRLAKIIDIFTTLKTYSVLQDSTIEGLEDMATKYQGIVATIKKKEYNFLDQRKMDFDQDYEEFCKQTNDLHNELRKFMDVTFAKIQNTNQALRMLKKFERLNIPNLGIDDKYQLILENYGADIDMISKLYTKQKYDPPLARNQPPIAGKILWARQLFHRIQQPMQLFQQHPAVLSTAEAKPIIRSYNRMAKVLLEFEVLFHRAWLRQIEEIHVGLEASLLVKAPGTGELFVNFDPQILILFRETECMAQMGLEVSPLATSLFQKRDRYKRNFSNMKMMLAEYQRVKSKIPAAIEQLIVPHLAKVDEALQPGLAALTWTSLNIEAYLENTFAKIKDLELLLDRVNDLIEFRIDAILEEMSSTPLCQLPQEEPLTCEEFLQMTKDLCVNGAQILHFKSSLVEEAVNELVNMLLDVEVLSEEESEKISNENSVNYKNESSAKREEGNFDTLTSSINARANALLLTTVTRKKKETEMLGEEARELLSHFNHQNMDALLKVTRNTLEAIRKRIHSSHTINFRDSNSASNMKQNSLPIFRASVTLAIPNIVMAPALEDVQQTLNKAVECIISVPKGVRQWSSELLSKKKIQERKMAALQSNEDSDSDVEMGENELQDTLEIASVNLPIPVQTKNYYKNVSENKEIVKLVSVLSTIINSTKKEVITSMDCFKRYNHIWQKGKEEAIKTFITQSPLLSEFESQILYFQNLEQEINAEPEYVCVGSIALYTADLKFALTAETKAWMVVIGRHCNKKYRSEMENIFMLIEEFNKKLNRPIKDLDDIRIAMAALKEIREEQISIDFQVGPIEESYALLNRYGLLIAREEIDKVDTLHYAWEKLLARAGEVQNKLVSLQPSFKKELISAVEVFLQDCHQFYLDYDLNGPMASGLKPQEASDRLIMFQNQFDNIYRKYITYTGGEELFGLPATQYPQLLEIKKQLNLLQKIYTLYNSVIETVNSYYDILWSEVNIEKINNELLEFQNRCRKLPRALKDWQAFLDLKKIIDDFSECCPLLEYMASKAMMERHWERITTLTGHSLDVGNESFKLRNIMEAPLLKYKEEIEDICISAVKERDIEQKLKQVINEWDNKTFTFGSFKTRGELLLRGDSTSEIIANMEDSLMLLGSLLSNRYNMPFKAQIQKWVQYLSNSTDIIESWMTVQNLWIYLEAVFVGGDIAKQLPKEAKRFSNIDKSWVKIMTRAHEVPSVVQCCVGDETLGQLLPHLLDQLEICQKSLTGYLEKKRLCFPRFFFVSDPALLEILGQASDSHTIQAHLLNVFDNIKSVKFHEKIYDRILSISSQEGETIELDKPVMAEGNVEVWLNSLLEESQSSLHLVIRQAAANIQETGFQLTEFLSSFPAQVGLLGIQMIWTRDSEEALRNAKFDKKIMQKTNQAFLELLNTLIDVTTRDLSSTERVKYETLITIHVHQRDIFDDLCHMHIKSPMDFEWLKQCRFYFNEDSDKMMIHITDVAFIYQNEFLGCTDRLVITPLTDRCYITLAQALGMSMGGAPAGPAGTGKTETTKDMGRCLGKYVVVFNCSDQMDFRGLGRIFKGLAQSGSWGCFDEFNRIDLPVLSVAAQQISIILTCKKEHKKSFIFTDGDNVTMNPEFGLFLTMNPGYAGRQELPENLKINFRSVAMMVPDRQIIIRVKLASCGFIDNVVLARKFFTLYKLCEEQLSKQVHYDFGLRNILSVLRTLGAAKRANPMDTESTIVMRVLRDMNLSKLIDEDEPLFLSLIEDLFPNILLDKAGYPELEAAISRQVEEAGLINHPPWKLKVIQLFETQRVRHGMMTLGPSGAGKTTCIHTLMRAMTDCGKPHREMRMNPKAITAPQMFGRLDVATNDWTDGIFSTLWRKTLRAKKGEHIWIILDGPVDAIWIENLNSVLDDNKTLTLANGDRIPMAPNCKIIFEPHNIDNASPATVSRNGMVFMSSSILDWSPILEGFLKKRSPQEAEILRQLYTESFPDLYRFCIQNLEYKMEVLEAFVITQSINMLQGLIPLKEQGGEVSQAHLGRLFVFALLWSAGAALELDGRRRLELWLRSRPTGTLELPPPAGPGDTAFDYYVAPDGTWTHWNTRTQEYLYPSDTTPEYGSILVPNVDNVRTDFLIQTIAKQGKAVLLIGEQGTAKTVIIKGFMSKYDPECHMIKSLNFSSATTPLMFQRTIESYVDKRMGTTYGPPAGKKMTVFIDDVNMPIINEWGDQVTNEIVRQLMEQNGFYNLEKPGEFTSIVDIQFLAAMIHPGGGRNDIPQRLKRQFSIFNCTLPSEASVDKIFGVIGVGHYCTQRGFSEEVRDSVTKLVPLTRRLWQMTKIKMLPTPAKFHYVFNLRDLSRVWQGMLNTTSEVIKEPNDLLKLWKHECKRVIADRFTVSSDVTWFDKALVSLVEEEFGEEKKLLVDCGIDTYFVDFLRDAPEAAGETSEEADAETPKIYEPIESFSHLKERLNMFLQLYNESIRGAGMDMVFFADAMVHLVKISRVIRTPQGNALLVGVGGSGKQSLTRLASFIAGYVSFQITLTRSYNTSNLMEDLKVLYRTAGQQGKGITFIFTDNEIKDESFLEYMNNVLSSGEVSNLFARDEIDEINSDLASVMKKEFPRCLPTNENLHDYFMSRVRQNLHIVLCFSPVGEKFRNRALKFPALISGCTIDWFSRWPKDALVAVSEHFLTSYDIDCSLEIKKEVVQCMGSFQDGVAEKCVDYFQRFRRSTHVTPKSYLSFIQGYKFIYGEKHVEVRTLANRMNTGLEKLKEASESVAALSKELEAKEKELQVANDKADMVLKEVTMKAQAAEKVKAEVQKVKDRAQAIVDSISKDKAIAEEKLEAAKPALEEAEAALQTIRPSDIATVRTLGRPPHLIMRIMDCVLLLFQRKVSAVKIDLEKSCTMPSWQESLKLMTAGNFLQNLQQFPKDTINEEVIEFLSPYFEMPDYNIETAKRVCGNVAGLCSWTKAMASFFSINKEVLPLKANLVVQENRHLLAMQDLQKAQAELDDKQAELDVVQAEYEQAMTEKQTLLEDAERCRHKMQTASTLISGLAGEKERWTEQSQEFAAQTKRLVGDVLLATAFLSYSGPFNQEFRDLLLNDWRKEMKARKIPFGKNLNLSEMLIDAPTISEWNLQGLPNDDLSIQNGIIVTKASRYPLLIDPQTQGKIWIKNKESRNELQITSLNHKYFRNHLEDSLSLGRPLLIEDVGEELDPALDNVLERNFIKTGSTFKVKVGDKEVDVLDGFRLYITTKLPNPAYTPEISARTSIIDFTVTMKGLEDQLLGRVILTEKQELEKERTHLMEDVTANKRRMKELEDNLLYRLTSTQGSLVEDESLIVVLSNTKRTAEEVTQKLEISAETEVQINSAREEYRPVATRGSILYFLITEMRLVNEMYQTSLRQFLGLFDLSLARSVKSPITSKRIANIIEHMTYEVYKYAARGLYEEHKFLFTLLLTLKIDIQRNRVKHEEFLTLIKGGASLDLKACPPKPSKWILDITWLNLVELSKLRQFSDVLDQISRNEKMWKIWFDKENPEEEPLPNAYDKSLDCFRRLLLIRSWCPDRTIAQARKYIVDSMGEKYAEGVILDLEKTWEESDPRTPLICLLSMGSDPTDSIIALGKRLKIETRYVSMGQGQEVHARKLLQQTMANGGWALLQNCHLGLDFMDELMDIIIETELVHDAFRLWMTTEAHKQFPITLLQMSIKFANDPPQGLRAGLKRTYSGVSQDLLDVSSGSQWKPMLYAVAFLHSTVQERRKFGALGWNIPYEFNQADFNATVQFIQNHLDDMDVKKGVSWTTIRYMIGEIQYGGRVTDDYDKRLLNTFAKVWFSENMFGPDFSFYQGYNIPKCSTVDNYLQYIQSLPAYDSPEVFGLHPNADITYQSKLAKDVLDTILGIQPKDTSGGGDETREAVVARLADDMLEKLPPDYVPFEVKERLQKMGPFQPMNIFLRQEIDRMQRVLSLVRSTLTELKLAIDGTIIMSENLRDALDCMFDARIPAWWKKASWISSTLGFWFTELIERNSQFTSWVFNGRPHCFWMTGFFNPQGFLTAMRQEITRANKGWALDNMVLCNEVTKWMKDDISAPPTEGVYVYGLYLEGAGWDKRNMKLIESKPKVLFELMPVIRIYAENNTLRDPRFYSCPIYKKPVRTDLNYIAAVDLRTAQTPEHWVLRGVALLCDVK

SEQ ID NO: 27352 - protein, 4158 aa, Homo sapiens
  REGION 1..4158: note = ENSP00000237449
MTFRATDSEFDLTNIEEYAENSALSRLNNIKAKQRVSYVTSTENESDTQILTFRHITKAQEKTRKRQQPIKLEPLPVLKVYQDHKQPEYIHEQNRFQLMTAGIIKRPVSIAKKSFATSSTQFLEHQDAVKKMQIHRPYVEVFSPSPPKLPHTGIGKRGLFGTRSSAYPKYTFHDREEVVKANIRDPLQIIKIIRENEHLGFLYMIPAVPRSSIEYDTYNLKVVSYENINKNDYYTISQRAVTHIYNEDIEFIEIDRWEQEYLYHRELTKIPIFSLFRKWKAFSVWRKNVRSKKITGCQKSLQKNLFIVNPHLRPALLKINELCYHLSFMGLCYIEKCHTYTLQEFKAAQVIRLAEVTERLGEFRNEAKYVVRRACRFALRAAGFVPDDCAFGPFEDYHKVQSSGSFINTPHELPTYGDSEKMTYTEQASKRHYCMRLTCFIRLNDYLIENTMHILTVNAVNSLLNHLTDKLKRTPSADVIQKWITEEKPEVPDKKGTLMVEKQEEDESLIPMFLTELMLTVQSLLFEPSLEDFLDGILGAVNHCQNTVLSVPNLVPDSYFDAFTSPYINNKLEGKTCGTGPSLAAVFEDDKNFHTIISQIKETIQAAFESARIYAATFEKFQIFFKENESLDLQALKLQEPDINFFSEQLEKYHKQHKDAVALRPTRNVGLLLIDTRLLREKLIPSPLRCLEVLNFMLPRQSKKKVDAIIFEAQDAEYKLEFVPTTTTEYVHSLLFLDEIQERIESLEDEGNIVTQMYKLMEQYQVPTPPEDFAVFATMKPSIVAVRNAIDKSVGDRESSIKQFCVHLGSDLEELNNEVNEVKLQAQDPQILDISADQDKIRLILNNLQSVLADLQKRAFQYKSYQKNFKVEVSKFEALEEVSAELKLKQLLWDSFSEWDKLQQEWLKSKFDCLDPEVLNGQVSKYAKFVTQLEKGLPPNSVVPQLKYKVEKMKEKLPVIIDLRNPTLKARHWAAIEQTVDATLVDAEIPLTLERLSQLHVFDFGQEIQDISGQASGEAALEAILKKVEDSWKTTEFVILPHRDSKDVFILGGTDDIQVLLDDSTINVATLASSRYLGPLKTRVDEWQKQLALFNQTLEEWLTCQRNWLYLESIFNAPDIQRQLPAEAKMFLQVDKSWKEIMRKVNRLPNALRAATQPGLLETFQNNNALLDQIQKCLEAYLESKRVIFPRFYFLSNDELLEILAQTRNPQAVQPHLRKCFDSISKLEFALMPPAEGKIPGIDGEPEKVYTNDILAMLSPEGERVSLGKGLKARGNVEEWLGKVEEAMFTSLRRLCKAAIADYQGKLRTDWVVAGHPSQVILTVSQIMWCRDLTECLETEHSNHIQALKNFEKVNFERLNALAAIVQGSLPKLHRNILTALITIDVHARDIVTELVQSKVETVESFDWQRQLRYYWDIDLDNCVARMALSQYTYGYEYLGACPRLVITPLTDRCYLCLMGALQLDLGGAPAGPAGTGKTETTKDLAKALAIQCVVFNCSDGLDYKMMGRFFSGLAQSGAWCCFDEFNRIDIEVLSVIAQQLITIRNAKAAKLSRFMFEGREIKLVMTCAAFITMNPGYAGRTELPDNLKALFRPFAMMVPNYALIAEVILYSEGFESSKILARKMTQMYKLCSEQLSQQDHYDFGMRAVKSVLVMAGSLKRENPDLNEDVVLIRALQDSNLPKFLTDDALLFSGIISDLFPGVQIPEHDYGILQSTIVDVMNRQNLQPEMCMVRKVIQFYETMLVRHGVMLVGPTGGGKTTVYRILAETLGNLQKLGIENSFYQAVKTYVLNPKSITMGELYGEVNNLTLEWKDGLMALSVRAAVNDTSEDHKWIISDGPVDALWIENMNTVLDDNKMLCLANSERIKLTPQIHMLFEVQDLRVASPATVSRCGMVFVDPEELKWMPYVKTWMKGISKKLTEETQEYILNLFQRYVDEGLHFINKKCSQAIPQVDISKVTTLCCLLESLILGKDGVNLAMEQTKLNTILCQTFVFCYLWSLGGNLTENYYDSFDTFIRTQFDDNPDARLPNSGDLWSIHMDFDTKRLDPWERIIPTFKYNRDVPFFEMLVPTTDTVRYGYLMEKLLAVKHSVLFTGITGVGKSVIAKGLLNKIQESAGYVPVYLNFSAQTSSARTQEIIESKLERKRKNILGAPGNKRIVIFVDDLNMPRLDRYGSQPPIELLRQYQDFGGFYDRNKLFWKEIQDVTIISACAPPGGGRNPVTPRFIRHFSMLCLPMPSEHSLKQIFQAILNGFLSDFPPAVKQTASSIVEASVEIYNKMSVDLLPTPAKSHYVFNLRDLSKCVQGILQCDPGTIREEIQIFRLFCHECQRVFHDRLINNEDKHYFHVILTEMANKHFGIAIDLEYFLNKPIIFGDFIKFGADKADRIYDDMPDIEKTANVLQDYLDDYNLTNPKEVKLVFFQDAIEHVSRIARMIRQERGNALLVGVGGTGKQSLTRLAAHICGYKCLQIELSRGYNYDSFHEDLRKLYKMAGVEDKNMVFLFTDTQIVVEEFLEDINNILNSGEVPNLFEKDELEQVLAATRPRAKEVGISEGNRDEVFQYFISKVRQKLHIVLCMSPVGEAFRSRCRMFPSLVNCCTIDWFVQWPREALLSVSKTFFSQVDAGNEELKEKLPLMCVNVHLSVSSMAERYYNELRRRYYTTPTSYLELINLYLSMLSEKRKQIISARDRVKNGLTKLLETNILVDKMKLDLSALEPVLLAKSEDVEALMEKLAVDQESADQVRNTVQEDEATAKVKAEETQAIADDAQRDLDEALPALDAANKALDSLDKADISEIRVFTKPPDLVMTVMEAISILLNAKPDWPSAKQLLGDSNFLKRLLEYDKENIKPQILAKLQKYINNPDFVPEKVEKVSKACKSMCMWVRAMDLYSRVVKVVEPKRQKLRAAQAELDITMATLREKQALLRQVEDQIQALQDEYDKGVNEKESLAKTMALTKARLVRAGKLTAALEDEQVRWEESIQKFEEEISNITGNVFIAAACVAYYGAFTAQYRQSLIECWIQDCQSLEIPIDPSFSLINILGDPYEIRQWNTDGLPRDLISTENGILVTQGRRWPLMIDPQDQANRWIRNKESKSGLKIIKLTDSNFLRILENSIRLGLPVLLEELKETLDPALEPILLKQIFISGGRLLIRLGDSDIDYDKNFRFYMTTKMPNPHYLPEVCIKVTIINFTVTKSGLEDQLLSDVVRLEKPRLEEQRIKLIVRINTDKNQLKTIEEKILRMLFTSEGNILDNEELIDTLQDSKITSGAIKTRLEEAESTEQMINVAREKYRPVATQGSVMYFVIASLSEIDPMYQYSLKYFKQLFNTTIETSVKTENLQQRLDVLLEQTLLTAYVNVSRGLFEQHKLIYSFMLCVEMMRQQGTLSDAEWNFFLRGSAGLEKERPPKPEAPWLPTATWFACCDLEESFPVFHGLTQNILSHPISIRLGSFETYINPQKWEGYSKMKHEDKHMRQEKEAAHQDPWSAGLSSFHKLILIKCCKEEKVVFALTDFVIENLGKQFIETPPVDLPTLYQDMSCNTPLVFILSTGSDPMGAFQRFARESGYSERVQSISLGQGQGPIAEKMVKDAMKSGNWVFLQNCHLAVSWMLAMEELIKTFTDPDSAIKDTFRLFLSSMPSNTFPVTVLQNSVKVTNEPPKGLRANIRRAFTEMTPSFFEENILGKKWRQIIFGICFFHAIIQERKKFGPLGWNICYEFNDSDRECALLNLKLYCKEGKIPWDALIYITGEITYGGRVTDSWDQRCLRTILKRFFSPETLEEDYKYSESGIYFAPMADSLQEFKDYIENLPLIDDPEIFGMHENANLVFQYKETSTLINTILEVQPRSSTGGEGKSNDEIVQELVASVQTRVPEKLEMEGASESLFVKDLQGRLNSLTTVLGQEVDRFNNLLKLIHTSLETLNKAIAGFVVMSEEMEKVYNSFLNNQVPALWSNTAYPSLKPLGSWVKDLILRTSFVDLWLKRGQPKSYWISGFFFPQGFLTGTLQNHARKYNLPIDELSFKYSVIPTYRDQAAVIEAAKTVQFGQELPMDMELPSPEDGVLVHGMFMDASRWDDKEMVIEDALPGQMNPVLPVVHFEPQQNYKPSPTLYHCPLYKTGARAGTLSTTGHSTNFVVTVLLPSKRSKDYWIAKGSALLCQLSE

SEQ ID NO: 27353 - protein, 4158 aa, Homo sapiens; identical to SEQ ID NO: 27352
  REGION 1..4158: note = ENSP00000374045

SEQ ID NO: 27354 - protein, 397 aa, Homo sapiens
  REGION 1..397: note = ENSP00000369127
MVKETTYYDVLGVKPNATQEELKKAYRKLALKYHPDKNPNEGEKFKQISQAYEVLSDAKKRELYDKGGEQAIKEGGAGGGFGSPMDIFDMFFGGGGRMQRERRGKNVVHQLSVTLEDLYNGATRKLALQKNVICDKCEGRGGKKGAVECCPNCRGTGMQIRIHQIGPGMVQQIQSVCMECQGHGERISPKDRCKSCNGRKIVREKKILEVHIDKGMKDGQKITFHGEGDQEPGLEPGDIIIVLDQKDHAVFTRRGEDLFMCMDIQLVEALCGFQKPISTLDNRTIVITSHPGQIVKHGDIKCVLNEGMPIYRRPYEKGRLIIEFKVNFPENGFLSPDKLSLLEKLLPERKEVEETDEMDQVELVDFDPNQERRRHYNGEAYEDDEHHPRGGVQCQTS

SEQ ID NO: 27355 - protein, 426 aa, Homo sapiens
  REGION 1..426: note = ENSP00000378324
MARGGSQSWSSGESDGQPKEQTPEKPRHKMVKETQYYDILGVKPSASPEEIKKAYRKLALKYHPDKNPDEGEKFKLISQAYEVLSDPKKRDVYDQGGEQAIKEGGSGSPSFSSPMDIFDMFFGGGGRMARERRGKNVVHQLSVTLEDLYNGVTKKLALQKNVICEKCEGVGGKKGSVEKCPLCKGRGMQIHIQQIGPGMVQQIQTVCIECKGQGERINPKDRCESCSGAKVIREKKIIEVHVEKGMKDGQKILFHGEGDQEPELEPGDVIIVLDQKDHSVFQRRGHDLIMKMKIQLSEALCGFKKTIKTLDNRILVITSKAGEVIKHGDLRCVRDEGMPIYKAPLEKGILIIQFLVIFPEKHWLSLEKLPQLEALLPPRQKVRITDDMDQVELKEFCPNEQNWRQHREAYEEDEDGPQAGVQCQTA

SEQ ID NO: 27356 - protein, 139 aa, Homo sapiens
  REGION 1..139: note = ENSP00000438263
MARGGSQSWSSGESDGQPKEQTPEKPRHKMVKETQYYDILGVKPSASPEEIKKAYRKLALKYHPDKNPDEGEKGHGHLQPDISLYSYSGFSVTSDTQLIISTNHRLKMLCILETEVKSFSILFTESLLFISKEAHDPPE

SEQ ID NO: 27357 - protein, 211 aa, Homo sapiens
  REGION 1..211: note = ENSP00000395191
MVKETQYYDILGVKPSASPEEIKKAYRKLALKYHPDKNPDEGEKFKLISQAYEVLSDPKKRDVYDQGGEQAIKEGGSGSPSFSSPMDIFDMFFGGGGRMARERRGKNVVHQLSVTLEDLYNGVTKKLALQKNVICEKCEGVGGKKGSVEKCPLCKGRGMQIHIQQIGPGMVQQIQTVCIECKGQGERINPKDRCESCSGAKVIREKKIIEV

SEQ ID NO: 27358 - protein, 114 aa, Homo sapiens
  REGION 1..114: note = ENSP00000407136
MVKETQYYDILGVKPSASPEEIKKAYRKLALKYHPDKNPDEGEKFKLISQAYEVLSDPKKRDVYDQGGEQAIKEGGSGSPSFSSPMDIFDMFFGGGGRMARERRECCTPVICNS

SEQ ID NO: 27359 - protein, 219 aa, Homo sapiens
  REGION 1..219: note = ENSP00000443962
MVKETQYYDILGVKPSASPEEIKKAYRKLALKYHPDKNPDEGEKFKLISQAYEVLSDPKKRDVYDQGGEQAIKEGGSGSPSFSSPMDIFDMFFGGGGRMARERRGKNVVHQLSVTLEDLYNGVTKKLALQKNVICEKCEGVGGKKGSVEKCPLCKGRGMQIHIQQIGPGMVQQIQTVCIECKGQGERINPKDRCESCSGAKVIREKKIIEVHVEKETRP

SEQ ID NO: 27360 - protein, 397 aa, Homo sapiens
  REGION 1..397: note = ENSP00000339581
MVKETQYYDILGVKPSASPEEIKKAYRKLALKYHPDKNPDEGEKFKLISQAYEVLSDPKKRDVYDQGGEQAIKEGGSGSPSFSSPMDIFDMFFGGGGRMARERRGKNVVHQLSVTLEDLYNGVTKKLALQKNVICEKCEGVGGKKGSVEKCPLCKGRGMQIHIQQIGPGMVQQIQTVCIECKGQGERINPKDRCESCSGAKVIREKKIIEVHVEKGMKDGQKILFHGEGDQEPELEPGDVIIVLDQKDHSVFQRRGHDLIMKMKIQLSEALCGFKKTIKTLDNRILVITSKAGEVIKHGDLRCVRDEGMPIYKAPLEKGILIIQFLVIFPEKHWLSLEKLPQLEALLPPRQKVRITDDMDQVELKEFCPNEQNWRQHREAYEEDEDGPQAGVQCQTA

SEQ ID NO: 27361 - protein, 397 aa, Homo sapiens; identical to SEQ ID NO: 27360
  REGION 1..397: note = ENSP00000378321

SEQ ID NO: 27362 - protein, 53 aa, Homo sapiens
  REGION 1..53: note = ENSP00000441946
MVKETQYYDILGVKPSASPEEIKKAYRKLALKYHPDKNPDEGEKARMLYTSYL

SEQ ID NO: 27363 - protein, 370 aa, Homo sapiens
  REGION 1..370: note = ENSP00000413499
MWESLTLDSGQISALTRFKLISQAYEVLSDPKKRDVYDQGGEQAIKEGGSGSPSFSSPMDIFDMFFGGGGRMARERRGKNVVHQLSVTLEDLYNGVTKKLALQKNVICEKCEGVGGKKGSVEKCPLCKGRGMQIHIQQIGPGMVQQIQTVCIECKGQGERINPKDRCESCSGAKVIREKKIIEVHVEKGMKDGQKILFHGEGDQEPELEPGDVIIVLDQKDHSVFQRRGHDLIMKMKIQLSEALCGFKKTIKTLDNRILVITSKAGEVIKHGDLRCVRDEGMPIYKAPLEKGILIIQFLVIFPEKHWLSLEKLPQLEALLPPRQKVRITDDMDQVELKEFCPNEQNWRQHREAYEEDEDGPQAGVQCQTA

SEQ ID NO: 27364 - protein, 340 aa, Homo sapiens
  REGION 1..340: note = ENSP00000254322
MGKDYYQTLGLARGASDEEIKRAYRRQALRYHPDKNKEPGAEEKFKEIAEAYDVLSDPRKREIFDRYGEEGLKGSGPSGGSGGGANGTSFSYTFHGDPHAMFAEFFGGRNPFDTFFGQRNGEEGMDIDDPFSGFPMGMGGFTNVNFGRSRSAQEPARKKQDPPVTHDLRVSLEEIYSGCTKKMKISHKRLNPDGKSIRNEDKILTIEVKKGWKEGTKITFPKEGDQTSNNIPADIVFVLKDKPHNIFKRDGSDVIYPARISLREALCGCTVNVPTLDGRTIPVVFKDVIRPGMRRKVPGEGLPLPKTPEKRGDLIIEFEVIFPERIPQTSRTVLEQVLPI

SEQ ID NO: 27365 - protein, 240 aa, Homo sapiens
  REGION 1..240: note = ENSP00000444212
MFAEFFGGRNPFDTFFGQRNGEEGMDIDDPFSGFPMGMGGFTNVNFGRSRSAQEPARKKQDPPVTHDLRVSLEEIYSGCTKKMKISHKRLNPDGKSIRNEDKILTIEVKKGWKEGTKITFPKEGDQTSNNIPADIVFVLKDKPHNIFKRDGSDVIYPARISLREALCGCTVNVPTLDGRTIPVVFKDVIRPGMRRKVPGEGLPLPKTPEKRGDLIIEFEVIFPERIPQTSRTVLEQVLPI

SEQ ID NO: 27366 - protein, 183 aa, Homo sapiens
  REGION 1..183: note = ENSP00000471073
MFAEFFGGRNPFDTFFGQRNGEEGMDIDDPFSGFPMGMGGFTNVNFGRSRSAQEPARKKQDPPVTHDLRVSLEEIYSGCTKKMKISHKRLNPDGKSIRNEDKILTIEVKKGWKEGTKITFPKEGDQTSNNIPADIVFVLKDKPHNIFKRDGSDVIYPARISLREALCGCTVNVPTLDGRTIPV

SEQ ID NO: 27367 - protein, 162 aa, Homo sapiens
  REGION 1..162: note = ENSP00000469221
MLMCLKGSGPSGGSGGGANGTSFSYTFHGDPHAMFAEFFGGRNPFDTFFGQRNGEEGMDIDDPFSGFPMGMGGFTNVNFGRSRSAQEPARKKQDPPVTHDLRVSLEEIYSGCTKKMKISHKRLNPDGKSIRNEDKILTIEVKKGWKEGTKITFPKEGDQTSN

SEQ ID NO: 27368 - protein, 116 aa, Homo sapiens
  REGION 1..116: note = ENSP00000470063
MFAEFFGGRNPFDTFFGQRNGEEGMDIDDPFSGFPMGMGGFTNVNFGRSRSAQEPARKKQDPPVTHDLRVSLEEIYSGCTKKMKISHKRLNPDGKSIRNEDKILTIEVKKGWKEGT

SEQ ID NO: 27369 - protein, 116 aa, Homo sapiens; identical to SEQ ID NO: 27368
  REGION 1..116: note = ENSP00000470596

SEQ ID NO: 27370 - protein, 107 aa, Homo sapiens
  REGION 1..107: note = ENSP00000470460
MFAEFFGGRNPFDTFFGQRNGEEGMDIDDPFSGFPMGMGGFTNVNFGRSRSAQEPARKKQDPPVTHDLRVSLEEIYSGCTKKMKISHKRLNPDGKSIRNEDKILTIE

SEQ ID NO: 27371 - protein, 91 aa, Homo sapiens
  REGION 1..91: note = ENSP00000471798
MFAEFFGGRNPFDTFFGQRNGEEGMDIDDPFSGFPMGMGGFTNVNFGRSRSAQEPARKKQDPPVTHDLRVSLEEIYSGCTKKMKISHKRLN

SEQ ID NO: 27372 - protein, 80 aa, Homo sapiens
  REGION 1..80: note = ENSP00000472886
MFAEFFGGRNPFDTFFGQRNGEEGMDIDDPFSGFPMGMGGFTNVNFGRSRSAQEPARKKQDPPVTHDLRVSLEEIYSGCT

SEQ ID NO: 27373 - protein, 79 aa, Homo sapiens
  REGION 1..79: note = ENSP00000471603
MFAEFFGGRNPFDTFFGQRNGEEGMDIDDPFSGFPMGMGGFTNVNFGRSRSAQEPARKKQDPPVTHDLRVSLEEIYSGC

SEQ ID NO: 27374 - protein, 172 aa, Homo sapiens
  REGION 1..172: note = ENSP00000399494
MGKDYYCILGIEKGASDEDIKKAYRKQALKFHPDKNKSPQAEEKFKEVAEAYEVLSDPKKREIYDQFGEEGLKGGAGGTDGQGGTFRYTFHGDPHATFAAFFGGSNPFEIFFGRRMGGGRDSEEMEIDGDPFSAFGFSMNGYPRDRNSVGPSRLKQDPPVIHELRVSLEEIY

SEQ ID NO: 27375 - protein, 337 aa, Homo sapiens
  REGION 1..337: note = ENSP00000359799
MGKDYYCILGIEKGASDEDIKKAYRKQALKFHPDKNKSPQAEEKFKEVAEAYEVLSDPKKREIYDQFGEEGLKGGAGGTDGQGGTFRYTFHGDPHATFAAFFGGSNPFEIFFGRRMGGGRDSEEMEIDGDPFSAFGFSMNGYPRDRNSVGPSRLKQDPPVIHELRVSLEEIYSGCTKRMKISRKRLNADGRSYRSEDKILTIEIKKGWKEGTKITFPREGDETPNSIPADIVFIIKDKDHPKFKRDGSNIIYTAKISLREALCGCSINVPTLDGRNIPMSVNDIVKPGMRRRIIGYGLPFPKNPDQRGDLLIEFEVSFPDTISSSSKEVLRKHLPAS

SEQ ID NO: 27376 - protein, 420 aa, Homo sapiens
  REGION 1..420: note = ENSP00000413684
MFKRTVLSCPPPAAPPLQARGAFRSFPHSWGEDFLASLMFKIQLEPLKLRAWTLNGFVKFRNKETSAGPVAVMGKDYYKILGIPSGANEDEIKKAYRKMALKYHPDKNKEPNAEEKFKEIAEAYDVLSDPKKRGLYDQYGEEGLKTGGGTSGGSSGSFHYTFHGDPHATFASFFGGSNPFDIFFASSRSTRPFSGFDPDDMDVDEDEDPFGAFGRFGFNGLSRGPRRAPEPLYPRRKVQDPPVVHELRVSLEEIYHGSTKRMKITRRRLNPDGRTVRTEDKILHIVIKRGWKEGTKITFPKEGDATPDNIPADIVFVLKDKPHAHFRRDGTNVLYSALISLKEALCGCTVNIPTIDGRVIPLPCNDVIKPGTVKRLRGEGLPFPKVPTQRGDLIVEFKVRFPDRLTPQTRQILKQHLPCS

SEQ ID NO: 27377 - protein, 348 aa, Homo sapiens
  REGION 1..348: note = ENSP00000441999
MGKDYYKILGIPSGANEDEIKKAYRKMALKYHPDKNKEPNAEEKFKEIAEAYDVLSDPKKRGLYDQYGEEGLKTGGGTSGGSSGSFHYTFHGDPHATFASFFGGSNPFDIFFASSRSTRPFSGFDPDDMDVDEDEDPFGAFGRFGFNGLSRGPRRAPEPLYPRRKVQDPPVVHELRVSLEEIYHGSTKRMKITRRRLNPDGRTVRTEDKILHIVIKRGWKEGTKITFPKEGDATPDNIPADIVFVLKDKPHAHFRRDGTNVLYSALISLKEALCGCTVNIPTIDGRVIPLPCNDVIKPGTVKRLRGEGLPFPKVPTQRGDLIVEFKVRFPDRLTPQTRQILKQHLPCS

SEQ ID NO: 27378 - protein, 211 aa, Homo sapiens
  REGION 1..211: note = ENSP00000445536
MYGPRAASRNKETSAGPVAVMGKDYYKILGIPSGANEDEIKKAYRKMALKYHPDKNKEPNAEEKFKEIAEAYDVLSDPKKRGLYDQYGEEGLKTGGGTSGGSSGSFHYTFHGDPHATFASFFGGSNPFDIFFASSRSTRPFSGFDPDDMDVDEDEDPFGAFGRFGFNGLSRGPRRAPEPLYPRRKVQDPPVVHELRVSLEEIYHGSTKRMK

SEQ ID NO: 27379 - protein, 155 aa, Homo sapiens
  REGION 1..155: note = ENSP00000396332
MGKDYYKILGIPSGANEDEIKKAYRKMALKYHPDKNKEPNAEEKFKEIAEAYDVLSDPKKRGLYDQYGEEGLKTGGGTSGGSSGSFHYTFHGDPHATFASFFGGSNPFDIFFASSRSTRPFSGFDPDDMDVDEDEDPFGAFGRFGFNGLSRGPRR

SEQ ID NO: 27380 - protein, 205 aa, Homo sapiens
  REGION 1..205: note = ENSP00000439217
MGKDYYKILGIPSGANEDEIKKAYRKMALKYHPDKNKEPNAEEKFKEIAEAYDVLSDPKKRGLYDQYGEEGLKTGGGTSGGSSGSFHYTFHGDPHATFASFFGGSNPFDIFFASSRSTRPFSGFDPDDMDVDEDEDPFGAFGRFGFNGLSRGPRRAPEPLYPRRKVQDPPVVHELRVSLEEIYHGSTKRMKITRRRLNPDGRTVR

SEQ ID NO: 27381 - protein, 105 aa, Homo sapiens
  REGION 1..105: note = ENSP00000433640
MGKDYYKILGIPSGANEDEIKKAYRKMALKYHPDKNKEPNAEEKFKEIAEAYDVLSDPKKRGLYDQYGEEAAAPLGPSVALTQMTWMWMKMRTHLALSAVLASMG

SEQ ID NO: 27382 - protein, 33 aa, Homo sapiens
  REGION 1..33: note = ENSP00000393749
MGKDYYKILGIPSGANEDEIKKAYRKMALKYHP

SEQ ID NO: 27383 - protein, 348 aa, Homo sapiens; identical to SEQ ID NO: 27377
  REGION 1..348: note = ENSP00000312517

SEQ ID NO: 27384 - protein, 462 aa, Homo sapiens
  REGION 1..462: note = ENSP00000404079
MGGAEAEPWGRAPGPAIGGRRAGDSCPGWRRRSRSRGRGQRLSHGPRRRPQLLTAAPPLQARGAFRSFPHSWGEDFLASLMFKIQLEPLKLRAWTLNGFVKFRNKETSAGPVAVMGKDYYKILGIPSGANEDEIKKAYRKMALKYHPDKNKEPNAEEKFKEIAEAYDVLSDPKKRGLYDQYGEEGLKTGGGTSGGSSGSFHYTFHGDPHATFASFFGGSNPFDIFFASSRSTRPFSGFDPDDMDVDEDEDPFGAFGRFGFNGLSRGPRRAPEPLYPRRKVQDPPVVHELRVSLEEIYHGSTKRMKITRRRLNPDGRTVRTEDKILHIVIKRGWKEGTKITFPKEGDATPDNIPADIVFVLKDKPHAHFRRDGTNVLYSALISLKEALCGCTVNIPTIDGRVIPLPCNDVIKPGTVKRLRGEGLPFPKVPTQRGDLIVEFKVRFPDRLTPQTRQILKQHLPCS

SEQ ID NO: 27385 - protein, 145 aa, Homo sapiens
  REGION 1..145: note = ENSP00000410643
MVDYYEVLGVQRHASPEDIKKAYRKLALKWHPDKNPENKEEAERKFKQVAEAYEVLSDAKKRDIYDKYGKEGLNGGGGGGSHFDSPFEFGFTFRNPDDVFREFFGGRDPFSFDFFEDPFEDFFGNRRGPRGSRSRGTGSFFSAFS

SEQ ID NO: 27386 - protein, 241 aa, Homo sapiens
  REGION 1..241: note = ENSP00000397556
MVDYYEVLGVQRHASPEDIKKAYRKLALKWHPDKNPENKEEAERKFKQVAEAYEVLSDAKKRDIYDKYGKEGLNGGGGGGSHFDSPFEFGFTFRNPDDVFREFFGGRDPFSFDFFEDPFEDFFGNRRGPRGSRSRGTGSFFSAFSGFPSFGSGFSSFDTGFTSFGSLGHGGLTSFSSTSFGGSGMGNFKSISTSTKMVNGRKITTKRIVENGQERVEVEEDGQLKSLTINGKEQLLRLDNK

SEQ ID NO: 27387 - protein, 326 aa, Homo sapiens
  REGION 1..326: note = ENSP00000262177
MVDYYEVLGVQRHASPEDIKKAYRKLALKWHPDKNPENKEEAERKFKQVAEAYEVLSDAKKRDIYDKYGKEGLNGGGGGGSHFDSPFEFGFTFRNPDDVFREFFGGRDPFSFDFFEDPFEDFFGNRRGPRGSRSRGTGSFFSAFSGFPSFGSGFSSFDTGFTSFGSLGHGGLTSFSSTSFGGSGMGNFKSISTSTKMVNGRKITTKRIVENGQERVEVEEDGQLKSLTINGVADDDALAEERMRRGQNALPAQPAGLRPPKPPRPASLLRHAPHCLSEEEGEQDRPRAPGPWDPLASAAGLKEGGKRKKQKQREESKKKKSTKGNH

SEQ ID NO: 27388 - protein, 228 aa, Homo sapiens
  REGION 1..228: note = ENSP00000400665
MVDYYEVLGVQRHASPEDIKKAYRKLALKWHPDKNPENKEEAERKFKQVAEAYEVLSDAKKRDIYDKYGKEGLNGGGGGGSHFDSPFEFGFTFRNPDDVFREFFGGRDPFSFDFFEDPFEDFFGNRRGPRGSRSRGTGSFFSAFSGFPSFGSGFSSFDTGFTSFGSLGHGGLTSFSSTSFGGSGMGNFKSISTSTKMVNGRKITTKRIVENGQERVEVEEDGQLKSLT

SEQ ID NO: 27389 - protein, 334 aa, Homo sapiens
  REGION 1..334: note = ENSP00000488263
MVDYYEVLGVQRHASPEDIKKAYRKLALKWHPDKNPENKEEAERKFKQVAEAYEVLSDAKKRDIYDKYGKEGLNGGGGGGSHFDSPFEFGFTFRNPDDVFREFFGGRDPFSFDFFEDPFEDFFGNRRGPRGSRSRGTGSFFSAFSGFPSFGSGFSSFDTGFTSFGSLGHGGLTSFSSTSFGGSGMGNFKSISTSTKMVNGRKITTKRIVENGQERVEVEEDGQLKSLTINGVADDDALAEERMRRGQNALPAQPAGLRPPKPPRPASLLRHAPHCLSEEEGEQDRPRAPGPWDPLASAAGVQREAAVEQAQSETSLGARGQRGHKPRLGCCVLT

SEQ ID NO: 27390 - protein, 211 aa, Homo sapiens
  REGION 1..211: note = ENSP00000396267
MVDYYEVLGVQRHASPEDIKKAYRKLALKWHPDKNPENKEEAERKFKQVAEAYEVLSDAKKRDIYDKYGKEGLNGGGGGGSHFDSPFEFGFTFRNPDDVFREFFGGRDPFSFDFFGVADDDALAEERMRRGQNALPAQPAGLRPPKPPRPASLLRHAPHCLSEEEGEQDRPRAPGPWDPLASAAGLKEGGKRKKQKQREESKKKKSTKGNH

SEQ ID NO: 27391 - protein, 129 aa, Homo sapiens
  REGION 1..129: note = ENSP00000415201
MVDYYEVLGVQRHASPEDIKKAYRKLALKWHPDKNPENKEEAERKFKQVAEAYEVLSDAKKRDIYDKYGKEGLNGGGGGGSHFDSPFEFGFTFRNPDDVFREFFGGRDPFSFDFFGQGSVWVEVLCSDR

SEQ ID NO: 27392 - protein, 66 aa, Homo sapiens
  REGION 1..66: note = ENSP00000391690
MVDYYEVLGVQRHASPEDIKKAYRKLALKWHPDKNPENKEEAERKFKQVAEAYEVLSDAKKRDIYD

SEQ ID NO: 27393 - protein, 125 aa, Homo sapiens
  REGION 1..125: note = ENSP00000403407
MVDYYEVLGVQRHASPEDIKKAYRKLALKWHPDKNPENKEEAERKFKQVAEAYEVLSDAKKRDIYDKYGKEGLNGGGGGGSHFDSPFEFGFTFRNPDDVFREFFGGRDPFSFDFFEDPFEDFFGN

SEQ ID NO: 27394 - protein, 98 aa, Homo sapiens
  REGION 1..98: note = ENSP00000396240
MVDYYEVLGVQRHASPEDIKKAYRKLALKWHPDKNPENKEEAERKFKQVAEAYEVLSDAKKRDIYDKYGKEGLNGGGGGGSHFDSPFEFGFTFRNPDD

SEQ ID NO: 27395 - protein, 45 aa, Homo sapiens
  REGION 1..45: note = ENSP00000389599
MVDYYEVLGVQRHASPEDIKKAYRKLALKWHPDKNPENKEEAERK

SEQ ID NO: 27396 - protein, 334 aa, Homo sapiens; identical to SEQ ID NO: 27389
  REGION 1..334: note = ENSP00000488740

SEQ ID NO: 27397 - protein, 273 aa, Homo sapiens
  REGION 1..273: note = ENSP00000264711
MEANMPKRKEPGRSLRIKVISMGNAEVGKSCIIKRYCEKRFVSKYLATIGIDYGVTKVHVRDREIKVNIFDMAGHPFFYEVRNEFYKDTQGVILVYDVGQKDSFDALDAWLAEMKQELGPHGNMENIIFVVCANKIDCTKHRCVDESEGRLWAESKGFLYFETSAQTGEGINEMFQTFYISIVDLCENGGKRPTTNSSASFTKEQADAIRRIRNSKDSWDMLGVKPGASRDEVNKAYRKLAVLLHPDKCVAPGSEDAFKAVVNARTALLKNIK

SEQ ID NO: 27398 - protein, 90 aa, Homo sapiens
  REGION 1..90: note = ENSP00000370187
MEANMPKRKEPGRSLRIKVISMGNAEVGKSCIIKRYCEKRFVSKYLATIGIDYGVTKVHVRDREIKVNIFDMAGHPFFYEMRKLRRREVK

SEQ ID NO: 27399 - protein, 177 aa, Homo sapiens
  REGION 1..177: note = ENSP00000440086
MEANMPKRKEPGRSLRIKVISMGNAEVGKSCIIKRYCEKRFVSKYLATIGIDYGVTKVHVRDREIKVNIFDMAGHPFFYEVRNEFYKDTQGVILVYDVGQKDSFDALDAWLAEMKQELGPHGNMENIIFVVCANKIDCTKHRCVDESEGRLWAESKGFLYFETSAQTGEGINEMFQG

SEQ ID NO: 27400 - protein, 494 aa, Homo sapiens
  REGION 1..494: note = ENSP00000406463
MAAAAECDVVMAATEPELLDDQEAKREAETFKEQGNAYYAKKDYNEAYNYYTKAIDMCPKNASYYGNRAATLMMLGRFREALGDAQQSVRLDDSFVRGHLREGKCHLSLGNAMAACRSFQRALELDHKNAQAQQEFKNANAVMEYEKIAETDFEKRDFRKVVFCMDRALEFAPACHRFKILKAECLAMLGRYPEAQSVASDILRMDSTNADALYVRGLCLYYEDCIEKAVQFFVQALRMAPDHEKACIACRNAKALKAKKEDGNKAFKEGNYKLAYELYTEALGIDPNNIKTNAKLYCNRGTVNSKLRKLDDAIEDCTNAVKLDDTYIKAYLRRAQCYMDTEQYEEAVRDYEKVYQTEKTKEHKQLLKNAQLELKKSKRKDYYKILGVDKNASEDEIKKAYRKRALMHHPDRHSGASAEVQKEEEKKFKEVGEAFTILSDPKKKTRYDSGQDLDEEGMNMGDFDPNNIFKAFFGGPGGFSFEASGPGNFFFQFG

SEQ ID NO: 27401 - protein, 55 aa, Homo sapiens
  REGION 1..55: note = ENSP00000467702
DKNASEDEIKKAYRKRALMHHPDFDPNNIFKAFFGGPGGFSFEASGPGNFFFQFG

SEQ ID NO: 27402 - protein, 438 aa, Homo sapiens
  REGION 1..438: note = ENSP00000394327
MCPKNASYYGNRAATLMMLGRFREALGDAQQSVRLDDSFVRGHLREGKCHLSLGNAMAACRSFQRALELDHKNAQAQQEFKNANAVMEYEKIAETDFEKRDFRKVVFCMDRALEFAPACHRFKILKAECLAMLGRYPEAQSVASDILRMDSTNADALYVRGLCLYYEDCIEKAVQFFVQALRMAPDHEKACIACRNAKALKAKKEDGNKAFKEGNYKLAYELYTEALGIDPNNIKTNAKLYCNRGTVNSKLRKLDDAIEDCTNAVKLDDTYIKAYLRRAQCYMDTEQYEEAVRDYEKVYQTEKTKEHKQLLKNAQLELKKSKRKDYYKILGVDKNASEDEIKKAYRKRALMHHPDRHSGASAEVQKEEEKKFKEVGEAFTILSDPKKKTRYDSGQDLDEEGMNMGDFDPNNIFKAFFGGPGGFSFEASGPGNFFFQFG

SEQ ID NO: 27403 - protein, 137 aa, Homo sapiens
  REGION 1..137: note = ENSP00000466114
MAAAAECDVVMAATEPELLDDQEAKREAETFKEQGNAYYAKKDYNEAYNYYTKAIDMCPKNASYYGNRAATLMMLGRFREALGDAQQSVRLDDSFVRGHLREGKCHLSLGNAMAACRSFQRALELDHKNAQAQQELH

SEQ ID NO: 27404 - protein, 438 aa, Homo sapiens; identical to SEQ ID NO: 27402
  REGION 1..438: note = ENSP00000313311

SEQ ID NO: 27405 - protein, 89 aa, Homo sapiens
  REGION 1..89: note = ENSP00000464993
  VARIANT 1: note = Any amino acid
XKEDGNKAFKEGNYKLAYELYTEALGIDPNNIKTNAKLYCNRGTVNSKLRKLDDAIEDCTNAVKLDDTYIKAYLRRAQWWDCSSPRLSL

SEQ ID NO: 27406 - protein, 253 aa, Homo sapiens
  REGION 1..253: note = ENSP00000467477
MCPKNASYYGNRAATLMMLGRFREALGDAQQSVRLDDSFVRGHLREGKCHLSLGNAMAACRSFQRALELDHKNAQAQQEFKNANAVMEYEKIAETDFEKRDFRKVVFCMDRALEFAPACHRFKILKAECLAMLGRYPEAQSVASDILRMDSTNADALYVRGLCLYYEDCIEKAVQFFVQALRMAPDHEKACIACRNAKALKAKKEDGNKAFKEGNYKLAYELYTEALGIDPNNIKTNAKLYCNRGTVNSKETR

SEQ ID NO: 27407 - protein, 258 aa, Homo sapiens
  REGION 1..258: note = ENSP00000468805
MAAAAECDVVMAATEPELLDDQEAKREAETFKEQGNAYYAKKDYNEAYNYYTKAIDMCPKNASYYGNRAATLMMLGRFREALGDAQQSVRLDDSFVRFKNANAVMEYEKIAETDFEKRDFRKVVFCMDRALEFAPACHRFKILKAECLAMLGRYPEAQSVASDILRMDSTNADALYVRGLCLYYEDCIEKAVQFFVQALRMAPDHEKACIACRNAKALKAKKEDGNKAFKEGNYKLAYELYTEALGIDPNNIKTNAKL

SEQ ID NO: 27408 - protein, 261 aa, Homo sapiens
  REGION 1..261: note = ENSP00000464756
MSIGTCCFPGTNREAETFKEQGNAYYAKKDYNEAYNYYTKAIDMCPKNASYYGNRAATLMMLGRFREALGDAQQSVRLDDSFVRGHLREGKCHLSLGNAMAACRSFQRALELDHKNAQAQQEFKNANAVMEYEKIAETDFEKRDFRKVVFCMDRALEFAPACHRFKILKAECLAMLGRYPEAQSVASDILRMDSTNADALYVRGLCLYYEDCIEKAVQFFVQALRMAPDHEKACIACRNAKALKAKKEDGNKAFKEGNYKL

SEQ ID NO: 27409 - protein, 128 aa, Homo sapiens
  REGION 1..128: note = ENSP00000468102
MCPKNASYYGNRAATLMMLGRFREALGDAQQSVRLDDSFVRGHLREGKCHLSLGNAMAACRSFQRALELDHKNAQAQQEFKNANAVMEYEKIAETDFEKRDFRKVVFCMDRALEFAPACHRFKILKAE

SEQ ID NO: 27410 - protein, 113 aa, Homo sapiens
  REGION 1..113: note = ENSP00000465340
MCPKNASYYGNRAATLMMLGRFREALGDAQQSVRLDDSFVRGHLREGKCHLSLGNAMAACRSFQRALELDHKNAQAQQEFKNANAVMEYEKIAETDFEKRDFRKVVFCMDRAL

SEQ ID NO: 27411 - protein, 104 aa, Homo sapiens
  REGION 1..104: note = ENSP00000466748
MCPKNASYYGNRAATLMMLGRFREALGDAQQSVRLDDSFVRGHLREGKCHLSLGNAMAACRSFQRALELDHKNAQAQQEFKNANAVMEYEKIAETDFEKRDFRK

SEQ ID NO: 27412 - protein, 39 aa, Homo sapiens
  REGION 1..39: note = ENSP00000466877
MAAAAECDVVMAATEPELLDDQEAKSPTPLTSHPSVPLL

SEQ ID NO: 27413 - protein, 102 aa, Homo sapiens
  REGION 1..102: note = ENSP00000465228
MCPKNASYYGNRAATLMMLGRFREALGDAQQSVRLDDSFVRGHLREGKCHLSLGNAMAACRSFQRALELDHKNAQAQQEFKNANAVMEYEKIAETDFEKRDF

SEQ ID NO: 27414 - protein, 75 aa, Homo sapiens
  REGION 1..75: note = ENSP00000465399
MCPKNASYYGNRAATLMMLGRFREALGDAQQSVRLDDSFVRGHLREGKCHLSLGNAMAACRSFQRALELDHKNAQ

SEQ ID NO: 27415 - protein, 74 aa, Homo sapiens
  REGION 1..74: note = ENSP00000465140
MCPKNASYYGNRAATLMMLGRFREALGDAQQSVRLDDSFVRGHLREGKCHLSLGNAMAACRSFQRALELDHKNA

SEQ ID NO: 27416 - protein, 737 aa, Homo sapiens
  REGION 1..737: note = ENSP00000345229
MQPRRAQAPGAQLLPALALLLLLLGAGPRGSSLANPVPAAPLSAPGPCAAQPCRNGGVCTSRPEPDPQHPAPAGEPGYSCTCPAGISGANCQLVADPCASNPCHHGNCSSSSSSSSDGYLCICNEGYEGPNCEQALPSLPATGWTESMAPRQLQPVPATQEPDKILPRSQATVTLPTWQPKTGQKVVEMKWDQVEVIPDIACGNASSNSSAGGRLVSFEVPQNTSVKIRQDATASLILLWKVTATGFQQCSLIDGRSVTPLQASGGLVLLEEMLALGNNHFIGFVNDSVTKSIVALRLTLVVKVSTCVPGESHANDLECSGKGKCTTKPSEATFSCTCEEQYVGTFCEEYDACQRKPCQNNASCIDANEKQDGSNFTCVCLPGYTGELCQSKIDYCILDPCRNGATCISSLSGFTCQCPEGYFGSACEEKVDPCASSPCQNNGTCYVDGVHFTCNCSPGFTGPTCAQLIDFCALSPCAHGTCRSVGTSYKCLCDPGYHGLYCEEEYNECLSAPCLNAATCRDLVNGYECVCLAEYKGTHCELYKDPCANVSCLNGATCDSDGLNGTCICAPGFTGEECDIDINECDSNPCHHGGSCLDQPNGYNCHCPHGWVGANCEIHLQWKSGHMAESLTNMPRHSLYIIIGALCVAFILMLIILIVGICRISRIEYQGSSRPAYEEFYNCRSIDSEFSNAIASIRHARFGKKSRPAMYDVSPIAYEDYSPDDKPLVTLIKTKDL

SEQ ID NO: 27417 - protein, 865 aa, Homo sapiens
  REGION 1..865: note = ENSP00000443657
MPTLFKGVWGVVEHSRALGRFCPACLPSGPHLHTQPALGTAEMTLLSSQSSSLVAPSGSVSAENPEQRMLEKRAKVIEELLQTERDYIRDLEMCIERIMVPMQQAQVPNIDFEGLFGNMQMVIKVSKQLLAALEISDAVGPVFLGHRDELEGTYKIYCQNHDEAIALLEIYEKDEKIQKHLQDSLADLKSLYNEWGCTNYINLGSFLIKPVQRVMRYPLLLMELLNSTPESHPDKVPLTNAVLAVKEINVNINEYKRRKDLVLKYRKGDEDSLMEKISKLNIHSIIKKSNRVSSHLKHLTGFAPQIKDEVFEETEKNFRMQERLIKSFIRDLSLYLQHIRESACVKVVAAVSMWDVCMERGHRDLEQFERVHRYISDQLFTNFKERTERLVISPLNQLLSMFTGPHKLVQKRFDKLLDFYNCTERAEKLKDKKTLEELQSARNNYEALNAQLLDELPKFHQYAQGLFTNCVHGYAEAHCDFVHQALEQLKPLLSLLKVAGREGNLIAIFHEEHSRVLQQLQVFTFFPESLPATKKPFERKTIDRQSARKPLLGLPSYMLQSEELRASLLARYPPEKLFQAERNFNAAQDLDVSLLEGDLVGVIKKKDPMGSQNRWLIDNGVTKGFVYSSFLKPYNPRRSHSDASVGSHSSTESEHGSSSPRFPRQNSGSTLTFNPSSMAVSFTSGSCQKQPQDASPPPKECDQGTLSASLNPSNSESSPSRCPSDPDSTSQPRSGDSADVARDVKQPTATPRSYRNFRHPEIVGYSVPGRNGQSQDLVKGCARTAQAPEDRSTEPDGSEAEGNQVYFAVYTFKARNPNELSVSANQKLKILEFKDVTGNTEWWLAEVNGKKGYVPSNYIRKTEYT

SEQ ID NO: 27418 - protein, 1209 aa, Homo sapiens
  REGION 1..1209: note = ENSP00000489875
MCETQKARKEREVEEKRHWDSSWEYEDYGSVRKRNLTVLDGLYRENDLDPRYWAKGQHQPYRKRDCGYWDFEQSEPSYMDCGEAHESGKGCVYHGGHDGYRSPENVDYESLSPGTKDNSPTRSPDVTSKAGGYGEANGYSDCKNLNYNPEDSKKAEQLTDCRGLDDSSANLGQPQLWYIDHENVNHNLEDCWATNFYCREHSNLYHVPGSYPDGQPVSFSDSNGVNEDKEFIKYHEGDRNVHQNDNMYPKAKTHIMDQGDFDTENKGYDALFANCAYKSRNSRGTDSLHQMENLEYNGTDIPRTKAHGGSRILLDGLQTQCTRGEQGGHHLGIPQSSSLEKNIWHLEEEKKLNGPETWRRNSCLRRTAPSTLRRSEFVQNSKKTQEMTLLSSQSSSLVAPSGSVSAENPEQRMLEKRAKVIEELLQTERDYIRDLEMCIERIMVPMQQAQVPNIDFEGLFGNMQMVIKVSKQLLAALEISDAVGPVFLGHRDELEGTYKIYCQNHDEAIALLEIYEKDEKIQKHLQDSLADLKSLYNEWGCTNYINLGSFLIKPVQRVMRYPLLLMELLNSTPESHPDKVPLTNAVLAVKEINVNINEYKRRKDLVLKYRKGDEDSLMEKISKLNIHSIIKKSNRVSSHLKHLTGFAPQIKDEVFEETEKNFRMQERLIKSFIRDLSLYLQHIRESACVKVVAAVSMWDVCMERGHRDLEQFERVHRYISDQLFTNFKERTERLVISPLNQLLSMFTGPHKLVQKRFDKLLDFYNCTERAEKLKDKKTLEELQSARNNYEALNAQLLDELPKFHQYAQGLFTNCVHGYAEAHCDFVHQALEQLKPLLSLLKVAGREGNLIAIFHEEHSRVLQQLQVFTFFPESLPATKKPFERKTIDRQSARKPLLGLPSYMLQSEELRASLLARYPPEKLFQAERNFNAAQDLDVSLLEGDLVGVIKKKDPMGSQNRWLIDNGVTKGFVYSSFLKPYNPRRSHSDASVGSHSSTESEHGSSSPRFPRQNSGSTLTFNPSSMAVSFTSGSCQKQPQDASPPPKECDQGTLSASLNPSNSESSPSRCPSDPDSTSQPRSGDSADVARDVKQPTATPRSYRNFRHPEIVGYSVPGRNGQSQDLVKGCARTAQAPEDRSTEPDGSEAEGNQVYFAVYTFKARNPNELSVSANQKLKILEFKDVTGNTEWWLAEVNGKKGYVPSNYIRKTEYT

SEQ ID NO: 27419 - protein, 1577 aa, Homo sapiens
  REGION 1..1577: note = ENSP00000315659
MEAGSVVRAIFDFCPSVSEELPLFVGDIIEVLAVVDEFWLLGKKEDVTGQFPSSFVEIVTIPSLKEGERLFVCICEFTSQELDNLPLHRGDLVILDGIPTAGWLQGRSCWGARGFFPSSCVRELCLSSQSRQWHSQSALFQIPEYSMGQARALMGLSAQLDEELDFREGDVITIIGVPEPGWFEGELEGRRGIFPEGFVELLGPLRTVDESVSSGNQDDCIVNGEVDTPVGEEEIGPDEDEEEPGTYGVALYRFQALEPNELDFEVGDKIRILATLEDGWLEGSLKGRTGIFPYRFVKLCPDTRVEETMALPQEGSLARIPETSLDCLENTLGVEEQRHETSDHEAEEPDCIISEAPTSPLGHLTSEYDTDRNSYQDEDTAGGPPRSPGVEWEMPLATDSPTSDPTEVVNGISSQPQVPFHPNLQKSQYYSTVGGSHPHSEQYPDLLPLEARTRDYASLPPKRMYSQLKTLQKPVLPLYRGSSVSASRVVKPRQSSPQLHNLASYTKKHHTSSVYSISERLEMKPGPQAQGLVMEAATHSQGDGSTDLDSKLTQQLIEFEKSLAGPGTEPDKILRHFSIMDFNSEKDIVRGSSKLITEQELPERRKALRPPPPRPCTPVSTSPHLLVDQNLKPAPPLVVRPSRPAPLPPSAQQRTNAVSPKLLSRHRPTCETLEKEGPGHMGRSLDQTSPCPLVLVRIEEMERDLDMYSRAQEELNLMLEEKQDESSRAETLEDLKFCESNIESLNMELQQLREMTLLSSQSSSLVAPSGSVSAENPEQRMLEKRAKVIEELLQTERDYIRDLEMCIERIMVPMQQAQVPNIDFEGLFGNMQMVIKVSKQLLAALEISDAVGPVFLGHRDELEGTYKIYCQNHDEAIALLEIYEKDEKIQKHLQDSLADLKSLYNEWGCTNYINLGSFLIKPVQRVMRYPLLLMELLNSTPESHPDKVPLTNAVLAVKEINVNINEYKRRKDLVLKYRKGDEDSLMEKISKLNIHSIIKKSNRVSSHLKHLTGFAPQIKDEVFEETEKNFRMQERLIKSFIRDLSLYLQHIRESACVKVVAAVSMWDVCMERGHRDLEQFERVHRYISDQLFTNFKERTERLVISPLNQLLSMFTGPHKLVQKRFDKLLDFYNCTERAEKLKDKKTLEELQSARNNYEALNAQLLDELPKFHQYAQGLFTNCVHGYAEAHCDFVHQALEQLKPLLSLLKVAGREGNLIAIFHEEHSRVLQQLQVFTFFPESLPATKKPFERKTIDRQSARKPLLGLPSYMLQSEELRASLLARYPPEKLFQAERNFNAAQDLDVSLLEGDLVGVIKKKDPMGSQNRWLIDNGVTKGFVYSSFLKPYNPRRSHSDASVGSHSSTESEHGSSSPRFPRQNSGSTLTFNPSSMAVSFTSGSCQKQPQDASPPPKECDQGTLSASLNPSNSESSPSRCPSDPDSTSQPRSGDSADVARDVKQPTATPRSYRNFRHPEIVGYSVPGRNGQSQDLVKGCARTAQAPEDRSTEPDGSEAEGNQVYFAVYTFKARNPNELSVSANQKLKILEFKDVTGNTEWWLAEVNGKKGYVPSNYIRKTEYT

SEQ ID NO: 27420 - protein, 412 aa, Homo sapiens
  REGION 1..412: note = ENSP00000417238
MTLRRRGEKATISIQEHMAIDVCPGPTRPIKQISDYFPRFPRGLPPDAGPRAAAPPDAPARPAVAGAGRRSPSDGAREDDEDVDQLFGAYGSSPGPSPGPSPARPPAKPPEDEPDADGYESDDCTALGTLDFSLLYDQENNALHCTITKAKGLKPMDHNGLADPYVKLHLLPGASKANKLRTKTLRNTLNPTWNETLTYYGITDEDMIRKTLRISVCDEDKFRHNEFIGETRVPLKKLKPNHTKTFSICLEKQLPVDKTEDKSLEERGRILISLKYSSQKQGLLVGIVRCAHLAAMDANGYSDPYVKTYLRPDVDKKSKHKTAVKKKTLNPEFNEEFCYEIKHGDLAKKSLEVTVWDYDIGKSNDFIGGVVLGIHAKGERLKHWFDCLKNKDKRIERWHTLTSELPGAVLSD

SEQ ID NO: 27421 - protein, 412 aa, Homo sapiens
  REGION 1..412: note = ENSP00000482950
MTLRRRGEKATISIQEHMAIDVCPGPIRPIKQISDYFPRFPRGLPPDAGPRAAAPPDAPARPAVAGAGRRSPSDGAREDDEDVDQLFGAYGSSPGPSPGPSPARPPAKPPEDEPDADGYESDDCTALGTLDFSLLYDQENNALHCTITKAKGLKPMDHNGLADPYVKLHLLPGASKANKLRTKTLRNTLNPTWNETLTYYGITDEDMIRKTLRISVCDEDKFRHNEFIGETRVPLKKLKPNHTKTFSICLEKQLPVDKTEDKSLEERGRILISLKYSSQKQGLLVGIVRCAHLAAMDANGYSDPYVKTYLRPDVDKKSKHKTAVKKKTLNPEFNEEFCYEIKHGDLAKKSLEVTVWDYDIGKSNDFIGGVVLGIHAKGERLKHWFDCLKNKDKRIERWHTLTSELPGAVLSD

SEQ ID NO: 27422 - protein, 1865 aa, Homo sapiens
  REGION 1..1865: note = ENSP00000280333
MTRWVPTKREEKYGVAFYNYDARGADELSLQIGDTVHILETYEGWYRGYTLRKKSKKGIFPASYIHLKEAIVEGKGQHETVIPGDLPLIQEVTTTLREWSTIWRQLYVQDNREMFRSVRHMIYDLIEWRSQILSGTLPQDELKELKKKVTAKIDYGNRILDLDLVVRDEDGNILDPELTSTISLFRAHEIASKQVEERLQEEKSQKQNIDINRQAKFAATPSLALFVNLKNVVCKIGEDAEVLMSLYDPVESKFISENYLVRWSSSGLPKDIDRLHNLRAVFTDLGSKDLKREKISFVCQIVRVGRMELRDNNTRKLTSGLRRPFGVAVMDVTDIINGKVDDEDKQHFIPFQPVAGENDFLQTVINKVIAAKEVNHKGQGLWVTLKLLPGDIHQIRKEFPHLVDRTTAVARKTGFPEIIMPGDVRNDIYVTLVQGDFDKGSKTTAKNVEVTVSVYDEDGKRLEHVIFPGAGDEAISEYKSVIYYQVKQPRWFETVKVAIPIEDVNRSHLRFTFRHRSSQDSKDKSEKIFALAFVKLMRYDGTTLRDGEHDLIVYKAEAKKLEDAATYLSLPSTKAELEEKGHSATGKSMQSLGSCTISKDSFQISTLVCSTKLTQNVDLLGLLKWRSNTSLLQQNLRQLMKVDGGEVVKFLQDTLDALFNIMMENSESETFDTLVFDALVFIIGLIADRKFQHFNPVLETYIKKHFSATLAYTKLTKVLKNYVDGAEKPGVNEQLYKAMKALESIFKFIVRSRILFNQLYENKGEADFVESLLQLFRSINDMMSSMSDQTVRVKGAALKYLPTIVNDVKLVFDPKELSKMFTEFILNVPMGLLTIQKLYCLIEIVHSDLFTQHDCREILLPMMTDQLKYHLERQEDLEACCQLLSHILEVLYRKDVGPTQRHVQIIMEKLLRTVNRTVISMGRDSELIGNFVACMTAILRQMEDYHYAHLIKTFGKMRTDVVDFLMETFIMFKNLIGKNVYPFDWVIMNMVQNKVFLRAINQYADMLNKKFLDQANFELQLWNNYFHLAVAFLTQESLQLENFSSAKRAKILNKYGDMRRQIGFEIRDMWYNLGQHKIKFIPEMVGPILEMTLIPETELRKATIPIFFDMMQCEFHSTRSFQMFENEIITKLDHEVEGGRGDEQYKVLFDKILLEHCRKHKYLAKTGETFVKLVVRLMERLLDYRTIMHDENKENRMSCTVNVLNFYKEIEREEMYIRYLYKLCDLHKECDNYTEAAYTLLLHAKLLKWSEDVCVAHLTQRDGYQATTQGQLKEQLYQEIIHYFDKGKMWEEAIALGKELAEQYENEMFDYEQLSELLKKQAQFYENIVKVIRPKPDYFAVGYYGQGFPTFLRGKVFIYRGKEYERREDFEARLLTQFPNAEKMKTTSPPGDDIKNSPGQYIQCFTVKPKLDLPPKFHRPVSEQIVSFYRVNEVQRFEYSRPIRKGEKNPDNEFANMWIERTIYTTAYKLPGILRWFEVKSVFMVEISPLENAIETMQLTNDKINSMVQQHLDDPSLPINPLSMLLNGIVDPAVMGGFANYEKAFFTDRYLQEHPEAHEKIEKLKDLIAWQIPFLAEGIRIHGDKVTEALRPFHERMEACFKQLKEKVEKEYGVRIMPSSLDDRRGSRPRSMVRSFTMPSSSRPLSVASVSSLSSDSTPSRPGSDGFALEPLLPKKMHSRSQDKLDKDDLEKEKKDKKKEKRNSKHQEIFEKEFKPTDISLQQSEAVILSETISPLRPQRPKSQVMNVIGSERRFSVSPSSPSSQQTPPPVTPRAKLSFSMQSSLELNGMTGADVADVPPPLPLKGSVADYGNLMENQDLLGSPTPPPPPPHQRHLPPPLPSKTPPPPPPKTTRKQASVDSGIVQ

SEQ ID NO: 27423 - protein, 1886 aa, Homo sapiens
  REGION 1..1886: note = ENSP00000485033
MTRWVPTKREEKYGVAFYNYDARGADELSLQIGDTVHILETYEGWYRGYTLRKKSKKGIFPASYIHLKEAIVEGKGQHETVIPGDLPLIQEVTTTLREWSTIWRQLYVQDNREMFRSVRHMIYDLIEWRSQILSGTLPQDELKELKKKVTAKIDYGNRILDLDLVVRDEDGNILDPELTSTISLFRAHEIASKQVEERLQEEKSQKQNIDINRQAKFAATPSLALFVNLKNVVCKIGEDAEVLMSLYDPVESKFISENYLVRWSSSGLPKDIDRLHNLRAVFTDLGSKDLKREKISFVCQIVRVGRMELRDNNTRKLTSGLRRPFGVAVMDVTDIINGKVDDEDKQHFIPFQPLALDDAIRHKPLNMSSRFSPRVAGENDFLQTVINKVIAAKEVNHKGQGLWVTLKLLPGDIHQIRKEFPHLVDRTTAVARKTGFPEIIMPGDVRNDIYVTLVQGDFDKGSKTTAKNVEVTVSVYDEDGKRLEHVIFPGAGDEAISEYKSVIYYQVKQPRWFETVKVAIPIEDVNRSHLRFTFRHRSSQDSKDKSEKIFALAFVKLMRYDGTTLRDGEHDLIVYKAEAKKLEDAATYLSLPSTKAELEEKGHSATGKSMQSLGSCTISKDSFQISTLVCSTKLTQNVDLLGLLKWRSNTSLLQQNLRQLMKVDGGEVVKFLQDTLDALFNIMMENSESETFDTLVFDALVFIIGLIADRKFQHFNPVLETYIKKHFSATLAYTKLTKVLKNYVDGAEKPGVNEQLYKAMKALESIFKFIVRSRILFNQLYENKGEADFVESLLQLFRSINDMMSSMSDQTVRVKGAALKYLPTIVNDVKLVFDPKELSKMFTEFILNVPMGLLTIQKLYCLIEIVHSDLFTQHDCREILLPMMTDQLKYHLERQEDLEACCQLLSHILEVLYRKDVGPTQRHVQIIMEKLLRTVNRTVISMGRDSELIGNFVACMTAILRQMEDYHYAHLIKTFGKMRTDVVDFLMETFIMFKNLIGKNVYPFDWVIMNMVQNKVFLRAINQYADMLNKKFLDQANFELQLWNNYFHLAVAFLTQESLQLENFSSAKRAKILNKYGDMRRQIGFEIRDMWYNLGQHKIKFIPEMVGPILEMTLIPETELRKATIPIFFDMMQCEFHSTRSFQMFENEIITKLDHEVEGGRGDEQYKVLFDKILLEHCRKHKYLAKTGETFVKLVVRLMERLLDYRTIMHDENKENRMSCTVNVLNFYKEIEREEMYIRYLYKLCDLHKECDNYTEAAYTLLLHAKLLKWSEDVCVAHLTQRDGYQATTQGQLKEQLYQEIIHYFDKGKMWEEAIALGKELAEQYENEMFDYEQLSELLKKQAQFYENIVKVIRPKPDYFAVGYYGQGFPTFLRGKVFIYRGKEYERREDFEARLLTQFPNAEKMKTTSPPGDDIKNSPGQYIQCFTVKPKLDLPPKFHRPVSEQIVSFYRVNEVQRFEYSRPIRKGEKNPDNEFANMWIERTIYTTAYKLPGILRWFEVKSVFMVEISPLENAIETMQLTNDKINSMVQQHLDDPSLPINPLSMLLNGIVDPAVMGGFANYEKAFFTDRYLQEHPEAHEKIEKLKDLIAWQIPFLAEGIRIHGDKVTEALRPFHERMEACFKQLKEKVEKEYGVRIMPSSLDDRRGSRPRSMVRSFTMPSSSRPLSVASVSSLSSDSTPSRPGSDGFALEPLLPKKMHSRSQDKLDKDDLEKEKKDKKKEKRNSKHQEIFEKEFKPTDISLQQSEAVILSETISPLRPQRPKSQVMNVIGSERRFSVSPSSPSSQQTPPPVTPRAKLSFSMQSSLELNGMTGADVADVPPPLPLKGSVADYGNLMENQDLLGSPTPPPPPPHQRHLPPPLPSKTPPPPPPKTTRKQASVDSGIVQ

SEQ ID NO: 27424 - protein, 83 aa, Homo sapiens
  REGION 1..83: note = ENSP00000387036
MARWIPTKRQKYGVAIYNYNASQDVELSLQIGDTVHILEMYEGWYRGYTLQNKSKKAIGSRTPTIPKSMDAQVSDIKWHSICI

SEQ ID NO: 27425 - protein, 350 aa, Homo sapiens
  REGION 1..350: note = ENSP00000429737
MARWIPTKRQKYGVAIYNYNASQDVELSLQIGDTVHILEMYEGWYRGYTLQNKSKKGIFPETYIHLKEATVEDLGQHETVIPGELPLVQELTSTLREWAVIWRKLYVNNKLTLFRQLQQMTYSLIEWRSQILSGTLPKDELAELKKKVTAKIDHGNRMLGLDLVVRDDNGNILDPDETSTIALFKAHEVASKRIEEKIQEEKSILQNLDLRGQSIFSTIHTYGLYVNFKNFVCNIGEDAELFMALYDPDQSTFISENYLIRWGSNGMPKEIEKLNNLQAVFTDLSSMDLIRPRVSLVCQIVRVGHMELKEGKKHTCGLRRPFGVAVMDITDIIHGKVDDEEKQHFIPFQQ

SEQ ID NO: 27426 - protein, 1870 aa, Homo sapiens
  REGION 1..1870: note = ENSP00000276440
MARWIPTKRQKYGVAIYNYNASQDVELSLQIGDTVHILEMYEGWYRGYTLQNKSKKGIFPETYIHLKEATVEDLGQHETVIPGELPLVQELTSTLREWAVIWRKLYVNNKLTLFRQLQQMTYSLIEWRSQILSGTLPKDELAELKKKVTAKIDHGNRMLGLDLVVRDDNGNILDPDETSTIALFKAHEVASKRIEEKIQEEKSILQNLDLRGQSIFSTIHTYGLYVNFKNFVCNIGEDAELFMALYDPDQSTFISENYLIRWGSNGMPKEIEKLNNLQAVFTDLSSMDLIRPRVSLVCQIVRVGHMELKEGKKHTCGLRRPFGVAVMDITDIIHGKVDDEEKQHFIPFQQIAMETYIRQRQLIMSPLITSHVIGENEPLTSVLNKVIAAKEVNHKGQGLWVSLKLLPGDLTQVQKNFSHLVDRSTAIARKMGFPEIILPGDVRNDIYVTLIHGEFDKGKKKTPKNVEVTMSVHDEEGKLLEKAIHPGAGYEGISEYKSVVYYQVKQPCWYETVKVSIAIEEVTRCHIRFTFRHRSSQETRDKSERAFGVAFVKLMNPDGTTLQDGRHDLVVYKGDNKKMEDAKFYLTLPGTKMEMEEKELQASKNLVTFTPSKDSTKDSFQIATLICSTKLTQNVDLLGLLNWRSNSQNIKHNLKKLMEVDGGEIVKFLQDTLDALFNIMMEMSDSETYDFLVFDALVFIISLIGDIKFQHFNPVLETYIYKHFSATLAYVKLSKVLNFYVANADDSSKTELLFAALKALKYLFRFIIQSRVLYLRFYGQSKDGDEFNNSIRQLFLAFNMLMDRPLEEAVKIKGAALKYLPSIINDVKLVFDPVELSVLFCKFIQSIPDNQLVRQKLNCMTKIVESTLFRQSECREVLLPLLTDQLSGQLDDNSNKPDHEASSQLLSNILEVLDRKDVGATAVHIQLIMERLLRRINRTVIGMNRQSPHIGSFVACMIALLQQMDDSHYSHYISTFKTRQDIIDFLMETFIMFKDLIGKNVYAKDWMVMNMTQNRVFLRAINQFAEVLTRFFMDQASFELQLWNNYFHLAVAFLTHESLQLETFSQAKRNKIVKKYGDMRKEIGFRIRDMWYNLGPHKIKFIPSMVGPILEVTLTPEVELRKATIPIFFDMMQCEFNFSGNGNFHMFENELITKLDQEVEGGRGDEQYKVLLEKLLLEHCRKHKYLSSSGEVFALLVSSLLENLLDYRTIIMQDESKENRMSCTVNVLNFYKEKKREDIYIRYLYKLRDLHRDCENYTEAAYTLLLHAELLQWSDKPCVPHLLQKDSYYVYTQQELKEKLYQEIISYFDKGKMWEKAIKLSKELAETYESKVFDYEGLGNLLKKRASFYENIIKAMRPQPEYFAVGYYGQGFPSFLRNKIFIYRGKEYERREDFSLRLLTQFPNAEKMTSTTPPGEDIKSSPKQYMQCFTVKPVMSLPPSYKDKPVPEQILNYYRANEVQQFRYSRPFRKGEKDPDNEFATMWIERTTYTTAYTFPGILKWFEVKQISTEEISPLENAIETMELTNERISNCVQQHAWDRSLSVHPLSMLLSGIVDPAVMGGFSNYEKAFFTEKYLQEHPEDQEKVELLKRLIALQMPLLTEGIRIHGEKLTEQLKPLHERLSSCFRELKEKVEKHYGVITLPPNLTERKQSRTGSIVLPYIMSSTLRRLSITSVTSSVVSTSSNSSDNAPSRPGSDGSILEPLLERRASSGARVEDLSLREENSENRISKFKRKDWSLSKSQVIAEKAPEPDLMSPTRKAQRPKSLQLMDNRLSPFHGSSPPQSTPLSPPPLTPKATRTLSSPSLQTDGIAATPVPPPPPPKSKPYEGSQRNSTELAPPLPVRREAKAPPPPPPKARKSGIPTSEPGSQ

SEQ ID NO: 27427 - protein, 1090 aa, Homo sapiens
  REGION 1..1090: note = ENSP00000414125
  VARIANT 1: note = Any amino acid
XVNPAEPRFAGPVHLQYHPHLWPLCELQELCLQHRGRCRVVYGPLRPRPVHFYQDLSSMDLIRPRVSLVCQIVRVGHMELKEGKKHTCGLRRPFGVAVMDITDIIHGKVDDEEKQHFIPFQQIAMETYIRQRQLIMSPLITSHVIGENEPLTSVLNKVIAAKEVNHKGQGLWVSLKLLPGDLTQVQKNFSHLVDRSTAIARKMGFPEIILPGDVRNDIYVTLIHGEFDKGKKKTPKNVEVTMSVHDEEGKLLEKAIHPGAGYEGISEYKSVVYYQVKQPCWYETVKVSIAIEEVTRCHIRFTFRHRSSQETRDKSERAFGVAFVKLMNPDGTTLQDGRHDLVVYKGDNKKMEDAKFYLTLPGTKMEMEEKELQASKNLVTFTPSKDSTKDSFQIATLICSTKLTQNVDLLGLLNWRSNSQNIKHNLKKLMEVDGGEIVKFLQDTLDALFNIMMEMSDSETYDFLVFDALVFIISLIGDIKFQHFNPVLETYIYKHFSATLAYVKLSKVLNFYVANADDSSKTELLFAALKALKYLFRFIIQSRVLYLRFYGQSKDGDEFNNSIRQLFLAFNMLMDRPLEEAVKIKGAALKYLPSIINDVKLVFDPVELSVLFCKFIQSIPDNQLVRQKLNCMTKIVESTLFRQSECREVLLPLLTDQLSGQLDDNSNKPDHEASSQLLSNILEVLDRKDVGATAVHIQLIMERLLRRINRTVIGMNRQSPHIGSFVACMIALLQQMDDSHYSHYISTFKTRQDIIDFLMETFIMFKDLIGKNVYAKDWMVMNMTQNRVFLRAINQFAEVLTRFFMDQASFELQLWNNYFHLAVAFLTHESLQLETFSQAKRNKIVKKYGDMRKEIGFRIRDMWYNLGPHKIKFIPSMVGPILEVTLTPEVELRKATIPIFFDMMQCEFNFSGNGNFHMFENELITKLDQEVEGGRGDEQYKVLLEKLLLEHCRKHKYLSSSGEVFALLVSSLLENLLDYRTIIMQDESKENRMSCTVNVLNFYKEKKREDIYIRYLYKLRDLHRDCENYTEAAYTLLLHAELLQVNGSESLFQQGGVQCPFRLNSIHFMILMGKNFIPGISFYTSFFSSF

SEQ ID NO: 27428 - protein, 138 aa, Homo sapiens
  REGION 1..138: note = ENSP00000428479
  VARIANT 1: note = Any amino acid
XMEEKELQASKNLVTFTPSKDSTKDSFQIATLICSTKLTQNVDLLGLLNWRSNSQNIKHNLKKLMEVDGGEIVKFLQDTLDALFNIMMEMSDSETYDFLVFDALVFIISLIGDIKFQHFNPVLETYIYKHFSATLAYV

SEQ ID NO: 27429 - protein, 2047 aa, Homo sapiens
  REGION 1..2047: note = ENSP00000294618
MAASERRAFAHKINRTVAAEVRKQVSRERSGSPHSSRRCSSSLGVPLTEVVEPLDFEDVLLSRPPDAEPGPLRDLVEFPADDLELLLQPRECRTTEPGIPKDEKLDAQVRAAVEMYIEDWVIVHRRYQYLSAAYSPVTTDTQRERQKGLPRQVFEQDASGDERSGPEDSNDSRRGSGSPEDTPRSSGASSIFDLRNLAADSLLPSLLERAAPEDVDRRNETLRRQHRPPALLTLYPAPDEDEAVERCSRPEPPREHFGQRILVKCLSLKFEIEIEPIFGILALYDVREKKKISENFYFDLNSDSMKGLLRAHGTHPAISTLARSAIFSVTYPSPDIFLVIKLEKVLQQGDISECCEPYMVLKEVDTAKNKEKLEKLRLAAEQFCTRLGRYRMPFAWTAVHLANIVSSAGQLDRDSDSEGERRPAWTDRRRRGPQDRASSGDDACSFSGFRPATLTVTNFFKQEAERLSDEDLFKFLADMRRPSSLLRRLRPVTAQLKIDISPAPENPHFCLSPELLHIKPYPDPRGRPTKEILEFPAREVYAPHTSYRNLLYVYPHSLNFSSRQGSVRNLAVRVQYMTGEDPSQALPVIFGKSSCSEFTREAFTPVVYHNKSPEFYEEFKLHLPACVTENHHLLFTFYHVSCQPRPGTALETPVGFTWIPLLQHGRLRTGPFCLPVSVDQPPPSYSVLTPDVALPGMRWVDGHKGVFSVELTAVSSVHPQDPYLDKFFTLVHVLEEGAFPFRLKDTVLSEGNVEQELRASLAALRLASPEPLVAFSHHVLDKLVRLVIRPPIISGQIVNLGRGAFEAMAHVVSLVHRSLEAAQDARGHCPQLAAYVHYAFRLPGTEPSLPDGAPPVTVQAATLARGSGRPASLYLARSKSISSSNPDLAVAPGSVDDEVSRILASKLLHEELALQWVVSSSAVREAILQHAWFFFQLMVKSMALHLLLGQRLDTPRKLRFPGRFLDDITALVGSVGLEVITRVHKDVELAEHLNASLAFFLSDLLSLVDRGFVFSLVRAHYKQVATRLQSSPNPAALLTLRMEFTRILCSHEHYVTLNLPCCPLSPPASPSPSVSSTTSQSSTFSSQAPDPKVTSMFELSGPFRQQHFLAGLLLTELALALEPEAEGAFLLHKKAISAVHSLLCGHDTDPRYAEATVKARVAELYLPLLSIARDTLPRLHDFAEGPGQRSRLASMLDSDTEGEGDIAGTINPSVAMAIAGGPLAPGSRASISQGPPTASRAGCALSAESSRTLLACVLWVLKNTEPALLQRWATDLTLPQLGRLLDLLYLCLAAFEYKGKKAFERINSLTFKKSLDMKARLEEAILGTIGARQEMVRRSRERSPFGNPENVRWRKSVTHWKQTSDRVDKTKDEMEHEALVEGNLATEASLVVLDTLEIIVQTVMLSEARESVLGAVLKVVLYSLGSAQSALFLQHGLATQRALVSKFPELLFEEDTELCADLCLRLLRHCGSRISTIRTHASASLYLLMRQNFEIGHNFARVKMQVTMSLSSLVGTTQNFSEEHLRRSLKTILTYAEEDMGLRDSTFAEQVQDLMFNLHMILTDTVKMKEHQEDPEMLIDLMYRIARGYQGSPDLRLTWLQNMAGKHAELGNHAEAAQCMVHAAALVAEYLALLEDHRHLPVGCVSFQNISSNVLEESAISDDILSPDEEGFCSGKHFTELGLVGLLEQAAGYFTMGGLYEAVNEVYKNLIPILEAHRDYKKLAAVHGKLQEAFTKIMHQSSGWERVFGTYFRVGFYGAHFGDLDEQEFVYKEPSITKLAEISHRLEEFYTERFGDDVVEIIKDSNPVDKSKLDSQKAYIQITYVEPYFDTYELKDRVTYFDRNYGLRTFLFCTPFTPDGRAHGELPEQHKRKTLLSTDHAFPYIKTRIRVCHREETVLTPVEVAIEDMQKKTRELAFATEQDPPDAKMLQMVLQGSVGPTVNQGPLEVAQVFLAEIPEDPKLFRHHNKLRLCFKDFCKKCEDALRKNKALIGPDQKEYHRELERNYCRLREALQPLLTQRLPQLMAPTPPGLRNSLNRASFRKADL

SEQ ID NO: 27430 - protein, 98 aa, Homo sapiens
  REGION 1..98: note = ENSP00000468291
RKTLLSTDHAFPYIKTRIRVCHREEELLEQSKFPKGRPLSPQGPKLYLEEPAPGPQLSVLRGESALVPTGLWGDHTVLGAGPSAPVSPSVCTDASSLF

SEQ ID NO: 27431 - protein, 1336 aa, Homo sapiens
  REGION 1..1336: note = ENSP00000468638
  VARIANT 1: note = Any amino acid
XLSEGNVEQELRASLAALRLASPEPLVAFSHHVLDKLVRLVIRPPIISGQIVNLGRGAFEAMAHVVSLVHRSLEAAQDARGHCPQLAAYVHYAFRLPGTEPSLPDGAPPVTVQAATLARGSGRPASLYLARSKSISSSNPDLAVAPGSVDDEVSRILASKGIDRSHSWVNSAYAPGGSKAVLRRAPPYCGADPRQLLHEELALQWVVSSSAVREAILQHAWFFFQLMVKSMALHLLLGQRLDTPRKLRFPGRFLDDITALVGSVGLEVITRVHKDVELAEHLNASLAFFLSDLLSLVDRGFVFSLVRAHYKQVATRLQSSPNPAALLTLRMEFTRILCSHEHYVTLNLPCCPLSPPASPSPSVSSTTSQSSTFSSQAPDPKVTSMFELSGPFRQQHFLAGLLLTELALALEPEAEGAFLLHKKAISAVHSLLCGHDTDPRYAEATVKARVAELYLPLLSIARDTLPRLHDFAEGPGQRSRLASMLDSDTEGEGDIAGTINPSVAMAIAGGPLAPGSRASISQGPPTASRAGCALSAESSRTLLACVLWVLKNTEPALLQRWATDLTLPQLGRLLDLLYLCLAAFEYKGKKAFERINSLTFKKSLDMKARLEEAILGTIGARQEMVRRSRERSPFGNPENVRWRKSVTHWKQTSDRVDKTKDEMEHEALVEGNLATEASLVVLDTLEIIVQTVMLSEARESVLGAVLKVVLYSLGSAQSALFLQHGLATQRALVSKFPELLFEEDTELCADLCLRLLRHCGSRISTIRTHASASLYLLMRQNFEIGHNFARVKMQVTMSLSSLVGTTQNFSEEHLRRSLKTILTYAEEDMGLRDSTFAEQVQDLMFNLHMILTDTVKMKEHQEDPEMLIDLMYRIARGYQGSPDLRLTWLQNMAGKHAELGNHAEAAQCMVHAAALVAEYLALLEDHRHLPVGCVSFQNISSNVLEESAISDDILSPDEEGFCSGKHFTELGLVGLLEQAAGYFTMGGLYEAVNEVYKNLIPILEAHRDYKKLAAVHGKLQEAFTKIMHQSSGWERVFGTYFRVGFYGAHFGDLDEQEFVYKEPSITKLAEISHRLEEFYTERFGDDVVEIIKDSNPVDKSKLDSQKAYIQITYVEPYFDTYELKDRVTYFDRNYGLRTFLFCTPFTPDGRAHGELPEQHKRKTLLSTDHAFPYIKTRIRVCHREETVLTPVEVAIEDMQKKTRELAFATEQDPPDAKMLQMVLQGSVGPTVNQGPLEVAQVFLAEIPEDPKLFRHHNKLRLCFKDFCKKCEDALRKNKALIGPDQKEYHRELERNYCRLREALQPLLTQRLPQLMAPTPPGLRNSLNRASFRKADL

SEQ ID NO: 27432 - protein, 148 aa, Homo sapiens
  REGION 1..148: note = ENSP00000467231
  VARIANT 1: note = Any amino acid
XRHLPVGCVSFQNISSNVLEESAISDDILSPDEEGFCSGKHFTELGLVGLLEQAAGYFTMPQRVFGTYFRVGFYGAHFGDLDEQEFVYKEPSITKLAEISHRLEEFYTERFGDDVVEIIKDSNPVDKSKLDSQKAYIQITYVEPYFDT

SEQ ID NO: 27433 - protein, 464 aa, Homo sapiens
  REGION 1..464: note = ENSP00000467191
  VARIANT 1: note = Any amino acid
XYPHSLNFSSRQGSVRNLAVRVQYMTGEDPSQALPVIFGKSSCSEFTREAFTPVVYHNKSPEFYEEFKLHLPACVTENHHLLFTFYHVSCQPRPGTALETPVGFTWIPLLQHGRLRTGPFCLPVSVDQPPPSYSVLTPDVALPGMRWVDGHKGVFSVELTAVSSVHPQDPYLDKFFTLVHVLEEGAFPFRLKDTVLSEGNVEQELRASLAALRLASPEPLVAFSHHVLDKLVRLVIRPPIISGQIVNLGRGAFEAMAHVVSLVHRSLEAAQDARGHCPQLAAYVHYAFRLPGTEPSLPDGAPPVTVQAATLARGSGRPASLYLARSKSISSSNPDLAVAPGSVDDEVSRILASKAIDCNSSRASSYLEGSSSAPPATQLRPTVQKLLHEELALQWVVSSSAVREAILQHAWFFFQLMVKSMALHLLLGQRLDTPRKLRFPGRFLDDITALVGSVGLEVITRVHK

SEQ ID NO: 27434 - protein, 184 aa, Homo sapiens
  REGION 1..184: note = ENSP00000465767
LGRGAFEAMAHVVSLVHRSLEAAQDARGHCPQLAAYVHYAFRLPGTEPSLPDGAPPVTVQAATLARGSGRPASLYLARSKSISSSNPDLAVAPGSVDDEVSRILASKGIDRSHSWVNSAYAPGGSKAVLRRAPPYCGADPRQAIDCNSSRASSYLEGSSSAPPATQLRPTVQKLLHEELALQWV

SEQ ID NO: 27435 - protein, 2131 aa, Homo sapiens
  REGION 1..2131: note = ENSP00000251157
MAERRAFAQKISRTVAAEVRKQISGQYSGSPQLLKNLNIVGNISHHTTVPLTEAVDPVDLEDYLITHPLAVDSGPLRDLIEFPPDDIEVVYSPRDCRTLVSAVPEESEMDPHVRDCIRSYTEDWAIVIRKYHKLGTGFNPNTLDKQKERQKGLPKQVFESDEAPDGNSYQDDQDDLKRRSMSIDDTPRGSWACSIFDLKNSLPDALLPNLLDRTPNEEIDRQNDDQRKSNRHKELFALHPSPDEEEPIERLSVPDIPKEHFGQRLLVKCLSLKFEIEIEPIFASLALYDVKEKKKISENFYFDLNSEQMKGLLRPHVPPAAITTLARSAIFSITYPSQDVFLVIKLEKVLQQGDIGECAEPYMIFKEADATKNKEKLEKLKSQADQFCQRLGKYRMPFAWTAIHLMNIVSSAGSLERDSTEVEISTGERKGSWSERRNSSIVGRRSLERTTSGDDACNLTSFRPATLTVTNFFKQEGDRLSDEDLYKFLADMRRPSSVLRRLRPITAQLKIDISPAPENPHYCLTPELLQVKLYPDSRVRPTREILEFPARDVYVPNTTYRNLLYIYPQSLNFANRQGSARNITVKVQFMYGEDPSNAMPVIFGKSSCSEFSKEAYTAVVYHNRSPDFHEEIKVKLPATLTDHHHLLFTFYHVSCQQKQNTPLETPVGYTWIPMLQNGRLKTGQFCLPVSLEKPPQAYSVLSPEVPLPGMKWVDNHKGVFNVEVVAVSSIHTQDPYLDKFFALVNALDEHLFPVRIGDMRIMENNLENELKSSISALNSSQLEPVVRFLHLLLDKLILLVIRPPVIAGQIVNLGQASFEAMASIINRLHKNLEGNHDQHGRNSLLASYIHYVFRLPNTYPNSSSPGPGGLGGSVHYATMARSAVRPASLNLNRSRSLSNSNPDISGTPTSPDDEVRSIIGSKGLDRSNSWVNTGGPKAAPWGSNPSPSAESTQAMDRSCNRMSSHTETSSFLQTLTGRLPTKKLFHEELALQWVVCSGSVRESALQQAWFFFELMVKSMVHHLYFNDKLEAPRKSRFPERFMDDIAALVSTIASDIVSRFQKDTEMVERLNTSLAFFLNDLLSVMDRGFVFSLIKSCYKQVSSKLYSLPNPSVLVSLRLDFLRIICSHEHYVTLNLPCSLLTPPASPSPSVSSATSQSSGFSTNVQDQKIANMFELSVPFRQQHYLAGLVLTELAVILDPDAEGLFGLHKKVINMVHNLLSSHDSDPRYSDPQIKARVAMLYLPLIGIIMETVPQLYDFTETHNQRGRPICIATDDYESESGSMISQTVAMAIAGTSVPQLTRPGSFLLTSTSGRQHTTFSAESSRSLLICLLWVLKNADETVLQKWFTDLSVLQLNRLLDLLYLCVSCFEYKGKKVFERMNSLTFKKSKDMRAKLEEAILGSIGARQEMVRRSRGQLERSPSGSAFGSQENLRWRKDMTHWRQNTEKLDKSRAEIEHEALIDGNLATEANLIILDTLEIVVQTVSVTESKESILGGVLKVLLHSMACNQSAVYLQHCFATQRALVSKFPELLFEEETEQCADLCLRLLRHCSSSIGTIRSHASASLYLLMRQNFEIGNNFARVKMQVTMSLSSLVGTSQNFNEEFLRRSLKTILTYAEEDLELRETTFPDQVQDLVFNLHMILSDTVKMKEHQEDPEMLIDLMYRIAKGYQTSPDLRLTWLQNMAGKHSERSNHAEAAQCLVHSAALVAEYLSMLEDRKYLPVGCVTFQNISSNVLEESAVSDDVVSPDEEGICSGKYFTESGLVGLLEQAAASFSMAGMYEAVNEVYKVLIPIHEANRDAKKLSTIHGKLQEAFSKIVHQSTGWERMFGTYFRVGFYGTKFGDLDEQEFVYKEPAITKLAEISHRLEGFYGERFGEDVVEVIKDSNPVDKCKLDPNKAYIQITYVEPYFDTYEMKDRITYFDKNYNLRRFMYCTPFTLDGRAHGELHEQFKRKTILTTSHAFPYIKTRVNVTHKEEIILTPIEVAIEDMQKKTQELAFATHQDPADPKMLQMVLQGSVGTTVNQGPLEVAQVFLSEIPSDPKLFRHHNKLRLCFKDFTKRCEDALRKNKSLIGPDQKEYQRELERNYHRLKEALQPLINRKIPQLYKAVLPVTCHRDSFSRMSLRKMDL

SEQ ID NO: 27436 - protein, 2129 aa, Homo sapiens
  REGION 1..2129: note = ENSP00000413583
MAERRAFAQKISRTVAAEVRKQISGQYSGSPQLLKNLNIVGNISHHTTVPLTEAVDPVDLEDYLITHPLAVDSGPLRDLIEFPPDDIEVVYSPRDCRTLVSAVPEESEMDPHVRDCIRSYTEDWAIVIRKYHKLGTGFNPNTLDKQKERQKGLPKQVFESDEAPDGNSYQDDQDDLKRRSMSIDDTPRGSWACSIFDLKNSLPDALLPNLLDRTPNEEIDRQNDDQRKSNRHKELFALHPSPDEEEPIERLSVPDIPKEHFGQRLLVKCLSLKFEIEIEPIFASLALYDVKEKKKISENFYFDLNSEQMKGLLRPHVPPAAITTLARSAIFSITYPSQDVFLVIKLEKVLQQGDIGECAEPYMIFKEADATKNKEKLEKLKSQADQFCQRLGKYRMPFAWTAIHLMNIVSSAGSLERDSTEVEISTGERKGSWSERRNSSIVGRRSLERTTSGDDACNLTSFRPATLTVTNFFKQEGDRLSDEDLYKFLADMRRPSSVLRRLRPITAQLKIDISPAPENPHYCLTPELLQVKLYPDSRVRPTREILEFPARDVYVPNTTYRNLLYIYPQSLNFANRQGSARNITVKVQFMYGEDPSNAMPVIFGKSSCSEFSKEAYTAVVYHNRSPDFHEEIKVKLPATLTDHHHLLFTFYHVSCQQKQNTPLETPVGYTWIPMLQNGRLKTGQFCLPVSLEKPPQAYSVLSPEVPLPGMKWVDNHKGVFNVEVVAVSSIHTQDPYLDKFFALVNALDEHLFPVRIGDMRIMENNLENELKSSISALNSSQLEPVVRFLHLLLDKLILLVIRPPVIAGQIVNLGQASFEAMASIINRLHKNLEGNHDQHGRNSLLASYIHYVFRLPNTYPNSSSPGPGGLGGSVHYATMARSAVRPASLNLNRSRSLSNSNPDISGTPTSPDDEVRSIIGSKGLDRSNSWVNTGGPKAAPWGSNPSPSAESTQAMDRSCNRMSSHTETSSFLQTLTGRLPTKKLFHEELALQWVVCSGSVRESALQQAWFFFELMVKSMVHHLYFNDKLEAPRKSRFPERFMDDIAALVSTIASDIVSRFQKDTEMVERLNTSLAFFLNDLLSVMDRGFVFSLIKSCYKQVSSKLYSLPNPSVLVSLRLDFLRIICSHEHYVTLNLPCSLLTPPASPSPSVSSATSQSSGFSTNVQDQKIANMFELSVPFRQQHYLAGLVLTELAVILDPDAEGLFGLHKKVINMVHNLLSSHDSDPRYSDPQIKARVAMLYLPLIGIIMETVPQLYDFTETHNQRGRPICIATDDYESESGSMISQTVAMAIAGTSVPQLTRPGSFLLTSTSGRQHTTFSAESSRSLLICLLWVLKNADETVLQKWFTDLSVLQLNRLLDLLYLCVSCFEYKGKKVFERMNSLTFKKSKDMRAKLEEAILGSIGARQEMVRRSRGQLERSPSGSAFGSQENLRWRKDMTHWRQNTEKLDKSRAEIEHEALIDGNLATEANLIILDTLEIVVQTVSVTESKESILGGVLKVLLHSMACNQSAVYLQHCFATQRALVSKFPELLFEEETEQCADLCLRLLRHCSSSIGTIRSHASASLYLLMRQNFEIGNNFARVKMQVTMSLSSLVGTSQNFNEEFLRRSLKTILTYAEEDLELRETTFPDQVQDLVFNLHMILSDTVKMKEHQEDPEMLIDLMYRIAKGYQTSPDLRLTWLQNMAGKHSERSNHAEAAQCLVHSAALVAEYLSMLEDRKYLPVGCVTFQNISSNVLEESAVSDDVVSPDEEGICSGKYFTESGLVGLLEQAAASFSMAGMYEAVNEVYKVLIPIHEANRDAKKLSTIHGKLQEAFSKIVHQDGKRMFGTYFRVGFYGTKFGDLDEQEFVYKEPAITKLAEISHRLEGFYGERFGEDVVEVIKDSNPVDKCKLDPNKAYIQITYVEPYFDTYEMKDRITYFDKNYNLRRFMYCTPFTLDGRAHGELHEQFKRKTILTTSHAFPYIKTRVNVTHKEEIILTPIEVAIEDMQKKTQELAFATHQDPADPKMLQMVLQGSVGTTVNQGPLEVAQVFLSEIPSDPKLFRHHNKLRLCFKDFTKRCEDALRKNKSLIGPDQKEYQRELERNYHRLKEALQPLINRKIPQLYKAVLPVTCHRDSFSRMSLRKMDL

SEQ ID NO: 27437 - protein, 2109 aa, Homo sapiens
  REGION 1..2109: note = ENSP00000340742
MAERRAFAQKISRTVAAEVRKQISGQYSGSPQLLKNLNIVGNISHHTTVPLTEAVDPVDLEDYLITHPLAVDSGPLRDLIEFPPDDIEVVYSPRDCRTLVSAVPEESEMDPHVRDCIRSYTEDWAIVIRKYHKLGTGFNPNTLDKQKERQKGLPKQVFESDEAPDGNSYQDDQDDLKRRSMSIDDTPRGSWACSIFDLKNSLPDALLPNLLDRTPNEEIDRQNDDQRKSNRHKELFALHPSPDEEEPIERLSVPDIPKEHFGQRLLVKCLSLKFEIEIEPIFASLALYDVKEKKKISENFYFDLNSEQMKGLLRPHVPPAAITTLARSAIFSITYPSQDVFLVIKLEKVLQQGDIGECAEPYMIFKEADATKNKEKLEKLKSQADQFCQRLGKYRMPFAWTAIHLMNIVSSAGSLERDSTEVEISTGERKGSWSERRNSSIVGRRSLERTTSGDDACNLTSFRPATLTVTNFFKQEGDRLSDEDLYKFLADMRRPSSVLRRLRPITAQLKIDISPAPENPHYCLTPELLQVKLYPDSRVRPTREILEFPARDVYVPNTTYRNLLYIYPQSLNFANRQGSARNITVKVQFMYGEDPSNAMPVIFGKSSCSEFSKEAYTAVVYHNRSPDFHEEIKVKLPATLTDHHHLLFTFYHVSCQQKQNTPLETPVGYTWIPMLQNGRLKTGQFCLPVSLEKPPQAYSVLSPEVPLPGMKWVDNHKGVFNVEVVAVSSIHTQDPYLDKFFALVNALDEHLFPVRIGDMRIMENNLENELKSSISALNSSQLEPVVRFLHLLLDKLILLVIRPPVIAGQIVNLGQASFEAMASIINRLHKNLEGNHDQHGRNSLLASYIHYVFRLPNTYPNSSSPGPGGLGGSVHYATMARSAVRPASLNLNRSRSLSNSNPDISGTPTSPDDEVRSIIGSKAMDRSCNRMSSHTETSSFLQTLTGRLPTKKLFHEELALQWVVCSGSVRESALQQAWFFFELMVKSMVHHLYFNDKLEAPRKSRFPERFMDDIAALVSTIASDIVSRFQKDTEMVERLNTSLAFFLNDLLSVMDRGFVFSLIKSCYKQVSSKLYSLPNPSVLVSLRLDFLRIICSHEHYVTLNLPCSLLTPPASPSPSVSSATSQSSGFSTNVQDQKIANMFELSVPFRQQHYLAGLVLTELAVILDPDAEGLFGLHKKVINMVHNLLSSHDSDPRYSDPQIKARVAMLYLPLIGIIMETVPQLYDFTETHNQRGRPICIATDDYESESGSMISQTVAMAIAGTSVPQLTRPGSFLLTSTSGRQHTTFSAESSRSLLICLLWVLKNADETVLQKWFTDLSVLQLNRLLDLLYLCVSCFEYKGKKVFERMNSLTFKKSKDMRAKLEEAILGSIGARQEMVRRSRGQLGTYTIASPPERSPSGSAFGSQENLRWRKDMTHWRQNTEKLDKSRAEIEHEALIDGNLATEANLIILDTLEIVVQTVSVTESKESILGGVLKVLLHSMACNQSAVYLQHCFATQRALVSKFPELLFEEETEQCADLCLRLLRHCSSSIGTIRSHASASLYLLMRQNFEIGNNFARVKMQVTMSLSSLVGTSQNFNEEFLRRSLKTILTYAEEDLELRETTFPDQVQDLVFNLHMILSDTVKMKEHQEDPEMLIDLMYRIAKGYQTSPDLRLTWLQNMAGKHSERSNHAEAAQCLVHSAALVAEYLSMLEDRKYLPVGCVTFQNISSNVLEESAVSDDVVSPDEEGICSGKYFTESGLVGLLEQAAASFSMAGMYEAVNEVYKVLIPIHEANRDAKKLSTIHGKLQEAFSKIVHQSTGWERMFGTYFRVGFYGTKFGDLDEQEFVYKEPAITKLAEISHRLEGFYGERFGEDVVEVIKDSNPVDKCKLDPNKAYIQITYVEPYFDTYEMKDRITYFDKNYNLRRFMYCTPFTLDGRAHGELHEQFKRKTILTTSHAFPYIKTRVNVTHKEEIILTPIEVAIEDMQKKTQELAFATHQDPADPKMLQMVLQGSVGTTVNQGPLEVAQVFLSEIPSDPKLFRHHNKLRLCFKDFTKRCEDALRKNKSLIGPDQKEYQRELERNYHRLKEALQPLINRKIPQLYKAVLPVTCHRDSFSRMSLRKMDL

SEQ ID NO: 27438 - protein, 1229 aa, Homo sapiens
  REGION 1..1229: note = ENSP00000490888
DEVRSIIGSKGLDRSNSWVNTGGPKAAPWGSNPSPSAESTQAMDRSCNRMSSHTETSSFLQTLTGRLPTKKGKEDELEKLSLLLFHEELALQWVVCSGSVRESALQQAWFFFELMVKSMVHHLYFNDKLEAPRKSRFPERFMDDIAALVSTIASDIVSRFQKDTEMVERLNTSLAFFLNDLLSVMDRGFVFSLIKSCYKQVSSKLYSLPNPSVLVSLRLDFLRIICSHEHYVTLNLPCSLLTPPASPSPSVSSATSQSSGFSTNVQDQKIANMFELSVPFRQQHYLAGLVLTELAVILDPDAEGLFGLHKKVINMVHNLLSSHDSDPRYSDPQIKARVAMLYLPLIGIIMETVPQLYDFTETHNQRGRPICIATDDYESESGSMISQTVAMAIAGTSVPQLTRPGSFLLTSTSGRQHTTFSAESSRSLLICLLWVLKNADETVLQKWFTDLSVLQLNRLLDLLYLCVSCFEYKGKKVFERMNSLTFKKSKDMRAKLEEAILGSIGARQEMVRRSRGQLERSPSGSAFGSQENLRWRKDMTHWRQNTEKLDKSRAEIEHEALIDGNLATEANLIILDTLEIVVQTVSVTESKESILGGVLKVLLHSMACNQSAVYLQHCFATQRALVSKFPELLFEEETEQCADLCLRLLRHCSSSIGTIRSHASASLYLLMRQNFEIGNNFARVKMQVTMSLSSLVGTSQNFNEEFLRRSLKTILTYAEEDLELRETTFPDQVQDLVFNLHMILSDTVKMKEHQEDPEMLIDLMYRIAKGYQTSPDLRLTWLQNMAGKHSERSNHAEAAQCLVHSAALVAEYLSMLEDRKYLPVGCVTFQNISSNVLEESAVSDDVVSPDEEGICSGKYFTESGLVGLLEQAAASFSMAGMYEAVNEVYKVLIPIHEANRDAKKLSTIHGKLQEAFSKIVHQDGKRMFGTYFRVGFYGTKFGDLDEQEFVYKEPAITKLAEISHRLEGFYGERFGEDVVEVIKDSNPVDKCKLDPNKAYIQITYVEPYFDTYEMKDRITYFDKNYNLRRFMYCTPFTLDGRAHGELHEQFKRKTILTTSHAFPYIKTRVNVTHKEEIILTPIEVAIEDMQKKTQELAFATHQDPADPKMLQMVLQGSVGTTVNQGPLEVAQVFLSEIPSDPKLFRHHNKLRLCFKDFTKRCEDALRKNKSLIGPDQKEYQRELERNYHRLKEALQPLINRKIPQLYKAVLPVTCHRDSFSRMSLRKMDL

SEQ ID NO: 27439 - protein, 2100 aa, Homo sapiens
  REGION 1..2100: note = ENSP00000489284
MAERRAFAQKISRTVAAEVRKQISGQYSGSPQLLKNLNIVGNISHHTTVPLTEAVDPVDLEDYLITHPLAVDSGPLRDLIEFPPDDIEVVYSPRDCRTLVSAVPEESEMDPHVRDCIRSYTEDWAIVIRKYHKLGTGFNPNTLDKQKERQKGLPKQVFESDEAPDGNSYQDDQDDLKRRSMSIDDTPRGSWACSIFDLKNSLPDALLPNLLDRTPNEEIDRQNDDQRKSNRHKELFALHPSPDEEEPIERLSVPDIPKEHFGQRLLVKCLSLKFEIEIEPIFASLALYDVKEKKKISENFYFDLNSEQMKGLLRPHVPPAAITTLARSAIFSITYPSQDVFLVIKLEKVLQQGDIGECAEPYMIFKEADATKNKEKLEKLKSQADQFCQRLGKYRMPFAWTAIHLMNIVSSAGSLERDSTEVEISTGERKGSWSERRNSSIVGRRSLERTTSGDDACNLTSFRPATLTVTNFFKQEGDRLSDEDLYKFLADMRRPSSVLRRLRPITAQLKIDISPAPENPHYCLTPELLQVKLYPDSRVRPTREILEFPARDVYVPNTTYRNLLYIYPQSLNFANRQGSARNITVKVQFMYGEDPSNAMPVIFGKSSCSEFSKEAYTAVVYHNRSPDFHEEIKVKLPATLTDHHHLLFTFYHVSCQQKQNTPLETPVGYTWIPMLQNGRLKTGQFCLPVSLEKPPQAYSVLSPEVPLPGMKWVDNHKGVFNVEVVAVSSIHTQDPYLDKFFALVNALDEHLFPVRIGDMRIMENNLENELKSSISALNSSQLEPVVRFLHLLLDKLILLVIRPPVIAGQIVNLGQASFEAMASIINRLHKNLEGNHDQHGRNSLLASYIHYVFRLPNTYPNSSSPGPGGLGGSVHYATMARSAVRPASLNLNRSRSLSNSNPDISGTPTSPDDEVRSIIGSKAMDRSCNRMSSHTETSSFLQTLTGRLPTKKLFHEELALQWVVCSGSVRESALQQAWFFFELMVKSMVHHLYFNDKLEAPRKSRFPERFMDDIAALVSTIASDIVSRFQKDTEMVERLNTSLAFFLNDLLSVMDRGFVFSLIKSCYKQVSSKLYSLPNPSVLVSLRLDFLRIICSHEHYVTLNLPCSLLTPPASPSPSVSSATSQSSGFSTNVQDQKIANMFELSVPFRQQHYLAGLVLTELAVILDPDAEGLFGLHKKVINMVHNLLSSHDSDPRYSDPQIKARVAMLYLPLIGIIMETVPQLYDFTETHNQRGRPICIATDDYESESGSMISQTVAMAIAGTSVPQLTRPGSFLLTSTSGRQHTTFSAESSRSLLICLLWVLKNADETVLQKWFTDLSVLQLNRLLDLLYLCVSCFEYKGKKVFERMNSLTFKKSKDMRAKLEEAILGSIGARQEMVRRSRGQLERSPSGSAFGSQENLRWRKDMTHWRQNTEKLDKSRAEIEHEALIDGNLATEANLIILDTLEIVVQTVSVTESKESILGGVLKVLLHSMACNQSAVYLQHCFATQRALVSKFPELLFEEETEQCADLCLRLLRHCSSSIGTIRSHASASLYLLMRQNFEIGNNFARVKMQVTMSLSSLVGTSQNFNEEFLRRSLKTILTYAEEDLELRETTFPDQVQDLVFNLHMILSDTVKMKEHQEDPEMLIDLMYRIAKGYQTSPDLRLTWLQNMAGKHSERSNHAEAAQCLVHSAALVAEYLSMLEDRKYLPVGCVTFQNISSNVLEESAVSDDVVSPDEEGICSGKYFTESGLVGLLEQAAASFSMAGMYEAVNEVYKVLIPIHEANRDAKKLSTIHGKLQEAFSKIVHQSTGWERMFGTYFRVGFYGTKFGDLDEQEFVYKEPAITKLAEISHRLEGFYGERFGEDVVEVIKDSNPVDKCKLDPNKAYIQITYVEPYFDTYEMKDRITYFDKNYNLRRFMYCTPFTLDGRAHGELHEQFKRKTILTTSHAFPYIKTRVNVTHKEEIILTPIEVAIEDMQKKTQELAFATHQDPADPKMLQMVLQGSVGTTVNQGPLEVAQVFLSEIPSDPKLFRHHNKLRLCFKDFTKRCEDALRKNKSLIGPDQKEYQRELERNYHRLKEALQPLINRKIPQLYKAVLPVTCHRDSFSRMSLRKMDL

SEQ ID NO: 27440 - protein, 2098 aa, Homo sapiens
  REGION 1..2098: note = ENSP00000489499
MAERRAFAQKISRTVAAEVRKQISGQYSGSPQLLKNLNIVGNISHHTTVPLTEAVDPVDLEDYLITHPLAVDSGPLRDLIEFPPDDIEVVYSPRDCRTLVSAVPEESEMDPHVRDCIRSYTEDWAIVIRKYHKLGTGFNPNTLDKQKERQKGLPKQVFESDEAPDGNSYQDDQDDLKRRSMSIDDTPRGSWACSIFDLKNSLPDALLPNLLDRTPNEEIDRQNDDQRKSNRHKELFALHPSPDEEEPIERLSVPDIPKEHFGQRLLVKCLSLKFEIEIEPIFASLALYDVKEKKKISENFYFDLNSEQMKGLLRPHVPPAAITTLARSAIFSITYPSQDVFLVIKLEKVLQQGDIGECAEPYMIFKEADATKNKEKLEKLKSQADQFCQRLGKYRMPFAWTAIHLMNIVSSAGSLERDSTEVEISTGERKGSWSERRNSSIVGRRSLERTTSGDDACNLTSFRPATLTVTNFFKQEGDRLSDEDLYKFLADMRRPSSVLRRLRPITAQLKIDISPAPENPHYCLTPELLQVKLYPDSRVRPTREILEFPARDVYVPNTTYRNLLYIYPQSLNFANRQGSARNITVKVQFMYGEDPSNAMPVIFGKSSCSEFSKEAYTAVVYHNRSPDFHEEIKVKLPATLTDHHHLLFTFYHVSCQQKQNTPLETPVGYTWIPMLQNGRLKTGQFCLPVSLEKPPQAYSVLSPEVPLPGMKWVDNHKGVFNVEVVAVSSIHTQDPYLDKFFALVNALDEHLFPVRIGDMRIMENNLENELKSSISALNSSQLEPVVRFLHLLLDKLILLVIRPPVIAGQIVNLGQASFEAMASIINRLHKNLEGNHDQHGRNSLLASYIHYVFRLPNTYPNSSSPGPGGLGGSVHYATMARSAVRPASLNLNRSRSLSNSNPDISGTPTSPDDEVRSIIGSKAMDRSCNRMSSHTETSSFLQTLTGRLPTKKLFHEELALQWVVCSGSVRESALQQAWFFFELMVKSMVHHLYFNDKLEAPRKSRFPERFMDDIAALVSTIASDIVSRFQKDTEMVERLNTSLAFFLNDLLSVMDRGFVFSLIKSCYKQVSSKLYSLPNPSVLVSLRLDFLRIICSHEHYVTLNLPCSLLTPPASPSPSVSSATSQSSGFSTNVQDQKIANMFELSVPFRQQHYLAGLVLTELAVILDPDAEGLFGLHKKVINMVHNLLSSHDSDPRYSDPQIKARVAMLYLPLIGIIMETVPQLYDFTETHNQRGRPICIATDDYESESGSMISQTVAMAIAGTSVPQLTRPGSFLLTSTSGRQHTTFSAESSRSLLICLLWVLKNADETVLQKWFTDLSVLQLNRLLDLLYLCVSCFEYKGKKVFERMNSLTFKKSKDMRAKLEEAILGSIGARQEMVRRSRGQLERSPSGSAFGSQENLRWRKDMTHWRQNTEKLDKSRAEIEHEALIDGNLATEANLIILDTLEIVVQTVSVTESKESILGGVLKVLLHSMACNQSAVYLQHCFATQRALVSKFPELLFEEETEQCADLCLRLLRHCSSSIGTIRSHASASLYLLMRQNFEIGNNFARVKMQVTMSLSSLVGTSQNFNEEFLRRSLKTILTYAEEDLELRETTFPDQVQDLVFNLHMILSDTVKMKEHQEDPEMLIDLMYRIAKGYQTSPDLRLTWLQNMAGKHSERSNHAEAAQCLVHSAALVAEYLSMLEDRKYLPVGCVTFQNISSNVLEESAVSDDVVSPDEEGICSGKYFTESGLVGLLEQAAASFSMAGMYEAVNEVYKVLIPIHEANRDAKKLSTIHGKLQEAFSKIVHQDGKRMFGTYFRVGFYGTKFGDLDEQEFVYKEPAITKLAEISHRLEGFYGERFGEDVVEVIKDSNPVDKCKLDPNKAYIQITYVEPYFDTYEMKDRITYFDKNYNLRRFMYCTPFTLDGRAHGELHEQFKRKTILTTSHAFPYIKTRVNVTHKEEIILTPIEVAIEDMQKKTQELAFATHQDPADPKMLQMVLQGSVGTTVNQGPLEVAQVFLSEIPSDPKLFRHHNKLRLCFKDFTKRCEDALRKNKSLIGPDQKEYQRELERNYHRLKEALQPLINRKIPQLYKAVLPVTCHRDSFSRMSLRKMDL

SEQ ID NO: 27441 - protein, 2140 aa, Homo sapiens
  REGION 1..2140: note = ENSP00000489124
MAERRAFAQKISRTVAAEVRKQISGQYSGSPQLLKNLNIVGNISHHTTVPLTEAVDPVDLEDYLITHPLAVDSGPLRDLIEFPPDDIEVVYSPRDCRTLVSAVPEESEMDPHVRDCIRSYTEDWAIVIRKYHKLGTGFNPNTLDKQKERQKGLPKQVFESDEAPDGNSYQDDQDDLKRRSMSIDDTPRGSWACSIFDLKNSLPDALLPNLLDRTPNEEIDRQNDDQRKSNRHKELFALHPSPDEEEPIERLSVPDIPKEHFGQRLLVKCLSLKFEIEIEPIFASLALYDVKEKKKISENFYFDLNSEQMKGLLRPHVPPAAITTLARSAIFSITYPSQDVFLVIKLEKVLQQGDIGECAEPYMIFKEADATKNKEKLEKLKSQADQFCQRLGKYRMPFAWTAIHLMNIVSSAGSLERDSTEVEISTGERKGSWSERRNSSIVGRRSLERTTSGDDACNLTSFRPATLTVTNFFKQEGDRLSDEDLYKFLADMRRPSSVLRRLRPITAQLKIDISPAPENPHYCLTPELLQVKLYPDSRVRPTREILEFPARDVYVPNTTYRNLLYIYPQSLNFANRQGSARNITVKVQFMYGEDPSNAMPVIFGKSSCSEFSKEAYTAVVYHNRSPDFHEEIKVKLPATLTDHHHLLFTFYHVSCQQKQNTPLETPVGYTWIPMLQNGRLKTGQFCLPVSLEKPPQAYSVLSPEVPLPGMKWVDNHKGVFNVEVVAVSSIHTQDPYLDKFFALVNALDEHLFPVRIGDMRIMENNLENELKSSISALNSSQLEPVVRFLHLLLDKLILLVIRPPVIAGQIVNLGQASFEAMASIINRLHKNLEGNHDQHGRNSLLASYIHYVFRLPNTYPNSSSPGPGGLGGSVHYATMARSAVRPASLNLNRSRSLSNSNPDISGTPTSPDDEVRSIIGSKGLDRSNSWVNTGGPKAAPWGSNPSPSAESTQAMDRSCNRMSSHTETSSFLQTLTGRLPTKKLFHEELALQWVVCSGSVRESALQQAWFFFELMVKSMVHHLYFNDKLEAPRKSRFPERFMDDIAALVSTIASDIVSRFQKDTEMVERLNTSLAFFLNDLLSVMDRGFVFSLIKSCYKQVSSKLYSLPNPSVLVSLRLDFLRIICSHEHYVTLNLPCSLLTPPASPSPSVSSATSQSSGFSTNVQDQKIANMFELSVPFRQQHYLAGLVLTELAVILDPDAEGLFGLHKKVINMVHNLLSSHDSDPRYSDPQIKARVAMLYLPLIGIIMETVPQLYDFTETHNQRGRPICIATDDYESESGSMISQTVAMAIAGTSVPQLTRPGSFLLTSTSGRQHTTFSAESSRSLLICLLWVLKNADETVLQKWFTDLSVLQLNRLLDLLYLCVSCFEYKGKKVFERMNSLTFKKSKDMRAKLEEAILGSIGARQEMVRRSRGQLGTYTIASPPERSPSGSAFGSQENLRWRKDMTHWRQNTEKLDKSRAEIEHEALIDGNLATEANLIILDTLEIVVQTVSVTESKESILGGVLKVLLHSMACNQSAVYLQHCFATQRALVSKFPELLFEEETEQCADLCLRLLRHCSSSIGTIRSHASASLYLLMRQNFEIGNNFARVKMQVTMSLSSLVGTSQNFNEEFLRRSLKTILTYAEEDLELRETTFPDQVQDLVFNLHMILSDTVKMKEHQEDPEMLIDLMYRIAKGYQTSPDLRLTWLQNMAGKHSERSNHAEAAQCLVHSAALVAEYLSMLEDRKYLPVGCVTFQNISSNVLEESAVSDDVVSPDEEGICSGKYFTESGLVGLLEQAAASFSMAGMYEAVNEVYKVLIPIHEANRDAKKLSTIHGKLQEAFSKIVHQSTGWERMFGTYFRVGFYGTKFGDLDEQEFVYKEPAITKLAEISHRLEGFYGERFGEDVVEVIKDSNPVDKCKLDPNKAYIQITYVEPYFDTYEMKDRITYFDKNYNLRRFMYCTPFTLDGRAHGELHEQFKRKTILTTSHAFPYIKTRVNVTHKEEIILTPIEVAIEDMQKKTQELAFATHQDPADPKMLQMVLQGSVGTTVNQGPLEVAQVFLSEIPSDPKLFRHHNKLRLCFKDFTKRCEDALRKNKSLIGPDQKEYQRELERNYHRLKEALQPLINRKIPQLYKAVLPVTCHRDSFSRMSLRKMDL

SEQ ID NO: 27442 - protein, 101 aa, Homo sapiens
  REGION 1..101: note = ENSP00000489412
FTESGLVGLLEQAAASFSMAGMYEAVNEVYKVLIPIHEANRDAKKLSTIHGKLQEAFSKIVHQFFYDLPFFTFYYTEYWLGADVWHLFSCWFLWNQVRGFG

SEQ ID NO: 27443 - protein, 602 aa, Homo sapiens
  REGION 1..602: note = ENSP00000490079
MAERRAFAQKISRTVAAEVRKQISGQYSGSPQLLKNLNIVGNISHHTTVPLTEAVDPVDLEDYLITHPLAVDSGPLRDLIEFPPDDIEVVYSPRDCRTLVSAVPEESEMDPHVRDCIRSYTEDWAIVIRKYHKLGTGFNPNTLDKQKERQKGLPKQVFESDEAPDGNSYQDDQDDLKRRSMSIDDTPRGSWACSIFDLKNSLPDALLPNLLDRTPNEEIDRQNDDQRKSNRHKELFALHPSPDEEEPIERLSVPDIPKEHFGQRLLVKCLSLKFEIEIEPIFASLALYDVKEKKKISENFYFDLNSEQMKGLLRPHVPPAAITTLARSAIFSITYPSQDVFLVIKLEKVLQQGDIGECAEPYMIFKEADATKNKEKLEKLKSQADQFCQRLGKYRMPFAWTAIHLMNIVSSAGSLERDSTEVEISTGERKGSWSERRNSSIVGRRSLERTTSGDDACNLTSFRPATLTVTNFFKQEGDRLSDEDLYKFLADMRRPSSVLRRLRPITAQLKIDISPAPENPHYCLTPELLQVKLYPDSRVRPTREILEFPARDVYVPNTTYRNLLYIYPQSLNFANRQGSARNITVKVQFMYGEDPSNAMPVS

SEQ ID NO: 27444 - protein, 255 aa, Homo sapiens
  REGION 1..255: note = ENSP00000489037
  VARIANT 1: note = Any amino acid
XKGVFNVEVVAVSSIHTQDPYLDKFFALVNALDEHLFPVRIGDMRIMENNLENELKSSISALNSSQLEPVVRFLHLLLDKLILLVIRPPVIAGQIVNLGQASFEAMASIINRLHKNLEGNHDQHGRNSLLASYIHYVFRLPNTYPNSSSPGPGGLGGSVHYATMARSAVRPASLNLNRSRSLSNSNPDISGTPTSPDDEVRSIIGSKLFHEELALQWVVCSGSVRESALQQAWFFFELMVKSMVHHLYFNDKLEA

SEQ ID NO: 27445 - protein, 248 aa, Homo sapiens
  REGION 1..248: note = ENSP00000489450
SSIHTQDPYLDKFFALVNALDEHLFPVRIGDMRIMENNLENELKSSISALNSSQLEPVVRFLHLLLDKLILLVIRPPVIAGQIVNLGQASFEAMASIINRLHKNLEGNHDQHGRNSLLASYIHYVFRLPNTYPNSSSPGPGGLGGSVHYATMARSAVRPASLNLNRSRSLSNSNPDISGTPTSPDDEVRSIIGSKGLDRSNSWVNTGGPKAAPWGSNPSPSAESTQLFHEELALQWVVCSGSVRESAL

SEQ ID NO: 27446 - protein, 46 aa, Homo sapiens
  REGION 1..46: note = ENSP00000488988
  VARIANT 1: note = Any amino acid
XTTYRNLLYIYPQSLNFANRQGSARNITVKVQFMYGEDPSNAMPVS

SEQ ID NO: 27447 - protein, 632 aa, Homo sapiens
  REGION 1..632: note = ENSP00000384446
MAERRAFAQKISRTVAAEVRKQISGQYSGSPQLLKNLNIVGNISHHTTVPLTEAVDPVDLEDYLITHPLAVDSGPLRDLIEFPPDDIEVVYSPRDCRTLVSAVPEESEMDPHVRDCIRSYTEDWAIVIRKYHKLGTGFNPNTLDKQKERQKGLPKQVFESDEAPDGNSYQDDQDDLKRRSMSIDDTPRGSWACSIFDLKNSLPDALLPNLLDRTPNEEIDRQNDDQRKSNRHKELFALHPSPDEEEPIERLSVPDIPKEHFGQRLLVKCLSLKFEIEIEPIFASLALYDVKEKKKISENFYFDLNSEQMKGLLRPHVPPAAITTLARSAIFSITYPSQDVFLVIKLEKVLQQGDIGECAEPYMIFKEADATKNKEKLEKLKSQADQFCQRLGKYRMPFAWTAIHLMNIVSSAGSLERDSTEVEISTGERKGSWSERRNSSIVGRRSLERTTSGDDACNLTSFRPATLTVTNFFKQEGDRLSDEDLYKFLADMRRPSSVLRRLRPITAQLKIDISPAPENPHYCLTPELLQVKLYPDSRVRPTREILEFPARDVYVPNTTYRNLLYIYPQSLNFANRQGSARNITVKVQFMYGEDPSNAMPSPSCTHPIPTVRPLPLWCYHSIFSLLSWDFIT

SEQ ID NO: 27448 - protein, 245 aa, Homo sapiens
  REGION 1..245: note = ENSP00000483062
PHVRDCIRSYTEDWAIVIRKYHKLGTGFNPNTLDKQKERQKGLPKQVFESDEAPDGNSYQDDQDDLKRRSMSIDDTPRGSWACSIFDLKNSLPDALLPNLLDRTPNEEIDRQNDDQRKSNRHKELFALHPSPDEEEPIERLSVPDIPKEHFGQRLLVKCLSLKFEIEIEPIFASLALYDVKEKKKISENFYFDLNSEQMKGLLRPHVPPAAITTLARSAIFSITYPSQDVFLVIKFSGLGFHYYA

SEQ ID NO: 27449 - protein, 173 aa, Homo sapiens
  REGION 1..173: note = ENSP00000489164
  VARIANT 1: note = Any amino acid
XECAEPYMIFKEADATKNKEKLEKLKSQADQFCQRLGKYRMPFAWTAIHLMNIVSSAGSLERDSTEVEISTGERKGSWSERRNSSIVGRRSLERTTSGDDACNLTSFRPATLTVTNFFKQVLFCHVGILGRCLCINFFNFRKVVIVLYMYGRVIPRNLKTLRIKIIKATIRMR

SEQ ID NO: 27450 - protein, 443 aa, Homo sapiens
  REGION 1..443: note = ENSP00000490677
  VARIANT 1: note = Any amino acid
XQISGQYSGSPQLLKNLNIVGNISHHTTVPLTEAVDPVDLEDYLITHPLAVDSGPLRDLIEFPPDDIEVVYSPRDCRTLVSAVPEESEMDPHVRDCIRSYTEDWAIVIRKYHKLGTGFNPNTLDKQKERQKGLPKQVFESDEAPDGNSYQDDQDDLKRRSMSIDDTPRGSWACSIFDLKNSLPDALLPNLLDRTPNEEIDRQNDDQRKSNRHKELFALHPSPDEEEPIERLSVPDIPKEHFGQRLLVKCLSLKFEIEIEPIFASLALYDVKEKKKISENFYFDLNSEQMKGLLRPHVPPAAITTLARSAIFSITYPSQDVFLVIKLEKVLQQGDIGECAEPYMIFKEADATKNKEKLEKLKSQADQFCQRLGKYRMPFAWTAIHLMNIVSSAGSLERDSTEVEISTGGFCNHCYRILLYPSWNTFVPISSGHSSFPQSLATCP

SEQ ID NO: 27451 - protein, 66 aa, Homo sapiens
  REGION 1..66: note = ENSP00000418587
MATLPSAERRAFALKINRYSSAEIRKQFTLPPNLGQYHRQSISTSGFPSLQLRRSFSMLSRLVLNS

SEQ ID NO: 27452 - protein, 50 aa, Homo sapiens
  REGION 1..50: note = ENSP00000436628
MATLPSAERRAFALKINSHALSPRLEYSGAISAHCNLCLPDSSDSPASAS

SEQ ID NO: 27453 - protein, 2099 aa, Homo sapiens
  REGION 1..2099: note = ENSP00000394888
MATLPSAERRAFALKINRYSSAEIRKQFTLPPNLGQYHRQSISTSGFPSLQLPQFYDPVEPVDFEGLLMTHLNSLDVQLAQELGDFTDDDLDVVFTPKECRTLQPSLPEEGVELDPHVRDCVQTYIREWLIVNRKNQGSPEICGFKKTGSRKDFHKTLPKQTFESETLECSEPAAQAGPRHLNVLCDVSGKGPVTACDFDLRSLQPDKRLENLLQQVSAEDFEKQNEEARRTNRQAELFALYPSVDEEDAVEIRPVPECPKEHLGNRILVKLLTLKFEIEIEPLFASIALYDVKERKKISENFHCDLNSDQFKGFLRAHTPSVAASSQARSAVFSVTYPSSDIYLVVKIEKVLQQGEIGDCAEPYTVIKESDGGKSKEKIEKLKLQAESFCQRLGKYRMPFAWAPISLSSFFNVSTLEREVTDVDSVVGRSSVGERRTLAQSRRLSERALSLEENGVGSNFKTSTLSVSSFFKQEGDRLSDEDLFKFLADYKRSSSLQRRVKSIPGLLRLEISTAPEIINCCLTPEMLPVKPFPENRTRPHKEILEFPTREVYVPHTVYRNLLYVYPQRLNFVNKLASARNITIKIQFMCGEDASNAMPVIFGKSSGPEFLQEVYTAVTYHNKSPDFYEEVKIKLPAKLTVNHHLLFTFYHISCQQKQGASVETLLGYSWLPILLNERLQTGSYCLPVALEKLPPNYSMHSAEKVPLQNPPIKWAEGHKGVFNIEVQAVSSVHTQDNHLEKFFTLCHSLESQVTFPIRVLDQKISEMALEHELKLSIICLNSSRLEPLVLFLHLVLDKLFQLSVQPMVIAGQTANFSQFAFESVVAIANSLHNSKDLSKDQHGRNCLLASYVHYVFRLPEVQRDVPKSGAPTALLDPRSYHTYGRTSAAAVSSKLLQARVMSSSNPDLAGTHSAADEEVKNIMSSKIADRNCSRMSYYCSGSSDAPSSPAAPRPASKKHFHEELALQMVVSTGMVRETVFKYAWFFFELLVKSMAQHVHNMDKRDSFRRTRFSDRFMDDITTIVNVVTSEIAALLVKPQKENEQAEKMNISLAFFLYDLLSLMDRGFVFNLIRHYCSQLSAKLSNLPTLISMRLEFLRILCSHEHYLNLNLFFMNADTAPTSPCPSISSQNSSSCSSFQDQKIASMFDLTSEYRQQHFLTGLLFTELAAALDAEGEGISKVQRKAVSAIHSLLSSHDLDPRCVKPEVKVKIAALYLPLVGIILDALPQLCDFTVADTRRYRTSGSDEEQEGAGAINQNVALAIAGNNFNLKTSGIVLSSLPYKQYNMLNADTTRNLMICFLWIMKNADQSLIRKWIADLPSTQLNRILDLLFICVLCFEYKGKQSSDKVSTQVLQKSRDVKARLEEALLRGEGARGEMMRRRAPGNDRFPGLNENLRWKKEQTHWRQANEKLDKTKAELDQEALISGNLATEAHLIILDMQENIIQASSALDCKDSLLGGVLRVLVNSLNCDQSTTYLTHCFATLRALIAKFGDLLFEEEVEQCFDLCHQVLHHCSSSMDVTRSQACATLYLLMRFSFGATSNFARVKMQVTMSLASLVGRAPDFNEEHLRRSLRTILAYSEEDTAMQMTPFPTQVEELLCNLNSILYDTVKMREFQEDPEMLMDLMYRIAKSYQASPDLRLTWLQNMAEKHTKKKCYTEAAMCLVHAAALVAEYLSMLEDHSYLPVGSVSFQNISSNVLEESVVSEDTLSPDEDGVCAGQYFTESGLVGLLEQAAELFSTGGLYETVNEVYKLVIPILEAHREFRKLTLTHSKLQRAFDSIVNKDHKRMFGTYFRVGFFGSKFGDLDEQEFVYKEPAITKLPEISHRLEAFYGQCFGAEFVEVIKDSTPVDKTKLDPNKAYIQITFVEPYFDEYEMKDRVTYFEKNFNLRRFMYTTPFTLEGRPRGELHEQYRRNTVLTTMHAFPYIKTRISVIQKEEFVLTPIEVAIEDMKKKTLQLAVAINQEPPDAKMLQMVLQGSVGATVNQGPLEVAQVFLAEIPADPKLYRHHNKLRLCFKEFIMRCGEAVEKNKRLITADQREYQQELKKNYNKLKENLRPMIERKIPELYKPIFRVESQKRDSFHRSSFRKCETQLSQGS

SEQ ID NO: 27454 - protein, 66 aa, Homo sapiens
  REGION 1..66: note = ENSP00000417082
MTHLNSLDVQLAQELGDFTDDDLDVVFTPKECRTLQPSLPEEGVELDPHVRDCVQTYIREWLIVNR

SEQ ID NO: 27455 - protein, 107 aa, Homo sapiens
  REGION 1..107: note = ENSP00000418318
MTHLNSLDVQLAQELGDFTDDDLDVVFTPKECRTLQPSLPEEGVELDPHVRDCVQTYIREWLIVNRKNQGSPEICGFKKTGSRKDFHKTLPKQTFESETLECSEPAA

SEQ ID NO: 27456 - protein, 502 aa, Homo sapiens
  REGION 1..502: note = ENSP00000417691
MTHLNSLDVQLAQELGDFTDDDLDVVFTPKECRTLQPSLPEEGVELDPHVRDCVQTYIREWLIVNRKNQGSPEICGFKKTGSRKDFHKTLPKQTFESETLECSEPAAQAGPRHLNVLCDVSGKGPVTACDFDLRSLQPDKRLENLLQQVSAEDFEKQNEEARRTNRQAELFALYPSVDEEDAVEIRPVPECPKEHLGNRILVKLLTLKFEIEIEPLFASIALYDVKERKKISENFHCDLNSDQFKGFLRAHTPSVAASSQARSAVFSVTYPSSDIYLVVKIEKVLQQGEIGDCAEPYTVIKESDGGKSKEKIEKLKLQAESFCQRLGKYRMPFAWAPISLSSFFNVSTLEREVTDVDSVVGRSSVGERRTLAQSRRLSERALSLEENGVGSNFKTSTLSVSSFFKQEGDRLSDEDLFKFLADYKRSSSLQRRVKSIPGLLRLEISTAPEIINCCLTPEMLPVKPFPENRTRPHKEILEFPTREVYVPHTVYREVFQVSAVAH

SEQ ID NO: 27457 - protein, 1999 aa, Homo sapiens
  REGION 1..1999: note = ENSP00000419438
MTHLNSLDVQLAQELGDFTDDDLDVVFTPKECRTLQPSLPEEGVELDPHVRDCVQTYIREWLIVNRKNQGSPEICGFKKTGSRKDFHKTLPKQTFESETLECSEPAAQAGPRHLNVLCDVSGKGPVTACDFDLRSLQPDKRLENLLQQVSAEDFEKQNEEARRTNRQAELFALYPSVDEEDAVEIRPVPECPKEHLGNRILVKLLTLKFEIEIEPLFASIALYDVKERKKISENFHCDLNSDQFKGFLRAHTPSVAASSQARSAVFSVTYPSSDIYLVVKIEKVLQQGEIGDCAEPYTVIKESDGGKSKEKIEKLKLQAESFCQRLGKYRMPFAWAPISLSSFFNVSTLEREVTDVDSVVGRSSVGERRTLAQSRRLSERALSLEENGVGSNFKTSTLSVSSFFKQEGDRLSDEDLFKFLADYKRSSSLQRRVKSIPGLLRLEISTAPEIINCCLTPEMLPVKPFPENRTRPHKEILEFPTREVYVPHTVYRNLLYVYPQRLNFVNKLASARNITIKIQFMCGEDASNAMPVIFGKSSGPEFLQEVYTAVTYHNKSPDFYEEVKIKLPAKLTVNHHLLFTFYHISCQQKQGASVETLLGYSWLPILLNERLQTGSYCLPVALEKLPPNYSMHSAEKVPLQNPPIKWAEGHKGVFNIEVQAVSSVHTQDNHLEKFFTLCHSLESQVTFPIRVLDQKISEMALEHELKLSIICLNSSRLEPLVLFLHLVLDKLFQLSVQPMVIAGQTANFSQFAFESVVAIANSLHNSKDLSKDQHGRNCLLASYVHYVFRLPEVQRDVPKSGAPTALLDPRSYHTYGRTSAAAVSSKLLQARVMSSSNPDLAGTHSAADEEVKNIMSSKHFHEELALQMVVSTGMVRETVFKYAWFFFELLVKSMAQHVHNMDKRDSFRRTRFSDRFMDDITTIVNVVTSEIAALLVKPQKENEQAEKMNISLAFFLYDLLSLMDRGFVFNLIRHYCSQLSAKLSNLPTLISMRLEFLRILCSHEHYLNLNLFFMNADTAPTSPCPSISSQNSSSCSSFQDQKIASMFDLTSEYRQQHFLTGLLFTELAAALDAEGEGISKVQRKAVSAIHSLLSSHDLDPRCVKPEVKVKIAALYLPLVGIILDALPQLCDFTVADTRRYRTSGSDEEQEGAGAINQNVALAIAGNNFNLKTSGIVLSSLPYKQYNMLNADTTRNLMICFLWIMKNADQSLIRKWIADLPSTQLNRILDLLFICVLCFEYKGKQSSDKVSTQVLQKSRDVKARLEEALLRGEGARGEMMRRRAPGNDRFPGLNENLRWKKEQTHWRQANEKLDKTKAELDQEALISGNLATEAHLIILDMQENIIQASSALDCKDSLLGGVLRVLVNSLNCDQSTTYLTHCFATLRALIAKFGDLLFEEEVEQCFDLCHQVLHHCSSSMDVTRSQACATLYLLMRFSFGATSNFARVKMQVTMSLASLVGRAPDFNEEHLRRSLRTILAYSEEDTAMQMTPFPTQVEELLCNLNSILYDTVKMREFQEDPEMLMDLMYRIAKSYQASPDLRLTWLQNMAEKHTKKKCYTEAAMCLVHAAALVAEYLSMLEDHSYLPVGSVSFQNISSNVLEESVVSEDTLSPDEDGVCAGQYFTESGLVGLLEQAAELFSTGGLYETVNEVYKLVIPILEAHREFRKLTLTHSKLQRAFDSIVNKDHKRMFGTYFRVGFFGSKFGDLDEQEFVYKEPAITKLPEISHRLEAFYGQCFGAEFVEVIKDSTPVDKTKLDPNKAYIQITFVEPYFDEYEMKDRVTYFEKNFNLRRFMYTTPFTLEGRPRGELHEQYRRNTVLTTMHAFPYIKTRISVIQKEEFVLTPIEVAIEDMKKKTLQLAVAINQEPPDAKMLQMVLQGSVGATVNQGPLEVAQVFLAEIPADPKLYRHHNKLRLCFKEFIMRCGEAVEKNKRLITADQREYQQELKKNYNKLKENLRPMIERKIPELYKPIFRVESQKRDSFHRSSFRKCETQLSQGS

SEQ ID NO: 27458 - protein, 439 aa, Homo sapiens
  REGION 1..439: note = ENSP00000371768
MHSAEKVPLQNPPIKWAEGHKGVFNIEVQAVSSVHTQDNHLEKFFTLCHSLESQVTFPIRVLDQKISEMALEHELKLSIICLNSSRLEPLVLFLHLVLDKLFQLSVQPMVIAGQTANFSQFAFESVVAIANSLHNSKDLSKDQHGRNCLLASYVHYVFRLPEVQRDVPKSGAPTALLDPRSYHTYGRTSAAAVSSKLLQARVMSSSNPDLAGTHSAADEEVKNIMSSKIADRNCSRMSYYCSGSSDAPSSPAAPRPASKKHFHEELALQMVVSTGMVRETVFKYAWFFFELLVKSMAQHVHNMDKRDSFRRTRFSDRFMDDITTIVNVVTSEIAALLVKPQKENEQAEKMNISLAFFLYDLLSLMDRGFVFNLIRHYCSQLSAKLSNLPTLISMRLEFLRILCSHEHYLNLNLFFMNADTAPTSPCPSISSQVIKELFN

SEQ ID NO: 27459 - protein, 1566 aa, Homo sapiens
  REGION 1..1566: note = ENSP00000371766
MCGEDASNAMPVRRETNICLKSGWAAHPCHFTQVRDSSVYKVRLFQANTAQHVQGLLCPGYQWGNRVIFGKSSGPEFLQEVYTAVTYHNKSPDFYEEVKIKLPAKLTVNHHLLFTFYHISCQQKQGASVETLLGYSWLPILLNERLQTGSYCLPVALEKLPPNYSMHSAEKVPLQNPPIKWAEGHKGVFNIEVQAVSSVHTQDNHLEKFFTLCHSLESQVTFPIRVLDQKISEMALEHELKLSIICLNSSRLEPLVLFLHLVLDKLFQLSVQPMVIAGQTANFSQFAFESVVAIANSLHNSKDLSKDQHGRNCLLASYVHYVFRLPEVQRDVPKSGAPTALLDPRSYHTYGRTSAAAVSSKLLQARVMSSSNPDLAGTHSAADEEVKNIMSSKIADRNCSRMSYYCSGSSDAPSSPAAPRPASKKHFHEELALQMVVSTGMVRETVFKYAWFFFELLVKSMAQHVHNMDKRDSFRRTRFSDRFMDDITTIVNVVTSEIAALLVKPQKENEQAEKMNISLAFFLYDLLSLMDRGFVFNLIRHYCSQLSAKLSNLPTLISMRLEFLRILCSHEHYLNLNLFFMNADTAPTSPCPSISSQNSSSCSSFQDQKIASMFDLTSEYRQQHFLTGLLFTELAAALDAEGEGISKVQRKAVSAIHSLLSSHDLDPRCVKPEVKVKIAALYLPLVGIILDALPQLCDFTVADTRRYRTSGSDEEQEGAGAINQNVALAIAGNNFNLKTSGIVLSSLPYKQYNMLNADTTRNLMICFLWIMKNADQSLIRKWIADLPSTQLNRILDLLFICVLCFEYKGKQSSDKVSTQVLQKSRDVKARLEEALLRGEGARGEMMRRRAPGNDRFPGLNENLRWKKEQTHWRQANEKLDKTKAELDQEALISGNLATEAHLIILDMQENIIQASSALDCKDSLLGGVLRVLVNSLNCDQSTTYLTHCFATLRALIAKFGDLLFEEEVEQCFDLCHQVLHHCSSSMDVTRSQACATLYLLMRFSFGATSNFARVKMQVTMSLASLVGRAPDFNEEHLRRSLRTILAYSEEDTAMQMTPFPTQVEELLCNLNSILYDTVKMREFQEDPEMLMDLMYRIAKSYQASPDLRLTWLQNMAEKHTKKKCYTEAAMCLVHAAALVAEYLSMLEDHSYLPVGSVSFQNISSNVLEESVVSEDTLSPDEDGVCAGQYFTESGLVGLLEQAAELFSTGGLYETVNEVYKLVIPILEAHREFRKLTLTHSKLQRAFDSIVNKDHKRMFGTYFRVGFFGSKFGDLDEQEFVYKEPAITKLPEISHRLEAFYGQCFGAEFVEVIKDSTPVDKTKLDPNKAYIQITFVEPYFDEYEMKDRVTYFEKNFNLRRFMYTTPFTLEGRPRGELHEQYRRNTVLTTMHAFPYIKTRISVIQKEEFVLTPIEVAIEDMKKKTLQLAVAINQEPPDAKMLQMVLQGSVGATVNQGPLEVAQVFLAEIPADPKLYRHHNKLRLCFKEFIMRCGEAVEKNKRLITADQREYQQELKKNYNKLKENLRPMIERKIPELYKPIFRVESQKRDSFHRSSFRKCETQLSQGS

SEQ ID NO: 27460 - protein, 2031 aa, Homo sapiens
  REGION 1..2031: note = ENSP00000408464
MTHLNSLDVQLAQELGDFTDDDLDVVFTPKECRTLQPSLPEEGVELDPHVRDCVQTYIREWLIVNRKNQGSPEICGFKKTGSRKDFHKTLPKQTFESETLECSEPAAQAGPRHLNVLCDVSGKGPVTACDFDLRSLQPDKRLENLLQQVSAEDFEKQNEEARRTNRQAELFALYPSVDEEDAVEIRPVPECPKEHLGNRILVKLLTLKFEIEIEPLFASIALYDVKERKKISENFHCDLNSDQFKGFLRAHTPSVAASSQARSAVFSVTYPSSDIYLVVKIEKVLQQGEIGDCAEPYTVIKESDGGKSKEKIEKLKLQAESFCQRLGKYRMPFAWAPISLSSFFNVSTLEREVTDVDSVVGRSSVGERRTLAQSRRLSERALSLEENGVGSNFKTSTLSVSSFFKQEGDRLSDEDLFKFLADYKRSSSLQRRVKSIPGLLRLEISTAPEIINCCLTPEMLPVKPFPENRTRPHKEILEFPTREVYVPHTVYRNLLYVYPQRLNFVNKLASARNITIKIQFMCGEDASNAMPVIFGKSSGPEFLQEVYTAVTYHNKSPDFYEEVKIKLPAKLTVNHHLLFTFYHISCQQKQGASVETLLGYSWLPILLNERLQTGSYCLPVALEKLPPNYSMHSAEKVPLQNPPIKWAEGHKGVFNIEVQAVSSVHTQDNHLEKFFTLCHSLESQVTFPIRVLDQKISEMALEHELKLSIICLNSSRLEPLVLFLHLVLDKLFQLSVQPMVIAGQTANFSQFAFESVVAIANSLHNSKDLSKDQHGRNCLLASYVHYVFRLPEVQRDVPKSGAPTALLDPRSYHTYGRTSAAAVSSKLLQARVMSSSNPDLAGTHSAADEEVKNIMSSKIADRNCSRMSYYCSGSSDAPSSPAAPRPASKKHFHEELALQMVVSTGMVRETVFKYAWFFFELLVKSMAQHVHNMDKRDSFRRTRFSDRFMDDITTIVNVVTSEIAALLVKPQKENEQAEKMNISLAFFLYDLLSLMDRGFVFNLIRHYCSQLSAKLSNLPTLISMRLEFLRILCSHEHYLNLNLFFMNADTAPTSPCPSISSQNSSSCSSFQDQKIASMFDLTSEYRQQHFLTGLLFTELAAALDAEGEGISKVQRKAVSAIHSLLSSHDLDPRCVKPEVKVKIAALYLPLVGIILDALPQLCDFTVADTRRYRTSGSDEEQEGAGAINQNVALAIAGNNFNLKTSGIVLSSLPYKQYNMLNADTTRNLMICFLWIMKNADQSLIRKWIADLPSTQLNRILDLLFICVLCFEYKGKQSSDKVSTQVLQKSRDVKARLEEALLRGEGARGEMMRRRAPGNDRFPGLNENLRWKKEQTHWRQANEKLDKTKAELDQEALISGNLATEAHLIILDMQENIIQASSALDCKDSLLGGVLRVLVNSLNCDQSTTYLTHCFATLRALIAKFGDLLFEEEVEQCFDLCHQVLHHCSSSMDVTRSQACATLYLLMRFSFGATSNFARVKMQVTMSLASLVGRAPDFNEEHLRRSLRTILAYSEEDTAMQMTPFPTQVEELLCNLNSILYDTVKMREFQEDPEMLMDLMYRIAKSYQASPDLRLTWLQNMAEKHTKKKCYTEAAMCLVHAAALVAEYLSMLEDHSYLPVGSVSFQNISSNVLEESVVSEDTLSPDEDGVCAGQYFTESGLVGLLEQAAELFSTGGLYETVNEVYKLVIPILEAHREFRKLTLTHSKLQRAFDSIVNKDHKRMFGTYFRVGFFGSKFGDLDEQEFVYKEPAITKLPEISHRLEAFYGQCFGAEFVEVIKDSTPVDKTKLDPNKAYIQITFVEPYFDEYEMKDRVTYFEKNFNLRRFMYTTPFTLEGRPRGELHEQYRRNTVLTTMHAFPYIKTRISVIQKEEFVLTPIEVAIEDMKKKTLQLAVAINQEPPDAKMLQMVLQGSVGATVNQGPLEVAQVFLAEIPADPKLYRHHNKLRLCFKEFIMRCGEAVEKNKRLITADQREYQQELKKNYNKLKENLRPMIERKIPELYKPIFRVESQKRDSFHRSSFRKCETQLSQGS

SEQ ID NO: 27461 - protein, 331 aa, Homo sapiens
  REGION 1..331: note = ENSP00000372160
MASNFNDIVKQGYVKIRSRKLGIFRRCWLVFKKASSKGPRRLEKFPDEKAAYFRNFHKVTELHNIKNITRLPRETKKHAVAIIFHDETSKTFACESELEAEEWCKHLCMECLGTRLNDISLGEPDLLAAGVQREQNERFNVYLMPTPNLDIYGECTMQITHENIYLWDIHNAKVKLVMWPLSSLRRYGRDSTWFTFESGRMCDTGEGLFTFQTREGEMIYQKVHSATLAIAEQHERLMLEMEQKARLQTSLTEPMTLSKSISLPRSAYWHHITRQNSVGEIYSLQGHGFGSSKMSRAQTFPSYAPEQSEEAQQPLSRSSSYGFSYSSSLIQ

SEQ ID NO: 27462 - protein, 156 aa, Homo sapiens
  REGION 1..156: note = ENSP00000462984
  VARIANT 1: note = Any amino acid
XLEAEEWCKHLCMECLGTRLNDISLGEPDLLAAGVQREQNERFNVYLMPTPNLDIYGECTMQITHENIYLWDIHNAKVKLVMWPLSSLRRYGRDSTWFTFESGRMCDTGEGLFTFQTREGEMIYQKVHSATLAIAEQHERLMLEMEQKARVRPLPW

SEQ ID NO: 27463 - protein, 145 aa, Homo sapiens
  REGION 1..145: note = ENSP00000270190
MDPEEQELLNDYRYRSYSSVIEKALRNFESSSEWADLISSLGKLNKALQSNLRYSLLPRRLLISKRLAQCLHPALPSGVHLKALETYEIIFKIVGTKWLAKDLFLYSCGLFPLLAHAAVSVRPVLLTLYEKYFLPLQKLLLPSLQ

SEQ ID NO: 27464 - protein, 2298 aa, Homo sapiens
  REGION 1..2298: note = ENSP00000382104
MDPEEQELLNDYRYRSYSSVIEKALRNFESSSEWADLISSLGKLNKALQSNLRYSLLPRRLLISKRLAQCLHPALPSGVHLKALETYEIIFKIVGTKWLAKDLFLYSCGLFPLLAHAAVSVRPVLLTLYEKYFLPLQKLLLPSLQAFIVGLLPGLEEGSEISDRTDALLLRLSLVVGKEVFYTALWGSVLASPSIRLPASVFVVGHINRDAPGREQKYMLGTNHQLTVKSLRASLLDSNVLVQRNNLEIVLFFFPFYTCLDSNERAIPLLRSDIVRILSAATQTLLRRDMSLNRRLYAWLLGSDIKGNTVVPESEISNSYEDQSSYFFEKYSKDLLVEGLAEILHQKFIDADVEERHHAYLKPFRVLISLLDKPEIGPQVVGNLFLEVIRAFYSYCRDALGSDLKLSYTQSGNSLISAIKENRNASEIVKTVNLLITSLSTDFLWDYMTRCFEECFRPVKQRYSVRNSVSPPPTVSELCALLVFLLDVIPLELYSEVQTQYLPQVLGCLVQPLAEDMEALSLPELTHALKTCFKVLSKVQMPPSYLDTESTSGTSSPVKGENGKIILETKAVIPGDEDASFPPLKSEDSGIGLSASSPELSEHLRVPRVSLERDDVWKKGGSMQRTFLCIQELIANFASKNIFGVQLTASGEESKSEEPAGKRDRDGTQSLAANDSSRKNSWEPKPITVPQFKQMLSDLFTARGSPFKTKSSESPSSSPSSPARKNGGEWDVEKVVIDLGGSREERREAFAAACHLLLDCATFPVYLSEEETEQLCATLFQLPGAGDSSFPSWLKSLMTICCCVTDCYLQNVAISTLLEVINHSQSLALVIEDKMKRYKSSGHNPFFGKLQMVTVPPIAPGILKVIAEKTDFYQRVARVLWNQLNKETREHHVTCVELFYRLHCLAPTANICEDIICHALLDPDKGTRLEALFRFSVIWHLTREIQGSRVTSHNRSFDRSLFVVLDSLACTDGAIGAAAQGWLVRALSLGDVARILEPVLLLLLQPKTQRTSIHCLKQENSADDLHRWFNRKKTSFREACAVPEPQESGSEEHLPLSQFTTVDREAIWAEVEKEPEKYPLRGELSEEELPYYVELPDRTAHGAPDSSEHTESADTSSCHTDSENTSSFSSPSHDLQELSNEENCCAPIPMGGRAYPKRSALLAAFQSESFKAGAKLSLVRVDSDKTQASESFSSDEEADLELQALTTSRLLKQQRERQEAVEALFKHILLYLQPYDSRRVLYAFSVLEAVLKTNPKEFIEAVSRTSMDTSSTAHLNLISNLLARHQEALIGQSFYGKLQTQVPNVCPHSLLLELLTYLCLSFLRSYYPCYLKVSHRDILGNRDVQVKSVEVLIRIMMQLVSVAKSSEGKNVEFIHSLLQRCKVQEFVLLSLSASMYTSQKRYGLATAHHGRALPEDSLFEESLINLGQDQIWSEHPLQIELLKLLQVLIVLEHHLGRAHEEAENQPDLSREWQRALNFQQAISALQYVQPHPLTSQGLLVSAVVRGLQPAYGYGMHPAWVSLVTHSLPYFGKSLGWTVTPFVVQICKNLDDLVKQYESESVKLSVSTTSKRENISPDYPLTLLEGLTTISHFCLLEQANQNKKTMAAGDPANLRNARNAILEELPRTVNTMALLWNVLRKEETQKRPVDLLGATKGSSSVYFKTTKTIRQKILDFLNPLTAHLGVQLTAAVAAVWSRKKAQRHSKMKIIPTASASQLTLVDLVCALSTLQTDTLLHLVKEVVKRPPQVKGGDEKSPLVDIPVLQFCYAFLQRLPVPALQENFSSLLGVLKESVQLNLAPPGYFLLLSMLNDFVTRTPNLENKKDQKDLQEITQKILEAVGNIAGSSLEQTSWLSRNLEVKAQPQASLEESDAEEDLYDAAAASAMVSSSAPSVYSVQALSLLAEVLASLLDMVYRSDEKEKAVPLISRLLYYVFPYLRNHSAYNAPSFRAGAQLLSSLSGYAYTKRAWRKEVLELFLDPAFFQMDTSCVHWKSIIDHLLTHEKTMFKDLMNMQSSSLKLFSSFEQKAMLLKRQAFAVFSGELDQYHLYLPLIQERLTDNLRVGQTSIVAAQMFLFFRVLLLRISPQHLTSLWPIMVSELIQTFTQLEEDLKDEDESLRSTNKVNRTKVSVPDANGPSVGEIPQSELILYLSACKFLDTALSFPPDKMPLFQIYRWAFIPEVDTEGPAFLSDVEENHQECKPHTVRILELLKLKFGEISSSDEITMKSEFPLLRQHSVSSIRQLMPFFMTLNGAFKTQRQLPADSPGTPFLDFPVTDSPRILKQLEECIEYDFLEHPEC

SEQ ID NO: 27465 - protein, 378 aa, Homo sapiens
  REGION 1..378: note = ENSP00000450518
MATVIHNPLKALGDQFYKEAIEHCRSYNSRLCAERSVRLPFLDSQTGVAQNNCYIWMEKRHRGPGLAPGQLYTYPARCWRKKRRLHPPEDPKLRLLEIKPEVELPLKKDGFTSESTTLEALLRGEGVEKKVDAREEESIQEIQRVLENDENVEEGNEEEDLEEDIPKRKNRTRGRARGSAGGRRRHDAASQEDHDKPYVCDICGKRYKNRPGLSYHYAHTHLASEEGDEAQDQETRSPPNHRNENHRPQKGPDGTVIPNNYCDFCLGGSNMNKKSGRPEELVSCADCGRSGHPTCLQFTLNMTEAVKTYKWQCIECKSCILCGTSENDDQLLFCDDCDRGYHMYCLNPPVAEPPEGSWSCHLCWELLKEKASAFGCQA

SEQ ID NO: 27466 - protein, 412 aa, Homo sapiens
  REGION 1..412: note = ENSP00000381791
MFYGRINGRNFAASSLPVAFAATPLMLFLPNPQLIFSFPISSRNHITGLMPPGKLKLENLFHMCTRLGDQFYKEAIEHCRSYNSRLCAERSVRLPFLDSQTGVAQNNCYIWMEKRHRGPGLAPGQLYTYPARCWRKKRRLHPPEDPKLRLLEIKPEVELPLKKDGFTSESTTLEALLRGEGVEKKVDAREEESIQEIQRVLENDENVEEGNEEEDLEEDIPKRKNRTRGRARGSAGGRRRHDAASQEDHDKPYVCDICGKRYKNRPGLSYHYAHTHLASEEGDEAQDQETRSPPNHRNENHRPQKGPDGTVIPNNYCDFCLGGSNMNKKSGRPEELVSCADCGRSAHLGGEGRKEKEAAAAARTTEDLFGSTSESDTSTFHGFDEDDLEEPRSCRGRRSGRGSPTADKKGSC

SEQ ID NO: 27467 - protein, 357 aa, Homo sapiens
  REGION 1..357: note = ENSP00000370614
MATVIHNPLKALGDQFYKEAIEHCRSYNSRLCAERSVRLPFLDSQTGVAQNNCYIWMEKRHRGPGLAPGQLYTYPARCWRKKRRLHPPEDPKLRLLEIKPEVELPLKKDGFTSESTTLEALLRGEGVEKKVDAREEESIQEIQRVLENDENVEEGNEEEDLEEDIPKRKNRTRGRARGSAGGRRRHDAASQEDHDKPYVCDICGKRYKNRPGLSYHYAHTHLASEEGDEAQDQETRSPPNHRNENHRPQKGPDGTVIPNNYCDFCLGGSNMNKKSGRPEELVSCADCGRSAHLGGEGRKEKEAAAAARTTEDLFGSTSESDTSTFHGFDEDDLEEPRSCRGRRSGRGSPTADKKGSC

SEQ ID NO: 27468 - protein, 367 aa, Homo sapiens
  REGION 1..367: note = ENSP00000444662
MGFTDLEEPISGCPGGPWALGLGDQFYKEAIEHCRSYNSRLCAERSVRLPFLDSQTGVAQNNCYIWMEKRHRGPGLAPGQLYTYPARCWRKKRRLHPPEDPKLRLLEIKPEVELPLKKDGFTSESTTLEALLRGEGVEKKVDAREEESIQEIQRVLENDENVEEGNEEEDLEEDIPKRKNRTRGRARGSAGGRRRHDAASQEDHDKPYVCDICGKRYKNRPGLSYHYAHTHLASEEGDEAQDQETRSPPNHRNENHRPQKGPDGTVIPNNYCDFCLGGSNMNKKSGRPEELVSCADCGRSAHLGGEGRKEKEAAAAARTTEDLFGSTSESDTSTFHGFDEDDLEEPRSCRGRRSGRGSPTADKKGSC

SEQ ID NO: 27469 - protein, 357 aa, Homo sapiens; identical to SEQ ID NO: 27467
  REGION 1..357: note = ENSP00000441640

SEQ ID NO: 27470 - protein, 412 aa, Homo sapiens; identical to SEQ ID NO: 27466
  REGION 1..412: note = ENSP00000479526

SEQ ID NO: 27471 - protein, 367 aa, Homo sapiens; identical to SEQ ID NO: 27468
  REGION 1..367: note = ENSP00000481992

SEQ ID NO: 27472 - protein, 60 aa, Homo sapiens
  REGION 1..60: note = ENSP00000391092
MSVILLTPDELTNSSETRLSLEDLFRKDFVLHDPEARWINDTDVVYKSENGHVIKLNIET

SEQ ID NO: 27473 - protein, 796 aa, Homo sapiens
  REGION 1..796: note = ENSP00000386565
MNQTASVSHHIKCQPSKTIKELGSNSPPQRNWKGIAIALLVILVVCSLITMSVILLTPDELTNSSETRLSLEDLFRKDFVLHDPEARWINDTDVVYKSENGHVIKLNIETNATTLLLENTTFVTFKASRHSVSPDLKYVLLAYDVKQIFHYSYTASYVIYNIHTREVWELNPPEVEDSVLQYAAWGVQGQQLIYIFENNIYYQPDIKSSSLRLTSSGKEEIIFNGIADWLYEEELLHSHIAHWWSPDGERLAFLMINDSLVPTMVIPRFTGALYPKGKQYPYPKAGQVNPTIKLYVVNLYGPTHTLELMPPDSFKSREYYITMVKWVSNTKTVVRWLNRAQNISILTVCETTTGACSKKYEMTSDTWLSQQNEEPVFSRDGSKFFMTVPVKQGGRGEFHHVAMFLIQSKSEQITVRHLTSGNWEVIKILAYDETTQKIYFLSTESSPRGRQLYSASTEGLLNRQCISCNFMKEQCTYFDASFSPMNQHFLLFCEGPRVPVVSLHSTDNPAKYFILESNSMLKEAILKKKIGKPEIKILHIDDYELPLQLSLPKDFMDRNQYALLLIMDEEPGGQLVTDKFHIDWDSVLIDMDNVIVARFDGRGSGFQGLKILQEIHRRLGSVEVKDQITAVKFLLKLPYIDSKRLSIFGKGYGGYIASMILKSDEKLFKCGSVVAPITDLKLYASAFSERYLGMPSKEESTYQAASVLHNVHGLKEENILIIHGTADTKVHFQHSAELIKHLIKAGVNYTMQVYPDEGHNVSEKSKYHLYSTILKFFSDCLKEEISVLPQEPEEDE

SEQ ID NO: 27474 - protein, 746 aa, Homo sapiens
  REGION 1..746: note = ENSP00000387038
MSVILLTPDELTNSSETRLSLEDLFRKDFVLHDPEARWINDTDVVYKSENGHVIKLNIETNATTLLLENTTFVTFKASRHSVSPDLKYVLLAYDVKQIFHYSYTASYVIYNIHTREVWELNPPEVEDSVLQYAAWGVQGQQLIYIFENNIYYQPDIKSSSLRLTSSGKEEIIFNGIADWLYEEELLHSHIAHWWSPDGERLAFLMINDSLVPTMVIPRFTGALYPKGKQYPYPKAGQVNPTIKLYVVNLYGPTHTLELMPPDSFKSREYYITMVKWVSNTKTVVRWLNRAQNISILTVCETTTGACSKKYEMTSDTWLSQQNEEPVFSRDGSKFFMTVPVKQGGRGEFHHVAMFLIQSKSEQITVRHLTSGNWEVIKILAYDETTQKIYFLSTESSPRGRQLYSASTEGLLNRQCISCNFMKEQCTYFDASFSPMNQHFLLFCEGPRVPVVSLHSTDNPAKYFILESNSMLKEAILKKKIGKPEIKILHIDDYELPLQLSLPKDFMDRNQYALLLIMDEEPGGQLVTDKFHIDWDSVLIDMDNVIVARFDGRGSGFQGLKILQEIHRRLGSVEVKDQITAVKFLLKLPYIDSKRLSIFGKGYGGYIASMILKSDEKLFKCGSVVAPITDLKLYASAFSERYLGMPSKEESTYQAASVLHNVHGLKEENILIIHGTADTKVHFQHSAELIKHLIKAGVNYTMQVYPDEGHNVSEKSKYHLYSTILKFFSDCLKEEISVLPQEPEEDE

SEQ ID NO: 27475 - protein, 258 aa, Homo sapiens
  REGION 1..258: note = ENSP00000376854
MVITEVAEGPVDGSEKELGSNSPPQRNWKGIAIALLVILVVCSLITMSVILLTPDELTNSSETRLSLEDLFRKDFVLHDPEARWINDTDVVYKSENGHVIKLNIETNATTLLLENTTFVTFKASRHSVSPDLKYVLLAYDVKQIFHYSYTASYVIYNIHTREVWELNPPEVEDSVLQYAAWGVQGQQLIYIFENNIYYQPDIKSSSLRLTSSGKEEIIFNGIADWLYEEELLHSHIAHWWSPDGERLAFLMINDSLVP

SEQ ID NO: 27476 - protein, 800 aa, Homo sapiens
  REGION 1..800: note = ENSP00000376855
MTAAKQEPQPTPGARASQAQPADQELGSNSPPQRNWKGIAIALLVILVVCSLITMSVILLTPDELTNSSETRLSLEDLFRKDFVLHDPEARWINDTDVVYKSENGHVIKLNIETNATTLLLENTTFVTFKASRHSVSPDLKYVLLAYDVKQIFHYSYTASYVIYNIHTREVWELNPPEVEDSVLQYAAWGVQGQQLIYIFENNIYYQPDIKSSSLRLTSSGKEEIIFNGIADWLYEEELLHSHIAHWWSPDGERLAFLMINDSLVPTMVIPRFTGALYPKGKQYPYPKAGQVNPTIKLYVVNLYGPTHTLELMPPDSFKSREYYITMVKWVSNTKTVVRWLNRAQNISILTVCETTTGACSKKYEMTSDTWLSQQNEEPVFSRDGSKFFMTVPVKQGGRGEFHHVAMFLIQSKSEQITVRHLTSGNWEVIKILAYDETTQKIYFLSTESSPRGRQLYSASTEGLLNRQCISCNFMKEQCTYFDASFSPMNQHFLLFCEGPRVPVVSLHSTDNPAKYFILESNSMLKEAILKKKIGKPEIKILHIDDYELPLQLSLPKDFMDRNQYALLLIMDEEPGGQLVTDKFHIDWDSVLIDMDNVIVARFDGRGSGFQGLKILQEIHRRLGSVEVKDQITAVKFLLKLPYIDSKRLSIFGKGYGGYIASMILKSDEKLFKCGSVVAPITDLKLYASAFSERYLGMPSKEESTYQAASVLHNVHGLKEENILIIHGTADTKVHFQHSAELIKHLIKAGVNYTMQVYPDEGHNVSEKSKYHLYSTILKFFSDCLKEEISVLPQEPEEDE

SEQ ID NO: 27477 - protein, 789 aa, Homo sapiens
  REGION 1..789: note = ENSP00000309066
MRKVESRGEGGREELGSNSPPQRNWKGIAIALLVILVVCSLITMSVILLTPDELTNSSETRLSLEDLFRKDFVLHDPEARWINDTDVVYKSENGHVIKLNIETNATTLLLENTTFVTFKASRHSVSPDLKYVLLAYDVKQIFHYSYTASYVIYNIHTREVWELNPPEVEDSVLQYAAWGVQGQQLIYIFENNIYYQPDIKSSSLRLTSSGKEEIIFNGIADWLYEEELLHSHIAHWWSPDGERLAFLMINDSLVPTMVIPRFTGALYPKGKQYPYPKAGQVNPTIKLYVVNLYGPTHTLELMPPDSFKSREYYITMVKWVSNTKTVVRWLNRAQNISILTVCETTTGACSKKYEMTSDTWLSQQNEEPVFSRDGSKFFMTVPVKQGGRGEFHHVAMFLIQSKSEQITVRHLTSGNWEVIKILAYDETTQKIYFLSTESSPRGRQLYSASTEGLLNRQCISCNFMKEQCTYFDASFSPMNQHFLLFCEGPRVPVVSLHSTDNPAKYFILESNSMLKEAILKKKIGKPEIKILHIDDYELPLQLSLPKDFMDRNQYALLLIMDEEPGGQLVTDKFHIDWDSVLIDMDNVIVARFDGRGSGFQGLKILQEIHRRLGSVEVKDQITAVKFLLKLPYIDSKRLSIFGKGYGGYIASMILKSDEKLFKCGSVVAPITDLKLYASAFSERYLGMPSKEESTYQAASVLHNVHGLKEENILIIHGTADTKVHFQHSAELIKHLIKAGVNYTMQVYPDEGHNVSEKSKYHLYSTILKFFSDCLKEEISVLPQEPEEDE

SEQ ID NO: 27478 - protein, 60 aa, Homo sapiens
  REGION 1..60: note = ENSP00000408535
MRKVESRGEGGREMNSQIRQKPDCLWKTSLGKTLCFTIQRLGGSMIQMWCIKARMDMSLN

SEQ ID NO: 27479 - protein, 97 aa, Homo sapiens
  REGION 1..97: note = ENSP00000402499
MSVILLTPDELTNSSETRLSLEDLFRKDFVLHDPEARWINDTDVVYKSENGHVIKLNIETNATTLLLENTTFVTFKASRHSVSPDLKYVLLAYDVKQ

SEQ ID NO: 27480 - protein, 748 aa, Homo sapiens
  REGION 1..748: note = ENSP00000490722
MVLQARNKHREAAPKPPQPPRASQSPLRGASDVGAGEPGPERAPLSPGRKGAAGRKGPRAEPGAPPAGGGLGGRLAARLRWALGLRRAGRGRTWTTLLLAVFAAVLHWSHITHLFENDRHFSHLSTLEREMAFRTEMGLYYSYFKTIVEAPSFLNGVWMIMNDKLTEYPLVINTLKRFNLYPEVILASWYRIYTKIMDLIGIQTKICWTVTRGEGLSPIESCEGLGDPACFYVAVIFILNGLMMALFFIYGTYLSGSRLGGLVTVLCFFFNHGECTRVMWTPPLRESFSYPFLVLQMLLVTHILRATKLYRGSLIALCISNVFFMLPWQFAQFVLLTQIASLFAVYVVGYIDICKLRKIIYIHMISLALCFVLMFGNSMLLTSYYASSLVIIWGILAMKPHFLKINVSELSLWVIQGCFWLFGTVILKYLTSKIFGIADDAHIGNLLTSKFFSYKDFDTLLYTCAAEFDFMEKETPLRYTKTLLLPVVLVVFVAIVRKIISDMWGVLAKQQTHVRKHQFDHGELVYHALQLLAYTALGILIMRLKLFLTPHMCVMASLICSRQLFGWLFCKVHPGAIVFAILAAMSIQGSANLQTQWNIVGEFSNLPQEELIEWIKYSTKPDAVFAGAMPTMASVKLSALRPIVNHPHYEDAGLRARTKIVYSMYSRKAAEEVKRELIKLKVNYYILEESWCVRRSKPGCSMPEIWDVEDPANAGKTPLCNLLVKDSKPHFTTVFQNSVYKVLEVVKE

SEQ ID NO: 27481 - protein, 675 aa, Homo sapiens
  REGION 1..675: note = ENSP00000308695
MEGRPPPEGRPPPRPRTGRAPRGRRRAVFAAVLHWSHITHLFENDRHFSHLSTLEREMAFRTEMGLYYSYFKTIVEAPSFLNGVWMIMNDKLTEYPLVINTLKRFNLYPEVILASWYRIYTKIMDLIGIQTKICWTVTRGEGLSPIESCEGLGDPACFYVAVIFILNGLMMALFFIYGTYLSGSRLGGLVTVLCFFFNHGECTRVMWTPPLRESFSYPFLVLQMLLVTHILRATKLYRGSLIALCISNVFFMLPWQFAQFVLLTQIASLFAVYVVGYIDICKLRKIIYIHMISLALCFVLMFGNSMLLTSYYASSLVIIWGILAMKPHFLKINVSELSLWVIQGCFWLFGTVILKYLTSKIFGIADDAHIGNLLTSKFFSYKDFDTLLYTCAAEFDFMEKETPLRYTKTLLLPVVLVVFVAIVRKIISDMWGVLAKQQTHVRKHQFDHGELVYHALQLLAYTALGILIMRLKLFLTPHMCVMASLICSRQLFGWLFCKVHPGAIVFAILAAMSIQGSANLQTQWNIVGEFSNLPQEELIEWIKYSTKPDAVFAGAMPTMASVKLSALRPIVNHPHYEDAGLRARTKIVYSMYSRKAAEEVKRELIKLKVNYYILEESWCVRRSKPGCSMPEIWDVEDPANAGKTPLCNLLVKDSKPHFTTVFQNSVYKVLEVVKE

SEQ ID NO: 27482 - protein, 83 aa, Homo sapiens
  REGION 1..83: note = ENSP00000412745
  VARIANT 1: note = Any amino acid
XFAGAMPTMASVKLSALRPIVNHPHYEDAGLRPGCSMPEIWDVEDPANAGKTPLCNLLVKDSKPHFTTVFQNSVYKVLEVVKE

SEQ ID NO: 27483 - protein, 206 aa, Homo sapiens
  REGION 1..206: note = ENSP00000400510
CTRVMWTPPLRESFSYPFLVLQMLLVTHILRATKLYRGSLIALCISNVFFMLPWQFAQFVLLTQIASLFAVYVVGYIDICKLRKIIYIHMGILAMKPHFLKINVSELSLWVIQGCFWLFGTVILKYLTSKIFGIADDAHIGNLLTSKFFSYKDFDTLLYTCAAEFDFMEKETPLRYTKTLLLPVVLVVFVAIVRKIISDMWGVLAK

SEQ ID NO: 27484 - protein, 85 aa, Homo sapiens
  REGION 1..85: note = ENSP00000478865
MYSRKAAEEVKRELIKLKVNYYILEESWCVRRSKPGCSMPEIWDVEDPANAGKTPLCNLLVKDSKPHFTTVFQNSVYKVLEVVKE

SEQ ID NO: 27485 - protein, 758 aa, Homo sapiens
  REGION 1..758: note = ENSP00000315988
MRKQGVSSKRLQSSGRSQSKGRRGASLAREPEVEEEMEKSALGGGKLPRGSWRSSPGRIQSLKERKGLELEVVAKTFLLGPFQFVRNSLAQLREKVQELQARRFSSRTTLGIAVFVAILHWLHLVTLFENDRHFSHLSSLEREMTFRTEMGLYYSYFKTIIEAPSFLEGLWMIMNDRLTEYPLIINAIKRFHLYPEVIIASWYCTFMGIMNLFGLETKTCWNVTRIEPLNEVQSCEGLGDPACFYVGVIFILNGLMMGLFFMYGAYLSGTQLGGLITVLCFFFNHGEATRVMWTPPLRESFSYPFLVLQMCILTLILRTSSNDRRPFIALCLSNVAFMLPWQFAQFILFTQIASLFPMYVVGYIEPSKFQKIIYMNMISVTLSFILMFGNSMYLSSYYSSSLLMTWAIILKRNEIQKLGVSKLNFWLIQGSAWWCGTIILKFLTSKILGVSDHIRLSDLIAARILRYTDFDTLIYTCAPEFDFMEKATPLRYTKTLLLPVVMVITCFIFKKTVRDISYVLATNIYLRKQLLEHSELAFHTLQLLVFTALAILIMRLKMFLTPHMCVMASLICSRQLFGWLFRRVRFEKVIFGILTVMSIQGYANLRNQWSIIGEFNNLPQEELLQWIKYSTTSDAVFAGAMPTMASIKLSTLHPIVNHPHYEDADLRARTKIVYSTYSRKSAKEVRDKLLELHVNYYVLEEAWCVVRTKPGCSMLEIWDVEDPSNAANPPLCSVLLEDARPYFTTVFQNSVYRVLKVN

SEQ ID NO: 27486 - protein, 149 aa, Homo sapiens
  REGION 1..149: note = ENSP00000437474
  VARIANT 1: note = Any amino acid
XIILKRNEIQKLGVSKLNFWLIQGSAWWCGTIILKFLTSKILGVSDHIRLSDLIAARILRYTDFDTLIYTCAPEFDFMEKATPLRYTKTLLLPVVMVITCFIFKKTVRDISYVLATNIYLRQMEHREMCLGILKKNEWRTLDTVPIRST

SEQ ID NO: 27487 - protein, 142 aa, Homo sapiens
  REGION 1..142: note = ENSP00000445878
MRKQGVSSKRLQSSGRSQSKGRRGASLAREPEVEEEMEKSALGGGKLPRGSWRSSPGRIQSLKERKGLELEVVAKTFLLGPFQFVRNSLAQLREKVQELQARRFSSRTTLGIAVFVAILHWDFIIHTSRPLLKHLRFWKDCG

SEQ ID NO: 27488 - protein, 124 aa, Homo sapiens
  REGION 1..124: note = ENSP00000443126
MFKVFRLFNFIKVGPFQIASLFPMYVVGYIEPSKFQKIIYMNMISVTLSFILMFGNSMYLSSYYSSSLLMTWAIILKRNEIQKLGVSKLNFWLIQGSAWWCGTIILKFLTSKILGVSDHIRLSD

SEQ ID NO: 27489 - protein, 47 aa, Homo sapiens
  REGION 1..47: note = ENSP00000439567
MTFRTEMGLYYSYFKTIIEAPSFLEGLWMIMNDRLTEYPLIINAIKR

SEQ ID NO: 27490 - protein, 90 aa, Homo sapiens
  REGION 1..90: note = ENSP00000444932
MRKQGVSSKRLQSSGRSQSKGRRGASLAREPEVEEEMEKSALGGGKLPRGSWRSSPGRIQSLKERKGLELEVVAKTFLLGPFQFVRNSLA

SEQ ID NO: 27491 - protein, 128 aa, Homo sapiens
  REGION 1..128: note = ENSP00000428762
MAEEEGPPVELRQRKKPKSSENKESAKEEKISDIPIPERAPKRVYELTHNNKTVSLKTINAVQQMSLYPELIASILYQATGSNEIIEPVYFYIGIVFGLQGIYVTALFVTSWLMSGTWLAGMLTVAWF

SEQ ID NO: 27492 - protein, 44 aa, Homo sapiens
  REGION 1..44: note = ENSP00000430162
MAEEEGPPVELRQRKKPKSSENKESAKEEKISDIPIPERAPKRA

SEQ ID NO: 27493 - protein, 723 aa, Homo sapiens
  REGION 1..723: note = ENSP00000389630
MAEEEGPPVELRQRKKPKSSENKESAKEEKISDIPIPERAPKHVLFQRFAKIFIGCLAAVTSGMMYALYLSAYHERKFWFSNRQELEREITFQGDSAIYYSYYKDMLKAPSFERGVYELTHNNKTVSLKTINAVQQMSLYPELIASILYQATGSNEIIEPVYFYIGIVFGLQGIYVTALFVTSWLMSGTWLAGMLTVAWFVINRVDTTRIEYSIPLRENWALPYFACQIAALTGYLKSNLNTYGERFCYLLMSASTYTFMMMWEYSHYLLFLQAISLFLLDTFSVEQSDKVYEVYKIYIFSLFLGYLLQFENPALLVSPLLSLVAALMLAKCLQLNVKKGSFVAKIIKVINFYLVCTLTITLNIIMKMFVPHKENGHMLKFLEVKFGLNMTKNFTMNWLLCQESLQAPSQDFFLRLTQSSLLPFYILVLIICFLSMLQVIFRRINGKSLKETVTLEDGRIGERPEIIYHVIHTILLGSLAMVIEGLKYIWIPYVCMLAAFGVCSPELWMTLFKWLRLRTVHPILLALILSMAVPTIIGLSLWKEFFPRLMTELMELQEFYDPDTVELMTWIKRQAPVAAVFAGSPQLMGAIKLCTGWMVTSLPLYNDDDLLKRNENIYQIYSKRSAEDIYKILTSYKANYLIVEDAICNEVGPMRGCRVKDLLDIANGHMVCEEGDKLTYSKYGRFCHEVKINYSPYVNYFTRVYWNRSYFVYKINTVISFQS

SEQ ID NO: 27494 - protein, 114 aa, Homo sapiens
  REGION 1..114: note = ENSP00000428041
  VARIANT 1: note = Any amino acid
XKRKSVTFQFLKELQNELEREITFQGDSAIYYSYYKDMLKAPSFERGVYELTHNNKTVSLKTINAVQQMSLYPELIASILYQATGSNEIIEPVYFYIGIVFGLQGIYVTALFVT

SEQ ID NO: 27495 - protein, 190 aa, Homo sapiens
  REGION 1..190: note = ENSP00000430417
KISDIPIPERAPKHVLFQRFAKIFIGCLAAVTSGMMYALYLSAYHERKFWFSNRQELEREITFQGDSAIYYSYYKDMLKAPSFERGVYELTHNNKTVSLKTINAVQQMSLYPELIASILYQATGSNEIIEPVYFYIGIVFGLQGIYVTALFVTSWLMSGTWLAGMLTVAWFVINSCTDPWYSVGGDNTGY

SEQ ID NO: 27496 - protein, 67 aa, Homo sapiens
  REGION 1..67: note = ENSP00000429559
ATGSNEIIEPVYFYIGIVFGLQGIYVTALFVTSWLMSGTWLAGMLTVAWFVINRAACNLAAGLPYSE

SEQ ID NO: 27497 - protein, 276 aa, Homo sapiens
  REGION 1..276: note = ENSP00000429785
  VARIANT 1: note = Any amino acid
XIEPVYFYIGIVFGLQGIYVTALFVTSWLMSGTWLAGMLTVAWFVINRVDTTRIEYSIPLRENWALPYFACQIAALTGYLKSNLNTYGERFCYLLMSASTYTFMMMWEYSHYLLFLQAISLFLLDTFSVEQSDKLNVKKGSFVAKIIKVINFYLVCTLTITLNIIMKMFVPHKENGHMLKFLEVKFGLNMTKNFTMNWLLCQESLQAPSQDFFLRLTQSSLLPFYILVLIICFLSMLQVIFRRINGKSLKETVTLEDGRIGERPEIIYHVIHTILL

SEQ ID NO: 27498 - protein, 75 aa, Homo sapiens
  REGION 1..75: note = ENSP00000429711
  VARIANT 1: note = Any amino acid
XWIPYVCMLAAFGVCSPELWMTLFKWLRLRTVHPILLALILSMAVPTIIGLSLWKEKASSSCSCVCRESTVNGCD

SEQ ID NO: 27499 - protein, 1025 aa, Homo sapiens
  REGION 1..1025: note = ENSP00000359211
MAPVLSKDSADIESILALNPRTQTHATLCSTSAKKLDKKHWKRNPDKNCFNCEKLENNFDDIKHTTLGERGALREAMRCLKCADAPCQKSCPTNLDIKSFITSIANKNYYGAAKMIFSDNPLGLTCGMVCPTSDLCVGGCNLYATEEGPINIGGLQQFATEVFKAMSIPQIRNPSLPPPEKMSEAYSAKIALFGAGPASISCASFLARLGYSDITIFEKQEYVGGLSTSEIPQFRLPYDVVNFEIELMKDLGVKIICGKSLSVNEMTLSTLKEKGYKAAFIGIGLPEPNKDAIFQGLTQDQGFYTSKDFLPLVAKGSKAGMCACHSPLPSIRGVVIVLGAGDTAFDCATSALRCGARRVFIVFRKGFVNIRAVPEEMELAKEEKCEFLPFLSPRKVIVKGGRIVAMQFVRTEQDETGKWNEDEDQMVHLKADVVISAFGSVLSDPKVKEALSPIKFNRWGLPEVDPETMQTSEAWVFAGGDVVGLANTTVESVNDGKQASWYIHKYVQSQYGASVSAKPELPLFYTPIDLVDISVEMAGLKFINPFGLASATPATSTSMIRRAFEAGWGFALTKTFSLDKDIVTNVSPRIIRGTTSGPMYGPGQSSFLNIELISEKTAAYWCQSVTELKADFPDNIVIASIMCSYNKNDWTELAKKSEDSGADALELNLSCPHGMGERGMGLACGQDPELVRNICRWVRQAVQIPFFAKLTPNVTDIVSIARAAKEGGANGVTATNTVSGLMGLKSDGTPWPAVGIAKRTTYGGVSGTAIRPIALRAVTSIARALPGFPILATGGIDSAESGLQFLHSGASVLQVCSAIQNQDFTVIEDYCTGLKALLYLKSIEELQDWDGQSPATVSHQKGKPVPRIAELMDKKLPSFGPYLEQRKKIIAENKIRLKEQNVAFSPLKRNCFIPKRPIPTIKDVIGKALQYLGTFGELSNVEQVVAMIDEEMCINCGKCYMTCNDSGYQAIQFDPETHLPTITDTCTGCTLCLSVCPIVDCIKMVSRTTPYEPKRGVPLSVNPVC

SEQ ID NO: 27500 - protein, 173 aa, Homo sapiens
  REGION 1..173: note = ENSP00000307107
MAPVLSKDSADIESILALNPRTQTHATLCSTSAKKLDKKHWKRNPDKNCFNCEKLENNFDDIKHTTLGERGALREAMRCLKCADAPCQKSCPTNLDIKSFITSIANKNYYGAAKMIFSDNPLGLTCGMVCPTSDLCVGGCNLYATEEGPINIGGLQQFATETLILAFSLMNHL

SEQ ID NO: 27501 - protein, 570 aa, Homo sapiens
  REGION 1..570: note = ENSP00000381526
MSYQGKKNIPRITSDRLLIKGGRIVNDDQSFYADIYMEDGLIKQIGDNLIVPGGVKTIEANGKMVIPGGIDVHTHFQMPYKGMTTVDDFFQGTKAALAGGTTMIIDHVVPEPESSLTEAYEKWREWADGKSCCDYALHVDITHWNDSVKQEVQNLIKDKGVNSFMVYMAYKDLYQVSNTELYEIFTCLGELGAIAQVHAENGDIIAQEQTRMLEMGITGPEGHVLSRPEELEAEAVFRAITIASQTNCPLYVTKVMSKSAADLISQARKKGNVVFGEPITASLGIDGTHYWSKNWAKAAAFVTSPPLSPDPTTPDYINSLLASGDLQLSGSAHCTFSTAQKAIGKDNFTAIPEGTNGVEERMSVIWDKAVATGKMDENQFVAVTSTNAAKIFNLYPRKGRISVGSDSDLVIWDPDAVKIVSAKNHQSAAEYNIFEGMELRGAPLVVICQGKIMLEDGNLHVTQGAGRFIPCSPFSDYVYKRIKARRKMADLHAVPRGMYDGPVFDLTTTPKGGTPAGSARGSPTRPNPPVRNLHQSGFSLSGTQVDEGVRSASKRIVAPPGGRSNITSLS

SEQ ID NO: 27502 - protein, 684 aa, Homo sapiens
  REGION 1..684: note = ENSP00000343690
MASGRRGWDSSHEDDLPVYLARPGTTDQVPRQKYGGMFCNVEGAFESKTLDFDALSVGQRGAKTPRSGQGSDRGSGSRPGIEGDTPRRGQGREESREPAPASPAPAGVEIRSATGKEVLQNLGPKDKSDRLLIKGGRIVNDDQSFYADIYMEDGLIKQIGDNLIVPGGVKTIEANGKMVIPGGIDVHTHFQMPYKGMTTVDDFFQGTKAALAGGTTMIIDHVVPEPESSLTEAYEKWREWADGKSCCDYALHVDITHWNDSVKQEVQNLIKDKGVNSFMVYMAYKDLYQVSNTELYEIFTCLGELGAIAQVHAENGDIIAQEQTRMLEMGITGPEGHVLSRPEELEAEAVFRAITIASQTNCPLYVTKVMSKSAADLISQARKKGNVVFGEPITASLGIDGTHYWSKNWAKAAAFVTSPPLSPDPTTPDYINSLLASGDLQLSGSAHCTFSTAQKAIGKDNFTAIPEGTNGVEERMSVIWDKAVATGKMDENQFVAVTSTNAAKIFNLYPRKGRISVGSDSDLVIWDPDAVKIVSAKNHQSAAEYNIFEGMELRGAPLVVICQGKIMLEDGNLHVTQGAGRFIPCSPFSDYVYKRIKARRKMADLHAVPRGMYDGPVFDLTTTPKGGTPAGSARGSPTRPNPPVRNLHQSGFSLSGTQVDEGVRSASKRIVAPPGGRSNITSLS

SEQ ID NO: 27503 - protein, 209 aa, Homo sapiens
  REGION 1..209: note = ENSP00000430267
  VARIANT 1: note = Any amino acid
XTSPPLSPDPTTPDYINSLLASGDLQLSGSAHCTFSTAQKAIGKDNFTAIPEGTNGVEERMSVIWDKAVATGKMDENQFVAVTSTNAAKIFNLYPRKGRISVGSDSDLVIWDPDAVKIVSAKNHQSMADLHAVPRGMYDGPVFDLTTTPKGGTPAGSARGSPTRPNPPVRNLHQSGFSLSGTQVDEGVRSASKRIVAPPGGRSNITSLS

SEQ ID NO: 27504 - protein, 75 aa, Homo sapiens
  REGION 1..75: note = ENSP00000428958
ADLISQARKKGNVVFGEPITASLGIDGTHYWSKNWAKAAAFVTSPPLSPDPTTPDYINSLLARPQGKWTKTSSWL

SEQ ID NO: 27505 - protein, 92 aa, Homo sapiens
  REGION 1..92: note = ENSP00000426720
MSYQGKKNIPRITSDRLLIKGGRIVNDDQSFYADIYMEDGLIKQIGDNLIVPGGVKTIEANGKMVIPGGIDVHTHFQMPYKGMTTVDDFFQG

SEQ ID NO: 27506 - protein, 572 aa, Homo sapiens
  REGION 1..572: note = ENSP00000339850
MSFQGKKSIPRITSDRLLIRGGRIVNDDQSFYADVHVEDGLIKQIGENLIVPGGIKTIDAHGLMVLPGGVDVHTRLQMPVLGMTPADDFCQGTKAALAGGTTMILDHVFPDTGVSLLAAYEQWRERADSAACCDYSLHVDITRWHESIKEELEALVKEKGVNSFLVFMAYKDRCQCSDSQMYEIFSIIRDLGALAQVHAENGDIVEEEQKRLLELGITGPEGHVLSHPEEVEAEAVYRAVTIAKQANCPLYVTKVMSKGAADAIAQAKRRGVVVFGEPITASLGTDGSHYWSKNWAKAAAFVTSPPVNPDPTTADHLTCLLSSGDLQVTGSAHCTFTTAQKAVGKDNFALIPEGTNGIEERMSMVWEKCVASGKMDENEFVAVTSTNAAKIFNFYPRKGRVAVGSDADLVIWNPKATKIISAKTHNLNVEYNIFEGVECRGAPAVVISQGRVALEDGKMFVTPGAGRFVPRKTFPDFVYKRIKARNRLAEIHGVPRGLYDGPVHEVMVPAKPGSGAPARASCPGKISVPPVRNLHQSGFSLSGSQADDHIARRTAQKIMAPPGGRSNITSLS

SEQ ID NO: 27507 - protein, 412 aa, Homo sapiens
  REGION 1..412: note = ENSP00000357616
MPVLGMTPADDFCQGTKAALAGGTTMILDHVFPDTGVSLLAAYEQWRERADSAACCDYSLHVDITRWHESIKEELEALVKEKGVNSFLVFMAYKDRCQCSDSQMYEIFSIIRDLGALAQVHAENGDIVEEVEAEAVYRAVTIAKQANCPLYVTKVMSKGAADAIAQAKRRGVVVFGEPITASLGTDGSHYWSKNWAKAAAFVTSPPVNPDPTTADHLTCLLSSGDLQVTGSAHCTFTTAQKAVGKDNFALIPEGTNGIEERMSMVWEKCVASGKMDENEFVAVTSTNAAKIFNFYPRKGRVAVGSDADLVIWNPKATKIISAKTHNLLAEIHGVPRGLYDGPVHEVMVPAKPGSGAPARASCPGKISVPPVRNLHQSGFSLSGSQADDHIARRTAQKIMAPPGGRSNITSLS

SEQ ID NO: 27508 - protein, 446 aa, Homo sapiens
  REGION 1..446: note = ENSP00000377353
MRTLNTSAMDGTGLVVERDFSVRILTACFLSLLILSTLLGNTLVCAAVIRFRHLRSKVTNFFVISLAVSDLLVAVLVMPWKAVAEIAGFWPFGSFCNIWVAFDIMCSTASILNLCVISVDRYWAISSPFRYERKMTPKAAFILISVAWTLSVLISFIPVQLSWHKAKPTSPSDGNATSLAETIDNCDSSLSRTYAISSSVISFYIPVAIMIVTYTRIYRIAQKQIRRIAALERAAVHAKNCQTTTGNGKPVECSQPESSFKMSFKRETKVLKTLSVIMGVFVCCWLPFFILNCILPFCGSGETQPFCIDSNTFDVFVWFGWANSSLNPIIYAFNADFRKAFSTLLGCYRLCPATNNAIETVSINNNGAAMFSSHHEPRGSISKECNLVYLIPHAVGSSEDLKKEEAAGIARPLEKLSPALSVILDYDTDVSLEKIQPITQNGQHPT

SEQ ID NO: 27509 - protein, 414 aa, Homo sapiens
  REGION 1..414: note = ENSP00000278597
MDPLNLSWYDDDLERQNWSRPFNGSDGKADRPHYNYYATLLTLLIAVIVFGNVLVCMAVSREKALQTTTNYLIVSLAVADLLVATLVMPWVVYLEVVGEWKFSRIHCDIFVTLDVMMCTASILNLCAISIDRYTAVAMPMLYNTRYSSKRRVTVMISIVWVLSFTISCPLLFGLNNADQNECIIANPAFVVYSSIVSFYVPFIVTLLVYIKIYIVLRRRRKRVNTKRSSRAFRAHLRAPLKEAARRAQELEMEMLSSTSPPERTRYSPIPPSHHQLTLPDPSHHGLHSTPDSPAKPEKNGHAKDHPKIAKIFEIQTMPNGKTRTSLKTMSRRKLSQQKEKKATQMLAIVLGVFIICWLPFFITHILNIHCDCNIPPVLYSAFTWLGYVNSAVNPIIYTTFNIEFRKAFLKILHC

SEQ ID NO: 27510 - protein, 443 aa, Homo sapiens
  REGION 1..443: note = ENSP00000354859
MDPLNLSWYDDDLERQNWSRPFNGSDGKADRPHYNYYATLLTLLIAVIVFGNVLVCMAVSREKALQTTTNYLIVSLAVADLLVATLVMPWVVYLEVVGEWKFSRIHCDIFVTLDVMMCTASILNLCAISIDRYTAVAMPMLYNTRYSSKRRVTVMISIVWVLSFTISCPLLFGLNNADQNECIIANPAFVVYSSIVSFYVPFIVTLLVYIKIYIVLRRRRKRVNTKRSSRAFRAHLRAPLKGNCTHPEDMKLCTVIMKSNGSFPVNRRRVEAARRAQELEMEMLSSTSPPERTRYSPIPPSHHQLTLPDPSHHGLHSTPDSPAKPEKNGHAKDHPKIAKIFEIQTMPNGKTRTSLKTMSRRKLSQQKEKKATQMLAIVLGVFIICWLPFFITHILNIHCDCNIPPVLYSAFTWLGYVNSAVNPIIYTTFNIEFRKAFLKILHC

SEQ ID NO: 27511 - protein, 442 aa, Homo sapiens
  REGION 1..442: note = ENSP00000441068
MDPLNLSWYDDDLERQNWSRPFNGSDGKADRPHYNYYATLLTLLIAVIVFGNVLVCMAVSREKALQTTTNYLIVSLAVADLLVATLVMPWVVYLEVGEWKFSRIHCDIFVTLDVMMCTASILNLCAISIDRYTAVAMPMLYNTRYSSKRRVTVMISIVWVLSFTISCPLLFGLNNADQNECIIANPAFVVYSSIVSFYVPFIVTLLVYIKIYIVLRRRRKRVNTKRSSRAFRAHLRAPLKGNCTHPEDMKLCTVIMKSNGSFPVNRRRVEAARRAQELEMEMLSSTSPPERTRYSPIPPSHHQLTLPDPSHHGLHSTPDSPAKPEKNGHAKDHPKIAKIFEIQTMPNGKTRTSLKTMSRRKLSQQKEKKATQMLAIVLGVFIICWLPFFITHILNIHCDCNIPPVLYSAFTWLGYVNSAVNPIIYTTFNIEFRKAFLKILHC

SEQ ID NO: 27512 - protein, 443 aa, Homo sapiens; identical to SEQ ID NO: 27510
  REGION 1..443: note = ENSP00000442172

SEQ ID NO: 27513 - protein, 445 aa, Homo sapiens
  REGION 1..445: note = ENSP00000438215
MDPLNLSWYDDDLERQNWSRPFNGSDGKADRPHYNYYATLLTLLIAVIVFGNVLVCMAVSREKALQTTTNYLIVSLAVADLLVATLVMPWVVYLEVVGEWKFSRIHCDIFVTLDVMMCTASILNLCAISIDRYTAVAMPMLYNTRYSSKRRVTVMISIVWVLSFTISCPLLFGLNNADQNECIIANPAFVVYSSIVSFYVPFIVTLLVYIKIYIVLRRRRKRVNTKRSSRAFRAHLRAPLKGNCTHPEDMKLCTVIMKSNGSFPVNRRRVVQEAARRAQELEMEMLSSTSPPERTRYSPIPPSHHQLTLPDPSHHGLHSTPDSPAKPEKNGHAKDHPKIAKIFEIQTMPNGKTRTSLKTMSRRKLSQQKEKKATQMLAIVLGVFIICWLPFFITHILNIHCDCNIPPVLYSAFTWLGYVNSAVNPIIYTTFNIEFRKAFLKILHC

SEQ ID NO: 27514 - protein, 177 aa, Homo sapiens
  REGION 1..177: note = ENSP00000438419
MDPLNLSWYDDDLERQNWSRPFNGSDGKADRPHYNYYATLLTLLIAVIVFGNVLVCMAVSREKALQTTTNYLIVSLAVADLLVATLVMPWVVYLEVVGEWKFSRIHCDIFVTLDVMMCTASILNLCAISIDRYTAVAMPMLYNTRYSSKRRVTVMISIVWVLSFTISCPLLFGLNNA

SEQ ID NO: 27515 - protein, 7 aa, Homo sapiens
  REGION 1..7: note = ENSP00000441474
MDPLNLS

SEQ ID NO: 27516 - protein, 1843 aa, Homo sapiens
  REGION 1..1843: note = ENSP00000434335
MWLVTFLLLLDSLHKARPEDVGTSLYFVNDSLQQLPCTASGYPIPAIRWLKDGRPLPADSRWTKRITGLTISDLRTEDSGTYICEVTNTFGSAEATGILMVIDPLHVTLTPKKLKTGIGSTVILSCALTGSPEFTIRWYRNTELVLPDEAISIRGLSNETLLITSAQKSHSGAYQCFATRKAQTAQDFAIIALEDGTPRIVSSFSEKVVNPGEQFSLMCAAKGAPPPTVTWALDDEPIVRDGSHRTNQYTMSDGTTISHMNVTGPQIRDGGVYRCTARNLVGSAEYQARINVRGPPSIRAMRNITAVAGRDTLINCRVIGYPYYSIKWYKDALLLPDNHRQVVFENGTLKLTDVQKGMDEGEYLCSVLIQPQLSISQSVHVAVKVPPLIQPFEFPPASIGQLLYIPCVVSSGDMPIRITWRKDGQVIISGSGVTIESKEFMSSLQISSVSLKHNGNYTCIASNAAATVSRERQLIVRVPPRFVVQPNNQDGIYGKAGVLNCSVDGYPPPKVMWKHAKGSGNPQQYHPVPLTGRIQILPNSSLLIRHVLEEDIGYYLCQASNGVGTDISKSMFLTVKIPAMITSHPNTTIAIKGHAKELNCTARGERPIIIRWEKGDTVIDPDRVMRYAIATKDNGDEVVSTLKLKPADRGDSVFFSCHAINSYGEDRGLIQLTVQEPPDPPELEIREVKARSMNLRWTQRFDGNSIITGFDIEYKNKSDSWDFKQSTRNISPTINQANIVDLHPASVYSIRMYSFNKIGRSEPSKELTISTEEAAPDGPPMDVTLQPVTSQSIQVTWKAPKKELQNGVIRGYQIGYRENSPGSNGQYSIVEMKATGDSEVYTLDNLKKFAQYGVVVQAFNRAGTGPSSSEINATTLEDVPSQPPENVRALSITSDVAVISWSEPPRSTLNGVLKGYRVIFWSLYVDGEWGEMQNITTTRERVELRGMEKFTNYSVQVLAYTQAGDGVRSSVLYIQTKEDVPGPPAGIKAVPSSASSVVVSWLPPTKPNGVIRKYTIFCSSPGSGQPAPSEYETSPEQLFYRIAHLNRGQQYLLWVAAVTSAGRGNSSEKVTIEPAGKAPAKIISFGGTVTTPWMKDVRLPCNSVGDPAPAVKWTKDSEDSAIPVSMDGHRLIHTNGTLLLRAVKAEDSGYYTCTATNTGGFDTIIVNLLVQVPPDQPRLTVSKTSASSITLTWIPGDNGGSSIRGFVLQYSVDNSEEWKDVFISSSERSFKLDSLKCGTWYKVKLAAKNSVGSGRISEIIEAKTHGREPSFSKDQHLFTHINSTHARLNLQGWNNGGCPITAIVLEYRPKGTWAWQGLRANSSGEVFLTELREATWYELRMRACNSAGCGNETAQFATLDYDGSTIPPIKSAQGEGDDVKKLFTIGCPVILATLGVALLFIVRKKRKEKRLKRLRDAKSLAEMLISKNNRSFDTPVKGPPQGPRLHIDIPRVQLLIEDKEGIKQLGDDKATIPVTDAEFSQAVNPQSFCTGVSLHHPTLIQSTGPLIDMSDIRPGTNPVSRKNVKSAHSTRNRYSSQWTLTKCQASTPARTLTSDWRTVGSQHGVTVTESDSYSASLSQDTDKGRNSMVSTESASSTYEELARAYEHAKLEEQLQHAKFEITECFISDSSSDQMTTGTNENADSMTSMSTPSEPGICRFTASPPKPQDADRGKNVAVPIPHRANKSDYCNLPLYAKSEAFFRKADGREPCPVVPPREASIRNLARTYHTQARHLTLDPASKSLGLPHPGAPAAASTATLPQRTLAMPAPPAGTAPPAPGPTPAEPPTAPSAAPPAPSTEPPRAGGPHTKMGGSRDSLLEMSTSGVGRSQKQGAGAYSKSYTLV

SEQ ID NO: 27517 - protein, 2113 aa, Homo sapiens
  REGION 1..2113: note = ENSP00000315465
MTGAGEPRREEPPPQPSAGLRSRESGAPSAGGWERAERGRGAAARPATGPPPRRIGPLYGMWLVTFLLLLDSLHKARPEDVGTSLYFVNDSLQQVTFSSSVGVVVPCPAAGSPSAALRWYLATGDDIYDVPHIRHVHANGTLQLYPFSPSAFNSFIHDNDYFCTAENAAGKIRSPNIRVKAVFREPYTVRVEDQRSMRGNVAVFKCLIPSSVQEYVSVVSWEKDTVSIIPEHRFFITYHGGLYISDVQKEDALSTYRCITKHKYSGETRQSNGARLSVTDPAESIPTILDGFHSQEVWAGHTVELPCTASGYPIPAIRWLKDGRPLPADSRWTKRITGLTISDLRTEDSGTYICEVTNTFGSAEATGILMVIDPLHVTLTPKKLKTGIGSTVILSCALTGSPEFTIRWYRNTELVLPDEAISIRGLSNETLLITSAQKSHSGAYQCFATRKAQTAQDFAIIALEDGTPRIVSSFSEKVVNPGEQFSLMCAAKGAPPPTVTWALDDEPIVRDGSHRTNQYTMSDGTTISHMNVTGPQIRDGGVYRCTARNLVGSAEYQARINVRGPPSIRAMRNITAVAGRDTLINCRVIGYPYYSIKWYKDALLLPDNHRQVVFENGTLKLTDVQKGMDEGEYLCSVLIQPQLSISQSVHVAVKVPPLIQPFEFPPASIGQLLYIPCVVSSGDMPIRITWRKDGQVIISGSGVTIESKEFMSSLQISSVSLKHNGNYTCIASNAAATVSRERQLIVRVPPRFVVQPNNQDGIYGKAGVLNCSVDGYPPPKVMWKHAKGSGNPQQYHPVPLTGRIQILPNSSLLIRHVLEEDIGYYLCQASNGVGTDISKSMFLTVKIPAMITSHPNTTIAIKGHAKELNCTARGERPIIIRWEKGDTVIDPDRVMRYAIATKDNGDEVVSTLKLKPADRGDSVFFSCHAINSYGEDRGLIQLTVQEPPDPPELEIREVKARSMNLRWTQRFDGNSIITGFDIEYKNKSDSWDFKQSTRNISPTINQANIVDLHPASVYSIRMYSFNKIGRSEPSKELTISTEEAAPDGPPMDVTLQPVTSQSIQVTWKAPKKELQNGVIRGYQIGYRENSPGSNGQYSIVEMKATGDSEVYTLDNLKKFAQYGVVVQAFNRAGTGPSSSEINATTLEDVPSQPPENVRALSITSDVAVISWSEPPRSTLNGVLKGYRVIFWSLYVDGEWGEMQNITTTRERVELRGMEKFTNYSVQVLAYTQAGDGVRSSVLYIQTKEDVPGPPAGIKAVPSSASSVVVSWLPPTKPNGVIRKYTIFCSSPGSGQPAPSEYETSPEQLFYRIAHLNRGQQYLLWVAAVTSAGRGNSSEKVTIEPAGKAPAKIISFGGTVTTPWMKDVRLPCNSVGDPAPAVKWTKDSEDSAIPVSMDGHRLIHTNGTLLLRAVKAEDSGYYTCTATNTGGFDTIIVNLLVQVPPDQPRLTVSKTSASSITLTWIPGDNGGSSIRGFVLQYSVDNSEEWKDVFISSSERSFKLDSLKCGTWYKVKLAAKNSVGSGRISEIIEAKTHGREPSFSKDQHLFTHINSTHARLNLQGWNNGGCPITAIVLEYRPKGTWAWQGLRANSSGEVFLTELREATWYELRMRACNSAGCGNETAQFATLDYDGSTIPPIKSAQGEGDDVKKLFTIGCPVILATLGVALLFIVRKKRKEKRLKRLRDAKSLAEMLISKNNRSFDTPVKGPPQGPRLHIDIPRVQLLIEDKEGIKQLGDDKATIPVTDAEFSQAVNPQSFCTGVSLHHPTLIQSTGPLIDMSDIRPGTNPVSRKNVKSAHSTRNRYSSQWTLTKCQASTPARTLTSDWRTVGSQHGVTVTESDSYSASLSQDTDKGRNSMVSTESASSTYEELARAYEHAKLEEQLQHAKFEITECFISDSSSDQMTTGTNENADSMTSMSTPSEPGICRFTASPPKPQDADRGKNVAVPIPHRANKSDYCNLPLYAKSEAFFRKADGREPCPVVPPREASIRNLARTYHTQARHLTLDPASKSLGLPHPGAPAAASTATLPQRTLAMPAPPAGTAPPAPGPTPAEPPTAPSAAPPAPSTEPPRAGGPHTKMGGSRDSLLEMSTSGVGRSQKQGAGAYSKSYTLV

SEQ ID NO: 27518 - protein, 66 aa, Homo sapiens
  REGION 1..66: note = ENSP00000436387
MTTSAPRRTLPARSGAPTSASKQFSGNPTPSGWRIKGQCVATWPSSSASSPLQCRNMLALYLGRKT

SEQ ID NO: 27519 - protein, 513 aa, Homo sapiens
  REGION 1..513: note = ENSP00000434055
MEVGITIQHAYEKQHPWIDLTSIGFSYVIDFNTMGQINRQTQRQRRVRRRLDLIYPMVTGTLPKAQSWPVSPGPATSPPMSPCSCPQCVLVMSVKAAVVNGSTGPLQLPVTRKNMPPPGVVKLPPLPGSGAKPLDSTGTIRGPLKTAPSQVIRRQASSMPTGTTMGSPASPPGPNSKTGRVALATLNRTNLQRLAIAQSRVLIASGVPTVPVKNLNGSSPVNPALAGITGILMSAAGLPVCLTRPPKLVLHPPPVSKSEIKSIPGVSNTSRKTTKKQAKKGKTPEEVLKKYLQKVRHPPDEDCTICMERLTAPSGYKGPQPTVKPDLVGKLSRCGHVYHIYCLVAMYNNGNKDGSLQCPTCKTIYGVKTGTQPPGKMEYHLIPHSLPGHPDCKTIRIIYSIPPGIQGPEHPNPGKSFSARGFPRHCYLPDSEKGRKVLKLLLVAWDRRLIFAIGTSSTTGESDTVIWNEVHHKTEFGSNLTGHGYPDANYLDNVLAELAAQGISEDSTAQEKD

SEQ ID NO: 27520 - protein, 619 aa, Homo sapiens
  REGION 1..619: note = ENSP00000227451
MLLASAVVVWEWLNEHGRWRPYSPAVSHHIEAVVRAGPRAGGSVVLGQVDSRLAPYIIDLQSMNQFRQDTGTLRPVRRNYYDPSSAPGKGVVWEWENDNGSWTPYDMEVGITIQHAYEKQHPWIDLTSIGFSYVIDFNTMGQINRQTQRQRRVRRRLDLIYPMVTGTLPKAQSWPVSPGPATSPPMSPCSCPQCVLVMSVKAAVVNGSTGPLQLPVTRKNMPPPGVVKLPPLPGSGAKPLDSTGTIRGPLKTAPSQVIRRQASSMPTGTTMGSPASPPGPNSKTGRVALATLNRTNLQRLAIAQSRVLIASGVPTVPVKNLNGSSPVNPALAGITGILMSAAGLPVCLTRPPKLVLHPPPVSKSEIKSIPGVSNTSRKTTKKQAKKGKTPEEVLKKYLQKVRHPPDEDCTICMERLTAPSGYKGPQPTVKPDLVGKLSRCGHVYHIYCLVAMYNNGNKDGSLQCPTCKTIYGVKTGTQPPGKMEYHLIPHSLPGHPDCKTIRIIYSIPPGIQGPEHPNPGKSFSARGFPRHCYLPDSEKGRKVLKLLLVAWDRRLIFAIGTSSTTGESDTVIWNEVHHKTEFGSNLTGHGYPDANYLDNVLAELAAQGISEDSTAQEKD

SEQ ID NO: 27521 - protein, 169 aa, Homo sapiens
  REGION 1..169: note = ENSP00000466351
  VARIANT 1: note = Any amino acid
XKEQRHWDISSSERLDILRDFTNYGLEHWGSDTQGVEKTRRFLLEWLSFLCRYVPVGLLERLPQRINERPPYYLGRDYLETLMASQKAADWIRIRCLGGLELGSCSRGPGVTEGTLQVLGLTSLSTCSPTARCSLGQCPPASPSCRSTRPTRTSSLRLSQGHPGARRVQ

SEQ ID NO: 27522 - protein, 408 aa, Homo sapiens
  REGION 1..408: note = ENSP00000315558
MAEGTAEAPLENGGGGDSGAGALERGVAPIKRQYLTTKEQFHQFLEAKGQEKTCRETELDIRGKLYLAPLTTCGNLPFRRICKRFGADVTCGEMAVCTNLLQGQMSEWALLKRHQCEDIFGVQLEGAFPDTMTKCAELLSRTVEVDFVDINVGCPIDLVYKKGGGCALMNRSTKFQQIVRGMNQVLDVPLTVKIRTGVQERVNLAHRLLPELRDWGVALVTLHGRSREQRYTKLADWQYIEECVQAASPMPLFGNGDILSFEDANRAMQTGVTGIMIARGALLKPWLFTEIKEQRHWDISSSERLDILRDFTNYGLEHWGSDTQGVEKTRRFLLEWLSFLCRYVPVGLLERLPQRINERPPYYLGRDYLETLMASQKAADWIRISEMLLGPVPPSFAFLPKHKANAYK

SEQ ID NO: 27523 - protein, 650 aa, Homo sapiens
  REGION 1..650: note = ENSP00000311977
MAEGTAEAPLENGGGGDSGAGALERGVAPIKRQYLTTKEQFHQFLEAKGQEKTCRETEVGDPAGNELAEPEAKRIRLEDGQTADGQTEEAAEPGEQLQTQKRARGQNKGRPHVKPTNYDKNRLCPSLIQESAAKCFFGDRCRFLHDVGRYLETKPADLGPRCVLFETFGRCPYGVTCRFAGAHLRPEGQNLVQEELAARGTQPPSIRNGLDKALQQQLRKREVRFERAEQALRRFSQGPTPAAAVPEGTAAEGAPRQENCGAQQVPAGPGTSTPPSSPVRTCGPLTDEDVVRLRPCEKKRLDIRGKLYLAPLTTCGNLPFRRICKRFGADVTCGEMAVCTNLLQGQMSEWALLKRHQCEDIFGVQLEGAFPDTMTKCAELLSRTVEVDFVDINVGCPIDLVYKKGGGCALMNRSTKFQQIVRGMNQVLDVPLTVKIRTGVQERVNLAHRLLPELRDWGVALVTLHGRSREQRYTKLADWQYIEECVQAASPMPLFGNGDILSFEDANRAMQTGVTGIMIARGALLKPWLFTEIKEQRHWDISSSERLDILRDFTNYGLEHWGSDTQGVEKTRRFLLEWLSFLCRYVPVGLLERLPQRINERPPYYLGRDYLETLMASQKAADWIRISEMLLGPVPPSFAFLPKHKANAYK

SEQ ID NO: 27524 - protein, 139 aa, Homo sapiens
  REGION 1..139: note = ENSP00000468075
  VARIANT 1: note = Any amino acid
XGVQLEGAFPDTMTKCAELLSRTVEVDFVDINVGCPIDLVYKKGGGCALMNRSTKFQQIVRGMNQVLDVPLTVKIRTGVQERVNLAHRLLPELRDWGVALVTPGSLGLFLSASHSLPPTLRGGFSPSSTAALGSSATPS

SEQ ID NO: 27525 - protein, 171 aa, Homo sapiens
  REGION 1..171: note = ENSP00000467987
CGNLPFRRICKRFGADVTCGEMAVCTNLLQGQMSEWALLKRHQCEDIFGVQLEGAFPDTMTKCAELLSRTVEVDFVDINVGCPIDLVYKKGGGCALMNRSTKFQQIVRGMNQVLDVPLTVKIRTGVQERVNLAHRLLPELRDWGVALVTEMGTSCHLRMPTAPCRLVSPGS

SEQ ID NO: 27526 - protein, 217 aa, Homo sapiens
  REGION 1..217: note = ENSP00000465369
MAEGTAEAPLENGGGGDSGAGALERGVAPIKRQYLTTKEQFHQFLEAKGQEKTCRETEVGDPAGNELAEPEAKRIRLEDGQTADGQTEEAAEPGEQLQTQKRARGQNKGRPHVKPTNYDKNRTWCRRSWRPAGPSPRPSATAWTKPCSSSCGSARSASSELSRPCAGSARAPHPLPLSPRARQPRALPGRKTVVPSRSPQGRALAPLPAAPCGPAGP

SEQ ID NO: 27527 - protein, 77 aa, Homo sapiens
  REGION 1..77: note = ENSP00000467302
TEVGDPAGNELAEPEAKRIRLEDGQTADGQTEEAAEPGEQLQTQKRARGQNKGRPHVKPTNYDKNRLCPSLIQAIGC

SEQ ID NO: 27528 - protein, 37 aa, Homo sapiens
  REGION 1..37: note = ENSP00000468233
MREGHHVHARADTSPPRSSFTNSWKPKGRRRLAGKPR

SEQ ID NO: 27529 - protein, 367 aa, Homo sapiens
  REGION 1..367: note = ENSP00000239223
MVMEVGTLDAGGLRALLGERAAQCLLLDCRSFFAFNAGHIAGSVNVRFSTIVRRRAKGAMGLEHIVPNAELRGRLLAGAYHAVVLLDERSAALDGAKRDGTLALAAGALCREARAAQVFFLKGGYEAFSASCPELCSKQSTPMGLSLPLSTSVPDSAESGCSSCSTPLYDQGGPVEILPFLYLGSAYHASRKDMLDALGITALINVSANCPNHFEGHYQYKSIPVEDNHKADISSWFNEAIDFIDSIKNAGGRVFVHCQAGISRSATICLAYLMRTNRVKLDEAFEFVKQRRSIISPNFSFMGQLLQFESQVLAPHCSAEAGSPAMAVLDRGTSTTTVFNFPVSIPVHSTNSALSYLQSPITTSPSC

SEQ ID NO: 27530 - protein, 665 aa, Homo sapiens
  REGION 1..665: note = ENSP00000298573
MAHEMIGTQIVTERLVALLESGTEKVLLIDSRPFVEYNTSHILEAININCSKLMKRRLQQDKVLITELIQHSAKHKVDIDCSQKVVVYDQSSQDVASLSSDCFLTVLLGKLEKSFNSVHLLAGGFAEFSRCFPGLCEGKSTLVPTCISQPCLPVANIGPTRILPNLYLGCQRDVLNKELMQQNGIGYVLNASNTCPKPDFIPESHFLRVPVNDSFCEKILPWLDKSVDFIEKAKASNGCVLVHCLAGISRSATIAIAYIMKRMDMSLDEAYRFVKEKRPTISPNFNFLGQLLDYEKKIKNQTGASGPKSKLKLLHLEKPNEPVPAVSEGGQKSETPLSPPCADSATSEAAGQRPVHPASVPSVPSVQPSLLEDSPLVQALSGLHLSADRLEDSNKLKRSFSLDIKSVSYSASMAASLHGFSSSEDALEYYKPSTTLDGTNKLCQFSPVQELSEQTPETSPDKEEASIPKKLQTARPSDSQSKRLHSVRTSSSGTAQRSLLSPLHRSGSVEDNYHTSFLFGLSTSQQHLTKSAGLGLKGWHSDILAPQTSTPSLTSSWYFATESSHFYSASAIYGGSASYSAYSCSQLPTCGDQVYSVRRRQKPSDRADSRRSWHEESPFEKQFKRRSCQMEFGESIMSENRSREELGKVGSQSSFSGSMEIIEVS

SEQ ID NO: 27531 - protein, 25 aa, Homo sapiens
  REGION 1..25: note = ENSP00000443039
MAHEMIGTQIVTERLVALLESGTEK

SEQ ID NO: 27532 - protein, 6 aa, Homo sapiens
  REGION 1..6: note = ENSP00000441250
MAHEMI

SEQ ID NO: 27533 - protein, 143 aa, Homo sapiens
  REGION 1..143: note = ENSP00000228862
MAHEMIGTQIVTERLVALLESGTEKVLLIDSRPFVEYNTSHILEAININCSKLMKRRLQQDKVLITELIQHSAKHKVDIDCSQKVVVYDQSSQDVASLSSDCFLTVLLGKLEKSFNSVHLLAGADAAEWDWLCVKCQQYLSKA

SEQ ID NO: 27534 - protein, 665 aa, Homo sapiens; identical to SEQ ID NO: 27530
  REGION 1..665: note = ENSP00000487512

SEQ ID NO: 27535 - protein, 143 aa, Homo sapiens; identical to SEQ ID NO: 27533
  REGION 1..143: note = ENSP00000487034

SEQ ID NO: 27536 - protein, 25 aa, Homo sapiens
  REGION 1..25: note = ENSP00000485919
MAHEMIGTQIVTERLVALLESGTEK

SEQ ID NO: 27537 - protein, 6 aa, Homo sapiens
  REGION 1..6: note = ENSP00000487493
MAHEMI

SEQ ID NO: 27538 - protein, 75 aa, Homo sapiens
  REGION 1..75: note = ENSP00000474082
MLEGVKYLCIPAADSPSQNLTRHFKESIKFIHECRLRGESCLVHCLAGVSRSVTLVIAYIMTVTDFGWEDALHTV

SEQ ID NO: 27539 - protein, 184 aa, Homo sapiens
  REGION 1..184: note = ENSP00000345281
MGNGMNKILPGLYIGNFKDARDAEQLSKNKVTHILSVHDSARPMLEGVKYLCIPAADSPSQNLTRHFKESIKFIHECRLRGESCLVHCLAGVSRSVTLVIAYIMTVTDFGWEDALHTVRAGRSCANPNVGFQRQLQEFEKHEVHQYRQWLKEEYGESPLQDAEEAKNILAAPGILKFWAFLRRL

SEQ ID NO: 27540 - protein, 102 aa, Homo sapiens
  REGION 1..102: note = ENSP00000474646
MTVTDFGWEDALHTVRAGRSCANPNVGFQRQLQEFEKHEVHQYRQWLKEEYGESPLQDAEEAKNILGKYKEQGRTEPQPGARRWSSFPALAPLTYDNYTTET

SEQ ID NO: 27541 - protein, 102 aa, Homo sapiens; identical to SEQ ID NO: 27540
  REGION 1..102: note = ENSP00000474827

SEQ ID NO: 27542 - protein, 18 aa, Homo sapiens
  REGION 1..18: note = ENSP00000474450
MPCTPCVLGDPVPTPTWA

SEQ ID NO: 27543 - protein, 54 aa, Homo sapiens
  REGION 1..54: note = ENSP00000475106
MGNGMNKILPGLYIGNFKDARDAEQLSKNKVTHILSVHDSARPMLEDKTFQRKY

SEQ ID NO: 27544 - protein, 205 aa, Homo sapiens
  REGION 1..205: note = ENSP00000397459
MGNGMNKILPGLYIGNFKDARDAEQLSKNKVTHILSVHDSARPMLEGVKYLCIPAADSPSQNLTRHFKESIKFIHECRLRGESCLVHCLAGVSRSVTLVIAYIMTVTDFGWEDALHTVRAGRSCANPNVGFQRQLQEFEKHEVHQYRQWLKEEYGESPLQDAEEAKNILGKYKEQGRTEPQPGARRWSSFPALAPLTYDNYTTET

SEQ ID NO: 27545 - protein, 46 aa, Homo sapiens
  REGION 1..46: note = ENSP00000475061
MTVTDFGWEDALHTVRAGRSCANPNVGFQRQLQEFEKHEVHQVSSS

SEQ ID NO: 27546 - protein, 46 aa, Homo sapiens; identical to SEQ ID NO: 27545
  REGION 1..46: note = ENSP00000474000

SEQ ID NO: 27547 - protein, 54 aa, Homo sapiens; identical to SEQ ID NO: 27543
  REGION 1..54: note = ENSP00000474330

SEQ ID NO: 27548 - protein, 102 aa, Homo sapiens; identical to SEQ ID NO: 27540
  REGION 1..102: note = ENSP00000474505

SEQ ID NO: 27549 - protein, 211 aa, Homo sapiens
  REGION 1..211: note = ENSP00000256261
MCPGNWLWASMTFMARFSRSSSRSPVRTRGTLEEMPTVQHPFLNVFELERLLYTGKTACNHADEVWPGLYLGDQDMANNRRELRRLGITHVLNASHSRWRGTPEAYEGLGIRYLGVEAHDSPAFDMSIHFQTAADFIHRALSQPGGKILVHCAVGVSRSATLVLAYLMLYHHLTLVEAIKKVKDHRGIIPNRGFLRQLLALDRRLRQGLEA

SEQ ID NO: 27550 - protein, 211 aa, Homo sapiens; identical to SEQ ID NO: 27549
  REGION 1..211: note = ENSP00000429176

SEQ ID NO: 27551 - protein, 145 aa, Homo sapiens
  REGION 1..145: note = ENSP00000430922
MCPGNWLWASMTFMARFSRSSSRSPVRTRGTLEEMPTVQHPFLNVFELERLLYTGKTACNHADEVWPGLYLGDQDMANNRRELRRLGITHVLNASHSRWRGTPEAYEGLGIRYLGVEAHDSPAFDMSIHFQTAADFIHRALSQPG

SEQ ID NO: 27552 - protein, 384 aa, Homo sapiens
  REGION 1..384: note = ENSP00000358596
MKVTSLDGRQLRKMLRKEAAARCVVLDCRPYLAFAASNVRGSLNVNLNSVVLRRARGGAVSARYVLPDEAARARLLQEGGGGVAAVVVLDQGSRHWQKLREESAARVVLTSLLACLPAGPRVYFLKGGYETFYSEYPECCVDVKPISQEKIESERALISQCGKPVVNVSYRPAYDQGGPVEILPFLYLGSAYHASKCEFLANLHITALLNVSRRTSEACATHLHYKWIPVEDSHTADISSHFQEAIDFIDCVREKGGKVLVHCEAGISRSPTICMAYLMKTKQFRLKEAFDYIKQRRSMVSPNFGFMGQLLQYESEILPSTPNPQPPSCQGEAAGSSLIGHLQTLSPDMQGAYCTFPASVLAPVPTHSTVSELSRSPVATATSC

SEQ ID NO: 27553 - protein, 152 aa, Homo sapiens
  REGION 1..152: note = ENSP00000367844
MEEYHRHCDEVGFNAEEAHNIVKECVDGVLGGEDYNHNNINQWTASIVEQSLTHLVKLGKAYKYIVTCAVVQKSAYGFHTASSCFWDTTSDGTCTVRWENRTMNCGVLLCRPGWSAVMQFRLTATSASQVQVILLPQPPEYLELQAHAITPG

SEQ ID NO: 27554 - protein, 116 aa, Homo sapiens
  REGION 1..116: note = ENSP00000367841
MEEYHRHCDEVGFNAEEAHNIVKECVDGVLGGEDYNHNNINQWTASIVEQSLTHLVKLGKAYKYIVTCAVVQKSAYGFHTASSCFWDTTSDGTCTVRWENRTMNCIVNVFAIAIVL

SEQ ID NO: 27555 - protein, 122 aa, Homo sapiens
  REGION 1..122: note = ENSP00000402695
MARSLGVLVALPFPLPVGFNAEEAHNIVKECVDGVLGGEDYNHNNINQWTASIVEQSLTHLVKLGKAYKYIVTCAVVQKSAYGFHTASSCFWDTTSDGTCTVRWENRTMNCIVNVFAIAIVL

SEQ ID NO: 27556 - protein, 629 aa, Homo sapiens
  REGION 1..629: note = ENSP00000469863
MAVPPGHGPFSGFPGPQEHTQVLPDVRLLPRRLPLAFRDATSAPLRKLSVDLIKTYKHINEVYYAKKKRRAQQAPPQDSSNKKEKKVLNHGYDDDNHDYIVRSGERWLERYEIDSLIGKGSFGQVVKAYDHQTQELVAIKIIKNKKAFLNQAQIELRLLELMNQHDTEMKYYIVHLKRHFMFRNHLCLVFELLSYNLYDLLRNTHFRGVSLNLTRKLAQQLCTALLFLATPELSIIHCDLKPENILLCNPKRSAIKIVDFGSSCQLGQRIYQYIQSRFYRSPEVLLGTPYDLAIDMWSLGCILVEMHTGEPLFSGSNEVDQMNRIVEVLGIPPAAMLDQAPKARKYFERLPGGGWTLRRTKELRKDYQGPGTRRLQEVLGVQTGGPGGRRAGEPGHSPADYLRFQDLVLRMLEYEPAARISPLGALQHGFFRRTADEATNTGPAGSSASTSPAPLDTCPSSSTASSISSSGGSSGSSSDNRTYRYSNRYCGGPGPPITDCEMNSPQVPPSQPLRPWAGGDVPHKTHQAPASASSLPGTGAQLPPQPRYLGRPPSPTSPPPPELMDVSLVGGPADCSPPHPAPAPQHPAASALRTRMTGGRPPLPPPDDPATLGPHLGLRGVPQSTAASS

SEQ ID NO: 27557 - protein, 629 aa, Homo sapiens; identical to SEQ ID NO: 27556
  REGION 1..629: note = ENSP00000312789

SEQ ID NO: 27558 - protein, 601 aa, Homo sapiens
  REGION 1..601: note = ENSP00000472941
MAVPPGHGPFSGFPGPQEHTQVLPDVRLLPRRLPLAFRDATSAPLRKLSVDLIKTYKHINEVYYAKKKRRAQQAPPQDSSNKKEKKVLNHGYDDDNHDYIVRSGERWLERYEIDSLIGKGSFGQVVKAYDHQTQELVAIKIIKNKKAFLNQAQIELRLLELMNQHDTEMKYYIVHLKRHFMFRNHLCLVFELLSYNLYDLLRNTHFRGVSLNLTRKLAQQLCTALLFLATPELSIIHCDLKPENILLCNPKRSAIKIVDFGSSCQLGQRIYQYIQSRFYRSPEVLLGTPYDLAIDMWSLGCILVEMHTGEPLFSGSNEVDQMNRIVEVLGIPPAAMLDQAPKARKYFERLPGGGWTLRRTKELRKDYQGPGTRRLQEDLVLRMLEYEPAARISPLGALQHGFFRRTADEATNTGPAGSSASTSPAPLDTCPSSSTASSISSSGGSSGSSSDNRTYRYSNRYCGGPGPPITDCEMNSPQVPPSQPLRPWAGGDVPHKTHQAPASASSLPGTGAQLPPQPRYLGRPPSPTSPPPPELMDVSLVGGPADCSPPHPAPAPQHPAASALRTRMTGGRPPLPPPDDPATLGPHLGLRGVPQSTAASS

SEQ ID NO: 27559 - protein, 589 aa, Homo sapiens
  REGION 1..589: note = ENSP00000403182
MAVPPGHGPFSGFPGPQEHTQVLPDVRLLPRRLPLAFRDATSAPLRKLSVDLIKTYKHINEVYYAKKKRRAQQAPPQDSSNKKEKKVLNHGYDDDNHDYIVRSGERWLERYEIDSLIGKGSFGQVVKAYDHQTQELVAIKIIKNKKAFLNQAQIELRLLELMNQHDTEMKYYIVHLKRHFMFRNHLCLVFELLSYNLYDLLRNTHFRGVSLNLTRKLAQQLCTALLFLATPELSIIHCDLKPENILLCNPKRSAIKIVDFGSSCQLGQRIYQYIQSRFYRSPEVLLGTPYDLAIDMWSLGCILVEMHTGEPLFSGSNEVDQMNRIVEVLGIPPAAMLDQAPKARKYFERLPGGGWTLRRTKELRKDLVLRMLEYEPAARISPLGALQHGFFRRTADEATNTGPAGSSASTSPAPLDTCPSSSTASSISSSGGSSGSSSDNRTYRYSNRYCGGPGPPITDCEMNSPQVPPSQPLRPWAGGDVPHKTHQAPASASSLPGTGAQLPPQPRYLGRPPSPTSPPPPELMDVSLVGGPADCSPPHPAPAPQHPAASALRTRMTGGRPPLPPPDDPATLGPHLGLRGVPQSTAASS

SEQ ID NO: 27560 - protein, 172 aa, Homo sapiens
  REGION 1..172: note = ENSP00000471609
MAVPPGHGPFSGFPGPQEHTQVLPDVRLLPRRLPLAFRDATSAPLRKLSVDLIKTYKHINEVYYAKKKRRAQQAPPQDSSNKKEKKVLNHGYDDDNHDYIVRSGERWLERYEIDSLIGKGSFGQVVKAYDHQTQELVAIKIIKNKKAFLNQAQIELRLLELMNQHDTEMKYY

SEQ ID NO: 27561 - protein, 137 aa, Homo sapiens
  REGION 1..137: note = ENSP00000472861
MAVPPGHGPFSGFPGPQEHTQVLPDVRLLPRRLPLAFRDATSAPLRKLSVDLIKTYKHINEVYYAKKKRRAQQAPPQDSSNKKEKKVLNHGYDDDNHDYIVRSGERWLERYEIDSLIGKGSFGQVWDTPHHPDPRPH

SEQ ID NO: 27562 - protein, 601 aa, Homo sapiens; identical to SEQ ID NO: 27558
  REGION 1..601: note = ENSP00000221803

SEQ ID NO: 27563 - protein, 629 aa, Homo sapiens; identical to SEQ ID NO: 27556
  REGION 1..629: note = ENSP00000486377

SEQ ID NO: 27564 - protein, 629 aa, Homo sapiens; identical to SEQ ID NO: 27556
  REGION 1..629: note = ENSP00000485915

SEQ ID NO: 27565 - protein, 601 aa, Homo sapiens; identical to SEQ ID NO: 27558
  REGION 1..601: note = ENSP00000486839

SEQ ID NO: 27566 - protein, 601 aa, Homo sapiens; identical to SEQ ID NO: 27558
  REGION 1..601: note = ENSP00000487313

SEQ ID NO: 27567 - protein, 589 aa, Homo sapiens; identical to SEQ ID NO: 27559
  REGION 1..589: note = ENSP00000487539

SEQ ID NO: 27568 - protein, 172 aa, Homo sapiens; identical to SEQ ID NO: 27560
  REGION 1..172: note = ENSP00000486913

SEQ ID NO: 27569 - protein, 137 aa, Homo sapiens; identical to SEQ ID NO: 27561
  REGION 1..137: note = ENSP00000486264

SEQ ID NO: 27570 - protein, 634 aa, Homo sapiens
  REGION 1..634: note = ENSP00000439697
MQLLPPPIRTGTKTQMDAKKPRKCDLTPFLVLKARKKQKFTSAKVGSKLSVQIQKPPSNIKNSRMTQVFHKNTSVTSLPFVDTKGKKNTVSFPHISKKVLLKSSLLYQENQAHNQMPASELKASEIPFHPSIKTQDPKAEEKSPKKQKVTLTAAEALKLFKNQLSPYEQSEILGYAELWFLGLEAKKLDTAPEKFSKTSFDDEHGFYLKVLHDHIAYRYEVLETIGKGSFGQVAKCLDHKNNELVALKIIRNKKRFHQQALMELKILEALRKKDKDNTYNVVHMKDFFYFRNHFCITFELLGINLYELMKNNNFQGFSLSIVRRFTLSVLKCLQMLSVEKIIHCDLKPENIVLYQKGQASVKVIDFGSSCYEHQKVYTYIQSRFYRSPEVILGHPYDVAIDMWSLGCITAELYTGYPLFPGENEVEQLACIMEVLGLPPAGFIQTASRRQTFFDSKGFPKNITNNRGKKRYPDSKDLTMVLKTYDTSFLDFLRRCLVWEPSLRMTPDQALKHAWIHQSRNLKPQPRPQTLRKSNSFFPSETRKDKVQGCHHSSRKDEITKETTEKTKDSPTKHVQHSGDQQDCLQHGADTVQLPQLVDAPKKSEAAVGAEVSMTSPGQSKNFSLKNTNVLPPIV

SEQ ID NO: 27571 - protein, 68 aa, Homo sapiens
  REGION 1..68: note = ENSP00000441996
MQLLPPPIRTGTKTQMDAKKPRKCDLTPFLVLKARKKQKFTSAKGPTLSEIYMEETRRSQLRKQENRL

SEQ ID NO: 27572 - protein, 59 aa, Homo sapiens
  REGION 1..59: note = ENSP00000444842
MQLLPPPIRTGTKTQMDAKKPRKCDLTPFLVLKARKKQKFTSAKEETRRSQLRKQENRL

SEQ ID NO: 27573 - protein, 43 aa, Homo sapiens
  REGION 1..43: note = ENSP00000439168
MQLLPPPIRTGTKLKWRLGKSRRPFSGKVQTVETTNENVLCLA

SEQ ID NO: 27574 - protein, 520 aa, Homo sapiens
  REGION 1..520: note = ENSP00000441755
MPASELKASEIPFHPSIKTQDPKAEEKSPKKQKVTLTAAEALKLFKNQLSPYEQSEILGYAELWFLGLEAKKLDTAPEKFSKTSFDDEHGFYLKVLHDHIAYRYEVLETIGKGSFGQVAKCLDHKNNELVALKIIRNKKRFHQQALMELKILEALRKKDKDNTYNVVHMKDFFYFRNHFCITFELLGINLYELMKNNNFQGFSLSIVRRFTLSVLKCLQMLSVEKIIHCDLKPENIVLYQKGQASVKVIDFGSSCYEHQKVYTYIQSRFYRSPEVILGHPYDVAIDMWSLGCITAELYTGYPLFPGENEVEQLACIMEVLGLPPAGFIQTASRRQTFFDSKGFPKNITNNRGKKRYPDSKDLTMVLKTYDTSFLDFLRRCLVWEPSLRMTPDQALKHAWIHQSRNLKPQPRPQTLRKSNSFFPSETRKDKVQGCHHSSRKADEITKETTEKTKDSPTKHVQHSGDQQDCLQHGADTVQLPQLVDAPKKSEAAVGAEVSMTSPGQSKNFSLKNTNVLPPIV

SEQ ID NO: 27575 - protein, 120 aa, Homo sapiens
  REGION 1..120: note = ENSP00000438769
  VARIANT 1: note = Any amino acid
XSKGFPKNITNNRGKKRYPDSKDLTMVLKTYDTSFLDFLRRCLVWEPSLRMTPDQALKHAWIHQSRNLKPQPRPQTLRKSNSFFPSETRKDKVQGCHHSSRKGTACQITSPSPTVRELIF

SEQ ID NO: 27576 - protein, 520 aa, Homo sapiens; identical to SEQ ID NO: 27574
  REGION 1..520: note = ENSP00000010132

SEQ ID NO: 27577 - protein, 2097 aa, Homo sapiens
  REGION 1..2097: note = ENSP00000387137
MLRVFILYAENVHTPDTDISDAYCSAVFAGVKKRTKVIKNSVNPVWNEGFEWDLKGIPLDQGSELHVVVKDHETMGRNRFLGEAKVPLREVLATPSLSASFNAPLLDTKKQPTGASLVLQVSYTPLPGAVPLFPPPTPLEPSPTLPDLDVVAGGGQSRAETWSLLSDSTMDTRYSGKKWPAPTDTGGEEDTEDQGLTGDEAEPFLDQSGGPGAPTTPRKLPSRPPPHYPGIKRKRSAPTSRKLLSDKPQDFQIRVQVIEGRQLPGVNIKPVVKVTAAGQTKRTRIHKGNSPLFNETLFFNLFDSPGELFDEPIFITVVDSRSLRTDALLGEFRMDVGTIYREPRHAYLRKWLLLSDPDDFSAGARGYLKTSLCVLGPGDEAPLERKDPSEDKEDIESNLLRPTGVALRGAHFCLKVFRAEDLPQMDDAVMDNVKQIFGFESNKKNLVDPFVEVSFAGKMLCSKILEKTANPQWNQNITLPAMFPSMCEKMRIRIIDWDRLTHNDIVATTYLSMSKISAPGGEIEVDDYLGFLPTFGPCYINLYGSPREFTGFPDPYTELNTGKGEGVAYRGRLLLSLETKLVEHSEQKVEDLPADDILRVEKYLRRRKYSLFAAFYSATMLQDVDDAIQFEVSIGNYGNKFDMTCLPLASTTQYSRAVFDGCHYYYLPWGNVKPVVVLSSYWEDISHRIETQNQLLGIADRLEAGLEQVHLALKAQCSTEDVDSLVAQLTDELIAGCSQPLGDIHETPSATHLDQYLYQLRTHHLSQITEAALALKLGHSELPAALEQAEDWLLRLRALAEEPQNSLPDIVIWMLQGDKRVAYQRVPAHQVLFSRRGANYCGKNCGKLQTIFLKYPMEKVPGARMPVQIRVKLWFGLSVDEKEFNQFAEGKLSVFAETYENETKLALVGNWGTTGLTYPKFSDVTGKIKLPKDSFRPSAGWTWAGDWFVCPEKTLLHDMDAGHLSFVEEVFENQTRLPGGQWIYMSDNYTDVNGEKVLPKDDIECPLGWKWEDEEWSTDLNRAVDEQGWEYSITIPPERKPKHWVPAEKMYYTHRRRRWVRLRRRDLSQMEALKRHRQAEAEGEGWEYASLFGWKFHLEYRKTDAFRRRRWRRRMEPLEKTGPAAVFALEGALGGVMDDKSEDSMSVSTLSFGVNRPTISCIFDYGNRYHLRCYMYQARDLAAMDKDSFSDPYAIVSFLHQSQKTVVVKNTLNPTWDQTLIFYEIEIFGEPATVAEQPPSIVVELYDHDTYGADEFMGRCICQPSLERMPRLAWFPLTRGSQPSGELLASFELIQREKPAIHHIPGFEVQETSRILDESEDTDLPYPPPQREANIYMVPQNIKPALQRTAIEILAWGLRNMKSYQLANISSPSLVVECGGQTVQSCVIRNLRKNPNFDICTLFMEVMLPREELYCPPITVKVIDNRQFGRRPVVGQCTIRSLESFLCDPYSAESPSPQGGPDDVSLLSPGEDVLIDIDDKEPLIPIQEEEFIDWWSKFFASIGEREKCGSYLEKDFDTLKVYDTQLENVEAFEGLSDFCNTFKLYRGKTQEETEDPSVIGEFKGLFKIYPLPEDPAIPMPPRQFHQLAAQGPQECLVRIYIVRAFGLQPKDPNGKCDPYIKISIGKKSVSDQDNYIPCTLEPVFGKMFELTCTLPLEKDLKITLYDYDLLSKDEKIGETVVDLENRLLSKFGARCGLPQTYCVSGPNQWRDQLRPSQLLHLFCQQHRVKAPVYRTDRVMFQDKEYSIEEIEAGRIPNPHLGPVEERLALHVLQQQGLVPEHVESRPLYSPLQPDIEQGKLQMWVDLFPKALGRPGPPFNITPRRARRFFLRCIIWNTRDVILDDLSLTGEKMSDIYVKGWMIGFEEHKQKTDVHYRSLGGEGNFNWRFIFPFDYLPAEQVCTIAKKDAFWRLDKTESKIPARVVFQIWDNDKFSFDDFLGSLQLDLNRMPKPAKTAKKCSLDQLDDAFHPEWFVSLFEQKTVKGWWPCVAEEGEKKILAGKLEMTLEIVAESEHEERPAGQGRDEPNMNPKLEDPRRPDTSFLWFTSPYKTMKFILWRRFRWAIILFIILFILLLFLAIFIYAFPNYAAMKLVKPFS

SEQ ID NO: 27578 - protein, 2118 aa, Homo sapiens
  REGION 1..2118: note = ENSP00000386547
MLRVFILYAENVHTPDTDISDAYCSAVFAGVKKRTKVIKNSVNPVWNEGFEWDLKGIPLDQGSELHVVVKDHETMGRNRFLGEAKVPLREVLATPSLSASFNAPLLDTKKQPTGASLVLQVSYTPLPGAVPLFPPPTPLEPSPTLPDLDVVAGGGQSRAETWSLLSDSTMDTRYSGKKWPAPTDTGGEEDTEDQGLTGDEAEPFLDQSGGPGAPTTPRKLPSRPPPHYPGIKRKRSAPTSRKLLSDKPQDFQIRVQVIEGRQLPGVNIKPVVKVTAAGQTKRTRIHKGNSPLFNETLFFNLFDSPGELFDEPIFITVVDSRSLRTDALLGEFRMDVGTIYREPRHAYLRKWLLLSDPDDFSAGARGYLKTSLCVLGPGDEAPLERKDPSEDKEDIESNLLRPTGVALRGAHFCLKVFRAEDLPQMDDAVMDNVKQIFGFESNKKNLVDPFVEVSFAGKMLCSKILEKTANPQWNQNITLPAMFPSMCEKMRIRIIDWDRLTHNDIVATTYLSMSKISAPGGEIEVDDYLGFLPTFGPCYINLYGSPREFTGFPDPYTELNTGKGEGVAYRGRLLLSLETKLVEHSEQKVEDLPADDILRVEKYLRRRKYSLFAAFYSATMLQDVDDAIQFEVSIGNYGNKFDMTCLPLASTTQYSRAVFDGCHYYYLPWGNVKPVVVLSSYWEDISHRIETQNQLLGIADRLEAGLEQVHLALKAQCSTEDVDSLVAQLTDELIAGCSQPLGDIHETPSATHLDQYLYQLRTHHLSQITEAALALKLGHSELPAALEQAEDWLLRLRALAEEPQNSLPDIVIWMLQGDKRVAYQRVPAHQVLFSRRGANYCGKNCGKLQTIFLKYPMEKVPGARMPVQIRVKLWFGLSVDEKEFNQFAEGKLSVFAETYENETKLALVGNWGTTGLTYPKFSDVTGKIKLPKDSFRPSAGWTWAGDWFVCPEKTLLHDMDAGHLSFVEEVFENQTRLPGGQWIYMSDNYTDVNGEKVLPKDDIECPLGWKWEDEEWSTDLNRAVDEQGWEYSITIPPERKPKHWVPAEKMYYTHRRRRWVRLRRRDLSQMEALKRHRQAEAEGEGWEYASLFGWKFHLEYRKTDAFRRRRWRRRMEPLEKTGPAAVFALEGALGGVMDDKSEDSMSVSTLSFGVNRPTISCIFDYGNRYHLRCYMYQARDLAAMDKDSFSDPYAIVSFLHQSQKTVVVKNTLNPTWDQTLIFYEIEIFGEPATVAEQPPSIVVELYDHDTYGADEFMGRCICQPSLERMPRLAWFPLTRGSQPSGELLASFELIQREKPAIHHIPGFEVQETSRILDESEDTDLPYPPPQREANIYMVPQNIKPALQRTAIEILAWGLRNMKSYQLANISSPSLVVECGGQTVQSCVIRNLRKNPNFDICTLFMEVMLPREELYCPPITVKVIDNRQFGRRPVVGQCTIRSLESFLCDPYSAESPSPQGGPDDVSLLSPGEDVLIDIDDKEPLIPIQLADGLSSLAPTNTASPPSSPHEEEFIDWWSKFFASIGEREKCGSYLEKDFDTLKVYDTQLENVEAFEGLSDFCNTFKLYRGKTQEETEDPSVIGEFKGLFKIYPLPEDPAIPMPPRQFHQLAAQGPQECLVRIYIVRAFGLQPKDPNGKCDPYIKISIGKKSVSDQDNYIPCTLEPVFGKMFELTCTLPLEKDLKITLYDYDLLSKDEKIGETVVDLENRLLSKFGARCGLPQTYCVSGPNQWRDQLRPSQLLHLFCQQHRVKAPVYRTDRVMFQDKEYSIEEIEAGRIPNPHLGPVEERLALHVLQQQGLVPEHVESRPLYSPLQPDIEQGKLQMWVDLFPKALGRPGPPFNITPRRARRFFLRCIIWNTRDVILDDLSLTGEKMSDIYVKGWMIGFEEHKQKTDVHYRSLGGEGNFNWRFIFPFDYLPAEQVCTIAKKDAFWRLDKTESKIPARVVFQIWDNDKFSFDDFLGSLQLDLNRMPKPAKTAKKCSLDQLDDAFHPEWFVSLFEQKTVKGWWPCVAEEGEKKILAGKLEMTLEIVAESEHEERPAGQGRDEPNMNPKLEDPRRPDTSFLWFTSPYKTMKFILWRRFRWAIILFIILFILLLFLAIFIYAFPNYAAMKLVKPFS

SEQ ID NO: 27579 - protein, 2101 aa, Homo sapiens
  REGION 1..2101: note = ENSP00000398305
MLRVFILYAENVHTPDTDISDAYCSAVFAGVKKRTKVIKNSVNPVWNEGFEWDLKGIPLDQGSELHVVVKDHETMGRNRFLGEAKVPLREVLATPSLSASFNAPLLDTKKQPTGASLVLQVSYTPLPGAVPLFPPPTPLEPSPTLPDLDVVADTGGEEDTEDQGLTGDEAEPFLDQSGGPGAPTTPRKLPSRPPPHYPGIKRKRSAPTSRKLLSDKPQDFQIRVQVIEGRQLPGVNIKPVVKVTAAGQTKRTRIHKGNSPLFNETLFFNLFDSPGELFDEPIFITVVDSRSLRTDALLGEFRMDVGTIYREPRHAYLRKWLLLSDPDDFSAGARGYLKTSLCVLGPGDEAPLERKDPSEDKEDIESNLLRPTGVALRGAHFCLKVFRAEDLPQMDDAVMDNVKQIFGFESNKKNLVDPFVEVSFAGKMLCSKILEKTANPQWNQNITLPAMFPSMCEKMRIRIIDWDRLTHNDIVATTYLSMSKISAPGGEIEEEPAGAVKPSKASDLDDYLGFLPTFGPCYINLYGSPREFTGFPDPYTELNTGKGEGVAYRGRLLLSLETKLVEHSEQKVEDLPADDILRVEKYLRRRKYSLFAAFYSATMLQDVDDAIQFEVSIGNYGNKFDMTCLPLASTTQYSRAVFDGCHYYYLPWGNVKPVVVLSSYWEDISHRIETQNQLLGIADRLEAGLEQVHLALKAQCSTEDVDSLVAQLTDELIAGCSQPLGDIHETPSATHLDQYLYQLRTHHLSQITEAALALKLGHSELPAALEQAEDWLLRLRALAEEPQNSLPDIVIWMLQGDKRVAYQRVPAHQVLFSRRGANYCGKNCGKLQTIFLKYPMEKVPGARMPVQIRVKLWFGLSVDEKEFNQFAEGKLSVFAETYENETKLALVGNWGTTGLTYPKFSDVTGKIKLPKDSFRPSAGWTWAGDWFVCPEKTLLHDMDAGHLSFVEEVFENQTRLPGGQWIYMSDNYTDVNGEKVLPKDDIECPLGWKWEDEEWSTDLNRAVDEQGWEYSITIPPERKPKHWVPAEKMYYTHRRRRWVRLRRRDLSQMEALKRHRQAEAEGEGWEYASLFGWKFHLEYRKTDAFRRRRWRRRMEPLEKTGPAAVFALEGALGGVMDDKSEDSMSVSTLSFGVNRPTISCIFDYGNRYHLRCYMYQARDLAAMDKDSFSDPYAIVSFLHQSQKTVVVKNTLNPTWDQTLIFYEIEIFGEPATVAEQPPSIVVELYDHDTYGADEFMGRCICQPSLERMPRLAWFPLTRGSQPSGELLASFELIQREKPAIHHIPGFEVQETSRILDESEDTDLPYPPPQREANIYMVPQNIKPALQRTAIEILAWGLRNMKSYQLANISSPSLVVECGGQTVQSCVIRNLRKNPNFDICTLFMEVMLPREELYCPPITVKVIDNRQFGRRPVVGQCTIRSLESFLCDPYSAESPSPQGGPDDVSLLSPGEDVLIDIDDKEPLIPIQLADGLSSLAPTNTASPPSSPHEEEFIDWWSKFFASIGEREKCGSYLEKDFDTLKVYDTQLENVEAFEGLSDFCNTFKLYRGKTQEETEDPSVIGEFKGLFKIYPLPEDPAIPMPPRQFHQLAAQGPQECLVRIYIVRAFGLQPKDPNGKCDPYIKISIGKKSVSDQDNYIPCTLEPVFGKMFELTCTLPLEKDLKITLYDYDLLSKDEKIGETVVDLENRLLSKFGARCGLPQTYCVSGPNQWRDQLRPSQLLHLFCQQHRVKAPVYRTDRVMFQDKEYSIEEIEAGRIPNPHLGPVEERLALHVLQQQGLVPEHVESRPLYSPLQPDIEQGKLQMWVDLFPKALGRPGPPFNITPRRARRFFLRCIIWNTRDVILDDLSLTGEKMSDIYVKGWMIGFEEHKQKTDVHYRSLGGEGNFNWRFIFPFDYLPAEQVCTIAKKDAFWRLDKTESKIPARVVFQIWDNDKFSFDDFLGSLQLDLNRMPKPAKTAKKCSLDQLDDAFHPEWFVSLFEQKTVKGWWPCVAEEGEKKILAGKLEMTLEIVAESEHEERPAGQGRDEPNMNPKLEDPRRPDTSFLWFTSPYKTMKFILWRRFRWAIILFIILFILLLFLAIFIYAFPNYAAMKLVKPFS

SEQ ID NO: 27580 - protein, 2111 aa, Homo sapiens
  REGION 1..2111: note = ENSP00000407046
MLRVFILYAENVHTPDTDISDAYCSAVFAGVKKRTKVIKNSVNPVWNEGFEWDLKGIPLDQGSELHVVVKDHETMGRNRFLGEAKVPLREVLATPSLSASFNAPLLDTKKQPTGASLVLQVSYTPLPGAVPLFPPPTPLEPSPTLPDLDVVAGGGQSRAETWSLLSDSTMDTRYSGKKWPAPTDTGGEEDTEDQGLTGDEAEPFLDQSGGPGAPTTPRKLPSRPPPHYPGIKRKRSAPTSRKLLSDKPQDFQIRVQVIEGRQLPGVNIKPVVKVTAAGQTKRTRIHKGNSPLFNETLFFNLFDSPGELFDEPIFITVVDSRSLRTDALLGEFRMDVGTIYREPRHAYLRKWLLLSDPDDFSAGARGYLKTSLCVLGPGDEAPLERKDPSEDKEDIESNLLRPTGVALRGAHFCLKVFRAEDLPQMDDAVMDNVKQIFGFESNKKNLVDPFVEVSFAGKMLCSKILEKTANPQWNQNITLPAMFPSMCEKMRIRIIDWDRLTHNDIVATTYLSMSKISAPGGEIEEEPAGAVKPSKASDLDDYLGFLPTFGPCYINLYGSPREFTGFPDPYTELNTGKGEGVAYRGRLLLSLETKLVEHSEQKVEDLPADDILRVEKYLRRRKYSLFAAFYSATMLQDVDDAIQFEVSIGNYGNKFDMTCLPLASTTQYSRAVFDGCHYYYLPWGNVKPVVVLSSYWEDISHRIETQNQLLGIADRLEAGLEQVHLALKAQCSTEDVDSLVAQLTDELIAGCSQPLGDIHETPSATHLDQYLYQLRTHHLSQITEAALALKLGHSELPAALEQAEDWLLRLRALAEEPQNSLPDIVIWMLQGDKRVAYQRVPAHQVLFSRRGANYCGKNCGKLQTIFLKYPMEKVPGARMPVQIRVKLWFGLSVDEKEFNQFAEGKLSVFAETYENETKLALVGNWGTTGLTYPKFSDVTGKIKLPKDSFRPSAGWTWAGDWFVCPEKTLLHDMDAGHLSFVEEVFENQTRLPGGQWIYMSDNYTDVNGEKVLPKDDIECPLGWKWEDEEWSTDLNRAVDEQGWEYSITIPPERKPKHWVPAEKMYYTHRRRRWVRLRRRDLSQMEALKRHRQAEAEGEGWEYASLFGWKFHLEYRKTDAFRRRRWRRRMEPLEKTGPAAVFALEGALGGVMDDKSEDSMSVSTLSFGVNRPTISCIFDYGNRYHLRCYMYQARDLAAMDKDSFSDPYAIVSFLHQSQKTVVVKNTLNPTWDQTLIFYEIEIFGEPATVAEQPPSIVVELYDHDTYGADEFMGRCICQPSLERMPRLAWFPLTRGSQPSGELLASFELIQREKPAIHHIPGFEVQETSRILDESEDTDLPYPPPQREANIYMVPQNIKPALQRTAIEILAWGLRNMKSYQLANISSPSLVVECGGQTVQSCVIRNLRKNPNFDICTLFMEVMLPREELYCPPITVKVIDNRQFGRRPVVGQCTIRSLESFLCDPYSAESPSPQGGPDDVSLLSPGEDVLIDIDDKEPLIPIQEEEFIDWWSKFFASIGEREKCGSYLEKDFDTLKVYDTQLENVEAFEGLSDFCNTFKLYRGKTQEETEDPSVIGEFKGLFKIYPLPEDPAIPMPPRQFHQLAAQGPQECLVRIYIVRAFGLQPKDPNGKCDPYIKISIGKKSVSDQDNYIPCTLEPVFGKMFELTCTLPLEKDLKITLYDYDLLSKDEKIGETVVDLENRLLSKFGARCGLPQTYCVSGPNQWRDQLRPSQLLHLFCQQHRVKAPVYRTDRVMFQDKEYSIEEIEAGRIPNPHLGPVEERLALHVLQQQGLVPEHVESRPLYSPLQPDIEQGKLQMWVDLFPKALGRPGPPFNITPRRARRFFLRCIIWNTRDVILDDLSLTGEKMSDIYVKGWMIGFEEHKQKTDVHYRSLGGEGNFNWRFIFPFDYLPAEQVCTIAKKDAFWRLDKTESKIPARVVFQIWDNDKFSFDDFLGSLQLDLNRMPKPAKTAKKCSLDQLDDAFHPEWFVSLFEQKTVKGWWPCVAEEGEKKILAGKLEMTLEIVAESEHEERPAGQGRDEPNMNPKLEDPRRPDTSFLWFTSPYKTMKFILWRRFRWAIILFIILFILLLFLAIFIYAFPNYAAMKLVKPFS

SEQ ID NO: 27581 - protein, 2080 aa, Homo sapiens
  REGION 1..2080: note = ENSP00000258104
MLRVFILYAENVHTPDTDISDAYCSAVFAGVKKRTKVIKNSVNPVWNEGFEWDLKGIPLDQGSELHVVVKDHETMGRNRFLGEAKVPLREVLATPSLSASFNAPLLDTKKQPTGASLVLQVSYTPLPGAVPLFPPPTPLEPSPTLPDLDVVADTGGEEDTEDQGLTGDEAEPFLDQSGGPGAPTTPRKLPSRPPPHYPGIKRKRSAPTSRKLLSDKPQDFQIRVQVIEGRQLPGVNIKPVVKVTAAGQTKRTRIHKGNSPLFNETLFFNLFDSPGELFDEPIFITVVDSRSLRTDALLGEFRMDVGTIYREPRHAYLRKWLLLSDPDDFSAGARGYLKTSLCVLGPGDEAPLERKDPSEDKEDIESNLLRPTGVALRGAHFCLKVFRAEDLPQMDDAVMDNVKQIFGFESNKKNLVDPFVEVSFAGKMLCSKILEKTANPQWNQNITLPAMFPSMCEKMRIRIIDWDRLTHNDIVATTYLSMSKISAPGGEIEEEPAGAVKPSKASDLDDYLGFLPTFGPCYINLYGSPREFTGFPDPYTELNTGKGEGVAYRGRLLLSLETKLVEHSEQKVEDLPADDILRVEKYLRRRKYSLFAAFYSATMLQDVDDAIQFEVSIGNYGNKFDMTCLPLASTTQYSRAVFDGCHYYYLPWGNVKPVVVLSSYWEDISHRIETQNQLLGIADRLEAGLEQVHLALKAQCSTEDVDSLVAQLTDELIAGCSQPLGDIHETPSATHLDQYLYQLRTHHLSQITEAALALKLGHSELPAALEQAEDWLLRLRALAEEPQNSLPDIVIWMLQGDKRVAYQRVPAHQVLFSRRGANYCGKNCGKLQTIFLKYPMEKVPGARMPVQIRVKLWFGLSVDEKEFNQFAEGKLSVFAETYENETKLALVGNWGTTGLTYPKFSDVTGKIKLPKDSFRPSAGWTWAGDWFVCPEKTLLHDMDAGHLSFVEEVFENQTRLPGGQWIYMSDNYTDVNGEKVLPKDDIECPLGWKWEDEEWSTDLNRAVDEQGWEYSITIPPERKPKHWVPAEKMYYTHRRRRWVRLRRRDLSQMEALKRHRQAEAEGEGWEYASLFGWKFHLEYRKTDAFRRRRWRRRMEPLEKTGPAAVFALEGALGGVMDDKSEDSMSVSTLSFGVNRPTISCIFDYGNRYHLRCYMYQARDLAAMDKDSFSDPYAIVSFLHQSQKTVVVKNTLNPTWDQTLIFYEIEIFGEPATVAEQPPSIVVELYDHDTYGADEFMGRCICQPSLERMPRLAWFPLTRGSQPSGELLASFELIQREKPAIHHIPGFEVQETSRILDESEDTDLPYPPPQREANIYMVPQNIKPALQRTAIEILAWGLRNMKSYQLANISSPSLVVECGGQTVQSCVIRNLRKNPNFDICTLFMEVMLPREELYCPPITVKVIDNRQFGRRPVVGQCTIRSLESFLCDPYSAESPSPQGGPDDVSLLSPGEDVLIDIDDKEPLIPIQEEEFIDWWSKFFASIGEREKCGSYLEKDFDTLKVYDTQLENVEAFEGLSDFCNTFKLYRGKTQEETEDPSVIGEFKGLFKIYPLPEDPAIPMPPRQFHQLAAQGPQECLVRIYIVRAFGLQPKDPNGKCDPYIKISIGKKSVSDQDNYIPCTLEPVFGKMFELTCTLPLEKDLKITLYDYDLLSKDEKIGETVVDLENRLLSKFGARCGLPQTYCVSGPNQWRDQLRPSQLLHLFCQQHRVKAPVYRTDRVMFQDKEYSIEEIEAGRIPNPHLGPVEERLALHVLQQQGLVPEHVESRPLYSPLQPDIEQGKLQMWVDLFPKALGRPGPPFNITPRRARRFFLRCIIWNTRDVILDDLSLTGEKMSDIYVKGWMIGFEEHKQKTDVHYRSLGGEGNFNWRFIFPFDYLPAEQVCTIAKKDAFWRLDKTESKIPARVVFQIWDNDKFSFDDFLGSLQLDLNRMPKPAKTAKKCSLDQLDDAFHPEWFVSLFEQKTVKGWWPCVAEEGEKKILAGKLEMTLEIVAESEHEERPAGQGRDEPNMNPKLEDPRRPDTSFLWFTSPYKTMKFILWRRFRWAIILFIILFILLLFLAIFIYAFPNYAAMKLVKPFS

SEQ ID NO: 27582 - protein, 2112 aa, Homo sapiens
  REGION 1..2112: note = ENSP00000386683
MLCCLLVRASNLPSAKKDRRSDPVASLTFRGVKKRTKVIKNSVNPVWNEGFEWDLKGIPLDQGSELHVVVKDHETMGRNRFLGEAKVPLREVLATPSLSASFNAPLLDTKKQPTGASLVLQVSYTPLPGAVPLFPPPTPLEPSPTLPDLDVVAGGGQSRAETWSLLSDSTMDTRYSGKKWPAPTDTGGEEDTEDQGLTGDEAEPFLDQSGGPGAPTTPRKLPSRPPPHYPGIKRKRSAPTSRKLLSDKPQDFQIRVQVIEGRQLPGVNIKPVVKVTAAGQTKRTRIHKGNSPLFNETLFFNLFDSPGELFDEPIFITVVDSRSLRTDALLGEFRMDVGTIYREPRHAYLRKWLLLSDPDDFSAGARGYLKTSLCVLGPGDEAPLERKDPSEDKEDIESNLLRPTGVALRGAHFCLKVFRAEDLPQMDDAVMDNVKQIFGFESNKKNLVDPFVEVSFAGKMLCSKILEKTANPQWNQNITLPAMFPSMCEKMRIRIIDWDRLTHNDIVATTYLSMSKISAPGGEIEEEPAGAVKPSKASDLDDYLGFLPTFGPCYINLYGSPREFTGFPDPYTELNTGKGEGVAYRGRLLLSLETKLVEHSEQKVEDLPADDILRVEKYLRRRKYSLFAAFYSATMLQDVDDAIQFEVSIGNYGNKFDMTCLPLASTTQYSRAVFDGCHYYYLPWGNVKPVVVLSSYWEDISHRIETQNQLLGIADRLEAGLEQVHLALKAQCSTEDVDSLVAQLTDELIAGCSQPLGDIHETPSATHLDQYLYQLRTHHLSQITEAALALKLGHSELPAALEQAEDWLLRLRALAEEPQNSLPDIVIWMLQGDKRVAYQRVPAHQVLFSRRGANYCGKNCGKLQTIFLKYPMEKVPGARMPVQIRVKLWFGLSVDEKEFNQFAEGKLSVFAETYENETKLALVGNWGTTGLTYPKFSDVTGKIKLPKDSFRPSAGWTWAGDWFVCPEKTLLHDMDAGHLSFVEEVFENQTRLPGGQWIYMSDNYTDVNGEKVLPKDDIECPLGWKWEDEEWSTDLNRAVDEQGWEYSITIPPERKPKHWVPAEKMYYTHRRRRWVRLRRRDLSQMEALKRHRQAEAEGEGWEYASLFGWKFHLEYRKTDAFRRRRWRRRMEPLEKTGPAAVFALEGALGGVMDDKSEDSMSVSTLSFGVNRPTISCIFDYGNRYHLRCYMYQARDLAAMDKDSFSDPYAIVSFLHQSQKTVVVKNTLNPTWDQTLIFYEIEIFGEPATVAEQPPSIVVELYDHDTYGADEFMGRCICQPSLERMPRLAWFPLTRGSQPSGELLASFELIQREKPAIHHIPGFEVQETSRILDESEDTDLPYPPPQREANIYMVPQNIKPALQRTAIEILAWGLRNMKSYQLANISSPSLVVECGGQTVQSCVIRNLRKNPNFDICTLFMEVMLPREELYCPPITVKVIDNRQFGRRPVVGQCTIRSLESFLCDPYSAESPSPQGGPDDVSLLSPGEDVLIDIDDKEPLIPIQEEEFIDWWSKFFASIGEREKCGSYLEKDFDTLKVYDTQLENVEAFEGLSDFCNTFKLYRGKTQEETEDPSVIGEFKGLFKIYPLPEDPAIPMPPRQFHQLAAQGPQECLVRIYIVRAFGLQPKDPNGKCDPYIKISIGKKSVSDQDNYIPCTLEPVFGKMFELTCTLPLEKDLKITLYDYDLLSKDEKIGETVVDLENRLLSKFGARCGLPQTYCVSGPNQWRDQLRPSQLLHLFCQQHRVKAPVYRTDRVMFQDKEYSIEEIEAGRIPNPHLGPVEERLALHVLQQQGLVPEHVESRPLYSPLQPDIEQGKLQMWVDLFPKALGRPGPPFNITPRRARRFFLRCIIWNTRDVILDDLSLTGEKMSDIYVKGWMIGFEEHKQKTDVHYRSLGGEGNFNWRFIFPFDYLPAEQVCTIAKKDAFWRLDKTESKIPARVVFQIWDNDKFSFDDFLGSLQLDLNRMPKPAKTAKKCSLDQLDDAFHPEWFVSLFEQKTVKGWWPCVAEEGEKKILAGKLEMTLEIVAESEHEERPAGQGRDEPNMNPKLEDPRRPDTSFLWFTSPYKTMKFILWRRFRWAIILFIILFILLLFLAIFIYAFPNYAAMKLVKPFS

SEQ ID NO: 27583 - protein, 2081 aa, Homo sapiens
  REGION 1..2081: note = ENSP00000377678
MLCCLLVRASNLPSAKKDRRSDPVASLTFRGVKKRTKVIKNSVNPVWNEGFEWDLKGIPLDQGSELHVVVKDHETMGRNRFLGEAKVPLREVLATPSLSASFNAPLLDTKKQPTGASLVLQVSYTPLPGAVPLFPPPTPLEPSPTLPDLDVVADTGGEEDTEDQGLTGDEAEPFLDQSGGPGAPTTPRKLPSRPPPHYPGIKRKRSAPTSRKLLSDKPQDFQIRVQVIEGRQLPGVNIKPVVKVTAAGQTKRTRIHKGNSPLFNETLFFNLFDSPGELFDEPIFITVVDSRSLRTDALLGEFRMDVGTIYREPRHAYLRKWLLLSDPDDFSAGARGYLKTSLCVLGPGDEAPLERKDPSEDKEDIESNLLRPTGVALRGAHFCLKVFRAEDLPQMDDAVMDNVKQIFGFESNKKNLVDPFVEVSFAGKMLCSKILEKTANPQWNQNITLPAMFPSMCEKMRIRIIDWDRLTHNDIVATTYLSMSKISAPGGEIEEEPAGAVKPSKASDLDDYLGFLPTFGPCYINLYGSPREFTGFPDPYTELNTGKGEGVAYRGRLLLSLETKLVEHSEQKVEDLPADDILRVEKYLRRRKYSLFAAFYSATMLQDVDDAIQFEVSIGNYGNKFDMTCLPLASTTQYSRAVFDGCHYYYLPWGNVKPVVVLSSYWEDISHRIETQNQLLGIADRLEAGLEQVHLALKAQCSTEDVDSLVAQLTDELIAGCSQPLGDIHETPSATHLDQYLYQLRTHHLSQITEAALALKLGHSELPAALEQAEDWLLRLRALAEEPQNSLPDIVIWMLQGDKRVAYQRVPAHQVLFSRRGANYCGKNCGKLQTIFLKYPMEKVPGARMPVQIRVKLWFGLSVDEKEFNQFAEGKLSVFAETYENETKLALVGNWGTTGLTYPKFSDVTGKIKLPKDSFRPSAGWTWAGDWFVCPEKTLLHDMDAGHLSFVEEVFENQTRLPGGQWIYMSDNYTDVNGEKVLPKDDIECPLGWKWEDEEWSTDLNRAVDEQGWEYSITIPPERKPKHWVPAEKMYYTHRRRRWVRLRRRDLSQMEALKRHRQAEAEGEGWEYASLFGWKFHLEYRKTDAFRRRRWRRRMEPLEKTGPAAVFALEGALGGVMDDKSEDSMSVSTLSFGVNRPTISCIFDYGNRYHLRCYMYQARDLAAMDKDSFSDPYAIVSFLHQSQKTVVVKNTLNPTWDQTLIFYEIEIFGEPATVAEQPPSIVVELYDHDTYGADEFMGRCICQPSLERMPRLAWFPLTRGSQPSGELLASFELIQREKPAIHHIPGFEVQETSRILDESEDTDLPYPPPQREANIYMVPQNIKPALQRTAIEILAWGLRNMKSYQLANISSPSLVVECGGQTVQSCVIRNLRKNPNFDICTLFMEVMLPREELYCPPITVKVIDNRQFGRRPVVGQCTIRSLESFLCDPYSAESPSPQGGPDDVSLLSPGEDVLIDIDDKEPLIPIQEEEFIDWWSKFFASIGEREKCGSYLEKDFDTLKVYDTQLENVEAFEGLSDFCNTFKLYRGKTQEETEDPSVIGEFKGLFKIYPLPEDPAIPMPPRQFHQLAAQGPQECLVRIYIVRAFGLQPKDPNGKCDPYIKISIGKKSVSDQDNYIPCTLEPVFGKMFELTCTLPLEKDLKITLYDYDLLSKDEKIGETVVDLENRLLSKFGARCGLPQTYCVSGPNQWRDQLRPSQLLHLFCQQHRVKAPVYRTDRVMFQDKEYSIEEIEAGRIPNPHLGPVEERLALHVLQQQGLVPEHVESRPLYSPLQPDIEQGKLQMWVDLFPKALGRPGPPFNITPRRARRFFLRCIIWNTRDVILDDLSLTGEKMSDIYVKGWMIGFEEHKQKTDVHYRSLGGEGNFNWRFIFPFDYLPAEQVCTIAKKDAFWRLDKTESKIPARVVFQIWDNDKFSFDDFLGSLQLDLNRMPKPAKTAKKCSLDQLDDAFHPEWFVSLFEQKTVKGWWPCVAEEGEKKILAGKLEMTLEIVAESEHEERPAGQGRDEPNMNPKLEDPRRPDTSFLWFTSPYKTMKFILWRRFRWAIILFIILFILLLFLAIFIYAFPNYAAMKLVKPFS

SEQ ID NO: 27584 - protein, 2088 aa, Homo sapiens
  REGION 1..2088: note = ENSP00000386285
MLCCLLVRASNLPSAKKDRRSDPVASLTFRGVKKRTKVIKNSVNPVWNEGFEWDLKGIPLDQGSELHVVVKDHETMGRNRFLGEAKVPLREVLATPSLSASFNAPLLDTKKQPTGASLVLQVSYTPLPGAVPLFPPPTPLEPSPTLPDLDVVADTGGEEDTEDQGLTGDEAEPFLDQSGGPGAPTTPRKLPSRPPPHYPGIKRKRSAPTSRKLLSDKPQDFQIRVQVIEGRQLPGVNIKPVVKVTAAGQTKRTRIHKGNSPLFNETLFFNLFDSPGELFDEPIFITVVDSRSLRTDALLGEFRMDVGTIYREPRHAYLRKWLLLSDPDDFSAGARGYLKTSLCVLGPGDEAPLERKDPSEDKEDIESNLLRPTGVALRGAHFCLKVFRAEDLPQMDDAVMDNVKQIFGFESNKKNLVDPFVEVSFAGKMLCSKILEKTANPQWNQNITLPAMFPSMCEKMRIRIIDWDRLTHNDIVATTYLSMSKISAPGGEIEVDDYLGFLPTFGPCYINLYGSPREFTGFPDPYTELNTGKGEGVAYRGRLLLSLETKLVEHSEQKVEDLPADDILRVEKYLRRRKYSLFAAFYSATMLQDVDDAIQFEVSIGNYGNKFDMTCLPLASTTQYSRAVFDGCHYYYLPWGNVKPVVVLSSYWEDISHRIETQNQLLGIADRLEAGLEQVHLALKAQCSTEDVDSLVAQLTDELIAGCSQPLGDIHETPSATHLDQYLYQLRTHHLSQITEAALALKLGHSELPAALEQAEDWLLRLRALAEEPQNSLPDIVIWMLQGDKRVAYQRVPAHQVLFSRRGANYCGKNCGKLQTIFLKYPMEKVPGARMPVQIRVKLWFGLSVDEKEFNQFAEGKLSVFAETYENETKLALVGNWGTTGLTYPKFSDVTGKIKLPKDSFRPSAGWTWAGDWFVCPEKTLLHDMDAGHLSFVEEVFENQTRLPGGQWIYMSDNYTDVNGEKVLPKDDIECPLGWKWEDEEWSTDLNRAVDEQGWEYSITIPPERKPKHWVPAEKMYYTHRRRRWVRLRRRDLSQMEALKRHRQAEAEGEGWEYASLFGWKFHLEYRKTDAFRRRRWRRRMEPLEKTGPAAVFALEGALGGVMDDKSEDSMSVSTLSFGVNRPTISCIFDYGNRYHLRCYMYQARDLAAMDKDSFSDPYAIVSFLHQSQKTVVVKNTLNPTWDQTLIFYEIEIFGEPATVAEQPPSIVVELYDHDTYGADEFMGRCICQPSLERMPRLAWFPLTRGSQPSGELLASFELIQREKPAIHHIPGFEVQETSRILDESEDTDLPYPPPQREANIYMVPQNIKPALQRTAIEILAWGLRNMKSYQLANISSPSLVVECGGQTVQSCVIRNLRKNPNFDICTLFMEVMLPREELYCPPITVKVIDNRQFGRRPVVGQCTIRSLESFLCDPYSAESPSPQGGPDDVSLLSPGEDVLIDIDDKEPLIPIQLADGLSSLAPTNTASPPSSPHEEEFIDWWSKFFASIGEREKCGSYLEKDFDTLKVYDTQLENVEAFEGLSDFCNTFKLYRGKTQEETEDPSVIGEFKGLFKIYPLPEDPAIPMPPRQFHQLAAQGPQECLVRIYIVRAFGLQPKDPNGKCDPYIKISIGKKSVSDQDNYIPCTLEPVFGKMFELTCTLPLEKDLKITLYDYDLLSKDEKIGETVVDLENRLLSKFGARCGLPQTYCVSGPNQWRDQLRPSQLLHLFCQQHRVKAPVYRTDRVMFQDKEYSIEEIEAGRIPNPHLGPVEERLALHVLQQQGLVPEHVESRPLYSPLQPDIEQGKLQMWVDLFPKALGRPGPPFNITPRRARRFFLRCIIWNTRDVILDDLSLTGEKMSDIYVKGWMIGFEEHKQKTDVHYRSLGGEGNFNWRFIFPFDYLPAEQVCTIAKKDAFWRLDKTESKIPARVVFQIWDNDKFSFDDFLGSLQLDLNRMPKPAKTAKKCSLDQLDDAFHPEWFVSLFEQKTVKGWWPCVAEEGEKKILAGKLEMTLEIVAESEHEERPAGQGRDEPNMNPKLEDPRRPDTSFLWFTSPYKTMKFILWRRFRWAIILFIILFILLLFLAIFIYAFPNYAAMKLVKPFS

SEQ ID NO: 27585 - protein, 2102 aa, Homo sapiens
  REGION 1..2102: note = ENSP00000386512
MLCCLLVRASNLPSAKKDRRSDPVASLTFRGVKKRTKVIKNSVNPVWNEGFEWDLKGIPLDQGSELHVVVKDHETMGRNRFLGEAKVPLREVLATPSLSASFNAPLLDTKKQPTGASLVLQVSYTPLPGAVPLFPPPTPLEPSPTLPDLDVVADTGGEEDTEDQGLTGDEAEPFLDQSGGPGAPTTPRKLPSRPPPHYPGIKRKRSAPTSRKLLSDKPQDFQIRVQVIEGRQLPGVNIKPVVKVTAAGQTKRTRIHKGNSPLFNETLFFNLFDSPGELFDEPIFITVVDSRSLRTDALLGEFRMDVGTIYREPRHAYLRKWLLLSDPDDFSAGARGYLKTSLCVLGPGDEAPLERKDPSEDKEDIESNLLRPTGVALRGAHFCLKVFRAEDLPQMDDAVMDNVKQIFGFESNKKNLVDPFVEVSFAGKMLCSKILEKTANPQWNQNITLPAMFPSMCEKMRIRIIDWDRLTHNDIVATTYLSMSKISAPGGEIEEEPAGAVKPSKASDLDDYLGFLPTFGPCYINLYGSPREFTGFPDPYTELNTGKGEGVAYRGRLLLSLETKLVEHSEQKVEDLPADDILRVEKYLRRRKYSLFAAFYSATMLQDVDDAIQFEVSIGNYGNKFDMTCLPLASTTQYSRAVFDGCHYYYLPWGNVKPVVVLSSYWEDISHRIETQNQLLGIADRLEAGLEQVHLALKAQCSTEDVDSLVAQLTDELIAGCSQPLGDIHETPSATHLDQYLYQLRTHHLSQITEAALALKLGHSELPAALEQAEDWLLRLRALAEEPQNSLPDIVIWMLQGDKRVAYQRVPAHQVLFSRRGANYCGKNCGKLQTIFLKYPMEKVPGARMPVQIRVKLWFGLSVDEKEFNQFAEGKLSVFAETYENETKLALVGNWGTTGLTYPKFSDVTGKIKLPKDSFRPSAGWTWAGDWFVCPEKTLLHDMDAGHLSFVEEVFENQTRLPGGQWIYMSDNYTDVNGEKVLPKDDIECPLGWKWEDEEWSTDLNRAVDEQGWEYSITIPPERKPKHWVPAEKMYYTHRRRRWVRLRRRDLSQMEALKRHRQAEAEGEGWEYASLFGWKFHLEYRKTDAFRRRRWRRRMEPLEKTGPAAVFALEGALGGVMDDKSEDSMSVSTLSFGVNRPTISCIFDYGNRYHLRCYMYQARDLAAMDKDSFSDPYAIVSFLHQSQKTVVVKNTLNPTWDQTLIFYEIEIFGEPATVAEQPPSIVVELYDHDTYGADEFMGRCICQPSLERMPRLAWFPLTRGSQPSGELLASFELIQREKPAIHHIPGFEVQETSRILDESEDTDLPYPPPQREANIYMVPQNIKPALQRTAIEILAWGLRNMKSYQLANISSPSLVVECGGQTVQSCVIRNLRKNPNFDICTLFMEVMLPREELYCPPITVKVIDNRQFGRRPVVGQCTIRSLESFLCDPYSAESPSPQGGPDDVSLLSPGEDVLIDIDDKEPLIPIQLADGLSSLAPTNTASPPSSPHEEEFIDWWSKFFASIGEREKCGSYLEKDFDTLKVYDTQLENVEAFEGLSDFCNTFKLYRGKTQEETEDPSVIGEFKGLFKIYPLPEDPAIPMPPRQFHQLAAQGPQECLVRIYIVRAFGLQPKDPNGKCDPYIKISIGKKSVSDQDNYIPCTLEPVFGKMFELTCTLPLEKDLKITLYDYDLLSKDEKIGETVVDLENRLLSKFGARCGLPQTYCVSGPNQWRDQLRPSQLLHLFCQQHRVKAPVYRTDRVMFQDKEYSIEEIEAGRIPNPHLGPVEERLALHVLQQQGLVPEHVESRPLYSPLQPDIEQGKLQMWVDLFPKALGRPGPPFNITPRRARRFFLRCIIWNTRDVILDDLSLTGEKMSDIYVKGWMIGFEEHKQKTDVHYRSLGGEGNFNWRFIFPFDYLPAEQVCTIAKKDAFWRLDKTESKIPARVVFQIWDNDKFSFDDFLGSLQLDLNRMPKPAKTAKKCSLDQLDDAFHPEWFVSLFEQKTVKGWWPCVAEEGEKKILAGKLEMTLEIVAESEHEERPAGQGRDEPNMNPKLEDPRRPDTSFLWFTSPYKTMKFILWRRFRWAIILFIILFILLLFLAIFIYAFPNYAAMKLVKPFS

SEQ ID NO: 27586 - protein, 2119 aa, Homo sapiens
  REGION 1..2119: note = ENSP00000386881
MLCCLLVRASNLPSAKKDRRSDPVASLTFRGVKKRTKVIKNSVNPVWNEGFEWDLKGIPLDQGSELHVVVKDHETMGRNRFLGEAKVPLREVLATPSLSASFNAPLLDTKKQPTGASLVLQVSYTPLPGAVPLFPPPTPLEPSPTLPDLDVVAGGGQSRAETWSLLSDSTMDTRYSGKKWPAPTDTGGEEDTEDQGLTGDEAEPFLDQSGGPGAPTTPRKLPSRPPPHYPGIKRKRSAPTSRKLLSDKPQDFQIRVQVIEGRQLPGVNIKPVVKVTAAGQTKRTRIHKGNSPLFNETLFFNLFDSPGELFDEPIFITVVDSRSLRTDALLGEFRMDVGTIYREPRHAYLRKWLLLSDPDDFSAGARGYLKTSLCVLGPGDEAPLERKDPSEDKEDIESNLLRPTGVALRGAHFCLKVFRAEDLPQMDDAVMDNVKQIFGFESNKKNLVDPFVEVSFAGKMLCSKILEKTANPQWNQNITLPAMFPSMCEKMRIRIIDWDRLTHNDIVATTYLSMSKISAPGGEIEVDDYLGFLPTFGPCYINLYGSPREFTGFPDPYTELNTGKGEGVAYRGRLLLSLETKLVEHSEQKVEDLPADDILRVEKYLRRRKYSLFAAFYSATMLQDVDDAIQFEVSIGNYGNKFDMTCLPLASTTQYSRAVFDGCHYYYLPWGNVKPVVVLSSYWEDISHRIETQNQLLGIADRLEAGLEQVHLALKAQCSTEDVDSLVAQLTDELIAGCSQPLGDIHETPSATHLDQYLYQLRTHHLSQITEAALALKLGHSELPAALEQAEDWLLRLRALAEEPQNSLPDIVIWMLQGDKRVAYQRVPAHQVLFSRRGANYCGKNCGKLQTIFLKYPMEKVPGARMPVQIRVKLWFGLSVDEKEFNQFAEGKLSVFAETYENETKLALVGNWGTTGLTYPKFSDVTGKIKLPKDSFRPSAGWTWAGDWFVCPEKTLLHDMDAGHLSFVEEVFENQTRLPGGQWIYMSDNYTDVNGEKVLPKDDIECPLGWKWEDEEWSTDLNRAVDEQGWEYSITIPPERKPKHWVPAEKMYYTHRRRRWVRLRRRDLSQMEALKRHRQAEAEGEGWEYASLFGWKFHLEYRKTDAFRRRRWRRRMEPLEKTGPAAVFALEGALGGVMDDKSEDSMSVSTLSFGVNRPTISCIFDYGNRYHLRCYMYQARDLAAMDKDSFSDPYAIVSFLHQSQKTVVVKNTLNPTWDQTLIFYEIEIFGEPATVAEQPPSIVVELYDHDTYGADEFMGRCICQPSLERMPRLAWFPLTRGSQPSGELLASFELIQREKPAIHHIPGFEVQETSRILDESEDTDLPYPPPQREANIYMVPQNIKPALQRTAIEILAWGLRNMKSYQLANISSPSLVVECGGQTVQSCVIRNLRKNPNFDICTLFMEVMLPREELYCPPITVKVIDNRQFGRRPVVGQCTIRSLESFLCDPYSAESPSPQGGPDDVSLLSPGEDVLIDIDDKEPLIPIQLADGLSSLAPTNTASPPSSPHEEEFIDWWSKFFASIGEREKCGSYLEKDFDTLKVYDTQLENVEAFEGLSDFCNTFKLYRGKTQEETEDPSVIGEFKGLFKIYPLPEDPAIPMPPRQFHQLAAQGPQECLVRIYIVRAFGLQPKDPNGKCDPYIKISIGKKSVSDQDNYIPCTLEPVFGKMFELTCTLPLEKDLKITLYDYDLLSKDEKIGETVVDLENRLLSKFGARCGLPQTYCVSGPNQWRDQLRPSQLLHLFCQQHRVKAPVYRTDRVMFQDKEYSIEEIEAGRIPNPHLGPVEERLALHVLQQQGLVPEHVESRPLYSPLQPDIEQGKLQMWVDLFPKALGRPGPPFNITPRRARRFFLRCIIWNTRDVILDDLSLTGEKMSDIYVKGWMIGFEEHKQKTDVHYRSLGGEGNFNWRFIFPFDYLPAEQVCTIAKKDAFWRLDKTESKIPARVVFQIWDNDKFSFDDFLGSLQLDLNRMPKPAKTAKKCSLDQLDDAFHPEWFVSLFEQKTVKGWWPCVAEEGEKKILAGKLEMTLEIVAESEHEERPAGQGRDEPNMNPKLEDPRRPDTSFLWFTSPYKTMKFILWRRFRWAIILFIILFILLLFLAIFIYAFPNYAAMKLVKPFS

SEQ ID NO: 27587 - protein, 2098 aa, Homo sapiens
  REGION 1..2098: note = ENSP00000386617
MLCCLLVRASNLPSAKKDRRSDPVASLTFRGVKKRTKVIKNSVNPVWNEGFEWDLKGIPLDQGSELHVVVKDHETMGRNRFLGEAKVPLREVLATPSLSASFNAPLLDTKKQPTGASLVLQVSYTPLPGAVPLFPPPTPLEPSPTLPDLDVVAGGGQSRAETWSLLSDSTMDTRYSGKKWPAPTDTGGEEDTEDQGLTGDEAEPFLDQSGGPGAPTTPRKLPSRPPPHYPGIKRKRSAPTSRKLLSDKPQDFQIRVQVIEGRQLPGVNIKPVVKVTAAGQTKRTRIHKGNSPLFNETLFFNLFDSPGELFDEPIFITVVDSRSLRTDALLGEFRMDVGTIYREPRHAYLRKWLLLSDPDDFSAGARGYLKTSLCVLGPGDEAPLERKDPSEDKEDIESNLLRPTGVALRGAHFCLKVFRAEDLPQMDDAVMDNVKQIFGFESNKKNLVDPFVEVSFAGKMLCSKILEKTANPQWNQNITLPAMFPSMCEKMRIRIIDWDRLTHNDIVATTYLSMSKISAPGGEIEVDDYLGFLPTFGPCYINLYGSPREFTGFPDPYTELNTGKGEGVAYRGRLLLSLETKLVEHSEQKVEDLPADDILRVEKYLRRRKYSLFAAFYSATMLQDVDDAIQFEVSIGNYGNKFDMTCLPLASTTQYSRAVFDGCHYYYLPWGNVKPVVVLSSYWEDISHRIETQNQLLGIADRLEAGLEQVHLALKAQCSTEDVDSLVAQLTDELIAGCSQPLGDIHETPSATHLDQYLYQLRTHHLSQITEAALALKLGHSELPAALEQAEDWLLRLRALAEEPQNSLPDIVIWMLQGDKRVAYQRVPAHQVLFSRRGANYCGKNCGKLQTIFLKYPMEKVPGARMPVQIRVKLWFGLSVDEKEFNQFAEGKLSVFAETYENETKLALVGNWGTTGLTYPKFSDVTGKIKLPKDSFRPSAGWTWAGDWFVCPEKTLLHDMDAGHLSFVEEVFENQTRLPGGQWIYMSDNYTDVNGEKVLPKDDIECPLGWKWEDEEWSTDLNRAVDEQGWEYSITIPPERKPKHWVPAEKMYYTHRRRRWVRLRRRDLSQMEALKRHRQAEAEGEGWEYASLFGWKFHLEYRKTDAFRRRRWRRRMEPLEKTGPAAVFALEGALGGVMDDKSEDSMSVSTLSFGVNRPTISCIFDYGNRYHLRCYMYQARDLAAMDKDSFSDPYAIVSFLHQSQKTVVVKNTLNPTWDQTLIFYEIEIFGEPATVAEQPPSIVVELYDHDTYGADEFMGRCICQPSLERMPRLAWFPLTRGSQPSGELLASFELIQREKPAIHHIPGFEVQETSRILDESEDTDLPYPPPQREANIYMVPQNIKPALQRTAIEILAWGLRNMKSYQLANISSPSLVVECGGQTVQSCVIRNLRKNPNFDICTLFMEVMLPREELYCPPITVKVIDNRQFGRRPVVGQCTIRSLESFLCDPYSAESPSPQGGPDDVSLLSPGEDVLIDIDDKEPLIPIQEEEFIDWWSKFFASIGEREKCGSYLEKDFDTLKVYDTQLENVEAFEGLSDFCNTFKLYRGKTQEETEDPSVIGEFKGLFKIYPLPEDPAIPMPPRQFHQLAAQGPQECLVRIYIVRAFGLQPKDPNGKCDPYIKISIGKKSVSDQDNYIPCTLEPVFGKMFELTCTLPLEKDLKITLYDYDLLSKDEKIGETVVDLENRLLSKFGARCGLPQTYCVSGPNQWRDQLRPSQLLHLFCQQHRVKAPVYRTDRVMFQDKEYSIEEIEAGRIPNPHLGPVEERLALHVLQQQGLVPEHVESRPLYSPLQPDIEQGKLQMWVDLFPKALGRPGPPFNITPRRARRFFLRCIIWNTRDVILDDLSLTGEKMSDIYVKGWMIGFEEHKQKTDVHYRSLGGEGNFNWRFIFPFDYLPAEQVCTIAKKDAFWRLDKTESKIPARVVFQIWDNDKFSFDDFLGSLQLDLNRMPKPAKTAKKCSLDQLDDAFHPEWFVSLFEQKTVKGWWPCVAEEGEKKILAGKLEMTLEIVAESEHEERPAGQGRDEPNMNPKLEDPRRPDTSFLWFTSPYKTMKFILWRRFRWAIILFIILFILLLFLAIFIYAFPNYAAMKLVKPFS

SEQ ID NO: 27588 - protein, 225 aa, Homo sapiens
  REGION 1..225: note = ENSP00000479439
  VARIANT 1: note = Any amino acid
XTQSLIKDLKNLYLNKAVNFSDHLLSSAAEGDGGLCGSRSSWVSDYSQSTSDTIEKIKRIKNFKTKTFQEKKEQLIPENRLLLKEVGPTGEGRVSVIEQLLDEGADPNCCDEDNRPVITVAVMNKHHEAIPVLVQRGADIDQQWGPLRNTALHEATLLGLAGRESTATLLGCNASIQKKNAGGQTAYDLALNTGDDLVTSLFAAKFGQGLEDQLAQTRSLSLDDC

SEQ ID NO: 27589 - protein, 247 aa, Homo sapiens
  REGION 1..247: note = ENSP00000366857
MTAGSVCVPQIIPLRVPQPGKANHEIDNNTLLEMKSDTPDVNIYYTLDGSKPEFLKRIGYGENNTFKYIKPITLPDGKIQVKAIAVSKDCRQSGIVTKVFHVDYEPPNIVSPEDNVENVLKDSSRQEFKNGFVGSKLKKKYKNSENQRSWNVNLRKFPVPRFCTRKRSEVFDKHGDNENSKGDRLSQVCPLPCPPAIRSLCSLLSRMWLSCPTHIWLSSPTPRRSSDGLVCRMQKLGTHEHSHLCGV

SEQ ID NO: 27590 - protein, 559 aa, Homo sapiens
  REGION 1..559: note = ENSP00000349774
MRIQRETDFLKCAHCLAPRPSDPFARFCQECGSPVPPIFGCRLPPPEGAQMGLCAECRSLVPMNTPICVVCEAPLALQLQPQASLHLKEKVICRACGTGNPAHLRYCVTCEGALPSSQESMCSGDKAPPPPTQKGGTISCYRCGRWNLWEASFCGWCGAMLGIPAGCSVCPKCGASNHLSARFCGSCGICVKSLVKLSLDRSLALAAEEPRPFSEPRCAWQSLNIPLPRSDVGTKRDIGTQTVGLFYPSGKLLAKKEQELASQKQRQEKMSDHKPLLTAISPGRGYWRRQLDHISAHLRCYAQNNPEFRALIAEPRMGKLISATVHEDGCEVSIRLNYSQVSNKNLYLNKAVNFSDHLLSSAAEGDGGLCGSRSSWVSDYSQSTSDTIEKIKRIKNFKTKTFQEKKEQLIPENRLLLKEVGPTGEGRVSVIEQLLDEGADPNCCDEDNRPVITVAVMNKHHEAIPVLVQRGADIDQQWGPLRNTALHEATLLGLAGRESTATLLGCNASIQKKNAGGQTAYDLALNTGDDLVTSLFAAKFGQGLEDQLAQTRSLSLDDC

SEQ ID NO: 27591 - protein, 752 aa, Homo sapiens
  REGION 1..752: note = ENSP00000351734
MTAGSVCVPQIIPLRVPQPGKANHEIDNNTLLEMKSDTPDVNIYYTLDGSKPEFLKRIGYGENNTFKYIKPITLPDGKIQVKAIAVSKDCRQSGIVTKVFHVDYEPPNIVSPEDNVENVLKDSSRQEFKNGFVGSKLKKKYKNSENQRSWNVNLRKFPESPLEIPAYGGGSGSRPPTRQSQSPGFAHVSGQKCLTSTEIMRIQRETDFLKCAHCLAPRPSDPFARFCQECGSPVPPIFGCRLPPPEGAQMGLCAECRSLVPMNTPICVVCEAPLALQLQPQASLHLKEKVICRACGTGNPAHLRYCVTCEGALPSSQESMCSGDKAPPPPTQKGGTISCYRCGRWNLWEASFCGWCGAMLGIPAGCSVCPKCGASNHLSARFCGSCGICVKSLVKLSLDRSLALAAEEPRPFSESLNIPLPRSDVGTKRDIGTQTVGLFYPSGKLLAKKEQELASQKQRQEKMSDHKPLLTAISPGRGYWRRQLDHISAHLRCYAQNNPEFRALIAEPRMGKLISATVHEDGCEVSIRLNYSQVSNKNLYLNKAVNFSDHLLSSAAEGDGGLCGSRSSWVSDYSQSTSDTIEKIKRIKNFKTKTFQEKKEQLIPENRLLLKEVGPTGEGRVSVIEQLLDEGADPNCCDEDNRPVITVAVMNKHHEAIPVLVQRGADIDQQWGPLRNTALHEATLLGLAGRESTATLLGCNASIQKKNAGGQTAYDLALNTGDDLVTSLFAAKFGQGLEDQLAQTRSLSLDDC

SEQ ID NO: 27592 - protein, 189 aa, Homo sapiens
  REGION 1..189: note = ENSP00000476391
MTAGSVCVPQIIPLRVPQPGKANHEIDNNTLLEMKSDTPDVNIYYTLDGSKPEFLKRIGYGENNTFKYIKPITLPDGKIQVKAIAVSKDCRQSGIVTKVFHVDYEPPNIVSPEDNVENVLKDSSRQEFKNGFVGSKLKKKYKNSENQRSWNVNLRKFPESPLEIPAYGGGSGSRPPTRQSQARHSPIYI

SEQ ID NO: 27593 - protein, 574 aa, Homo sapiens
  REGION 1..574: note = ENSP00000477046
MTAGSVCVPQIIPLRVPQPGKANHEIDNNTLLEMKSDTPDVNIYYTLDGSKPEFLKRIGYGENNTFKYIKPITLPDGKIQVKAIAVSKDCRQSGIVTKVFHVDYEPPNIVSPEDNVENVLKDSSRQEFKNGFVGSKLKKKYKNSENQRSWNVNLRKFPESPLEIPAYGGGSGSRPPTRQSQSPGFAHVSGQKCLTSTEIMRIQRETDFLKCAHCLAPRPSDPFARFCQECGSPVPPIFGCRLPPPEGAQMGLCAECRSLVPMNTPICVVCEAPLALQLQPQASLHLKEKVICRACGTGNPAHLRYCVTCEGALPSSQESMCSGDKAPPPPTQKGGTISCYRCGRWNLWEASFCGWCGAMLGIPAGCSVCPKCGASNHLSARFCGSCGICVKSLVKLSLDRSLALAAEEPRPFSESLNIPLPRSDVGTKRDIGTQTVGLFYPSGKLLAKKEQELASQKQRQEKMSDHKPLLTAISPGRGYWRRQLDHISAHLRCYAQNNPEFRALIAEPRMGKLISATVHEDGCEVSIRLNYSQVSNKVRKLRLREVKQPASSKGTKLVSGRPRIHTWQPETFPS

SEQ ID NO: 27594 - protein, 140 aa, Homo sapiens
  REGION 1..140: note = ENSP00000484666
MSDHKPLLTAISPGRGYWRRQLDHISAHLRCYAQNNPEFRALIAEPRMGKLISATVHEDGCEVSIRLNYSQVSNKNLYLNKAVNFSDHLLSSAAEGDGGLCGSRSSWVSDYSQSTSDTIEKIKRIKNFKTKTFQEKKEQL

SEQ ID NO: 27595 - protein, 247 aa, Homo sapiens; identical to SEQ ID NO: 27589
  REGION 1..247: note = ENSP00000477872

SEQ ID NO: 27596 - protein, 752 aa, Homo sapiens; identical to SEQ ID NO: 27591
  REGION 1..752: note = ENSP00000262547

SEQ ID NO: 27597 - protein, 462 aa, Homo sapiens
  REGION 1..462: note = ENSP00000328866
MGLCAECRSLVPMNTPICVVCEAPLALQLQPQASLHLKEKVICRACGTGNPAHLRYCVTCEGALPSSQELGIPAGCSVCPKCGASNHLSARFCGSCGICVKSLVKLSLDRSLALAAEEPRPFSESLNIPLPRSDVGTKRDIGTQTVGLFYPSGKLLAKKEQELASQKQRQEKMSDHKPLLTAISPGRGYWRRQLDHISAHLRCYAQNNPEFRALIAEPRMGKLISATVHEDGCEVSIRLNYSQVSNKNLYLNKAVNFSDHLLSSAAEGDGGLCGSRSSWVSDYSQSTSDTIEKIKRIKNFKTKTFQEKKEQLIPENRLLLKEVGPTGEGRVSVIEQLLDEGADPNCCDEDNRPVITVAVMNKHHEAIPVLVQRGADIDQQWGPLRNTALHEATLLGLAGRESTATLLGCNASIQKKNAGGQTAYDLALNTGDDLVTSLFAAKFGQGLEDQLAQTRSLSLDDC

SEQ ID NO: 27598 - protein, 767 aa, Homo sapiens
  REGION 1..767: note = ENSP00000332148
MQSPAATAEGLSGPLFGAYTFPTFKFQPRHDSMDWRRISTLDVDRVARELDVATLQENIAGITFCNLDREVCSRCGQPVDPALLKVLRLAQLIIEYLLHCQDCLSASVAQLEARLQTSLGQQQRGQQELGRQADELKGVREESRRRRKMISTLQQLLMQTGTHSYHTCHLCDKTFMNATFLRGHIQRRHAGVAEGGKQKKQEQPVEEVLEELRAKLKWTQGELEAQREAERQRQLQEAELIHQREIEAKKEFDKWKEQEWTKLYGEIDKLKKLFWDEFKNVAKQNSTLEEKLRALQSHSVMESKLGSLRDEESEEWLRQARELQALREKTEIQKTEWKRKVKELHEEHMAEKKELQEENQRLQASLSQDQKKAAAQSQCQISTLRAQLQEQARIIASQEEMIQSLSLRKVEGIHKVPKAVDTEEDSPEEEMEDSQDEQHKVLAALRRNPTLLKHFRPILEDTLEEKLESMGIRKDAKGISIQTLRHLESLLRVQREQKARKFSEFLSLRGKLVKEVTSRAKERQENGAVVSQPDGQPSVKSQQSTLVTREAQPKTRTLQVALPSTPAEPPPPTRQSHGSHGSSLTQVSAPAPRPGLHGPSSTPPSSGPGMSTPPFSSEEDSEGDRVQRVSLQPPKVPSRMVPRPKDDWDWSDTETSEENAQPPGQGSGTLVQSMVKNLEKQLEAPAKKPAGGVSLFFMPNAGPQRAATPGRKPQLSEDESDLEISSLEDLPLDLDQREKPKPLSRSKLPEKFGTGPQSSGQPRVPAW

SEQ ID NO: 27599 - protein, 148 aa, Homo sapiens
  REGION 1..148: note = ENSP00000417228
  VARIANT 1: note = Any amino acid
XQPPKVPSRMVPRPKDDWDWSDTETSEENAQPPGQGSGTLVQSMVKNLEKQLEAPAKKPAGGVSLFFMPNAGPQRAATPGRKPQVGCRMLRVYSGILYRTSSEFGGPGVKVGEGPASVILCPSGTLWVTSLCPCAHGEMASLEYLYPS

SEQ ID NO: 27600 - protein, 539 aa, Homo sapiens
  REGION 1..539: note = ENSP00000419486
MQSPAATAEGLSGPLFGAYTFPTFKFQPRHDSMDWRRISTLDVDRVARELDVATLQENIAGITFCNLDREVCSRCGQPVDPALLKVLRLAQLIIEYLLHCQDCLSASVAQLEARLQTSLGQQQRGQQELGRQADELKGVREESRRRRKMISTLQQLLMQTGTHSYHTCHLCDKTFMNATFLRGHIQRRHAGVAEGGKQKKQEQPVEEVLEELRAKLKWTQGELEAQREAERQRQLQEAELIHQREIEAKKEFDKWKEQEWTKLYGEIDKLKKLFWDEFKNVAKQNSTLEEKLRALQSHSVMESKLGSLRDEESEEWLRQARELQALREKTEIQKTEWKRKVKELHEEHMAEKKELQEENQRLQASLSQDQKKAAAQSQCQISTLRAQLQEQARIIASQEEMIQSLSLRKVEGIHKVPKAVDTEEDSPEEEMEDSQDEQHKVLAALRRNPTLLKHFRPILEDTLEEKLESMGIRKDAKGISIQTLRHLESLLRVQREQKARKFSEFLSLRGKLVKEVTSRAKERQENGAVVSQPDGQPSG

SEQ ID NO: 27601 - protein, 67 aa, Homo sapiens
  REGION 1..67: note = ENSP00000420600
MQSPAATAEGLSGPLFGAYTFPTFKFQPRHDSMDWRRISTLDVDRVARELDVATLQENIAGITFCNL

SEQ ID NO: 27602 - protein, 39 aa, Homo sapiens
  REGION 1..39: note = ENSP00000420051
MQSPAATAEGLSGPLFGAYTFPTFKFQPRHDSMDWRRIS

SEQ ID NO: 27603 - protein, 465 aa, Homo sapiens
  REGION 1..465: note = ENSP00000262904
MRKGIQPALEQYLVTAGGGEGAAVVAAAAAASMDKRALLASPGFAAAAAAAAAPGAYIQILTTNTSTTSCSSSLQSGAVAAGPLLPSAPGAEQTAGSLLYTTPHGPSSRAGLLQQPPALGRGGSGGGGGPPAKRRLELGESGHQYLSDGLKTPKGKGRAALRSPDSPKTPKSPSEKTRYDTSLGLLTKKFIQLLSQSPDGVLDLNKAAEVLKVQKRRIYDITNVLEGIHLIKKKSKNNVQWMGCSLSEDGGMLAQCQGLSKEVTELSQEEKKLDELIQSCTLDLKLLTEDSENQRLAYVTYQDIRKISGLKDQTVIVVKAPPETRLEVPDSIESLQIHLASTQGPIEVYLCPEETETHSPMKTNNQDHNGNIPKPASKDLASTNSGHSDCSVSMGNLSPLASPANLLQQTEDQIPSNLEGPFVNLLPPLLQEDYLLSLGEEEGISDLFDAYDLEKLPLVEDFMCS

SEQ ID NO: 27604 - protein, 334 aa, Homo sapiens
  REGION 1..334: note = ENSP00000443418
MPLQQQAKRRLELGESGHQYLSDGLKTPKGKGRAALRSPDSPKKKTRYDTSLGLLTKKFIQLLSQSPDGVLDLNKAAEVLKVQKRRIYDITNVLEGIHLIKKKSKNNVQWMGCSLSEDGGMLAQCQGLSKEVTELSQEEKKLDELIQSCTLDLKLLTEDSENQRLAYVTYQDIRKISGLKDQTVIVVKAPPETRLEVPDSIESLQIHLASTQGPIEVYLCPEETETHSPMKTNNQDHNGNIPKPASKDLASTNSGHSDCSVSMGNLSPLASPANLLQQTEDQIPSNLEGPFVNLLPPLLQEDYLLSLGEEEGISDLFDAYDLEKLPLVEDFMCS

SEQ ID NO: 27605 - protein, 128 aa, Homo sapiens
  REGION 1..128: note = ENSP00000483249
MDKRALLASPGFAAPPAKRRLELGESGHQYLSDGLKTPKGKGRAALRSPDSPKKKTRYDTSLGLLTKKFIQLLSQSPDGVLDLNKAAEVLKVQKRRIYDITNVLEGISDLFDAYDLEKLPLVEDFMCS

SEQ ID NO: 27606 - protein, 591 aa, Homo sapiens
  REGION 1..591: note = ENSP00000322898
MFGIQESIQRSGSSMKEEPLGSGMNAVRTWMQGAGVLDANTAAQSGVGLARAHFEKQPPSNLRKSNFFHFVLALYDRQGQPVEIERTAFVGFVEKEKEANSEKTNNGIHYRLQLLYSNGIRTEQDFYVRLIDSMTKQAIVYEGQDKNPEMCRVLLTHEIMCSRCCDKKSCGNRNETPSDPVIIDRFFLKFFLKCNQNCLKNAGNPRDMRRFQVVVSTTVNVDGHVLAVSDNMFVHNNSKHGRRARRLDPSEGTPSYLEHATPCIKAISPSEGWTTGGATVIIIGDNFFDGLQVIFGTMLVWSELITPHAIRVQTPPRHIPGVVEVTLSYKSKQFCKGTPGRFIYTALNEPTIDYGFQRLQKVIPRHPGDPERLPKEVILKRAADLVEALYGMPHNNQEIILKRAADIAEALYSVPRNHNQLPALANTSVHAGMMGVNSFSGQLAVNVSEASQATNQGFTRNSSSVSPHGYVPSTTPQQTNYNSVTTSMNGYGSAAMSNLGGSPTFLNGSAANSPYAIVPSSPTMASSTSLPSNCSSSSGIFSFSPANMVSAVKQKSAFAPVVRPQTSPPPTCTSTNGNSLQAISGMIVPPM

SEQ ID NO: 27607 - protein, 560 aa, Homo sapiens
  REGION 1..560: note = ENSP00000370029
MFGIQESIQRSGSSMKEEPLGSGMNAVRTWMQGAGVLDANTAAQSGVGLARAHFEKQPPSNLRKSNFFHFVLALYDRQGQPVEIERTAFVGFVEKEKEANSEKTNNGIHYRLQLLYSNGIRTEQDFYVRLIDSMTKQAIVYEGQDKNPEMCRVLLTHEIMCRFFLKFFLKCNQNCLKNAGNPRDMRRFQVVVSTTVNVDGHVLAVSDNMFVHNNSKHGRRARRLDPSEATPCIKAISPSEGWTTGGATVIIIGDNFFDGLQVIFGTMLVWSELITPHAIRVQTPPRHIPGVVEVTLSYKSKQFCKGTPGRFIYTALNEPTIDYGFQRLQKVIPRHPGDPERLPKEVILKRAADLVEALYGMPHNNQEIILKRAADIAEALYSVPRNHNQLPALANTSVHAGMMGVNSFSGQLAVNVSEASQATNQGFTRNSSSVSPHGYVPSTTPQQTNYNSVTTSMNGYGSAAMSNLGGSPTFLNGSAANSPYAIVPSSPTMASSTSLPSNCSSSSGIFSFSPANMVSAVKQKSAFAPVVRPQTSPPPTCTSTNGNSLQAISGMIVPPM

SEQ ID NO: 27608 - protein, 523 aa, Homo sapiens
  REGION 1..523: note = ENSP00000428020
MFGIQESIQRSGSSMKEEPLGSGMNAVRTWMQGAGVLDANTAAQSGVGLARAHFEKQPPSNLRKSNFFHFVLALYDRQGQPVEIERTAFVGFVEKEKEANSEKTNNGIHYRLQLLYSNGIRTEQDFYVRLIDSMTKQAIVYEGQDKNPEMCRVLLTHEIMCSRCCDKKSCGNRNETPSDPVIIDRFFLKFFLKCNQNCLKNAGNPRDMRRFQVVVSTTVNVDGHVLAVSDNMFVHNNSKHGRRARRLDPSEATPCIKAISPSEGWTTGGATVIIIGDNFFDGLQVIFGTMLVWSELITPHAIRVQTPPRHIPGVVEVTLSYKSKQFCKGTPGRFIYTALNEPTIDYGFQRLQKVIPRHPGDPERLPKEVILKRAADLVEALYGMPHNNQEIILKRAADIAEALYSVPRNHNQLPALANTSVHAGMMGVNSFSGQLAVNVSEASQATNQVVPSSPTMASSTSLPSNCSSSSGIFSFSPANMVSAVKQKSAFAPVVRPQTSPPPTCTSTNGNSLQAISGMIVPPM

SEQ ID NO: 27609 - protein, 407 aa, Homo sapiens
  REGION 1..407: note = ENSP00000477809
RFFLKFFLKCNQNCLKNAGNPRDMRRFQVVVSTTVNVDGHVLAVSDNMFVHNNSKHGRRARRLDPSEGTPSYLEHATPCIKAISPSEGWTTGGATVIIIGDNFFDGLQVIFGTMLVWSELITPHAIRVQTPPRHIPGVVEVTLSYKSKQFCKGTPGRFIYTALNEPTIDYGFQRLQKVIPRHPGDPERLPKEVILKRAADLVEALYGMPHNNQEIILKRAADIAEALYSVPRNHNQLPALANTSVHAGMMGVNSFSGQLAVNVSEASQATNQGFTRNSSSVSPHGYVPSTTPQQTNYNSVTTSMNGYGSAAMSNLGGSPTFLNGSAANSPYAIVPSSPTMASSTSLPSNCSSSSGIFSFSPANMVSAVKQKSAFAPVVRPQTSPPPTCTSTNGNSLQAISGMIVPPM

SEQ ID NO: 27610 - protein, 575 aa, Homo sapiens
  REGION 1..575: note = ENSP00000430241
MFGIQDTLGRGPTLKEKSLGAEMDSVRSWVRNVGVVDANVAAQSGVALSRAHFEKQPPSNLRKSNFFHFVLALYDRQGQPVEIERTAFVDFVENDKEQGNEKTNNGTHYKLQLLYSNGVRTEQDLYVRLIDSVTKQPIAYEGQNKNPEMCRVLLTHEVMCSRCCEKKSCGNRNETPSDPVIIDRFFLKFFLKCNQNCLKTAGNPRDMRRFQVVLSTTVNVDGHVLAVSDNMFVHNNSKHGRRARRLDPSEATPCIKAISPSEGWTTGGAMVIIIGDNFFDGLQVVFGTMLVWSELITPHAIRVQTPPRHIPGVVEVTLSYKSKQFCKGAPGRFIYTALNEPTIDYGFQRLQKVIPRHPGDPERLAKEMLLKRAADLVEALYGTPHNNQDIILKRAADIAEALYSVPRNPSQLPALSSSPAHSGMMGINSYGSQLGVSISESTQGNNQGYIRNTSSISPRGYSSSSTPQQSNYSTSSNSMNGYSNVPMANLGVPGSPGFLNGSPTGSPYGIMSSSPTVGSSSTSSILPFSSSVFPAVKQKSAFAPVIRPQGSPSPACSSGNGNGFRAMTGLVVPPM

SEQ ID NO: 27611 - protein, 427 aa, Homo sapiens
  REGION 1..427: note = ENSP00000386178
MCRVLLTHEVMCSRCCEKKSCGNRNETPSDPVIIDRFFLKFFLKCNQNCLKTAGNPRDMRRFQVVLSTTVNVDGHVLAVSDNMFVHNNSKHGRRARRLDPSEATPCIKAISPSEGWTTGGAMVIIIGDNFFDGLQVVFGTMLVWSELITPHAIRVQTPPRHIPGVVEVTLSYKSKQFCKGAPGRFIYTALNEPTIDYGFQRLQKVIPRHPGDPERLAKEMLLKRAADLVEALYGTPHNNQDIILKRAADIAEALYSVPRNPSQLPALSSSPAHSGMMGINSYGSQLGVSISESTQGNNQGYIRNTSSISPRGYSSSSTPQQSNYSTSSNSMNGYSNVPMANLGVPGSPGFLNGSPTGSPYGIMSSSPTVGSSSTSSILPFSSSVFPAVKQKSAFAPVIRPQGSPSPACSSGNGNGFRAMTGLVVPPM

SEQ ID NO: 27612 - protein, 264 aa, Homo sapiens
  REGION 1..264: note = ENSP00000437909
MVIIIGDNFFDGLQVVFGTMLVWSELITPHAIRVQTPPRHIPGVVEVTLSYKSKQFCKGAPGRFIYTALNEPTIDYGFQRLQKVIPRHPGDPERLAKEMLLKRAADLVEALYGTPHNNQDIILKRAADIAEALYSVPRNPSQLPALSSSPAHSGMMGINSYGSQLGVSISESTQGNNQGYIRNTSSISPRGYSSSSTPQQSNYSTSSNSMNGYSNVPMANLGVPGSPGFLNGSPTGSPYGTGLWLTWLLKAFWGKKRIETIPFL

SEQ ID NO: 27613 - protein, 551 aa, Homo sapiens
  REGION 1..551: note = ENSP00000357637
MFGIQENIPRGGTTMKEEPLGSGMNPVRSWMHTAGVVDANTAAQSGVGLARAHFEKQPPSNLRKSNFFHFVLALYDRQGQPVEIERTAFVDFVEKEKEPNNEKTNNGIHYKLQLLYSNGVRTEQDLYVRLIDSMTKQAIVYEGQDKNPEMCRVLLTHEIMCSRCCDKKSCGNRNETPSDPVIIDRFFLKFFLKCNQNCLKNAGNPRDMRRFQVVVSTTVNVDGHVLAVSDNMFVHNNSKHGRRARRLDPSEATPCIKAISPSEGWTTGGATVIIIGDNFFDGLQVVFGTMLVWSELITPHAIRVQTPPRHIPGVVEVTLSYKSKQFCKGAPGRFVYTALNEPTIDYGFQRLQKVIPRHPGDPERLPKEVLLKRAADLVEALYGMPHNNQEIILKRAADIAEALYSVPRNHNQIPTLGNNPAHTGMMGVNSFSSQLAVNVSETSQANDQVGYSRNTSSVSPRGYVPSSTPQQSNYNTVSTSMNGYGSGAMASLGVPGSPGFLNGSSANSPYGMKQKSAFAPVVRPQASPPPSCTSANGNGLQAMSGLVVPPM

SEQ ID NO: 27614 - protein, 596 aa, Homo sapiens
  REGION 1..596: note = ENSP00000347463
MFGIQENIPRGGTTMKEEPLGSGMNPVRSWMHTAGVVDANTAAQSGVGLARAHFEKQPPSNLRKSNFFHFVLALYDRQGQPVEIERTAFVDFVEKEKEPNNEKTNNGIHYKLQLLYSNGVRTEQDLYVRLIDSMTKQAIVYEGQDKNPEMCRVLLTHEIMCSRCCDKKSCGNRNETPSDPVIIDRFFLKFFLKCNQNCLKNAGNPRDMRRFQVVVSTTVNVDGHVLAVSDNMFVHNNSKHGRRARRLDPSEGTAPSYLENATPCIKAISPSEGWTTGGATVIIIGDNFFDGLQVVFGTMLVWSELITPHAIRVQTPPRHIPGVVEVTLSYKSKQFCKGAPGRFVYTALNEPTIDYGFQRLQKVIPRHPGDPERLPKEVLLKRAADLVEALYGMPHNNQEIILKRAADIAEALYSVPRNHNQIPTLGNNPAHTGMMGVNSFSSQLAVNVSETSQANDQVGYSRNTSSVSPRGYVPSSTPQQSNYNTVSTSMNGYGSGAMASLGVPGSPGFLNGSSANSPYGIVPSSPTMAASSVTLPSNCSSTHGIFSFSPANVISAVKQKSAFAPVVRPQASPPPSCTSANGNGLQAMSGLVVPPM

SEQ ID NO: 27615 - protein, 191 aa, Homo sapiens
  REGION 1..191: note = ENSP00000387543
  VARIANT 1: note = Any amino acid
XFSSQLAVNVSETSQANDQVGYSRNTSSVSPRGYVPSSTPQQSNYNTVSTSMNGYGSGAMASLGVPGSPGFLNGSSANSPYGIVPSSPTMAASSVTLPSNCSSTHGIFSFSPANVISAVKQKSAFAPVVRPQASPPPSCTSANGNGLQGSLLGAEDVAAEKTNWPFCEVGGIFHFDELMLKKGTGKLCLGW

SEQ ID NO: 27616 - protein, 540 aa, Homo sapiens
  REGION 1..540: note = ENSP00000405003
MDALPRSGLNLKEEPLLPAGLGSVRSWMQGAGILDASTAAQSGVGLARAHFEKQPPSNLRKSNFFHFVLAMYDRQGQPVEVERTAFIDFVEKDREPGAEKTNNGIHYRLRLVYNNGLRTEQDLYVRLIDSMSKQAIIYEGQDKNPEMCRVLLTHEIMCSRCCDRKSCGNRNETPSDPVIIDRFFLKFFLKCNQNCLKNAGNPRDMRRFQVVVSTTVSVDGHVLAVSDNMFVHNNSKHGRRARRLDPSEAATPCIKAISPGEGWTTGGATVIVIGDNFFDGLQVVFGNVLVWSELITPHAIRVQTPPRHIPGVVEVTLSYKSKQFCKGCPGRFVYTALNEPTIDYGFQRLQKVIPRHPGDPERLPKEVLLKRAADLAEALYGVPGSNQELLLKRAADVAEALYSTPRAPGPLAPLAPSHPHPAVVGINAFSSPLAIAVGDATPGPEPGYARSCSSASPRGFAPSPGSQQSGYGGGLGAGLGGYGAPGVAGLGVPGSPSFLNGSTATSPFAKERLRPRAAPPKLPTPGLPQSPRRGASRPVF

SEQ ID NO: 27617 - protein, 621 aa, Homo sapiens
  REGION 1..621: note = ENSP00000345030
RPRRGGAGTGPRGESAGLLLLLLQDALPRSGLNLKEEPLLPAGLGSVRSWMQGAGILDASTAAQSGVGLARAHFEKQPPSNLRKSNFFHFVLAMYDRQGQPVEVERTAFIDFVEKDREPGAEKTNNGIHYRLRLVYNNGLRTEQDLYVRLIDSMSKQAIIYEGQDKNPEMCRVLLTHEIMCSRCCDRKSCGNRNETPSDPVIIDRFFLKFFLKCNQNCLKNAGNPRDMRRFQVVVSTTVSVDGHVLAVSDNMFVHNNSKHGRRARRLDPSEAATPCIKAISPGEGWTTGGATVIVIGDNFFDGLQVVFGNVLVWSELITPHAIRVQTPPRHIPGVVEVTLSYKSKQFCKGCPGRFVYTALNEPTIDYGFQRLQKVIPRHPGDPERLPKEVLLKRAADLAEALYGVPGSNQELLLKRAADVAEALYSTPRAPGPLAPLAPSHPHPAVVGINAFSSPLAIAVGDATPGPEPGYARSCSSASPRGFAPSPGSQQSGYGGGLGAGLGGYGAPGVAGLGVPGSPSFLNGSTATSPFAIMPSSPPLAAASSMSLPAAAPTTSVFSFSPVNMISAVKQRSAFAPVLRPPSSPPQACPRAHGEGLPDQSFEDSDKFHSPARGLQGLAYS

SEQ ID NO: 27618 - protein, 602 aa, Homo sapiens
  REGION 1..602: note = ENSP00000477023
MFPAQDALPRSGLNLKEEPLLPAGLGSVRSWMQGAGILDASTAAQSGVGLARAHFEKQPPSNLRKSNFFHFVLAMYDRQGQPVEVERTAFIDFVEKDREPGAEKTNNGIHYRLRLVYNNGLRTEQDLYVRLIDSMSKQAIIYEGQDKNPEMCRVLLTHEIMCSRCCDRKSCGNRNETPSDPVIIDRFFLKFFLKCNQNCLKNAGNPRDMRRFQVVVSTTVSVDGHVLAVSDNMFVHNNSKHGRRARRLDPSEAATPCIKAISPGEGWTTGGATVIVIGDNFFDGLQVVFGNVLVWSELITPHAIRVQTPPRHIPGVVEVTLSYKSKQFCKGCPGRFVYTALNEPTIDYGFQRLQKVIPRHPGDPERLPKEVLLKRAADLAEALYGVPGSNQELLLKRAADVAEALYSTPRAPGPLAPLAPSHPHPAVVGINAFSSPLAIAVGDATPGPEPGYARSCSSASPRGFAPSPGSQQSGYGGGLGAGLGGYGAPGVAGLGVPGSPSFLNGSTATSPFAIMPSSPPLAAASSMSLPAAAPTTSVFSFSPVNMISAVKQRSAFAPVLRPPSSPPQACPRAHGEGLPDQSFEDSDKFHSPARGLQGLAYS

SEQ ID NO: 27619 - protein, 177 aa, Homo sapiens
  REGION 1..177: note = ENSP00000477107
LIDSMSKQAIIYEGQDKNPEMCRVLLTHEIMCSRCCDRKSCGNRNETPSDPVIIDRFFLKFFLKCNQNCLKNAGNPRDMRRFQVVVSTTVSVDGHVLAVSDNMFVHNNSKHGRRARRLDPSEAAPTSFETCTLMLAASCLPVGALGMEEAEEGVPGLLYLGSSPSGCLMDSGPTHSQ

SEQ ID NO: 27620 - protein, 598 aa, Homo sapiens
  REGION 1..598: note = ENSP00000370022
MDALPRSGLNLKEEPLLPAGLGSVRSWMQGAGILDASTAAQSGVGLARAHFEKQPPSNLRKSNFFHFVLAMYDRQGQPVEVERTAFIDFVEKDREPGAEKTNNGIHYRLRLVYNNGLRTEQDLYVRLIDSMSKQAIIYEGQDKNPEMCRVLLTHEIMCSRCCDRKSCGNRNETPSDPVIIDRFFLKFFLKCNQNCLKNAGNPRDMRRFQVVVSTTVSVDGHVLAVSDNMFVHNNSKHGRRARRLDPSEAATPCIKAISPGEGWTTGGATVIVIGDNFFDGLQVVFGNVLVWSELITPHAIRVQTPPRHIPGVVEVTLSYKSKQFCKGCPGRFVYTALNEPTIDYGFQRLQKVIPRHPGDPERLPKEVLLKRAADLAEALYGVPGSNQELLLKRAADVAEALYSTPRAPGPLAPLAPSHPHPAVVGINAFSSPLAIAVGDATPGPEPGYARSCSSASPRGFAPSPGSQQSGYGGGLGAGLGGYGAPGVAGLGVPGSPSFLNGSTATSPFAIMPSSPPLAAASSMSLPAAAPTTSVFSFSPVNMISAVKQRSAFAPVLRPPSSPPQACPRAHGEGLPDQSFEDSDKFHSPARGLQGLAYS

SEQ ID NO: 27621 - protein, 87 aa, Homo sapiens
  REGION 1..87: note = ENSP00000475102
  VARIANT 1: note = Any amino acid
XSVMAPVDVDLNLVSNILESYSSQAGLAGPASNLLQSMGVQLPDNTDHRPTNGVSLCCPGWSAVALSWLNASSTSQVHAILLPQPPE

SEQ ID NO: 27622 - protein, 644 aa, Homo sapiens
  REGION 1..644: note = ENSP00000362070
MEETMKLATMEDTVEYCLFLIPDESRDSDKHKEILQKYIERIITRFAPMLVPYIWQNQPFNLKYKPGKGGVPAHMFGVTKFGDNIEDEWFIVYVIKQITKEFPELVARIEDNDGEFLLIEAADFLPKWLDPENSTNRVFFCHGELCIIPAPRKSGAESWLPTTPPTIPQALNIITAHSEKILASESIRAAVNRRIRGYPEKIQASLHRAHCFLPAGIVAVLKQRPRLVAAAVQAFYLRDPIDLRACRVFKTFLPETRIMTSVTFTKCLYAQLVQQRFVPDRRSGYRLPPPSDPQYRAHELGMKLAHGFEILCSKCSPHFSDCKKSLVTASPLWASFLESLKKNDYFKGLIEGSAQYRERLEMAENYFQLSVDWPESSLAMSPGEEILTLLQTIPFDIEDLKKEAANLPPEDDDQWLDLSPDQLDQLLQEAVGKKESESVSKEEKEQNYDLTEVSESMKAFISKVSTHKGAELPREPSEAPITFDADSFLNYFDKILGPRPNESDSDDLDDEDFECLDSDDDLDFETHEPGEEASLKGTLDNLKSYMAQMDQELAHTCISKSFTTRNQVEPVSQTTDNNSDEEDSGTGESVMAPVDVDLNLVSNILESYSSQAGLAGPASNLLQSMGVQLPDNTDHRPTSKPTKN

SEQ ID NO: 27623 - protein, 163 aa, Homo sapiens
  REGION 1..163: note = ENSP00000433778
MFGVTKFGDNIEDEWFIVYVIKQITKEFPELVARIEDNDGEFLLIEAADFLPKWLDPENSTNRVFFCHGELCIIPAPRKSGAESWLPTTPPTIPQALNIITAHSEKILASESIRAAVNRRIRGSHSLNVYMHNWCNKGLCQTGGVDTGCLLHLIPSTEPMNWA

SEQ ID NO: 27624 - protein, 601 aa, Homo sapiens
  REGION 1..601: note = ENSP00000395786
MEETMKLATMEDTVEYCLFLIPDESRDSDKHKEILQKYIERIITRFAPMLVPYIWQNQPFNLKYKPGKGGVPAHMFGVTKFGDNIEDEWFIVYVIKQITKEFPELVARIEDNDGEFLLIEAADFLPKWLDPENSTNRVFFCHGELCIIPAPRKSGAESWLPTTPPTIPQALNIITAHSEKILASESIRAAVNRRIRGYPEKIQASLHRAHCFLPAGIVAVLKQRPRLVAAAVQAFYLRDPIDLRACRVFKTFLPETRIMTSAHGFEILCSKCSPHFSDCKKSLVTASPLWASFLESLKKNDYFKGLIEGSAQYRERLEMAENYFQLSVDWPESSLAMSPGEEILTLLQTIPFDIEDLKKEAANLPPEDDDQWLDLSPDQLDQLLQEAVGKKESESVSKEEKEQNYDLTEVSESMKAFISKVSTHKGAELPREPSEAPITFDADSFLNYFDKILGPRPNESDSDDLDDEDFECLDSDDDLDFETHEPGEEASLKGTLDNLKSYMAQMDQELAHTCISKSFTTRNQVEPVSQTTDNNSDEEDSGTGESVMAPVDVDLNLVSNILESYSSQAGLAGPASNLLQSMGVQLPDNTDHRPTSKPTKN

SEQ ID NO: 27625 - protein, 677 aa, Homo sapiens
  REGION 1..677: note = ENSP00000401566
MEETMKLATMEDTVEYCLFLIPDESRDSDKHKEILQKYIERIITRFAPMLVPYIWQNQPFNLKYKPGKGGVPAHMFGVTKFGDNIEDEWFIVYVIKQITKEFPELVARIEDNDGEFLLIEAADFLPKWLDPENSTNRVFFCHGELCIIPAPRKSGAESWLPTTPPTIPQALNIITAHSEKILASESIRAAVNRRIRGYPEKIQASLHRAHCFLPAGIVAVLKQRPRLVAAAVQAFYLRDPIDLRACRVFKTFLPETRIMTSVTFTKCLYAQLVQQRFVPDRRSGYRLPPPSDPQYRAHELGMKLAHGFEILCSKCSPHFSDCKKSLVTASPLWASFLESLKKNDYFKGLIEGSAQYRERLEMAENYFQLSVDWPERLEVQWRDPGLLQAPPPGFTPFICLSLLSTWDNSSLAMSPGEEILTLLQTIPFDIEDLKKEAANLPPEDDDQWLDLSPDQLDQLLQEAVGKKESESVSKEEKEQNYDLTEVSESMKAFISKVSTHKGAELPREPSEAPITFDADSFLNYFDKILGPRPNESDSDDLDDEDFECLDSDDDLDFETHEPGEEASLKGTLDNLKSYMAQMDQELAHTCISKSFTTRNQVEPVSQTTDNNSDEEDSGTGESVMAPVDVDLNLVSNILESYSSQAGLAGPASNLLQSMGVQLPDNTDHRPTSKPTKN

SEQ ID NO: 27626 - protein, 212 aa, Homo sapiens
  REGION 1..212: note = ENSP00000391367
MFGVTKFGDNIEDEWFIVYVIKQITKEFPELVARIEDNDGEFLLIEAADFLPKWLDPENSTNRVFFCHGELCIIPAPRKSGAESWLPTTPPTIPQALNIITAHSEKILASESIRAAVNRRIRGYPEKIQASLHRAHCFLPAGIVAVLKQRPRLVAAAVQAFYLRDPIDLRACRVFKTFLPETRIMTSVTFTKCLYAQLVQQRFVPDRRSGYR

SEQ ID NO: 27627 - protein, 217 aa, Homo sapiens
  REGION 1..217: note = ENSP00000416288
MEETMKLATMEDTVEYCLFLIPDESRDSDKHKEILQKYIERIITRFAPMLVPYIWQNQPFNLKYKPGKGGVPAHMFGVTKFGDNIEDEWFIVYVIKQITKEFPELVASTNRVFFCHGELCIIPAPRKSGAESWLPTTPPTIPQALNIITAHSEKILASESIRAAVNRRIRGYPEKIQASLHRAHCFLPAGIVAVLKQRPRLVAAAVQAFYLRDPIDL

SEQ ID NO: 27628 - protein, 754 aa, Homo sapiens
  REGION 1..754: note = ENSP00000405088
MMSTYKRATLDEEDLVDSLSEGDAYPNGLQVNFHSPRSGQRCWAARTQVEKRLVVLVVLLAAGLVACLAALGIQYQTRSPSVCLSEACVSVTSSILSSMDPTVDPCHDFFSYACGGWIKANPVPDGHSRWGTFSNLWEHNQAIIKHLLENSTASVSEAERKAQVYYRACMNETRIEELRAKPLMELIERLGGWNITGPWAKDNFQDTLQVVTAHYRTSPFFSVYVSADSKNSNSNVIQVDQSGLGLPSRDYYLNKTENEKVLTGYLNYMVQLGKLLGGGDEEAIRPQMQQILDFETALANITIPQEKRRDEELIYHKVTAAELQTLAPAINWLPFLNTIFYPVEINESEPIVVYDKEYLEQISTLINTTDRCLLNNYMIWNLVRKTSSFLDQRFQDADEKFMEVMYGTKKTCLPRWKFCVSDTENNLGFALGPMFVKATFAEDSKSIATEIILEIKKAFEESLSTLKWMDEETRKSAKEKADAIYNMIGYPNFIMDPKELDKVFNDYTAVPDLYFENAMRFFNFSWRVTADQLRKAPNRDQWSMTPPMVNAYYSPTKNEIVFPAGILQAPFYTRSSPKALNFGGIGVVVGHELTHAFDDQGREYDKDGNLRPWWKNSSVEAFKRQTECMVEQYSNYSVNGEPVNGRHTLGENIADNGGLKAAYRAYQNWVKKNGAEHSLPTLGLTNNQLFFLGFAQVWCSVRTPESSHEGLITDPHSPSRFRVIGSLSNSKEFSEHFRCPPGSPMNPPHKCEVW

SEQ ID NO: 27629 - protein, 758 aa, Homo sapiens
  REGION 1..758: note = ENSP00000349581
MPLQGLGLQRNPFLQGKRGPGLTSSPPLLPPSLQVNFHSPRSGQRCWAARTQVEKRLVVLVVLLAAGLVACLAALGIQYQTRSPSVCLSEACVSVTSSILSSMDPTVDPCHDFFSYACGGWIKANPVPDGHSRWGTFSNLWEHNQAIIKHLLENSTASVSEAERKAQVYYRACMNETRIEELRAKPLMELIERLGGWNITGPWAKDNFQDTLQVVTAHYRTSPFFSVYVSADSKNSNSNVIQVDQSGLGLPSRDYYLNKTENEKVLTGYLNYMVQLGKLLGGGDEEAIRPQMQQILDFETALANITIPQEKRRDEELIYHKVTAAELQTLAPAINWLPFLNTIFYPVEINESEPIVVYDKEYLEQISTLINTTDRCLLNNYMIWNLVRKTSSFLDQRFQDADEKFMEVMYGTKKTCLPRWKFCVSDTENNLGFALGPMFVKATFAEDSKSIATEIILEIKKAFEESLSTLKWMDEETRKSAKEKADAIYNMIGYPNFIMDPKELDKVFNDYTAVPDLYFENAMRFFNFSWRVTADQLRKAPNRDQWSMTPPMVNAYYSPTKNEIVFPAGILQAPFYTRSSPKALNFGGIGVVVGHELTHAFDDQGREYDKDGNLRPWWKNSSVEAFKRQTECMVEQYSNYSVNGEPVNGRHTLGENIADNGGLKAAYRAYQNWVKKNGAEHSLPTLGLTNNQLFFLGFAQVWCSVRTPESSHEGLITDPHSPSRFRVIGSLSNSKEFSEHFRCPPGSPMNPPHKCEVW

SEQ ID NO: 27630 - protein, 770 aa, Homo sapiens
  REGION 1..770: note = ENSP00000364028
MRGVWPPPVSALLSALGMSTYKRATLDEEDLVDSLSEGDAYPNGLQVNFHSPRSGQRCWAARTQVEKRLVVLVVLLAAGLVACLAALGIQYQTRSPSVCLSEACVSVTSSILSSMDPTVDPCHDFFSYACGGWIKANPVPDGHSRWGTFSNLWEHNQAIIKHLLENSTASVSEAERKAQVYYRACMNETRIEELRAKPLMELIERLGGWNITGPWAKDNFQDTLQVVTAHYRTSPFFSVYVSADSKNSNSNVIQVDQSGLGLPSRDYYLNKTENEKVLTGYLNYMVQLGKLLGGGDEEAIRPQMQQILDFETALANITIPQEKRRDEELIYHKVTAAELQTLAPAINWLPFLNTIFYPVEINESEPIVVYDKEYLEQISTLINTTDRCLLNNYMIWNLVRKTSSFLDQRFQDADEKFMEVMYGTKKTCLPRWKFCVSDTENNLGFALGPMFVKATFAEDSKSIATEIILEIKKAFEESLSTLKWMDEETRKSAKEKADAIYNMIGYPNFIMDPKELDKVFNDYTAVPDLYFENAMRFFNFSWRVTADQLRKAPNRDQWSMTPPMVNAYYSPTKNEIVFPAGILQAPFYTRSSPKALNFGGIGVVVGHELTHAFDDQGREYDKDGNLRPWWKNSSVEAFKRQTECMVEQYSNYSVNGEPVNGRHTLGENIADNGGLKAAYRAYQNWVKKNGAEHSLPTLGLTNNQLFFLGFAQVWCSVRTPESSHEGLITDPHSPSRFRVIGSLSNSKEFSEHFRCPPGSPMNPPHKCEVW

SEQ ID NO: 27631 - protein, 738 aa, Homo sapiens
  REGION 1..738: note = ENSP00000388439
MRGVWPPPVSALLSALGMSTYKRATLDEEDLVDSLSEGDAYPNGLQVNFHSPRSGQRCWAARTQVEKRLVVLVVLLAAGLVACLAALGIQYQTRSPSVCLSEACVSVTSSILSSMDPTVDPCHDFFSYACGGWIKANPVPDGHSRWGTFSNLWEHNQAIIKHLLENSTASVSEAERKAQVYYRACMNETRIEELRAKPLMELIERLGGWNITGPWAKDNFQDTLQVVTAHYRTSPFFSVYVSADSKNSNSNVIQVDQSGLGLPSRDYYLNKTENEKVLTGYLNYMVQLGKLLGGGDEEAIRPQMQQILDFETALANITIPQEKRRDEELIYHKVTAAELQTLAPAINWLPFLNTIFYPVEINESEPIVVYDKEYLEQISTLINTTDRCLLNNYMIWNLVRKTSSFLDQRFQDADEKFMEVMYGTKKTCLPRWKFCVSDTENNLGFALGPMFVKATFAEDSKSIATEIILEIKKAFEESLSTLKWMDEETRKSAKEKADAIYNMIGYPNFIMDPKELDKVFNDYTAVPDLYFENAMRFFNFSWRVTADQLRKAPNRDQWSMTPPMVNAYYSPTKNEIVFPAGILQAPFYTRSSPKALNFGGIGVVVGHELTHAFDDQGREYDKDGNLRPWWKNSSVEAFKRQTECMVEQYSNYSVNGEPVNGRHTLGENIADNGGLKAAYRVWCSVRTPESSHEGLITDPHSPSRFRVIGSLSNSKEFSEHFRCPPGSPMNPPHKCEVW

SEQ ID NO: 27632 - protein, 767 aa, Homo sapiens
  REGION 1..767: note = ENSP00000264205
MEALRESVLHLALQMSTYKRATLDEEDLVDSLSEGDAYPNGLQVNFHSPRSGQRCWAARTQVEKRLVVLVVLLAAGLVACLAALGIQYQTRSPSVCLSEACVSVTSSILSSMDPTVDPCHDFFSYACGGWIKANPVPDGHSRWGTFSNLWEHNQAIIKHLLENSTASVSEAERKAQVYYRACMNETRIEELRAKPLMELIERLGGWNITGPWAKDNFQDTLQVVTAHYRTSPFFSVYVSADSKNSNSNVIQVDQSGLGLPSRDYYLNKTENEKVLTGYLNYMVQLGKLLGGGDEEAIRPQMQQILDFETALANITIPQEKRRDEELIYHKVTAAELQTLAPAINWLPFLNTIFYPVEINESEPIVVYDKEYLEQISTLINTTDRCLLNNYMIWNLVRKTSSFLDQRFQDADEKFMEVMYGTKKTCLPRWKFCVSDTENNLGFALGPMFVKATFAEDSKSIATEIILEIKKAFEESLSTLKWMDEETRKSAKEKADAIYNMIGYPNFIMDPKELDKVFNDYTAVPDLYFENAMRFFNFSWRVTADQLRKAPNRDQWSMTPPMVNAYYSPTKNEIVFPAGILQAPFYTRSSPKALNFGGIGVVVGHELTHAFDDQGREYDKDGNLRPWWKNSSVEAFKRQTECMVEQYSNYSVNGEPVNGRHTLGENIADNGGLKAAYRAYQNWVKKNGAEHSLPTLGLTNNQLFFLGFAQVWCSVRTPESSHEGLITDPHSPSRFRVIGSLSNSKEFSEHFRCPPGSPMNPPHKCEVW

SEQ ID NO: 27633 - protein, 77 aa, Homo sapiens
  REGION 1..77: note = ENSP00000431856
MDPTVDPCHDFFSYACGGWIKANPVPDGHSRWGTFSNLWEHNQAIIKHLLENSTASVSEAERKAQVYYRACMNETRI

SEQ ID NO: 27634 - protein, 134 aa, Homo sapiens
  REGION 1..134: note = ENSP00000436633
MEQMSTYKRATLDEEDLVDSLSEGDAYPNGLQVNFHSPRSGQRCWAARTQVEKRLVVLVVLLAAGLVACLAALGIQYQTRSPSVCLSEACVSVTSSILSSMDPTVDPCHDFFSYACGGWIKANPVPDGHSRWGT

SEQ ID NO: 27635 - protein, 103 aa, Homo sapiens
  REGION 1..103: note = ENSP00000432860
MSTYKRATLDEEDLVDSLSEGDAYPNGLQVNFHSPRSGQRCWAARTQVEKRLVVLVVLLAAGLVACLAALGIQYQTRSPSVCLSEACVSVTSSILSSMDPTVD

SEQ ID NO: 27636 - protein, 292 aa, Homo sapiens
  REGION 1..292: note = ENSP00000360577
MLRVLCLLRPWRPLRARGCASDGAAGGSEIQVRALAGPDQGITEILMNRPSARNALGNVFVSELLETLAQLREDRQVRVLLFRSGVKGVFCAGADLKEREQMSEAEVGVFVQRLRGLMNDIAAFPAPTIAAMDGFALGGGLELALACDLRVAASSAVMGLIETTRGLLPGAGGTQRLPRCLGVALAKELIFTGRRLSGTEAHVLGLVNHAVAQNEEGDAAYQRARALAQEILPQAPIAVRLGKVAIDRGTEVDIASGMAIEGMCYAQNIPTRDRLEGMAAFREKRTPKFVGK

SEQ ID NO: 27637 - protein, 65 aa, Homo sapiens
  REGION 1..65: note = ENSP00000360575
MLRVLCLLRPWRPLRARGCASDGAAGGSEIQVRALAGPDQGKCAVPGRRMTRLGLGRRQRGTGRL

SEQ ID NO: 27638 - protein, 261 aa, Homo sapiens
  REGION 1..261: note = ENSP00000351125
MLRVLCLLRPWRPLRARGCASDGAAGGSEIQVRALAGPDQGITEILMNRPSARNALGNVFVSELLETLAQLREDRQVRVLLFRSGVKGVFCAGADLKEREQMSEAEVGVFVQRLRGLMNDIASSAVMGLIETTRGLLPGAGGTQRLPRCLGVALAKELIFTGRRLSGTEAHVLGLVNHAVAQNEEGDAAYQRARALAQEILPQAPIAVRLGKVAIDRGTEVDIASGMAIEGMCYAQNIPTRDRLEGMAAFREKRTPKFVGK

SEQ ID NO: 27639 - protein, 48 aa, Homo sapiens
  REGION 1..48: note = ENSP00000446190
MLRVLCLLRPWRPLRARGCASDGAAGGSEIQVRALAGPDQDKAEDPGR

SEQ ID NO: 27640 - protein, 219 aa, Homo sapiens
  REGION 1..219: note = ENSP00000441962
MLRVLCLLRPWRPLRARGCASDGAAGGSEIQVRALAGPDQGITEILMNRPSARNALGNVFVSELLETLAQLREDRQVRVLLFRSGVKGVFCAGADLKEREQMSEAEVGVFVQRLRGLMNDIASSAVMGLIETTRGLLPGAGGTQRLPRCLGVALAKELIFTGRRLSGTEAHVLGLVNHAVAQNEEGDAAYQRARALAQEILPQVDIASGMAIEGMCYAQ

SEQ ID NO: 27641 - protein, 49 aa, Homo sapiens
  REGION 1..49: note = ENSP00000439906
MLRVLCLLRPWRPLRARGCASDGAAGGSEIQVRALAGPDQGCRFHEDRP

SEQ ID NO: 27642 - protein, 43 aa, Homo sapiens
  REGION 1..43: note = ENSP00000438535
MLRVLCLLRPWRPLRARGCASDGAAGGSEIQVRALAGPDQAGH

SEQ ID NO: 27643 - protein, 244 aa, Homo sapiens
  REGION 1..244: note = ENSP00000439264
MLRVLCLLRPWRPLRARGCASDGAAGGSEIQVRALAGPDQGITEILMNRPSARNALGNVFVSELLETLAQLREDRQVRVLLFRSGVKGVFCAGADLKEREQMSEAEVGVFVQRLRGLMNDIASSAVMGLIETTRGLLPGAGGTQRLPRCLGVALAKELIFTGRRLSGTEAHVLGLVNHAVAQNEEGDAAYQRARALAQEILPQVDIASGMAIEGMCYAQNIPTRDRLEGMAAFREKRTPKFVGK

SEQ ID NO: 27644 - protein, 78 aa, Homo sapiens
  REGION 1..78: note = ENSP00000393659
MRDLARGMFVFGYDNYMAHAFPQDELNPIHCRGRGPDRGDPSNLNINDVLGNYSLTLVDALDTLAGPGKPPFCSQNNN

SEQ ID NO: 27645 - protein, 657 aa, Homo sapiens
  REGION 1..657: note = ENSP00000256497
MQWRALVLGLVLLRLGLHGVLWLVFGLGPSMGFYQRFPLSFGFQRLRSPDGPASPTSGPVGRPGGVSGPSWLQPPGTGAAQSPRKAPRRPGPGMCGPANWGYVLGGRGRGPDEYEKRYSGAFPPQLRAQMRDLARGMFVFGYDNYMAHAFPQDELNPIHCRGRGPDRGDPSNLNINDVLGNYSLTLVDALDTLAIMGNSSEFQKAVKLVINTVSFDKDSTVQVFEATIRVLGSLLSAHRIITDSKQPFGDMTIKDYDNELLYMAHDLAVRLLPAFENTKTGIPYPRVNLKTGVPPDTNNETCTAGAGSLLVEFGILSRLLGDSTFEWVARRAVKALWNLRSNDTGLLGNVVNIQTGHWVGKQSGLGAGLDSFYEYLLKSYILFGEKEDLEMFNAAYQSIQNYLRRGREACNEGEGDPPLYVNVNMFSGQLMNTWIDSLQAFFPGLQVLIGDVEDAICLHAFYYAIWKRYGALPERYNWQLQAPDVLFYPLRPELVESTYLLYQATKNPFYLHVGMDILQSLEKYTKVKCGYATLHHVIDKSTEDRMESFFLSETCKYLYLLFDEDNPVHKSGTRYMFTTEGHIVSVDEHLRELPWKEFFSEEGGQDQGGKSVHRPKPHELKVINSSSNCNRVPDERRYSLPLKSIYMRQIDQMVGLI

SEQ ID NO: 27646 - protein, 53 aa, Homo sapiens
  REGION 1..53: note = ENSP00000394615
MPAAPARPCNGERSSWGWCSSGLASMEYCGSSSGWGPAWASTSAFRSASASSV

SEQ ID NO: 27647 - protein, 376 aa, Homo sapiens
  REGION 1..376: note = ENSP00000394099
MGNSSEFQKAVKLVINTVSFDKDSTVQVFEATIRVLGSLLSAHRIITDSKQPFGDMTIKDYDNELLYMAHDLAVRLLPAFENTKTGIPYPRVNLKTGVPPDTNNETCTAGAGSLLVEFGILSRLLGDSTFEWVARRAVKALWNLRSNDTGLLGNVVNIQTGHWVGKQSGLGAGLDSFYEYLLKSYILFGEKEDLEMFNAAYQSIQNYLRRGREACNEGEGDPPLYVNVNMFSGQLMNTWIDSLQAFFPGLQVLIGDVEDAICLHAFYYAIWKRYGALPERYNWQLQAPDVLFYPLRPELVESTYLLYQATKNPFYLHVGMDILQSLEKYTKVKCGYATLHHVIDKSTEDRMESFFLSETCKYLYLVCVLQDEPRNI

SEQ ID NO: 27648 - protein, 480 aa, Homo sapiens
  REGION 1..480: note = ENSP00000296591
MKRSVAVWLLVGLSLGVPQFGKGDICDPNPCENGGICLPGLADGSFSCECPDGFTDPNCSSVVEVASDEEEPTSAGPCTPNPCHNGGTCEISEAYRGDTFIGYVCKCPRGFNGIHCQHNINECEVEPCKNGGICTDLVANYSCECPGEFMGRNCQYKCSGPLGIEGGIISNQQITASSTHRALFGLQKWYPYYARLNKKGLINAWTAAENDRWPWIQINLQRKMRVTGVITQGAKRIGSPEYIKSYKIAYSNDGKTWAMYKVKGTNEDMVFRGNIDNNTPYANSFTPPIKAQYVRLYPQVCRRHCTLRMELLGCELSGCSEPLGMKSGHIQDYQITASSIFRTLNMDMFTWEPRKARLDKQGKVNAWTSGHNDQSQWLQVDLLVPTKVTGIITQGAKDFGHVQFVGSYKLAYSNDGEHWTVYQDEKQRKDKVFQGNFDNDTHRKNVIDPPIYARHIRILPWSWYGRITLRSELLGCTEEE

SEQ ID NO: 27649 - protein, 470 aa, Homo sapiens
  REGION 1..470: note = ENSP00000369483
MKRSVAVWLLVGLSLGVPQFGKGDICDPNPCENGGICLPGLADGSFSCECPDGFTDPNCSSVVEVGPCTPNPCHNGGTCEISEAYRGDTFIGYVCKCPRGFNGIHCQHNINECEVEPCKNGGICTDLVANYSCECPGEFMGRNCQYKCSGPLGIEGGIISNQQITASSTHRALFGLQKWYPYYARLNKKGLINAWTAAENDRWPWIQINLQRKMRVTGVITQGAKRIGSPEYIKSYKIAYSNDGKTWAMYKVKGTNEDMVFRGNIDNNTPYANSFTPPIKAQYVRLYPQVCRRHCTLRMELLGCELSGCSEPLGMKSGHIQDYQITASSIFRTLNMDMFTWEPRKARLDKQGKVNAWTSGHNDQSQWLQVDLLVPTKVTGIITQGAKDFGHVQFVGSYKLAYSNDGEHWTVYQDEKQRKDKVFQGNFDNDTHRKNVIDPPIYARHIRILPWSWYGRITLRSELLGCTEEE

SEQ ID NO: 27650 - protein, 532 aa, Homo sapiens
  REGION 1..532: note = ENSP00000366416
MNKSTCLMAAETPSKRWRLHCLAFSQRFVRAGPACSSREACSSPRAGWNPAGFRLPGRWSPFVALHLVCQIREALKLRSGHRTPSGAGSSMQPPPSLCGRALVALVLACGLSRIWGEERGFPPDRATPLLQTAEIMTPPTKTLWPKGSNASLARSLAPAEVPKGDRTAGSPPRTISPPPCQGPIEIKETFKYINTVVSCLVFVLGIIGNSTLLRIIYKNKCMRNGPNILIASLALGDLLHIVIDIPINVYKLLAEDWPFGAEMCKLVPFIQKASVGITVLSLCALSIDRYRAVASWSRIKGIGVPKWTAVEIVLIWVVSVVLAVPEAIGFDIITMDYKGSYLRICLLHPVQKTAFMQFYKTAKDWWLFSFYFCLPLAITAFFYTLMTCEMLRKKSGMQIALNDHLKQRREVAKTVFCLVLVFALCWLPLHLSRILKLTLYNQNDPNRCELLSFLLVLDYIGINMASLNSCINPIALYLVSKRFKNCFKSCLCCWCQSFEEKQSLEEKQSCLKFKANDHGYDNFRSSNKYSSS

SEQ ID NO: 27651 - protein, 442 aa, Homo sapiens
  REGION 1..442: note = ENSP00000335311
MQPPPSLCGRALVALVLACGLSRIWGEERGFPPDRATPLLQTAEIMTPPTKTLWPKGSNASLARSLAPAEVPKGDRTAGSPPRTISPPPCQGPIEIKETFKYINTVVSCLVFVLGIIGNSTLLRIIYKNKCMRNGPNILIASLALGDLLHIVIDIPINVYKLLAEDWPFGAEMCKLVPFIQKASVGITVLSLCALSIDRYRAVASWSRIKGIGVPKWTAVEIVLIWVVSVVLAVPEAIGFDIITMDYKGSYLRICLLHPVQKTAFMQFYKTAKDWWLFSFYFCLPLAITAFFYTLMTCEMLRKKSGMQIALNDHLKQRREVAKTVFCLVLVFALCWLPLHLSRILKLTLYNQNDPNRCELLSFLLVLDYIGINMASLNSCINPIALYLVSKRFKNCFKSCLCCWCQSFEEKQSLEEKQSCLKFKANDHGYDNFRSSNKYSSS

SEQ ID NO: 27652 - protein, 436 aa, Homo sapiens
  REGION 1..436: note = ENSP00000486202
MQPPPSLCGRALVALVLACGLSRIWGEERGFPPDRATPLLQTAEIMTPPTKTLWPKGSNASLARSLAPAEVPKGDRTAGSPPRTISPPPCQGPIEIKETFKYINTVVSCLVFVLGIIGNSTLLRIIYKNKCMRNGPNILIASLALGDLLHIVIDIPINVYKLLAEDWPFGAEMCKLVPFIQKASVGITVLSLCALSIDRYRAVASWSRIKGIGVPKWTAVEIVLIWVVSVVLAVPEAIGFDIITMDYKGSYLRICLLHPVQKTAFMQFYKTAKDWWLFSFYFCLPLAITAFFYTLMTCEMLRKKSGMQIALNDHLKQRREVAKTVFCLVLVFALCWLPLHLSRILKLTLYNQNDPNRCELLSFLLVLDYIGINMASLNSCINPIALYLVSKRFKNCFKAGPHVGNKLVMLFSVNIECDGTVNQNPTMWPERKSNNN

SEQ ID NO: 27653 - protein, 78 aa, Homo sapiens
  REGION 1..78: note = ENSP00000487082
MQPPPSLCGRALVALVLACGLSRIWGEERGFPPDRATPLLQTAEIMTPPTKTLWPKGSNASLARSLAPAEVPKGDRTA

SEQ ID NO: 27654 - protein, 595 aa, Homo sapiens
  REGION 1..595: note = ENSP00000194130
MKFFSYILVYRRFLFVVFTVLVLLPLPIVLHTKEAECAYTLFVVATFWLTEALPLSVTALLPSLMLPMFGIMPSKKVASAYFKDFHLLLIGVICLATSIEKWNLHKRIALKMVMMVGVNPAWLTLGFMSSTAFLSMWLSNTSTAAMVMPIAEAVVQQIINAEAEVEATQMTYFNGSTNHGLEIDESVNGHEINERKEKTKPVPGYNNDTGKISSKVELEKNSGMRTKYRTKKGHVTRKLTCLCIAYSSTIGGLTTITGTSTNLIFAEYFNTRYPDCRCLNFGSWFTFSFPAALIILLLSWIWLQWLFLGFNFKEMFKCGKTKTVQQKACAEVIKQEYQKLGPIRYQEIVTLVLFIIMALLWFSRDPGFVPGWSALFSEYPGFATDSTVALLIGLLFFLIPAKTLTKTTPTGEIVAFDYSPLITWKEFQSFMPWDIAILVGGGFALADGCEESGLSKWIGNKLSPLGSLPAWLIILISSLMVTSLTEVASNPATITLFLPILSPLAEAIHVNPLYILIPSTLCTSFAFLLPVANPPNAIVFSYGHLKVIDMVKAGLGVNIVGVAVVMLGICTWIVPMFDLYTYPSWAPAMSNETMP

SEQ ID NO: 27655 - protein, 36 aa, Homo sapiens
  REGION 1..36: note = ENSP00000388403
MKFFSYILVYRRFLFVVFTVLVLLPLPIVLHTKSKL

SEQ ID NO: 27656 - protein, 40 aa, Homo sapiens
  REGION 1..40: note = ENSP00000401417
MKFFSYILVYRRFLFVVFTVLVLLPLPIVLHTKLILTFPR

SEQ ID NO: 27657 - protein, 161 aa, Homo sapiens
  REGION 1..161: note = ENSP00000441309
MLPMFGIMPSKKVASAYFKDFHLLLIGVICLATSIEKWNLHKRIALKMVMMVGVNPAWLTLGFMSSTAFLSMWLSNTSTAAMVMPIAEAVVQQIINAEAEVEATQMTYFNGSTNHGLEIDESVNGHEINERKEKTKPVPGYNNDTGKISSKVELEKYLQVR

SEQ ID NO: 27658 - protein, 493 aa, Homo sapiens
  REGION 1..493: note = ENSP00000378058
MLKALFLTMLTLALVKSQDTEETITYTQCTDGYEWDPVRQQCKDIDECDIVPDACKGGMKCVNHYGGYLCLPKTAQIIVNNEQPQQETQPAEGTSGATTGVVAASSMATSGVLPGGGFVASAAAVAGPEMQTGRNNFVIRRNPADPQRIPSNPSHRIQCAAGYEQSEHNVCQDIDECTAGTHNCRADQVCINLRGSFACQCPPGYQKRGEQCVDIDECTIPPYCHQRCVNTPGSFYCQCSPGFQLAANNYTCVDINECDASNQCAQQCYNILGSFICQCNQGYELSSDRLNCEDIDECRTSSYLCQYQCVNEPGKFSCMCPQGYQVVRSRTCQDINECETTNECREDEMCWNYHGGFRCYPRNPCQDPYILTPENRCVCPVSNAMCRELPQSIVYKYMSIRSDRSVPSDIFQIQATTIYANTINTFRIKSGNENGEFYLRQTSPVSAMLVLVKSLSGPREHIVDLEMLTVSSIGTFRTSSVLRLTIIVGPFSF

SEQ ID NO: 27659 - protein, 46 aa, Homo sapiens
  REGION 1..46: note = ENSP00000489578
MLKALFLTMLTLALVKSQDTEETITYTQCTDGYEWDPVRQQCKEDS

SEQ ID NO: 27660 - protein, 493 aa, Homo sapiens; identical to SEQ ID NO: 27658
  REGION 1..493: note = ENSP00000347596

SEQ ID NO: 27661 - protein, 280 aa, Homo sapiens
  REGION 1..280: note = ENSP00000489183
  VARIANT 1: note = Any amino acid
XNNFVIRRNPADPQRIPSNPSHRIQCAAGYEQSEHNVCQDIDECTAGTHNCRADQVCINLRGSFACQCPPGYQKRGEQCVDIDECRTSSYLCQYQCVNEPGKFSCMCPQGYQVVRSRTCQDINECETTNECREDEMCWNYHGGFRCYPRNPCQDPYILTPENRCVCPVSNAMCRELPQSIVYKYMSIRSDRSVPSDIFQIQATTIYANTINTFRIKSGNENGEFYLRQTSPVSAMLVLVKSLSGPREHIVDLEMLTVSSIGTFRTSSVLRLTIIVGPFSF

SEQ ID NO: 27662 - protein, 172 aa, Homo sapiens
  REGION 1..172: note = ENSP00000392055
MLKALFLTMLTLALVKSQDTEETITYTQCTDGYEWDPVRQQCKDIDECDIVPDACKGGMKCVNHYGGYLCLPKTAQIIVNNEQPQQETQPAEGTSGATTGVVAASSMATSGVLPGGGFVASAAAVAGPEMQTGRNNFVIRRNPADPQRIPSNPSHRIQCAAGYEQSEHNVCQ

SEQ ID NO: 27663 - protein, 119 aa, Homo sapiens
  REGION 1..119: note = ENSP00000408195
MLKALFLTMLTLALVKSQDTEETITYTQCTDGYEWDPVRQQCKDIDECDIVPDACKGGMKCVNHYGGYLCLPKTAQIIVNNEQPQQETQPAEGTSGATTGVVAASSMATSGVLPGGGFV

SEQ ID NO: 27664 - protein, 106 aa, Homo sapiens
  REGION 1..106: note = ENSP00000398345
MLKALFLTMLTLALVKSQDTEETITYTQCTDGYEWDPVRQQCKDIDECDIVPDACKGGMKCVNHYGGYLCLPKTAQIIVNNEQPQQETQPAEGTSGATTGVVAASS

SEQ ID NO: 27665 - protein, 87 aa, Homo sapiens
  REGION 1..87: note = ENSP00000389319
MLKALFLTMLTLALVKSQDTEETITYTQCTDGYEWDPVRQQCKDIDECDIVPDACKGGMKCVNHYGGYLCLPKTAQIIVNNEQPQQE

SEQ ID NO: 27666 - protein, 61 aa, Homo sapiens
  REGION 1..61: note = ENSP00000399480
MLKALFLTMLTLALVKSQDTEETITYTQCTDGYEWDPVRQQCKDIDECDIVPDACKGGMKC

SEQ ID NO: 27667 - protein, 51 aa, Homo sapiens
  REGION 1..51: note = ENSP00000405686
MLKALFLTMLTLALVKSQDTEETITYTQCTDGYEWDPVRQQCKDIDECDIV

SEQ ID NO: 27668 - protein, 27 aa, Homo sapiens
  REGION 1..27: note = ENSP00000398387
MLKALFLTMLTLALVKSQDTEETITYT

SEQ ID NO: 27669 - protein, 749 aa, Homo sapiens
  REGION 1..749: note = ENSP00000404232
MALPLLPGNSFNRNVGKEKFHKSQHWGFCNNVMMLVSDEKPGIGGEPLLGQKIKPKCSIYPKGDGSDVPSWVAFDKQVLSFDAYLEEEVLDKSQTNYRIRYYKIYFYPEDDTIQVNEPEVKNSGLLQGTSIRRHRITLPPPDEDQFYTVYHFNVGTEVVFYGRTFKIYDCDAFTRNFLRKIGVKVNPPVQCPEDPYMKIRREVVEHVEPLRPYESLDTLKQFLQYHGKILCFFCLWDDSVSMFGDRRELILHYFLCDDTIEIKELLPHSSGRDALKMFLRRSKLPKNCPPRVYQPGQITDRAVLNSYGDFIKNQADGYLFDRYKLGKVDQEFYKDSDLSLGVTINVWGRKVLLYDCDEFTKSYYKSKYGIENFTSVSCKPPSPPPKIERKFPPYNGFGSEEDSLRNCIDLKPTPHRRNFKKFMEKDSYGSKSNILRFFAKLVTDKCVDLDRMFVISYYLGDDTISVFEPIERNSGIAGGMFLKRSRVKKPGQEVFKSELSEYIKAEELYIGVTVNVNGYLFRLLNADEYTLNYMEQNTDKYPFSNLKLALQKLKQEEGKSRELKQVFKAADSKHTNMVDYNTFRDILMSLTVGNLAEQEFVTIARHYRVPEGTCSDMDFLIALAHEKFKKNMFENFDTFIYSCVYEDREKKNVLPTKDIKRLCKSSRLPLSDDLLESLLSRFEDSEKQIDYKSFFSALNWRKNPVPELQPASYLKERCEDVWLGMPSPIPAKYIDYWTFLKDAFGLEEE

SEQ ID NO: 27670 - protein, 143 aa, Homo sapiens
  REGION 1..143: note = ENSP00000386556
MGELQYDAGRDGFIDLMELKLMMEKLGAPQTHLGLKSMIKEVDEDFDGKLSFREFLLIFHKAAAGELQEDSGLMALAKLSEIDVALEGVKGAKNFFEAKVQALSSASKFEAELKAEQDERKREEEERRLRQAAFQKLKANFNT

SEQ ID NO: 27671 - protein, 239 aa, Homo sapiens
  REGION 1..239: note = ENSP00000264059
MASEELACKLERRLRREEAEESGPQLAPLGAPAPEPKPEPEPPARAPTASADAELSAQLSRRLDINEGAARPRRCRVFNPYTEFPEFSRRLIKDLESMFKLYDAGRDGFIDLMELKLMMEKLGAPQTHLGLKSMIKEVDEDFDGKLSFREFLLIFHKAAAGELQEDSGLMALAKLSEIDVALEGVKGAKNFFEAKVQALSSASKFEAELKAEQDERKREEEERRLRQAAFQKLKANFNT

SEQ ID NO: 27672 - protein, 99 aa, Homo sapiens
  REGION 1..99: note = ENSP00000395119
  VARIANT 1: note = Any amino acid
XELACKLERRLRREEAEESGPQLAPLGAPAPEPKPEPEPPARAPTASADAELSAQLSRRLDINEGAARPRRCRVFNPYTEFPEFSRRLIKDLESMFKLI

SEQ ID NO: 27673 - protein, 127 aa, Homo sapiens
  REGION 1..127: note = ENSP00000386243
MELKLMMEKLGAPQTHLGLKSMIKEVDEDFDGKLSFREFLLIFHKAAAGELQEDSGLMALAKLSEIDVALEGVKGAKNFFEAKVQALSSASKFEAELKAEQDERKREEEERRLRQAAFQKLKANFNT

SEQ ID NO: 27674 - protein, 81 aa, Homo sapiens
  REGION 1..81: note = ENSP00000401073
MELKLMMEKLGAPQTHLGLKSMIKEVDEDFDGKLSFREFLLIFHKAAAGELQEDSGLMALAKLSEIDVALEGVKGAKNFFE

SEQ ID NO: 27675 - protein, 127 aa, Homo sapiens; identical to SEQ ID NO: 27673
  REGION 1..127: note = ENSP00000386685

SEQ ID NO: 27676 - protein, 142 aa, Homo sapiens [sequence omitted]

SEQ ID NO: 27677 - protein, 240 aa, Homo sapiens
  REGION 1..240: note = ENSP00000365147
MATDELATKLSRRLQMEGEGGGETPEQPGLNGAAAAAAGAPDEAAEALGSADCELSAKLLRRADLNQGIGEPQSPSRRVFNPYTEFKEFSRKQIKDMEKMFKQYDAGRDGFIDLMELKLMMEKLGAPQTHLGLKNMIKEVDEDFDSKLSFREFLLIFRKAAAGELQEDSGLCVLARLSEIDVSSEGVKGAKSFFEAKVQAINVSSRFEEEIKAEQEERKKQAEEMKQRKAAFKELQSTFK

SEQ ID NO: 27678 - protein, 179 aa, Homo sapiens
  REGION 1..179: note = ENSP00000395153
  VARIANT 1: note = Any amino acid
XKMFKQYDAGRDGFIDLMELKLMMEKLGAPQTHLGLKNMIKEVDEDFDSKLSFREFLLIFRKAAAGELQEDSGLCVLARLSEIDVSSEGVKGAKSFFEAKWNWVCRWAPRTGSRGSGWQQLERLPSSALALQQPQNIGPGHQRVQPLRGGDQGRAGGKEEAGGGDEAAESGLQGAAVHL

SEQ ID NO: 27679 - protein, 188 aa, Homo sapiens [sequence omitted]

SEQ ID NO: 27680 - protein, 228 aa, Homo sapiens
  REGION 1..228: note = ENSP00000328777
MLHVEMLTLVFLVLWMCVFSQDPGSKAVADRYAVYWNSSNPRFQRGDYHIDVCINDYLDVFCPHYEDSVPEDKTERYVLYMVNFDGYSACDHTSKGFKRWECNRPHSPNGPLKFSEKFQLFTPFSLGFEFRPGREYFYISSAIPDNGRRSCLKLKVFVRPTNSCMKTIGVHDRVFDVNDKVENSLEPADDTVHESAEPSRGENAAQTPRIPSRLLAILLFLLAMLLTL

SEQ ID NO: 27681 - protein, 201 aa, Homo sapiens
  REGION 1..201: note = ENSP00000426989
MLHVEMLTLVFLVLWMCVFSQDPGSKAVADRYAVYWNSSNPRFQRGDYHIDVCINDYLDVFCPHYEDSVPEDKTERYVLYMVNFDGYSACDHTSKGFKRWECNRPHSPNGPLKFSEKFQLFTPFSLGFEFRPGREYFYISSAIPDNGRRSCLKLKVFVRPTNDTVHESAEPSRGENAAQTPRIPSRLLAILLFLLAMLLTL

SEQ ID NO: 27682 - protein, 340 aa, Homo sapiens
  REGION 1..340: note = ENSP00000226091
MGPPHSGPGGVRVGALLLLGVLGLVSGLSLEPVYWNSANKRFQAEGGYVLYPQIGDRLDLLCPRARPPGPHSSPNYEFYKLYLVGGAQGRRCEAPPAPNLLLTCDRPDLDLRFTIKFQEYSPNLWGHEFRSHHDYYIIATSDGTREGLESLQGGVCLTRGMKVLLRVGQSPRGGAVPRKPVSEMPMERDRGAAHSLEPGKENLPGDPTSNATSRGAEGPLPPPSMPAVAGAAGGLALLLLGVAGAGGAMCWRRRRAKPSESRHPGPGSFGRGGSLGLGGGGGMGPREAEPGELGIALRGGGAADPPFCPHYEKVSGDYGHPVYIVQDGPPQSPPNIYYKV

SEQ ID NO: 27683 - protein, 728 aa, Homo sapiens
  REGION 1..728: note = ENSP00000386082
MYGVCGCCGALRPRYKRLVDNIFPEDPEDGLVKTNMEKLTFYALSAPEKLDRIGAYLSERLIRDVGRHRYGYVCIAMEALDQLLMACHCQSINLFVESFLKMVAKLLESEKPNLQILGTNSFVKFANIEEDTPSYHRSYDFFVSRFSEMCHSSHDDLEIKTKIRMSGIKGLQGVVRKTVNDELQANIWDPQHMDKIVPSLLFNLQHVEEAESRSPSPLQAPEKEKESPAELAERCLRELLGRAAFGNIKNAIKPVLIHLDNHSLWEPKVFAIRCFKIIMYSIQPQHSHLVIQQLLGHLDANSRSAATVRAGIVEVLSEAAVIAATGSVGPTVLEMFNTLLRQLRLSIDYALTGSYDGAVSLGTKIIKEHEERMFQEAVIKTVGSFASTLPTYQRSEVILFIMSKVPRPSLHQAVDTGRTGENRNRLTQIMLLKSLLQVSTGFQCNNMMSALPSNFLDRLLSTALMEDAEIRLFVLEILISFIDRHGNRHKFSTISTLSDISVLKLKVDKCSRQDTVFMKKHSQQLYRHIYLSCKEETNVQKHYEALYGLLALISIELANEEVVVDLIRLVLAVQDVAQVNEENLPVYNRCALYALGAAYLNLISQLTTVPAFCQHIHEVIETRKKEAPYMLPEDVFVERPRLSQNLDGVVIELLFRQSKISEVLGGSGYNSDRLCLPYIPQLTDEDRLSKRRSIGETISLQVEVESRNSPEKEEVSVRATVLGQPHLL

SEQ ID NO: 27684 - protein, 817 aa, Homo sapiens
  REGION 1..817: note = ENSP00000384081
MYGVCGCCGALRPRYKRLVDNIFPEDPEDGLVKTNMEKLTFYALSAPEKLDRIGAYLSERLIRDVGRHRYGYVCIAMEALDQLLMACHCQSINLFVESFLKMVAKLLESEKPNLQILGTNSFVKFANIEEDTPSYHRSYDFFVSRFSEMCHSSHDDLEIKTKIRMSGIKGLQGVVRKTVNDELQANIWDPQHMDKIVPSLLFNLQHVEEAESRSPSPLQAPEKEKESPAELAERCLRELLGRAAFGNIKNAIKPVLIHLDNHSLWEPKVFAIRCFKIIMYSIQPQHSHLVIQQLLGHLDANSRSAATVRAGIVEVLSEAAVIAATGSVGPTVLEMFNTLLRQLRLSIDYALTGSYDGAVSLGTKIIKEHEERMFQEAVIKTVGSFASTLPTYQRSEVILFIMSKVPRPSLHQAVDTGRTGENRNRLTQIMLLKSLLQVSTGFQCNNMMSALPSNFLDRLLSTALMEDAEIRLFVLEILISFIDRHGNRHKFSTISTLSDISVLKLKVDKCSRQDTVFMKKHSQQLYRHIYLSCKEETNVQKHYEALYGLLALISIELANEEVVVDLIRLVLAVQDVAQVNEENLPVYNRCALYALGAAYLNLISQLTTVPAFCQHIHEVIETRKKEAPYMLPEDVFVERPRLSQNLDGVVIELLFRQSKISEVLGGSGYNSDRLCLPYIPQLTDEDRLSKRRSIGETISLQVEVESRNSPEKEERVPAEEITYETLKKAIVDSVAVEEQERERRRQVVEKFQKAPFEEIAAHCGARASLLQSKLNQIFEITIRPPPSPSGTITAAYGQPQNHSIPVYEMKFPDLCVY

SEQ ID NO: 27685 - protein, 782 aa, Homo sapiens
  REGION 1..782: note = ENSP00000385832
MEKLTFYALSAPEKLDRIGAYLSERLIRDVGRHRYGYVCIAMEALDQLLMACHCQSINLFVESFLKMVAKLLESEKPNLQILGTNSFVKFANIEEDTPSYHRSYDFFVSRFSEMCHSSHDDLEIKTKIRMSGIKGLQGVVRKTVNDELQANIWDPQHMDKIVPSLLFNLQHVEEAESRSPSPLQAPEKEKESPAELAERCLRELLGRAAFGNIKNAIKPVLIHLDNHSLWEPKVFAIRCFKIIMYSIQPQHSHLVIQQLLGHLDANSRSAATVRAGIVEVLSEAAVIAATGSVGPTVLEMFNTLLRQLRLSIDYALTGSYDGAVSLGTKIIKEHEERMFQEAVIKTVGSFASTLPTYQRSEVILFIMSKVPRPSLHQAVDTGRTGENRNRLTQIMLLKSLLQVSTGFQCNNMMSALPSNFLDRLLSTALMEDAEIRLFVLEILISFIDRHGNRHKFSTISTLSDISVLKLKVDKCSRQDTVFMKKHSQQLYRHIYLSCKEETNVQKHYEALYGLLALISIELANEEVVVDLIRLVLAVQDVAQVNEENLPVYNRCALYALGAAYLNLISQLTTVPAFCQHIHEVIETRKKEAPYMLPEDVFVERPRLSQNLDGVVIELLFRQSKISEVLGGSGYNSDRLCLPYIPQLTDEDRLSKRRSIGETISLQVEVESRNSPEKEERVPAEEITYETLKKAIVDSVAVEEQERERRRQVVEKFQKAPFEEIAAHCGARASLLQSKLNQIFEITIRPPPSPSGTITAAYGQPQNHSIPVYEMKFPDLCVY

SEQ ID NO: 27686 - protein, 669 aa, Homo sapiens
  REGION 1..669: note = ENSP00000384454
MCHSSHDDLEIKTKIRMSGIKGLQGVVRKTVNDELQANIWDPQHMDKIVPSLLFNLQHVEEAESRSPSPLQAPEKEKESPAELAERCLRELLGRAAFGNIKNAIKPVLIHLDNHSLWEPKVFAIRCFKIIMYSIQPQHSHLVIQQLLGHLDANSRSAATVRAGIVEVLSEAAVIAATGSVGPTVLEMFNTLLRQLRLSIDYALTGSYDGAVSLGTKIIKEHEERMFQEAVIKTVGSFASTLPTYQRSEVILFIMSKVPRPSLHQAVDTGRTGENRNRLTQIMLLKSLLQVSTGFQCNNMMSALPSNFLDRLLSTALMEDAEIRLFVLEILISFIDRHGNRHKFSTISTLSDISVLKLKVDKCSRQDTVFMKKHSQQLYRHIYLSCKEETNVQKHYEALYGLLALISIELANEEVVVDLIRLVLAVQDVAQVNEENLPVYNRCALYALGAAYLNLISQLTTVPAFCQHIHEVIETRKKEAPYMLPEDVFVERPRLSQNLDGVVIELLFRQSKISEVLGGSGYNSDRLCLPYIPQLTDEDRLSKRRSIGETISLQVEVESRNSPEKEERVPAEEITYETLKKAIVDSVAVEEQERERRRQVVEKFQKAPFEEIAAHCGARASLLQSKLNQIFEITIRPPPSPSGTITAAYGQPQNHSIPVYEMKFPDLCVY

SEQ ID NO: 27687 - protein, 652 aa, Homo sapiens
  REGION 1..652: note = ENSP00000264719
FVKFANIEEDTPSYHRSYDFFVSRFSEMCHSSHDDLEIKTKIRMSGIKGLQGVVRKTVNDELQANIWDPQHMDKIVPSLLFNLQHVEEAESRSPSPLQAPEKEKESPAELAERCLRELLGRAAFGNIKNAIKPVLIHLDNHSLWEPKVFAIRCFKIIMYSIQPQHSHLVIQQLLGHLDANSRSAATVRAGIVEVLSEAAVIAATGSVGPTVLEMFNTLLRQLRLSIDYALTGSYDGAVSLGTKIIKEHEERMFQEAVIKTVGSFASTLPTYQRSEVILFIMSKVPRPSLHQAVDTGRTGENRNRLTQIMLLKSLLQVSTGFQCNNMMSALPSNFLDRLLSTALMEDAEIRLFVLEILISFIDRHGNRHKFSTISTLSDISVLKLKVDKCSRQDTVFMKKHSQQLYRHIYLSCKEETNVQKHYEALYGLLALISIELANEEVVVDLIRLVLAVQVIETRKKEAPYMLPEDVFVERPRLSQNLDGVVIELLFRQSKISEVLGGSGYNSDRLCLPYIPQLTDEDRLSKRRSIGETISLQVEVESRNSPEKEERVPAEEITYETLKKAIVDSVAVEEQERERRRQVVEKFQKAPFEEIAAHCGARASLLQSKLNQIFEITIRPPPSPSGTITAAYGQPQNHSIPVYEMKFPDLCVY

SEQ ID NO: 27688 - protein, 1165 aa, Homo sapiens
  REGION 1..1165: note = ENSP00000424316
MLLTLIILLPVVSKFSFVSLSAPQHWSCPEGTLAGNGNSTCVGPAPFLIFSHGNSIFRIDTEGTNYEQLVVDAGVSVIMDFHYNEKRIYWVDLERQLLQRVFLNGSRQERVCNIEKNVSGMAINWINEEVIWSNQQEGIITVTDMKGNNSHILLSALKYPANVAVDPVERFIFWSSEVAGSLYRADLDGVGVKALLETSEKITAVSLDVLDKRLFWIQYNREGSNSLICSCDYDGGSVHISKHPTQHNLFAMSLFGDRIFYSTWKMKTIWIANKHTGKDMVRINLHSSFVPLGELKVVHPLAQPKAEDDTWEPDVNECAFWNHGCTLGCKNTPGSYYCTCPVGFVLLPDGKRCHQLVSCPRNVSECSHDCVLTSEGPLCFCPEGSVLERDGKTCSGCSSPDNGGCSQLCVPLSPVSWECDCFPGYDLQLDEKSCAASGPQPFLLFANSQDIRHMHFDGTDYGTLLSQQMGMVYALDHDPVENKIYFAHTALKWIERANMDGSQRERLIEEGVDVPEGLAVDWIGRRFYWTDRGKSLIGRSDLNGKRSKIITKENISQPRGIAVHPMAKRLFWTDTGINPRIESSSLQGLGRLVIASSDLIWPSGITIDFLTDKLYWCDAKQSVIEMANLDGSKRRRLTQNDVGHPFAVAVFEDYVWFSDWAMPSVMRVNKRTGKDRVRLQGSMLKPSSLVVVHPLAKPGADPCLYQNGGCEHICKKRLGTAWCSCREGFMKASDGKTCLALDGHQLLAGGEVDLKNQVTPLDILSKTRVSEDNITESQHMLVAEIMVSDQDDCAPVGCSMYARCISEGEDATCQCLKGFAGDGKLCSDIDECEMGVPVCPPASSKCINTEGGYVCRCSEGYQGDGIHCLDIDECQLGEHSCGENASCTNTEGGYTCMCAGRLSEPGLICPDSTPPPHLREDDHHYSVRNSDSECPLSHDGYCLHDGVCMYIEALDKYACNCVVGYIGERCQYRDLKWWELRHAGHGQQQKVIVVAVCVVVLVMLLLLSLWGAHYYRTQKLLSKNPKNPYEESSRDVRSRRPADTEDGMSSCPQPWFVVIKEHQDLKNGGQPVAGEDGQAADGSMQPTSWRQEPQLCGMGTEQGCWIPVSSDKGSCPQVMERSFHMPSYGTQTLEGGVEKPHSLLSANPLWQQRALDPPHQMELTQ

SEQ ID NO: 27689 - protein, 1207 aa, Homo sapiens
  REGION 1..1207: note = ENSP00000265171
MLLTLIILLPVVSKFSFVSLSAPQHWSCPEGTLAGNGNSTCVGPAPFLIFSHGNSIFRIDTEGTNYEQLVVDAGVSVIMDFHYNEKRIYWVDLERQLLQRVFLNGSRQERVCNIEKNVSGMAINWINEEVIWSNQQEGIITVTDMKGNNSHILLSALKYPANVAVDPVERFIFWSSEVAGSLYRADLDGVGVKALLETSEKITAVSLDVLDKRLFWIQYNREGSNSLICSCDYDGGSVHISKHPTQHNLFAMSLFGDRIFYSTWKMKTIWIANKHTGKDMVRINLHSSFVPLGELKVVHPLAQPKAEDDTWEPEQKLCKLRKGNCSSTVCGQDLQSHLCMCAEGYALSRDRKYCEDVNECAFWNHGCTLGCKNTPGSYYCTCPVGFVLLPDGKRCHQLVSCPRNVSECSHDCVLTSEGPLCFCPEGSVLERDGKTCSGCSSPDNGGCSQLCVPLSPVSWECDCFPGYDLQLDEKSCAASGPQPFLLFANSQDIRHMHFDGTDYGTLLSQQMGMVYALDHDPVENKIYFAHTALKWIERANMDGSQRERLIEEGVDVPEGLAVDWIGRRFYWTDRGKSLIGRSDLNGKRSKIITKENISQPRGIAVHPMAKRLFWTDTGINPRIESSSLQGLGRLVIASSDLIWPSGITIDFLTDKLYWCDAKQSVIEMANLDGSKRRRLTQNDVGHPFAVAVFEDYVWFSDWAMPSVMRVNKRTGKDRVRLQGSMLKPSSLVVVHPLAKPGADPCLYQNGGCEHICKKRLGTAWCSCREGFMKASDGKTCLALDGHQLLAGGEVDLKNQVTPLDILSKTRVSEDNITESQHMLVAEIMVSDQDDCAPVGCSMYARCISEGEDATCQCLKGFAGDGKLCSDIDECEMGVPVCPPASSKCINTEGGYVCRCSEGYQGDGIHCLDIDECQLGEHSCGENASCTNTEGGYTCMCAGRLSEPGLICPDSTPPPHLREDDHHYSVRNSDSECPLSHDGYCLHDGVCMYIEALDKYACNCVVGYIGERCQYRDLKWWELRHAGHGQQQKVIVVAVCVVVLVMLLLLSLWGAHYYRTQKLLSKNPKNPYEESSRDVRSRRPADTEDGMSSCPQPWFVVIKEHQDLKNGGQPVAGEDGQAADGSMQPTSWRQEPQLCGMGTEQGCWIPVSSDKGSCPQVMERSFHMPSYGTQTLEGGVEKPHSLLSANPLWQQRALDPPHQMELTQ

SEQ ID NO: 27690 - protein, 1166 aa, Homo sapiens
  REGION 1..1166: note = ENSP00000421384
MLLTLIILLPVVSKFSFVSLSAPQHWSCPEGTLAGNGNSTCVGPAPFLIFSHGNSIFRIDTEGTNYEQLVVDAGVSVIMDFHYNEKRIYWVDLERQLLQRVFLNGSRQERVCNIEKNVSGMAINWINEEVIWSNQQEGIITVTDMKGNNSHILLSALKYPANVAVDPVERFIFWSSEVAGSLYRADLDGVGVKALLETSEKITAVSLDVLDKRLFWIQYNREGSNSLICSCDYDGGSVHISKHPTQHNLFAMSLFGDRIFYSTWKMKTIWIANKHTGKDMVRINLHSSFVPLGELKVVHPLAQPKAEDDTWEPEQKLCKLRKGNCSSTVCGQDLQSHLCMCAEGYALSRDRKYCEDVNECAFWNHGCTLGCKNTPGSYYCTCPVGFVLLPDGKRCHQLVSCPRNVSECSHDCVLTSEGPLCFCPEGSVLERDGKTCSGCSSPDNGGCSQLCVPLSPVSWECDCFPGYDLQLDEKSCAASGPQPFLLFANSQDIRHMHFDGTDYGTLLSQQMGMVYALDHDPVENKIYFAHTALKWIERANMDGSQRERLIEEGVDVPEGLAVDWIGRRFYWTDRGKSLIGRSDLNGKRSKIITKENISQPRGIAVHPMAKRLFWTDTGINPRIESSSLQGLGRLVIASSDLIWPSGITIDFLTDKLYWCDAKQSVIEMANLDGSKRRRLTQNDVGHPFAVAVFEDYVWFSDWAMPSVMRVNKRTGKDRVRLQGSMLKPSSLVVVHPLAKPGADPCLYQNGGCEHICKKRLGTAWCSCREGFMKASDGKTCLALDGHQLLAGGEVDLKNQVTPLDILSKTRVSEDNITESQHMLVAEIMVSDQDDCAPVGCSMYARCISEGEDATCQCLKGFAGDGKLCSDIDECEMGVPVCPPASSKCINTEGGYVCRCSEGYQGDGIHCLDSTPPPHLREDDHHYSVRNSDSECPLSHDGYCLHDGVCMYIEALDKYACNCVVGYIGERCQYRDLKWWELRHAGHGQQQKVIVVAVCVVVLVMLLLLSLWGAHYYRTQKLLSKNPKNPYEESSRDVRSRRPADTEDGMSSCPQPWFVVIKEHQDLKNGGQPVAGEDGQAADGSMQPTSWRQEPQLCGMGTEQGCWIPVSSDKGSCPQVMERSFHMPSYGTQTLEGGVEKPHSLLSANPLWQQRALDPPHQMELTQ

SEQ ID NO: 27691 - protein, 128 aa, Homo sapiens
  REGION 1..128: note = ENSP00000413354
MFNNCEVVLGNLEITYVQRNYDLSFLKTIQEVAGYVLIALNTVERIPLENLQIIRGNMYYENSYALAVLSNYDANKTGLKELPMRNLQEILHGAVRFSNNPALCNVESIQWRDIVSSDFLSNMSMDFQ

SEQ ID NO: 27692 - protein, 464 aa, Homo sapiens
  REGION 1..464: note = ENSP00000492462
MSSLTKIICAQQCSGRCRGKSPSDCCHNQCAAGCTGPRESDCLVCRKFRDEATCKDTCPPLMLYNPTTYQMDVNPEGKYSFGATCVKKCPRNYVVTDHGSCVRACGADSYEMEEDGVRKCKKCEGPCRKVCNGIGIGEFKDSLSINATNIKHFKNCTSISGDLHILPVAFRGDSFTHTPPLDPQELDILKTVKEITGFLLIQAWPENRTDLHAFENLEIIRGRTKQHGQFSLAVVSLNITSLGLRSLKEISDGDVIISGNKNLCYANTINWKKLFGTSGQKTKIISNRGENSCKATGQVCHALCSPEGCWGPEPRDCVSCRNVSRGRECVDKCNLLEGEPREFVENSECIQCHPECLPQAMNITCTGRGPDNCIQCAHYIDGPHCVKTCPAGVMGENNTLVWKYADAGHVCHLCHPNCTYGCTGPGLEGCPTNGPKIPSIATGMVGALLLLLVVALGIGLFMRR

SEQ ID NO: 27693 - protein, 1165 aa, Homo sapiens
  REGION 1..1165: note = ENSP00000395243
MRPSGTAGAALLALLAALCPASRALEEKKVCQGTSNKLTQLGTFEDHFLSLQRMFNNCEVVLGNLEITYVQRNYDLSFLKTIQEVAGYVLIALNTVERIPLENLQIIRGNMYYENSYALAVLSNYDANKTGLKELPMRNLQGQKCDPSCPNGSCWGAGEENCQKLTKIICAQQCSGRCRGKSPSDCCHNQCAAGCTGPRESDCLVCRKFRDEATCKDTCPPLMLYNPTTYQMDVNPEGKYSFGATCVKKCPRNYVVTDHGSCVRACGADSYEMEEDGVRKCKKCEGPCRKVCNGIGIGEFKDSLSINATNIKHFKNCTSISGDLHILPVAFRGDSFTHTPPLDPQELDILKTVKEITGFLLIQAWPENRTDLHAFENLEIIRGRTKQHGQFSLAVVSLNITSLGLRSLKEISDGDVIISGNKNLCYANTINWKKLFGTSGQKTKIISNRGENSCKATGQVCHALCSPEGCWGPEPRDCVSCRNVSRGRECVDKCNLLEGEPREFVENSECIQCHPECLPQAMNITCTGRGPDNCIQCAHYIDGPHCVKTCPAGVMGENNTLVWKYADAGHVCHLCHPNCTYGCTGPGLEGCPTNGPKIPSIATGMVGALLLLLVVALGIGLFMRRRHIVRKRTLRRLLQERELVEPLTPSGEAPNQALLRILKETEFKKIKVLGSGAFGTVYKGLWIPEGEKVKIPVAIKELREATSPKANKEILDEAYVMASVDNPHVCRLLGICLTSTVQLITQLMPFGCLLDYVREHKDNIGSQYLLNWCVQIAKGMNYLEDRRLVHRDLAARNVLVKTPQHVKITDFGLAKLLGAEEKEYHAEGGKVPIKWMALESILHRIYTHQSDVWSYGVTVWELMTFGSKPYDGIPASEISSILEKGERLPQPPICTIDVYMIMVKCWMIDADSRPKFRELIIEFSKMARDPQRYLVIQGDERMHLPSPTDSNFYRALMDEEDMDDVVDADEYLIPQQGFFSSPSTSRTPLLSSLSATSNNSTVACIDRNGLQSCPIKEDSFLQRYSSDPTGALTEDSIDDTFLPVPEYINQSVPKRPAGSVQNPVYHNQPLNPAPSRDPHYQDPHSTAVGNPEYLNTVQPTCVNSTFDSPAHWAQKGSHQISLDNPDYQQDFFPKEAKPNGIFKGSTAENAEYLRVAPQSSEFIGA

SEQ ID NO: 27694 - protein, 1091 aa, Homo sapiens
  REGION 1..1091: note = ENSP00000415559
MRPSGTAGAALLALLAALCPASRALEEKKVCQGTSNKLTQLGTFEDHFLSLQRMFNNCEVVLGNLEITYVQRNYDLSFLKTIQEVAGYVLIALNTVERIPLENLQIIRGNMYYENSYALAVLSNYDANKTGLKELPMRNLQGQKCDPSCPNGSCWGAGEENCQKLTKIICAQQCSGRCRGKSPSDCCHNQCAAGCTGPRESDCLVCRKFRDEATCKDTCPPLMLYNPTTYQMDVNPEGKYSFGATCVKKCPRNYVVTDHGSCVRACGADSYEMEEDGVRKCKKCEGPCRKVCNGIGIGEFKDSLSINATNIKHFKNCTSISGDLHILPVAFRGDSFTHTPPLDPQELDILKTVKEITGFLLIQAWPENRTDLHAFENLEIIRGRTKQHGQFSLAVVSLNITSLGLRSLKEISDGDVIISGNKNLCYANTINWKKLFGTSGQKTKIISNRGENSCKATGQVCHALCSPEGCWGPEPRDCVSCRNVSRGRECVDKCNLLEGEPREFVENSECIQCHPECLPQAMNITCTGRGPDNCIQCAHYIDGPHCVKTCPAGVMGENNTLVWKYADAGHVCHLCHPNCTYGCTGPGLEGCPTNGPKIPSIATGMVGALLLLLVVALGIGLFMRRRHIVRKRTLRRLLQERELVEPLTPSGEAPNQALLRILKETEFKKIKVLGSGAFGTVYKGLWIPEGEKVKIPVAIKELREATSPKANKEILDEAYVMASVDNPHVCRLLGICLTSTVQLITQLMPFGCLLDYVREHKDNIGSQYLLNWCVQIAKGMNYLEDRRLVHRDLAARNVLVKTPQHVKITDFGLAKLLGAEEKEYHAEGGKVPIKWMALESILHRIYTHQSDVWSYGVTVWELMTFGSKPYDGIPASEISSILEKGERLPQPPICTIDVYMIMVKCWMIDADSRPKFRELIIEFSKMARDPQRYLVIQGDERMHLPSPTDSNFYRALMDEEDMDDVVDADEYLIPQQGFFSSPSTSRTPLLSSLSATSNNSTVACIDRNGLQSCPIKEDSFLQRYSSDPTGALTEDSIDDTFLPVPGEWLVWKQSCSSTSSTHSAAASLQCPSQVLPPASPEGETVADLQTQ

SEQ ID NO: 27695 - protein, 628 aa, Homo sapiens
  REGION 1..628: note = ENSP00000342376
MRPSGTAGAALLALLAALCPASRALEEKKVCQGTSNKLTQLGTFEDHFLSLQRMFNNCEVVLGNLEITYVQRNYDLSFLKTIQEVAGYVLIALNTVERIPLENLQIIRGNMYYENSYALAVLSNYDANKTGLKELPMRNLQEILHGAVRFSNNPALCNVESIQWRDIVSSDFLSNMSMDFQNHLGSCQKCDPSCPNGSCWGAGEENCQKLTKIICAQQCSGRCRGKSPSDCCHNQCAAGCTGPRESDCLVCRKFRDEATCKDTCPPLMLYNPTTYQMDVNPEGKYSFGATCVKKCPRNYVVTDHGSCVRACGADSYEMEEDGVRKCKKCEGPCRKVCNGIGIGEFKDSLSINATNIKHFKNCTSISGDLHILPVAFRGDSFTHTPPLDPQELDILKTVKEITGFLLIQAWPENRTDLHAFENLEIIRGRTKQHGQFSLAVVSLNITSLGLRSLKEISDGDVIISGNKNLCYANTINWKKLFGTSGQKTKIISNRGENSCKATGQVCHALCSPEGCWGPEPRDCVSCRNVSRGRECVDKCNLLEGEPREFVENSECIQCHPECLPQAMNITCTGRGPDNCIQCAHYIDGPHCVKTCPAGVMGENNTLVWKYADAGHVCHLCHPNCTYGS

SEQ ID NO: 27696 - protein, 705 aa, Homo sapiens
  REGION 1..705: note = ENSP00000345973
MRPSGTAGAALLALLAALCPASRALEEKKVCQGTSNKLTQLGTFEDHFLSLQRMFNNCEVVLGNLEITYVQRNYDLSFLKTIQEVAGYVLIALNTVERIPLENLQIIRGNMYYENSYALAVLSNYDANKTGLKELPMRNLQEILHGAVRFSNNPALCNVESIQWRDIVSSDFLSNMSMDFQNHLGSCQKCDPSCPNGSCWGAGEENCQKLTKIICAQQCSGRCRGKSPSDCCHNQCAAGCTGPRESDCLVCRKFRDEATCKDTCPPLMLYNPTTYQMDVNPEGKYSFGATCVKKCPRNYVVTDHGSCVRACGADSYEMEEDGVRKCKKCEGPCRKVCNGIGIGEFKDSLSINATNIKHFKNCTSISGDLHILPVAFRGDSFTHTPPLDPQELDILKTVKEITGFLLIQAWPENRTDLHAFENLEIIRGRTKQHGQFSLAVVSLNITSLGLRSLKEISDGDVIISGNKNLCYANTINWKKLFGTSGQKTKIISNRGENSCKATGQVCHALCSPEGCWGPEPRDCVSCRNVSRGRECVDKCNLLEGEPREFVENSECIQCHPECLPQAMNITCTGRGPDNCIQCAHYIDGPHCVKTCPAGVMGENNTLVWKYADAGHVCHLCHPNCTYGPGNESLKAMLFCLFKLSSCNQSNDGSVSHQSGSPAAQESCLGWIPSLLPSEFQLGWGGCSHLHAWPSASVIITASSCH

SEQ ID NO: 27697 - protein, 405 aa, Homo sapiens
  REGION 1..405: note = ENSP00000413843
MRPSGTAGAALLALLAALCPASRALEEKKVCQGTSNKLTQLGTFEDHFLSLQRMFNNCEVVLGNLEITYVQRNYDLSFLKTIQEVAGYVLIALNTVERIPLENLQIIRGNMYYENSYALAVLSNYDANKTGLKELPMRNLQEILHGAVRFSNNPALCNVESIQWRDIVSSDFLSNMSMDFQNHLGSCQKCDPSCPNGSCWGAGEENCQKLTKIICAQQCSGRCRGKSPSDCCHNQCAAGCTGPRESDCLVCRKFRDEATCKDTCPPLMLYNPTTYQMDVNPEGKYSFGATCVKKCPRNYVVTDHGSCVRACGADSYEMEEDGVRKCKKCEGPCRKVCNGIGIGEFKDSLSINATNIKHFKNCTSISGDLHILPVAFRGDSFTHTPPLDPQELDILKTVKEITGLS

SEQ ID NO: 27698 - protein, 1210 aa, Homo sapiens [sequence omitted]

SEQ ID NO: 27699 - protein, 239 aa, Homo sapiens
  REGION 1..239: note = ENSP00000250457
MPLGHIMRLDLEKIALEYIVPCLHEVGFCYLDNFLGEVVGDCVLERVKQLHCTGALRDGQLAGPRAGVSKRHLRGDQITWIGGNEEGCEAISFLLSLIDRLVLYCGSRLGKYYVKERSKAMVACYPGNGTGYVRHVDNPNGDGRCITCIYYLNKNWDAKLHGGILRIFPEGKSFIADVEPIFDRLLFFWSDRRNPHEVQPSYATRYAMTVWYFDAEERAEAKKKFRNLTRKTESALTED

SEQ ID NO: 27700 - protein, 145 aa, Homo sapiens
  REGION 1..145: note = ENSP00000447470
MPLGHIMRLDLEKIALEYIVPCLHEAMVACYPGNGTGYVRHVDNPNGDGRCITCIYYLNKNWDAKLHGGILRIFPEGKSFIADVEPIFDRLLFFWSDRRNPHEVQPSYATRYAMTVWYFDAEERAEAKKKFRNLTRKTESALTED

SEQ ID NO: 27701 - protein, 79 aa, Homo sapiens
  REGION 1..79: note = ENSP00000451316
MAMVACYPGNGTGYVRHVDNPNGDGRCITCIYYLNKNWDAKLHGGILRIFPEGKSFIADVEPIFDRLLFFWSDRRNPHE

SEQ ID NO: 27702 - protein, 148 aa, Homo sapiens
  REGION 1..148: note = ENSP00000446572
MPLGHIMRLDLEKIALEYIVPCLHEVGFCYLDNFLGEVVGDCVLERVKQLHCTGALRDGQLAGPRAGVSKRHLRGDQITWIGGNEEGCEAISFLLSLIDRLVLYCGSRLGKYYVKERSKVGRARRPAAAAPAGTGGTRSPLYVDFPGP

SEQ ID NO: 27703 - protein, 543 aa, Homo sapiens
  REGION 1..543: note = ENSP00000239938
MAAAKAEMQLMSPLQISDPFGSFPHSPTMDNYPKLEEMMLLSNGAPQFLGAAGAPEGSGSNSSSSSSGGGGGGGGGSNSSSSSSTFNPQADTGEQPYEHLTAESFPDISLNNEKVLVETSYPSQTTRLPPITYTGRFSLEPAPNSGNTLWPEPLFSLVSGLVSMTNPPASSSSAPSPAASSASASQSPPLSCAVPSNDSSPIYSAAPTFPTPNTDIFPEPQSQAFPGSAGTALQYPPPAYPAAKGGFQVPMIPDYLFPQQQGDLGLGTPDQKPFQGLESRTQQPSLTPLSTIKAFATQSGSQDLKALNTSYQSQLIKPSRMRKYPNRPSKTPPHERPYACPVESCDRRFSRSDELTRHIRIHTGQKPFQCRICMRNFSRSDHLTTHIRTHTGEKPFACDICGRKFARSDERKRHTKIHLRQKDKKADKSVVASSATSSLSSYPSPVATSYPSPVTTSYPSPATTSYPSPVPTSFSSPGSSTYPSPVHSGFPSPSVATTYSSVPPAFPAQVSSFPSSAVTNSFSASTGLSDMTATFSPRTIEIC

SEQ ID NO: 27704 - protein, 387 aa, Homo sapiens
  REGION 1..387: note = ENSP00000318057
MTGKLAEKLPVTMSSLLNQLPDNLYPEEIPSALNLFSGSSDSVVHYNQMATENVMDIGLTNEKPNPELSYSGSFQPAPGNKTVTYLGKFAFDSPSNWCQDNIISLMSAGILGVPPASGALSTQTSTASMVQPPQGDVEAMYPALPPYSNCGDLYSEPVSFHDPQGNPGLAYSPQDYQSAKPALDSNLFPMIPDYNLYHHPNDMGSIPEHKPFQGMDPIRVNPPPITPLETIKAFKDKQIHPGFGSLPQPPLTLKPIRPRKYPNRPSKTPLHERPHACPAEGCDRRFSRSDELTRHLRIHTGHKPFQCRICMRSFSRSDHLTTHIRTHTGEKPFACEFCGRKFARSDERKRHAKIHLKQKEKKAEKGGAPSASSAPPVSLAPVVTTCA

SEQ ID NO: 27705 - protein, 349 aa, Homo sapiens
  REGION 1..349: note = ENSP00000430310
MEPCAAWSPRGGRENVMDIGLTNEKPNPELSYSGSFQPAPGNKTVTYLGKFAFDSPSNWCQDNIISLMSAGILGVPPASGALSTQTSTASMVQPPQGDVEAMYPALPPYSNCGDLYSEPVSFHDPQGNPGLAYSPQDYQSAKPALDSNLFPMIPDYNLYHHPNDMGSIPEHKPFQGMDPIRVNPPPITPLETIKAFKDKQIHPGFGSLPQPPLTLKPIRPRKYPNRPSKTPLHERPHACPAEGCDRRFSRSDELTRHLRIHTGHKPFQCRICMRSFSRSDHLTTHIRTHTGEKPFACEFCGRKFARSDERKRHAKIHLKQKEKKAEKGGAPSASSAPPVSLAPVVTTCA

SEQ ID NO: 27706 - protein, 71 aa, Homo sapiens
  REGION 1..71: note = ENSP00000429370
MTGKLAEKLPVTMSSLLNQLPDNLYPEEIPSALNLFSGSSDSVVHYNQMATASHPGWSHVRRGVPAVGERM

SEQ ID NO: 27707 - protein, 535 aa, Homo sapiens
  REGION 1..535: note = ENSP00000327116
MFSWLGTDDRRRKDPEVFQTVSEGLKKLYKSKLLPLEEHYRFHEFHSPALEDADFDNKPMVLLVGQYSTGKTTFIRYLLEQDFPGMRIGPEPTTDSFIAVMQGDMEGIIPGNALVVDPKKPFRKLNAFGNAFLNRFVCAQLPNPVLESISVIDTPGILSGEKQRISRGYDFAAVLEWFAERVDRIILLFDAHKLDISDEFSEVIKALKNHEDKMRVVLNKADQIETQQLMRVYGALMWSLGKIVNTPEVIRVYIGSFWSHPLLIPDNRKLFEAEEQDLFRDIQSLPRNAALRKLNDLIKRARLAKVHAYIISSLKKEMPSVFGKDNKKKELVNNLAEIYGRIEREHQISPGDFPNLKRMQDQLQAQDFSKFQPLKSKLLEVVDDMLAHDIAQLMVLVRQEESQRPIQMVKGGAFEGTLHGPFGHGYGEGAGEGIDDAEWVVARDKPMYDEIFYTLSPVDGKITGANAKKEMVRSKLPNSVLGKIWKLADIDKDGMLDDDEFALANHLIKVKLEGHELPNELPAHLLPPSKRKVAE

SEQ ID NO: 27708 - protein, 965 aa, Homo sapiens
  REGION 1..965: note = ENSP00000408325
MIIPSLDGALFQWDQDRESMETVPFTVESLLESSYKFGDDVVLVGGKSLTTYGLSAYSGKVRYICSALGCRQWDSDEMEQEEDILLLQRTQKTVRAVGPRSGNEKWNFSVGHFELRYIPDMETRAGFIESTFKPNENTEESKIISDVEEQEAAIMDIVIKVSVADWKVMAFSKKGGHLEWEYQFCTPIASAWLLKDGKVIPISLFDDTSYTSNDDVLEDEEDIVEAARGATENSVYLGMYRGQLYLQSSVRISEKFPSSPKALESVTNENAIIPLPTIKWKPLIHSPSRTPVLVGSDEFDKCLSNDKFSHEEYSNGALSILQYPYDNGYYLPYYKRERNKRSTQITVRFLDNPHYNKNIRKKDPVLLLHWWKEIVATILFCIIATTFIVRRLFHPHPHRQRKESETQCQTENKYDSVSGEANDSSWNDIKNSGYISRYLTDFEPIQCLGRGGFGVVFEAKNKVDDCNYAIKRIRLPNRELAREKVMREVKALAKLEHPGIVRYFNAWLEAPPEKWQEKMDEIWLKDESTDWPLSSPSPMDAPSVKIRRMDPFATKEHIEIIAPSPQRSRSFSVGISCDQTSSSESQFSPLEFSGMDHEDISESVDAAYNLQDSCLTDCDVEDGTMDGNDEGHSFELCPSEASPYVRSRERTSSSIVFEDSGCDNASSKEEPKTNRLHIGNHCANKLTAFKPTSSKSSSEATLSISPPRPTTLSLDLTKNTTEKLQPSSPKVYLYIQMQLCRKENLKDWMNGRCTIEERERSVCLHIFLQIAEAVEFLHSKGLMHRDLKPSNIFFTMDDVVKVGDFGLVTAMDQDEEEQTVLTPMPAYARHTGQVGTKLYMSPEQIHGNSYSHKVDIFSLGLILFELLYPFSTQMERVRTLTDVRNLKFPPLFTQKYPCEYVMVQDMLSPSPMERPEAINIIENAVFEDLDFPGKTVLRQRSRSLSSSGTKHSRQSNNSHSPLPSN

SEQ ID NO: 27709 - protein, 1116 aa, Homo sapiens
  REGION 1..1116: note = ENSP00000307235
MERAISPGLLVRALLLLLLLLGLAARTVAAGRARGLPAPTAEAAFGLGAAAAPTSATRVPAAGAVAAAEVTVEDAEALPAAAGEQEPRGPEPDDETELRPRGRSLVIISTLDGRIAALDPENHGKKQWDLDVGSGSLVSSSLSKPEVFGNKMIIPSLDGALFQWDQDRESMETVPFTVESLLESSYKFGDDVVLVGGKSLTTYGLSAYSGKVRYICSALGCRQWDSDEMEQEEDILLLQRTQKTVRAVGPRSGNEKWNFSVGHFELRYIPDMETRAGFIESTFKPNENTEESKIISDVEEQEAAIMDIVIKVSVADWKVMAFSKKGGHLEWEYQFCTPIASAWLLKDGKVIPISLFDDTSYTSNDDVLEDEEDIVEAARGATENSVYLGMYRGQLYLQSSVRISEKFPSSPKALESVTNENAIIPLPTIKWKPLIHSPSRTPVLVGSDEFDKCLSNDKFSHEEYSNGALSILQYPYDNGYYLPYYKRERNKRSTQITVRFLDNPHYNKNIRKKDPVLLLHWWKEIVATILFCIIATTFIVRRLFHPHPHRQRKESETQCQTENKYDSVSGEANDSSWNDIKNSGYISRYLTDFEPIQCLGRGGFGVVFEAKNKVDDCNYAIKRIRLPNRELAREKVMREVKALAKLEHPGIVRYFNAWLEAPPEKWQEKMDEIWLKDESTDWPLSSPSPMDAPSVKIRRMDPFATKEHIEIIAPSPQRSRSFSVGISCDQTSSSESQFSPLEFSGMDHEDISESVDAAYNLQDSCLTDCDVEDGTMDGNDEGHSFELCPSEASPYVRSRERTSSSIVFEDSGCDNASSKEEPKTNRLHIGNHCANKLTAFKPTSSKSSSEATLSISPPRPTTLSLDLTKNTTEKLQPSSPKVYLYIQMQLCRKENLKDWMNGRCTIEERERSVCLHIFLQIAEAVEFLHSKGLMHRDLKPSNIFFTMDDVVKVGDFGLVTAMDQDEEEQTVLTPMPAYARHTGQVGTKLYMSPEQIHGNSYSHKVDIFSLGLILFELLYPFSTQMERVRTLTDVRNLKFPPLFTQKYPCEYVMVQDMLSPSPMERPEAINIIENAVFEDLDFPGKTVLRQRSRSLSSSGTKHSRQSNNSHSPLPSN

SEQ ID NO: 27710 - protein, 956 aa, Homo sapiens
  REGION 1..956: note = ENSP00000412076
MCYSEGGWSTSGSRLQLLITIILLKVFGNKMIIPSLDGALFQWDQDRESMETVPFTVESLLESSYKFGDDVVLVGGKSLTTYGLSAYSGKVRYICSALGCRQWDSDEMEQEEDILLLQRTQKTVRAVGPRSGNEKWNFSVGHFELRYIPDMETRAGFIESTFKPNENTEESKIISDVEEQEAAIMDIVIKVSVADWKVMAFSKKGGHLEWEYQFCTPIASAWLLKDGKVIPISLFDDTSYTSNDDVLEDEEDIVEAARGATENSVYLGMYRGQLYLQSSVRISEKFPSSPKALESVTNENAIIPLPTIKWKPLIHSPSRTPVLVGSDEFDKCLSNDKFSHEEYSNGALSILQYPYDNGYYLPYYKRERNKRSTQITVRFLDNPHYNKNIRKKDPVLLLHWWKEIVATILFCIIATTFIVRRLFHPHPHRQRKESETQCQTENKYDSVSGEANDSSWNDIKNSGYISRYLTDFEPIQCLGRGGFGVVFEAKNKVDDCNYAIKRIRLPNRELAREKVMREVKALAKLEHPGIVRYFNAWLEAPPEKWQEKMDEIWLKDESTDWPLSSPSPMDAPSVKIRRMDPFATKEHIEIIAPSPQRSRSFSVGISCDQTSSSESQFSPLEFSGMDHEDISESVDAAYNLQDSCLTDCDVEDGTMDGNDEGHSFELCPSEASPYVRSRERTSSSIVFEDSGCDNASSKEEPKTNRLHIGNHCANKLTAFKPTSSKSSSEATLSISPPRPTTLSLDLTKNTTEKLQPSSPKVYLYIQMQLCRKENLKDWMNGRCTIEERERSVCLHIFLQIAEAVEFLHSKGLMHRDLKPSNIFFTMDDVVKVGDFGLVTAMDQDEEEQTVLTPMPAYARHTGQVGTKLYMSPEQIHGNSYSHKVDIFSLGLILFELLYPFSTQMERVRTLTDVRNLKFPPLFTQKYPCEYVMVQDMLSPSPMERPEAINIIENAVF

SEQ ID NO: 27711 - protein, 472 aa, Homo sapiens
  REGION 1..472: note = ENSP00000253039
MAGGEAGVTLGQPHLSRQDLTTLDVTKLTPLSHEVISRQATINIGTIGHVAHGKSTVVKAISGVHTVRFKNELERNITIKLGYANAKIYKLDDPSCPRPECYRSCGSSTPDEFPTDIPGTKGNFKLVRHVSFVDCPGHDILMATMLNGAAVMDAALLLIAGNESCPQPQTSEHLAAIEIMKLKHILILQNKIDLVKESQAKEQYEQILAFVQGTVAEGAPIIPISAQLKYNIEVVCEYIVKKIPVPPRDFTSEPRLIVIRSFDVNKPGCEVDDLKGGVAGGSILKGVLKVGQEIEVRPGIVSKDSEGKLMCKPIFSKIVSLFAEHNDLQYAAPGGLIGVGTKIDPTLCRADRMVGQVLGAVGALPEIFTELEISYFLLRRLLGVRTEGDKKAAKVQKLSKNEVLMVNIGSLSTGGRVSAVKADLGKIVLTNPVCTEVGEKIALSRRVEKHWRLIGWGQIRRGVTIKPTVDDD

SEQ ID NO: 27712 - protein, 183 aa, Homo sapiens
  REGION 1..183: note = ENSP00000391383
  VARIANT 1: note = Any amino acid
XAGGEAGVTLGQPHLSRQDLTTLDVTKLTPLSHEVISRQATINIGTIGHVAHGKSTVVKAISGVHTVRFKNELERNITIKLGYANAKIYKLDDPSCPRPECYRSCGSSTPDEFPTDIPGTKGNFKLVRHVSFVDCPGHDILMATMLNGAAVMDAALLLIGKYLTIGLDKSMWNKSKMKYLKGN

SEQ ID NO: 27713 - protein, 411 aa, Homo sapiens
  REGION 1..411: note = ENSP00000269349
MATTATMATSGSARKRLLKEEDMTKVEFETSEEVDVTPTFDTMGLREDLLRGIYAYGFEKPSAIQQRAIKQIIKGRDVIAQSQSGTGKTATFSISVLQCLDIQVRETQALILAPTRELAVQIQKGLLALGDYMNVQCHACIGGTNVGEDIRKLDYGQHVVAGTPGRVFDMIRRRSLRTRAIKMLVLDEADEMLNKGFKEQIYDVYRYLPPATQVVLISATLPHEILEMTNKFMTDPIRILVKRDELTLEGIKQFFVAVEREEWKFDTLCDLYDTLTITQAVIFCNTKRKVDWLTEKMREANFTVSSMHGDMPQKERESIMKEFRSGASRVLISTDVWARGLDVPQVSLIINYDLPNNRELYIHRIGRSGRYGRKGVAINFVKNDDIRILRDIEQYYSTQIDEMPMNVADLI

SEQ ID NO: 27714 - protein, 125 aa, Homo sapiens
  REGION 1..125: note = ENSP00000460439
MATTATMATSGSARKRLLKEEDMTKVEFETSEEVDVTPTFDTMGLREDLLRGIYAYGFEKPSAIQQRAIKQIIKGRDVIAQSQSGTGKTATFSISVLQCLDIQGLLALGDYMNVQCHACIGGTNV

SEQ ID NO: 27715 - protein, 389 aa, Homo sapiens
  REGION 1..389: note = ENSP00000369453
MAVRLCDVASLLRSGSWAAEPWTGQVIAAMETQLSNGPTCNNTANGPTTINNNCSSPVDSGNTEDSKTNLIVNYLPQNMTQEELKSLFGSIGEIESCKLVRDKITGQSLGYGFVNYIDPKDAEKAINTLNGLRLQTKTIKVSYARPSSASIRDANLYVSGLPKTMTQKELEQLFSQYGRIITSRILVDQVTGISRGVGFIRFDKRIEAEEAIKGLNGQKPPGATEPITVKFANNPSQKTNQAILSQLYQSPNRRYPGPLAQQAQRFRLDNLLNMAYGVKSRFSPMTIDGMTSLAGINIPGHPGTGWCIFVYNLAPDADESILWQMFGPFGAVTNVKVIRDFNTNKCKGFGFVTMTNYDEAAMAIASLNGYRLGDRVLQVSFKTNKTHKA

SEQ ID NO: 27716 - protein, 346 aa, Homo sapiens
  REGION 1..346: note = ENSP00000223951
METQLSNGPTCNNTANGPTTINNNCSSPVDSGNTEDSKTNLIVNYLPQNMTQEELKSLFGSIGEIESCKLVRDKITGQSLGYGFVNYIDPKDAEKAINTLNGLRLQTKTIKVSYARPSSASIRDANLYVSGLPKTMTQKELEQLFSQYGRIITSRILVDQVTGISRGVGFIRFDKRIEAEEAIKGLNGQKPPGATEPITVKFANNPSQKTNQAILSQLYQSPNRRYPGPLAQQAQRFRFSPMTIDGMTSLAGINIPGHPGTGWCIFVYNLAPDADESILWQMFGPFGAVTNVKVIRDFNTNKCKGFGFVTMTNYDEAAMAIASLNGYRLGDRVLQVSFKTNKTHKA

SEQ ID NO: 27717 - protein, 359 aa, Homo sapiens
  REGION 1..359: note = ENSP00000369460
METQLSNGPTCNNTANGPTTINNNCSSPVDSGNTEDSKTNLIVNYLPQNMTQEELKSLFGSIGEIESCKLVRDKITGQSLGYGFVNYIDPKDAEKAINTLNGLRLQTKTIKVSYARPSSASIRDANLYVSGLPKTMTQKELEQLFSQYGRIITSRILVDQVTGISRGVGFIRFDKRIEAEEAIKGLNGQKPPGATEPITVKFANNPSQKTNQAILSQLYQSPNRRYPGPLAQQAQRFRLDNLLNMAYGVKRFSPMTIDGMTSLAGINIPGHPGTGWCIFVYNLAPDADESILWQMFGPFGAVTNVKVIRDFNTNKCKGFGFVTMTNYDEAAMAIASLNGYRLGDRVLQVSFKTNKTHKA

SEQ ID NO: 27718 - protein, 90 aa, Homo sapiens
  REGION 1..90: note = ENSP00000391757
MTQKELEQLFSQYGRIITSRILVDQVTGISRGVGFIRFDKRIEAEEAIKGLNGQKPPGATEPITVKFANNPSQKTNQAILSQLYQSPNRR

SEQ ID NO: 27719 - protein, 189 aa, Homo sapiens
  REGION 1..189: note = ENSP00000412602
METQLSNGPTCNNTANGPTTINNNCSSPVDSGNTEDSKTNLIVNYLPQNMTQEELKSLFGSIGEIESCKLVRDKITGQSLGYGFVNYIDPKDAEKAINTLNGLRLQTKTIKVSYARPSSASIRDANLYVSGLPKTMTQKELEQLFSQYGRIITSRILVDQVTGISRGVGFIRFDKRIEAEEAIKGLNGQ

SEQ ID NO: 27720 - protein, 359 aa, Homo sapiens; identical to SEQ ID NO: 27717
  REGION 1..359: note = ENSP00000380479

SEQ ID NO: 27721 - protein, 359 aa, Homo sapiens; identical to SEQ ID NO: 27717
  REGION 1..359: note = ENSP00000440998

SEQ ID NO: 27722 - protein, 367 aa, Homo sapiens
  REGION 1..367: note = ENSP00000352162
MVTQILGAMESQVGGGPAGPALPNGPLLGTNGATDDSKTNLIVNYLPQNMTQDEFKSLFGSIGDIESCKLVRDKITGQSLGYGFVNYSDPNDADKAINTLNGLKLQTKTIKVSYARPSSASIRDANLYVSGLPKTMSQKEMEQLFSQYGRIITSRILVDQVTGVSRGVGFIRFDKRIEAEEAIKGLNGQKPLGAAEPITVKFANNPSQKTGQALLTHLYQSSARRYAGPLHHQTQRFRLDNLLNMAYGVKSPLSLIARFSPIAIDGMSGLAGVGLSGGAAGAGWCIFVYNLSPEADESVLWQLFGPFGAVTNVKVIRDFTTNKCKGFGFVTMTNYDEAAMAIASLNGYRLGERVLQVSFKTSKQHKA

SEQ ID NO: 27723 - protein, 360 aa, Homo sapiens
  REGION 1..360: note = ENSP00000390878
MVTQILGAMESQVGGGPAGPALPNGPLLGTNGATDDSKTNLIVNYLPQNMTQDEFKSLFGSIGDIESCKLVRDKITGQSLGYGFVNYSDPNDADKAINTLNGLKLQTKTIKVSYARPSSASIRDANLYVSGLPKTMSQKEMEQLFSQYGRIITSRILVDQVTGVSRGVGFIRFDKRIEAEEAIKGLNGQKPLGAAEPITVKFANNPSQKTGQALLTHLYQSSARRYAGPLHHQTQRFRLDNLLNMAYGVKRFSPIAIDGMSGLAGVGLSGGAAGAGWCIFVYNLSPEADESVLWQLFGPFGAVTNVKVIRDFTTNKCKGFGFVTMTNYDEAAMAIASLNGYRLGERVLQVSFKTSKQHKA

SEQ ID NO: 27724 - protein, 92 aa, Homo sapiens
  REGION 1..92: note = ENSP00000467314
MVTQILGAMESQVGGGPAGPALPNGPLLGTNGATDDSKTNLIVNYLPQNMTQDEFKSLFGSIGDIESCKLVRDKITDKAINTLNGLKLQTKT

SEQ ID NO: 27725 - protein, 366 aa, Homo sapiens
  REGION 1..366: note = ENSP00000360892
MEQIISTMEPQVSNGPTSNTSNGPSSNNRNCPSPMQTGATTDDSKTNLIVNYLPQNMTQEEFRSLFGSIGEIESCKLVRDKITGQSLGYGFVNYIDPKDAEKAINTLNGLRLQTKTIKVSYARPSSASIRDANLYVSGLPKTMTQKELEQLFSQYGRIITSRILVDQVTGVSRGVGFIRFDKRIEAEEAIKGLNGQKPSGATEPITVKFANNPSQKSSQALLSQLYQSPNRRYPGPLHHQAQRFRLDNLLNMAYGVKRFSPITIDGMTSLVGMNIPGHTGTGWCIFVYNLSPDSDESVLWQLFGPFGAVNNVKVIRDFNTNKCKGFGFVTMTNYDEAAMAIASLNGYRLGDRVLQVSFKTNKAHKS

SEQ ID NO: 27726 - protein, 402 aa, Homo sapiens
  REGION 1..402: note = ENSP00000349594
MLRYLQPLGCVHGGKGLTDMRLLLLREIVINESRNCSFMIISTMEPQVSNGPTSNTSNGPSSNNRNCPSPMQTGATTDDSKTNLIVNYLPQNMTQEEFRSLFGSIGEIESCKLVRDKITGQSLGYGFVNYIDPKDAEKAINTLNGLRLQTKTIKVSYARPSSASIRDANLYVSGLPKTMTQKELEQLFSQYGRIITSRILVDQVTGVSRGVGFIRFDKRIEAEEAIKGLNGQKPSGATEPITVKFANNPSQKSSQALLSQLYQSPNRRYPGPLHHQAQRFRLDNLLNMAYGVKRFSPITIDGMTSLVGMNIPGHTGTGWCIFVYNLSPDSDESVLWQLFGPFGAVNNVKVIRDFNTNKCKGFGFVTMTNYDEAAMAIASLNGYRLGDRVLQVSFKTNKAHKS

SEQ ID NO: 27727 - protein, 366 aa, Homo sapiens
  REGION 1..366: note = ENSP00000360889
MVMIISTMEPQVSNGPTSNTSNGPSSNNRNCPSPMQTGATTDDSKTNLIVNYLPQNMTQEEFRSLFGSIGEIESCKLVRDKITGQSLGYGFVNYIDPKDAEKAINTLNGLRLQTKTIKVSYARPSSASIRDANLYVSGLPKTMTQKELEQLFSQYGRIITSRILVDQVTGVSRGVGFIRFDKRIEAEEAIKGLNGQKPSGATEPITVKFANNPSQKSSQALLSQLYQSPNRRYPGPLHHQAQRFRLDNLLNMAYGVKRFSPITIDGMTSLVGMNIPGHTGTGWCIFVYNLSPDSDESVLWQLFGPFGAVNNVKVIRDFNTNKCKGFGFVTMTNYDEAAMAIASLNGYRLGDRVLQVSFKTNKAHKS

SEQ ID NO: 27728 - protein, 380 aa, Homo sapiens
  REGION 1..380: note = ENSP00000360888
MVMIISTMEPQVSNGPTSNTSNGPSSNNRNCPSPMQTGATTDDSKTNLIVNYLPQNMTQEEFRSLFGSIGEIESCKLVRDKITGQSLGYGFVNYIDPKDAEKAINTLNGLRLQTKTIKVSYARPSSASIRDANLYVSGLPKTMTQKELEQLFSQYGRIITSRILVDQVTGVSRGVGFIRFDKRIEAEEAIKGLNGQKPSGATEPITVKFANNPSQKSSQALLSQLYQSPNRRYPGPLHHQAQRFRLDNLLNMAYGVKRLMSGPVPPSACPPRFSPITIDGMTSLVGMNIPGHTGTGWCIFVYNLSPDSDESVLWQLFGPFGAVNNVKVIRDFNTNKCKGFGFVTMTNYDEAAMAIASLNGYRLGDRVLQVSFKTNKAHKS

SEQ ID NO: 27729 - protein, 385 aa, Homo sapiens
  REGION 1..385: note = ENSP00000360886
MEWNGLKMIISTMEPQVSNGPTSNTSNGPSSNNRNCPSPMQTGATTDDSKTNLIVNYLPQNMTQEEFRSLFGSIGEIESCKLVRDKITGQSLGYGFVNYIDPKDAEKAINTLNGLRLQTKTIKVSYARPSSASIRDANLYVSGLPKTMTQKELEQLFSQYGRIITSRILVDQVTGVSRGVGFIRFDKRIEAEEAIKGLNGQKPSGATEPITVKFANNPSQKSSQALLSQLYQSPNRRYPGPLHHQAQRFRLDNLLNMAYGVKRLMSGPVPPSACPPRFSPITIDGMTSLVGMNIPGHTGTGWCIFVYNLSPDSDESVLWQLFGPFGAVNNVKVIRDFNTNKCKGFGFVTMTNYDEAAMAIASLNGYRLGDRVLQVSFKTNKAHKS

SEQ ID NO: 27730 - protein, 371 aa, Homo sapiens
  REGION 1..371: note = ENSP00000360884
MEWNGLKMIISTMEPQVSNGPTSNTSNGPSSNNRNCPSPMQTGATTDDSKTNLIVNYLPQNMTQEEFRSLFGSIGEIESCKLVRDKITGQSLGYGFVNYIDPKDAEKAINTLNGLRLQTKTIKVSYARPSSASIRDANLYVSGLPKTMTQKELEQLFSQYGRIITSRILVDQVTGVSRGVGFIRFDKRIEAEEAIKGLNGQKPSGATEPITVKFANNPSQKSSQALLSQLYQSPNRRYPGPLHHQAQRFRLDNLLNMAYGVKRFSPITIDGMTSLVGMNIPGHTGTGWCIFVYNLSPDSDESVLWQLFGPFGAVNNVKVIRDFNTNKCKGFGFVTMTNYDEAAMAIASLNGYRLGDRVLQVSFKTNKAHKS

SEQ ID NO: 27731 - protein, 369 aa, Homo sapiens
  REGION 1..369: note = ENSP00000399939
MRLKNQIISTMEPQVSNGPTSNTSNGPSSNNRNCPSPMQTGATTDDSKTNLIVNYLPQNMTQEEFRSLFGSIGEIESCKLVRDKITGQSLGYGFVNYIDPKDAEKAINTLNGLRLQTKTIKVSYARPSSASIRDANLYVSGLPKTMTQKELEQLFSQYGRIITSRILVDQVTGVSRGVGFIRFDKRIEAEEAIKGLNGQKPSGATEPITVKFANNPSQKSSQALLSQLYQSPNRRYPGPLHHQAQRFRLDNLLNMAYGVKRFSPITIDGMTSLVGMNIPGHTGTGWCIFVYNLSPDSDESVLWQLFGPFGAVNNVKVIRDFNTNKCKGFGFVTMTNYDEAAMAIASLNGYRLGDRVLQVSFKTNKAHKS

SEQ ID NO: 27732 - protein, 504 aa, Homo sapiens
  REGION 1..504: note = ENSP00000368867
MATSLHEGPTNQLDLLIRAVEASVHSSNAHCTDKTIEAAEALLHMESPTCLRDSRSPVEVFVPPCVSTPEFIHAAMRPDVITETVVEVSTEESEPMDTSPIPTSPDSHEPMKKKKGNTTYLWEFLLDLLQDKNTCPRYIKWTQREKGIFKLVDSKAVSKLWGKHKNKPDMNYETMGRALRYYYQRGILAKVEGQRLVYQFKDMPKNIVVIDDDKSETCNEDLAGTTDEKSLERVSLSAESLLKAASSVRSGKNSSPINCSRAEKGVARVVNITSPGHDASSRSPTTTASVSATAAPRTVRVAMQVPVVMTSLGQKISTVAVQSVNAGAPLITSTSPTTATSPKVVIQTIPTVMPASTENGDKITMQPAKIITIPATQLAQCQLQTKSNLTGSGSINIVGTPLAVRALTPVSIAHGTPVMRLSMPTQQASGQTPPRVISAVIKGPEVKSEAVAKKQEHDVKTLQLVEEKPADGNKTVTHVVVVSAPSAIALPVTMKTEGLVTCEK

SEQ ID NO: 27733 - protein, 593 aa, Homo sapiens
  REGION 1..593: note = ENSP00000368868
MTSAVVDSGGTILELSSNGVENQEESEKVSEYPAVIVEPVPSARLEQGYAAQVLVYDDETYMMQDVAEEQEVETENVETVEASVHSSNAHCTDKTIEAAEALLHMESPTCLRDSRSPVEVFVPPCVSTPEFIHAAMRPDVITETVVEVSTEESEPMDTSPIPTSPDSHEPMKKKKVGRKPKTQQSPISNGSPELGIKKKPREGKGNTTYLWEFLLDLLQDKNTCPRYIKWTQREKGIFKLVDSKAVSKLWGKHKNKPDMNYETMGRALRYYYQRGILAKVEGQRLVYQFKDMPKNIVVIDDDKSETCNEDLAGTTDEKSLERVSLSAESLLKAASSVRSGKNSSPINCSRAEKGVARVVNITSPGHDASSRSPTTTASVSATAAPRTVRVAMQVPVVMTSLGQKISTVAVQSVNAGAPLITSTSPTTATSPKVVIQTIPTVMPASTENGDKITMQPAKIITIPATQLAQCQLQTKSNLTGSGSINIVGTPLAVRALTPVSIAHGTPVMRLSMPTQQASGQTPPRVISAVIKGPEVKSEAVAKKQEHDVKTLQLVEEKPADGNKTVTHVVVVSAPSAIALPVTMKTEGLVTCEK

SEQ ID NO: 27734 - protein, 192 aa, Homo sapiens
  REGION 1..192: note = ENSP00000426087
MATSLHEGPTNQLDLLIRAVEASVHSSNAHCTDKTIEAAEALLHMESPTCLRDSRSPEFIHAAMRPDVITETVVEVSTEESEPMDTSPIPTSPDSHEPMKKKKGNTTYLWEFLLDLLQDKNTCPRYIKWTQREKGIFKLVDSKAVSKLWGKHKNKPDMNYETMGRALRYYYQRGILAKVEGQRLVYQFKDMP

SEQ ID NO: 27735 - protein, 93 aa, Homo sapiens
  REGION 1..93: note = ENSP00000421278
MTSAVVDSGGTILELSSNGVENQEESEKVSEYPAVIVEPVPSARLEQGYAAQVLVYDDETYMMQDVAEEQEVETENVETGGISLCHPGWSAVV

SEQ ID NO: 27736 - protein, 245 aa, Homo sapiens
  REGION 1..245: note = ENSP00000397796
MATSLHEGPTNQLDLLIRAVEASVHSSNAHCTDKTIEAAEALLHMESPTCLRDSRSPVEVFVPPCVSTPEFIHAAMRPDVITETVVEVSTEESEPMDTSPIPTSPDSHEPMKKKKGNTTYLWEFLLDLLQDKNTCPRYIKWTQREKGIFKLVDSKAVSKLWGKHKNKPDMNYETMGRALRYYYQRGILAKVEGQRLVYQFKDMPKNIVVIDDDKSETCNEDLAGTTDEKSLERVSLSAESLLKAA

SEQ ID NO: 27737 - protein, 521 aa, Homo sapiens
  REGION 1..521: note = ENSP00000426997
MATSLHEGPTNQLDLLIRAVEASVHSSNAHCTDKTIEAAEALLHMESPTCLRDSRSPEFIHAAMRPDVITETVVEVSTEESEPMDTSPIPTSPDSHEPMKKKKVGRKPKTQQSPISNGSPELGIKKKPREGKGNTTYLWEFLLDLLQDKNTCPRYIKWTQREKGIFKLVDSKAVSKLWGKHKNKPDMNYETMGRALRYYYQRGILAKVEGQRLVYQFKDMPKNIVVIDDDKSETCNEDLAGTTDEKSLERVSLSAESLLKAASSVRSGKNSSPINCSRAEKGVARVVNITSPGHDASSRSPTTTASVSATAAPRTVRVAMQVPVVMTSLGQKISTVAVQSVNAGAPLITSTSPTTATSPKVVIQTIPTVMPASTENGDKITMQPAKIITIPATQLAQCQLQTKSNLTGSGSINIVGTPLAVRALTPVSIAHGTPVMRLSMPTQQASGQTPPRVISAVIKGPEVKSEAVAKKQEHDVKTLQLVEEKPADGNKTVTHVVVVSAPSAIALPVTMKTEGLVTCEK

SEQ ID NO: 27738 - protein, 533 aa, Homo sapiens
  REGION 1..533: note = ENSP00000351458
MATSLHEGPTNQLDLLIRAVEASVHSSNAHCTDKTIEAAEALLHMESPTCLRDSRSPVEVFVPPCVSTPEFIHAAMRPDVITETVVEVSTEESEPMDTSPIPTSPDSHEPMKKKKVGRKPKTQQSPISNGSPELGIKKKPREGKGNTTYLWEFLLDLLQDKNTCPRYIKWTQREKGIFKLVDSKAVSKLWGKHKNKPDMNYETMGRALRYYYQRGILAKVEGQRLVYQFKDMPKNIVVIDDDKSETCNEDLAGTTDEKSLERVSLSAESLLKAASSVRSGKNSSPINCSRAEKGVARVVNITSPGHDASSRSPTTTASVSATAAPRTVRVAMQVPVVMTSLGQKISTVAVQSVNAGAPLITSTSPTTATSPKVVIQTIPTVMPASTENGDKITMQPAKIITIPATQLAQCQLQTKSNLTGSGSINIVGTPLAVRALTPVSIAHGTPVMRLSMPTQQASGQTPPRVISAVIKGPEVKSEAVAKKQEHDVKTLQLVEEKPADGNKTVTHVVVVSAPSAIALPVTMKTEGLVTCEK

SEQ ID NO: 27739 - protein, 581 aa, Homo sapiens
  REGION 1..581: note = ENSP00000377782
MTSAVVDSGGTILELSSNGVENQEESEKVSEYPAVIVEPVPSARLEQGYAAQVLVYDDETYMMQDVAEEQEVETENVETVEASVHSSNAHCTDKTIEAAEALLHMESPTCLRDSRSPEFIHAAMRPDVITETVVEVSTEESEPMDTSPIPTSPDSHEPMKKKKVGRKPKTQQSPISNGSPELGIKKKPREGKGNTTYLWEFLLDLLQDKNTCPRYIKWTQREKGIFKLVDSKAVSKLWGKHKNKPDMNYETMGRALRYYYQRGILAKVEGQRLVYQFKDMPKNIVVIDDDKSETCNEDLAGTTDEKSLERVSLSAESLLKAASSVRSGKNSSPINCSRAEKGVARVVNITSPGHDASSRSPTTTASVSATAAPRTVRVAMQVPVVMTSLGQKISTVAVQSVNAGAPLITSTSPTTATSPKVVIQTIPTVMPASTENGDKITMQPAKIITIPATQLAQCQLQTKSNLTGSGSINIVGTPLAVRALTPVSIAHGTPVMRLSMPTQQASGQTPPRVISAVIKGPEVKSEAVAKKQEHDVKTLQLVEEKPADGNKTVTHVVVVSAPSAIALPVTMKTEGLVTCEK

SEQ ID NO: 27740 - protein, 828 aa, Homo sapiens
  REGION 1..828: note = ENSP00000456548
MAGRGWGALWVCVAAATLLHAGGLARADCWLIEGDKGFVWLAICSQNQPPYEAIPQQINSTIVDLRLNENRIRSVQYASLSRFGNLTYLNLTKNEIGYIEDGAFSGQFNLQVLQLGYNRLRNLTEGMLRGLGKLEYLYLQANLIEVVMASSFWECPNIVNIDLSMNRIQQLNSGTFAGLAKLSVCELYSNPFYCSCELLGFLRWLAAFTNATQTYDRMQCESPPVYSGYYLLGQGRRGHRSILSKLQSVCTEDSYAAEVVGPPRPASGRSQPGRSPPPPPPPEPSDMPCADDECFSGDGTTPLVALPTLATQAEARPLIKVKQLTQNSATITVQLPSPFHRMYTLEHFNNSKASTVSRLTKAQEEIRLTNLFTLTNYTYCVVSTSAGLRHNHTCLTICLPRLPSPPGPVPSPSTATHYIMTILGCLFGMVLVLGAVYYCLRRRRRQEEKHKKAASAAAAGSLKKTIIELKYGPELEAPGLAPLSQGPLLGPEAVTRIPYLPAAGEVEQYKLVESADTPKASKGSYMEVRTGDPPERRDCELGRPGPDSQSSVAEISTIAKEVDKVNQIINNCIDALKSESTSFQGVKSGPVSVAEPPLVLLSEPLAAKHGFLAPGYKDAFGHSLQRHHSVEAAGPPRASTSSSGSVRSPRAFRAEAVGVHKAAAAEAKYIEKGSPAADAILTVTPAAAVLRAEAEKGRQYGEHRHSYPGSHPAEPPAPPGPPPPPPHEGLGRKASILEPLTRPRPRDLAYSQLSPQYHSLSYSSSPEYTCRASQSIWERFRLSRRRHKEEEEFMAAGHALRKKVQFAKDEDLHDILDYWKGVSAQHKS

SEQ ID NO: 27741 - protein, 828 aa, Homo sapiens; identical to SEQ ID NO: 27740
  REGION 1..828: note = ENSP00000457193

SEQ ID NO: 27742 - protein, 247 aa, Homo sapiens
  REGION 1..247: note = ENSP00000379360
MQVVKEQVMRALTTKPSSLDQFKSKLQNLSYTEILKIRQSERMNQEDFQSRPILELKEKIQPEILELIKQQRLNRLVEGTCFRKLNARRRQDKFWYCRLSPNHKVLHYGDLEESPQGEVPHDSLQDKLPVADIKAVVTGKDCPHMKEKGALKQNKEVLELAFSILYDSNCQLNFIAPDKHEYCIWTDGLNALLGKDMMSDLTRNDLDTLLSMEIKLRLLDLENIQIPDAPPPIPKEPSNYDFVYDCN

SEQ ID NO: 27743 - protein, 727 aa, Homo sapiens
  REGION 1..727: note = ENSP00000312185
MPPPADIVKVAIEWPGAYPKLMEIDQKKPLSAIIKEVCDGWSLANHEYFALQHADSSNFYITEKNRNEIKNGTILRLTTSPAQNAQQLHERIQSSSMDAKLEALKDLASLSRDVTFAQEFINLDGISLLTQMVESGTERYQKLQKIMKPCFGDMLSFTLTAFVELMDHGIVSWDTFSVAFIKKIASFVNKSAIDISILQRSLAILESMVLNSHDLYQKVAQEITIGQLIPHLQGSDQEIQTYTIAVINALFLKAPDERRQEMANILAQKQLRSIILTHVIRAQRAINNEMAHQLYVLQVLTFNLLEDRMMTKMDPQDQAQRDIIFELRRIAFDAESEPNNSSGSMEKRKSMYTRDYKKLGFINHVNPAMDFTQTPPGMLALDNMLYFAKHHQDAYIRIVLENSSREDKHECPFGRSSIELTKMLCEILKVGELPSETCNDFHPMFFTHDRSFEEFFCICIQLLNKTWKEMRATSEDFNKVMQVVKEQVMRALTTKPSSLDQFKSKLQNLSYTEILKIRQSERMNQEDFQSRPILELKEKIQPEILELIKQQRLNRLVEGTCFRKLNARRRQDKFWYCRLSPNHKVLHYGDLEESPQGEVPHDSLQDKLPVADIKAVVTGKDCPHMKEKGALKQNKEVLELAFSILYDSNCQLNFIAPDKHEYCIWTDGLNALLGKDMMSDLTRNDLDTLLSMEIKLRLLDLENIQIPDAPPPIPKEPSNYDFVYDCN

SEQ ID NO: 27744 - protein, 247 aa, Homo sapiens; identical to SEQ ID NO: 27742
  REGION 1..247: note = ENSP00000379355

SEQ ID NO: 27745 - protein, 727 aa, Homo sapiens; identical to SEQ ID NO: 27743
  REGION 1..727: note = ENSP00000406952

SEQ ID NO: 27746 - protein, 727 aa, Homo sapiens; identical to SEQ ID NO: 27743
  REGION 1..727: note = ENSP00000394458

SEQ ID NO: 27747 - protein, 182 aa, Homo sapiens
  REGION 1..182: note = ENSP00000396465
ANILAQKQLRSIILTHVIRAQRAINNEMAHQLYVLQVLTFNLLEDRMMTKMDPQDQAQRDIIFELRRIAFDAESEPNNSSGSMEKRKSMYTRDYKKLGFINHVNPAMDFTQTPPGMLALDNMLYFAKHHQDAYIRIVLENSSREDKHECPFGRSSIELTKMLCEILKVGELHHLSPEKFTLP

SEQ ID NO: 27748 - protein, 193 aa, Homo sapiens
  REGION 1..193: note = ENSP00000413108
  VARIANT 1: note = Any amino acid
XQEIQTYTIAVINALFLKAPDERRQVDVESNVDILDCPLTEMANILAQKQLRSIILTHVIRAQRAINNEMAHQLYVLQVLTFNLLEDRMMTKMDPQDQAQRDIIFELRRIAFDAESEPNNSSGSMEKRKSMYTRDYKKLGFINHVNPAMDFTQTPPGMLALDNMLYFAKHHQDAYIRIVLENSSREDKHECPF

SEQ ID NO: 27749 - protein, 124 aa, Homo sapiens
  REGION 1..124: note = ENSP00000395933
QEMANILAQKQLRSIILTHVIRAQRAINNEMAHQLYVLQVLTFNLLEDRMMTKMDPQDQAQRDIIFELRRIAFDAESEPNNSSGSMEKRKSMYTRDYKKLGFIVSKLSPVCALPPASPGLTSAT

SEQ ID NO: 27750 - protein, 167 aa, Homo sapiens
  REGION 1..167: note = ENSP00000406610
MPPPADIVKVAIEWPGAYPKLMEIDQKKPLSAIIKEVCDGWSLANHEYFALQHADSSNFYITEKNRNEIKNGTILRLTTSPAQNAQQLHERIQSSSMDAKLEALKDLASLSRDVTFAQEFINLDGISLLTQMVESGTDFGDMLSFTLTAFVELMDHGIVSWDTFSVA

SEQ ID NO: 27751 - protein, 149 aa, Homo sapiens
  REGION 1..149: note = ENSP00000416090
MPPPADIVKVAIEWPGAYPKLMEIDQKKPLSAIIKEVCDGWSLANHEYFALQHADSSNFYITEKNRNEIKNGTILRLTTSPAQNAQQLHERIQSSSMDAKLEALKDLASLSRDVTFAQEFINLDGISLLTQMVESGTERYQKLQKIMKP

SEQ ID NO: 27752 - protein, 81 aa, Homo sapiens
  REGION 1..81: note = ENSP00000391734
MPPPADIVKVAIEWPGAYPKLMEIDQKKPLSAIIKEVCDGWSLANHEYFALQHADSSNFYITEKNRNEIKNGTILRLTTSP

SEQ ID NO: 27753 - protein, 59 aa, Homo sapiens
  REGION 1..59: note = ENSP00000397857
MPPPADIVKVAIEWPGAYPKLMEIDQKKPLSAIIKEVCDGWSLANHEYFALQHADSSNF

SEQ ID NO: 27754 - protein, 720 aa, Homo sapiens
  REGION 1..720: note = ENSP00000290246
MPPPSDIVKVAIEWPGANAQLLEIDQKRPLASIIKEVCDGWSLPNPEYYTLRYADGPQLYITEQTRSDIKNGTILQLAISPSRAARQLMERTQSSNMETRLDAMKELAKLSADVTFATEFINMDGIIVLTRLVESGTKLLSHYSEMLAFTLTAFLELMDHGIVSWDMVSITFIKQIAGYVSQPMVDVSILQRSLAILESMVLNSQSLYQKIAEEITVGQLISHLQVSNQEIQTYAIALINALFLKAPEDKRQDMANAFAQKHLRSIILNHVIRGNRPIKTEMAHQLYVLQVLTFNLLEERMMTKMDPNDQAQRDIIFELRRIAFDAESDPSNAPGSGTEKRKAMYTKDYKMLGFTNHINPAMDFTQTPPGMLALDNMLYLAKVHQDTYIRIVLENSSREDKHECPFGRSAIELTKMLCEILQVGELPNEGRNDYHPMFFTHDRAFEELFGICIQLLNKTWKEMRATAEDFNKVMQVVREQITRALPSKPNSLDQFKSKLRSLSYSEILRLRQSERMSQDDFQSPPIVELREKIQPEILELIKQQRLNRLCEGSSFRKIGNRRRQERFWYCRLALNHKVLHYGDLDDNPQGEVTFESLQEKIPVADIKAIVTGKDCPHMKEKSALKQNKEVLELAFSILYDPDETLNFIAPNKYEYCIWIDGLSALLGKDMSSELTKSDLDTLLSMEMKLRLLDLENIQIPEAPPPIPKEPSSYDFVYHYG

SEQ ID NO: 27755 - protein, 441 aa, Homo sapiens
  REGION 1..441: note = ENSP00000431972
  VARIANT 1: note = Any amino acid
XPIKTEMAHQLYVLQVLTFNLLEERMMTKMDPNDQAQRDIIFELRRIAFDAESDPSNAPGSGTEKRKAMYTKDYKMLGFTNHINPAMDFTQTPPGMLALDNMLYLAKVHQDTYIRIVLENSSREDKHECPFGRSAIELTKMLCEILQVGELPNEGRNDYHPMFFTHDRAFEELFGICIQLLNKTWKEMRATAEDFNKVMQVVREQITRALPSKPNSLDQFKSKLRSLSYSEILRLRQSERMSQDDFQSPPIVELREKIQPEILELIKQQRLNRLCEGSSFRKIGNRRRQERFWYCRLALNHKVLHYGDLDDNPQGEVTFESLQEKIPVADIKAIVTGKDCPHMKEKSALKQNKVSREASLSSWPSDTWRVPLVVVFSRCILGIFPSLFLNVLLRILNIHKNRWNLCIHITQTQQPWPVLPIHLFLSFIALKKVPSITLFHL

SEQ ID NO: 27756 - protein, 632 aa, Homo sapiens
  REGION 1..632: note = ENSP00000361249
MERTQSSNMETRLDAMKELAKLSADVTFATEFINMDGIIVLTRLVESGTKLLSHYSEMLAFTLTAFLELMDHGIVSWDMVSITFIKQIAGYVSQPMVDVSILQRSLAILESMVLNSQSLYQKIAEEITVGQLISHLQVSNQEIQTYAIALINALFLKAPEDKRQDMANAFAQKHLRSIILNHVIRGNRPIKTEMAHQLYVLQVLTFNLLEERMMTKMDPNDQAQRDIIFELRRIAFDAESDPSNAPGSGTEKRKAMYTKDYKMLGFTNHINPAMDFTQTPPGMLALDNMLYLAKVHQDTYIRIVLENSSREDKHECPFGRSAIELTKMLCEILQVGELPNEGRNDYHPMFFTHDRAFEELFGICIQLLNKTWKEMRATAEDFNKVMQVVREQITRALPSKPNSLDQFKSKLRSLSYSEILRLRQSERMSQDDFQSPPIVELREKIQPEILELIKQQRLNRLCEGSSFRKIGNRRRQERFWYCRLALNHKVLHYGDLDDNPQGEVTFESLQEKIPVADIKAIVTGKDCPHMKEKSALKQNKEVLELAFSILYDPDETLNFIAPNKYEYCIWIDGLSALLGKDMSSELTKSDLDTLLSMEMKLRLLDLENIQIPEAPPPIPKEPSSYDFVYHYG

SEQ ID NO: 27757 - protein, 283 aa, Homo sapiens
  REGION 1..283: note = ENSP00000414329
YHPMFFTHDRAFEELFGICIQLLNKTWKEMRATAEDFNKVMQVVREQITRALPSKPNSLDQFKSKLRSLSYSEILRLRQSERMSQDDFQSPPIVELREKIQPEILELIKQQRLNRLCEGSSFRKIGNRRRQERFWYCRLALNHKVLHYGDLDDNPQGEVTFESLQEKNIKAIVTGKDCPHMKEKSALKQNKEVLELAFSILYDPDETLNFIAPNKYEYCIWIDGLSALLGKDMSSELTKSDLDTLLSMEMKLRLLDLENIQIPEAPPPIPKEPSSYDFVYHYG

SEQ ID NO: 27758 - protein, 718 aa, Homo sapiens
  REGION 1..718: note = ENSP00000326172
MPPPSDIVKVAIEWPGANAQLLEIDQKRPLASIIKEVCDGWSLPNPEYYTLRYADGPQLYITEQTRSDIKNGTILQLAISPSRAARQLMERTQSSNMETRLDAMKELAKLSADVTFATEFINMDGIIVLTRLVESGTKLLSHEMLAFTLTAFLELMDHGIVSWDMVSITFIKQIAGYVSQPMVDVSILQRSLAILESMVLNSQSLYQKIAEEITVGQLISHLQVSNQEIQTYAIALINALFLKAPEDKRQDMANAFAQKHLRSIILNHVIRGNRPIKTEMAHQLYVLQVLTFNLLEERMMTKMDPNDQAQRDIIFELRRIAFDAESDPSNAPGSGTEKRKAMYTKDYKMLGFTNHINPAMDFTQTPPGMLALDNMLYLAKVHQDTYIRIVLENSSREDKHECPFGRSAIELTKMLCEILQVGELPNEGRNDYHPMFFTHDRAFEELFGICIQLLNKTWKEMRATAEDFNKVMQVVREQITRALPSKPNSLDQFKSKLRSLSYSEILRLRQSERMSQDDFQSPPIVELREKIQPEILELIKQQRLNRLCEGSSFRKIGNRRRQERFWYCRLALNHKVLHYGDLDDNPQGEVTFESLQEKIPVADIKAIVTGKDCPHMKEKSALKQNKEVLELAFSILYDPDETLNFIAPNKYEYCIWIDGLSALLGKDMSSELTKSDLDTLLSMEMKLRLLDLENIQIPEAPPPIPKEPSSYDFVYHYG

SEQ ID NO: 27759 - protein, 267 aa, Homo sapiens
  REGION 1..267: note = ENSP00000388962
EEITVGQLISHLQVSNQEIQTYAIALINALFLKAPEDKRQDMANAFAQKHLRSIILNHVIRGNRPIKTEMAHQLYVLQVLTFNLLEERMMTKMDPNDQAQRDIIFELRRIAFDAESDPSNAPGSGTEKRKAMYTKDYKMLGFTNHINPAMDFTQTPPGMLALDNMLYLAKVHQDTYIRIVLENSSREDKHECPFGRSAIELTKMLCEILQVGELPNEGRNDYHPMFFTHDRAFEELFGICIQLLNKTWKEMRATAEDFNKVSVSGLL

SEQ ID NO: 27760 - protein, 338 aa, Homo sapiens
  REGION 1..338: note = ENSP00000416181
MPPPSDIVKVAIEWPGANAQLLEIDQKRPLASIIKEVCDGWSLPNPEYYTLRYADGPQLYITEQTRSDIKNGTILQLAISPSRAARQLMERTQSSNMETRLDAMKELAKLSADVTFATEFINMDGIIVLTRLVESGTKLLSHYSEMLAFTLTAFLELMDHGIVSWDMVSITFIKQIAGYVSQPMVDVSILQRSLAILESMVLNSQSLYQKIAEEITVGQLISHLQVSNQEIQTYAIALINALFLKAPEDKRQDMANAFAQKHLRSIILNHVIRGNRPIKTEMAHQLYVLQVLTFNLLEERMMTKMDPNDQAQRDIIFELRRIAFDAESDPSNAPGSGT

SEQ ID NO: 27761 - protein, 720 aa, Homo sapiens; identical to SEQ ID NO: 27754
  REGION 1..720: note = ENSP00000379673

SEQ ID NO: 27762 - protein, 328 aa, Homo sapiens
  REGION 1..328: note = ENSP00000433232
MLIQVCLYFYCKFLWRCLKFVMRKLTGRCELQRICYNTKPGASRTMKIETSLRDSKSKLLQTSVSVHPDAIEKTIEDIMELKKINPDVNPQLGISLQACLLQIVGYRNLIADVEKLRREAYDSDNPQHEEMLLKLWKFLKPNTPLESRISKQWCEIGFQGDDPKTDFRGMGLLGLYNLQYFAERDATAAQQVLSDSLHPKCRDITKEEISKFSKAEWEKKRMDKAIGYSFAIVGINITDLAYNLLVSGALKTHFYNIAPEAPTLSHFQQTFCYLMHEFHKFWIEEDPMDIMEFNRVREKFRKRIIKQLQNPDMALCPHFAASEGLINM

SEQ ID NO: 27763 - protein, 334 aa, Homo sapiens
  REGION 1..334: note = ENSP00000265840
MKHFLRMLIQVCLYFYCKFLWRCLKFVMRKLTGRCELQRICYNTKPGASRTMKIETSLRDSKSKLLQTSVSVHPDAIEKTIEDIMELKKINPDVNPQLGISLQACLLQIVGYRNLIADVEKLRREAYDSDNPQHEEMLLKLWKFLKPNTPLESRISKQWCEIGFQGDDPKTDFRGMGLLGLYNLQYFAERDATAAQQVLSDSLHPKCRDITKEEISKFSKAEWEKKRMDKAIGYSFAIVGINITDLAYNLLVSGALKTHFYNIAPEAPTLSHFQQTFCYLMHEFHKFWIEEDPMDIMEFNRVREKFRKRIIKQLQNPDMALCPHFAASEGLINM

SEQ ID NO: 27764 - protein, 326 aa, Homo sapiens
  REGION 1..326: note = ENSP00000412257
MKHFLRMLIQVCLYFYCKFLWRCLKFVMRKLTGRCELQRICYNTKPGASRTMKIETSLRDSKSKLLQTSVSVHPDAIEKTIEDIMELKKINPDVNPQLGISLQACLLQIVGYRNLIADVEKLRREAYDSDNPQHEEMLLKLWKFLKPNTPLESRISKQWCEIGFQGDDPKTDFRGMGLLGLYNLQYFAERDATAAQQVLSDSLHPKCSKFSKAEWEKKRMDKAIGYSFAIVGINITDLAYNLLVSGALKTHFYNIAPEAPTLSHFQQTFCYLMHEFHKFWIEEDPMDIMEFNRVREKFRKRIIKQLQNPDMALCPHFAASEGLINM

SEQ ID NO: 27765 - protein, 706 aa, Homo sapiens
  REGION 1..706: note = ENSP00000389857
MAGLTAAAPRPGVLLLLLSILHPSRPGGVPGAIPGGVPGGVFYPGAGLGALGGGALGPGGKPLKPVPGGLAGAGLGAGLGAFPAVTFPGALVPGGVADAAAAYKAAKAGAGLGGVPGVGGLGVSAGAVVPQPGAGVKPGKVPGVGLPGVYPGGVLPGARFPGVGVLPGVPTGAGVKPKAPGVGGAFAGIPGVGPFGGPQPGVPLGYPIKAPKLPGGYGLPYTTGKLPYGYGPGGVAGAAGKAGYPTGTGVGPQAAAAAAAKAAAKFGAGAAGVLPGVGGAGVPGVPGAIPGIGGIAGVGTPAAAAAAAAAAKAAKYGAAAGLVPGGPGFGPGVVGVPGAGVPGVGVPGAGIPVVPGAGIPGAAVPGVVSPEAAAKAAAKAAKYGARPGVGVGGIPTYGVGAGGFPGFGVGVGGIPGVAGVPGVGGVPGVGGVPGVGISPEAQAAAAAKAAKYGVGTPAAAAAKAAAKAAQFGLVPGVGVAPGVGVAPGVGVAPGVGLAPGVGVAPGVGVAPGVGVAPGIGPGGVAAAAKSAAKVAAKAQLRAAAGLGAGIPGLGVGVGVPGLGVGAGVPGLGVGAGVPGFGAVPGALAAAKAAKYGAAVPGVLGGLGALGGVGIPGGVVGAGPAAAAAAAKAAAKAAQFGLVGAAGLGGLGVGGLGVPGVGGLGGIPPAAAAKAAKYGVAARPGFGLSPIFPGGACLGKACGRKRK

SEQ ID NO: 27766 - protein, 724 aa, Homo sapiens
  REGION 1..724: note = ENSP00000252034
MAGLTAAAPRPGVLLLLLSILHPSRPGGVPGAIPGGVPGGVFYPGAGLGALGGGALGPGGKPLKPVPGGLAGAGLGAGLGAFPAVTFPGALVPGGVADAAAAYKAAKAGAGLGGVPGVGGLGVSAGAVVPQPGAGVKPGKVPGVGLPGVYPGGVLPGARFPGVGVLPGVPTGAGVKPKAPGVGGAFAGIPGVGPFGGPQPGVPLGYPIKAPKLPGGYGLPYTTGKLPYGYGPGGVAGAAGKAGYPTGTGVGPQAAAAAAAKAAAKFGAGAAGVLPGVGGAGVPGVPGAIPGIGGIAGVGTPAAAAAAAAAAKAAKYGAAAGLVPGGPGFGPGVVGVPGAGVPGVGVPGAGIPVVPGAGIPGAAVPGVVSPEAAAKAAAKAAKYGARPGVGVGGIPTYGVGAGGFPGFGVGVGGIPGVAGVPGVGGVPGVGGVPGVGISPEAQAAAAAKAAKYGVGTPAAAAAKAAAKAAQFGLVPGVGVAPGVGVAPGVGVAPGVGLAPGVGVAPGVGVAPGVGVAPGIGPGGVAAAAKSAAKVAAKAQLRAAAGLGAGIPGLGVGVGVPGLGVGAGVPGLGVGAGVPGFGAVPGALAAAKAAKYGAAVPGVLGGLGALGGVGIPGGVVGAGPAAAAAAAKAAAKAAQFGLVGAAGLGGLGVGGLGVPGVGGLGGIPPAAAAKAAKYGAAGLGGVLGGAGQFPLGGVAARPGFGLSPIFPGGACLGKACGRKRK

SEQ ID NO: 27767 - protein, 151 aa, Homo sapiens
  REGION 1..151: note = ENSP00000394549
MAGLTAAAPRPGVLLLLLSILHPSRPGGVPGAIPGGVPGGVFYPALGPGGKPLKPGLGAFPAVTFPGALVPGGVADAAAAYKAAKAGAGLGGVPGVGGLGVSAGAVVPQPGAGVKPGKVPGVGLPGVYPGGVLPGARFPGVGVLPGVPTGA

SEQ ID NO: 27768 - protein, 643 aa, Homo sapiens
  REGION 1..643: note = ENSP00000315607
MAGLTAAAPRPGVLLLLLSILHPSRPGGVPGAIPGGVPGGVFYPGAGLGALGGGALGPGGKPLKPGLGAFPAVTFPGALVPGGVADAAAAYKAAKAGAGLGGVPGVGGLGVSAGAVVPQPGAGVKPGKVPGVGLPGVYPGGVLPGARFPGVGVLPGVPTGAGVKPKAPGVGPFGGPQPGVPLGYPIKAPKLPGYGPGGVAGAAGKAGYPTGTGVGPQAAAAAAAKAAAKFGAGAAGVLPGVGGAGVPGVPGAIPGIGGIAGVGTPAAAAAAAAAAKAAKYGAAAGLVPGGPGFGPGVVGVPGAGVPGVGVPGAGIPVVPGAGIPGAAVPGVVSPEAAAKAAAKAAKYGARPGVGVGGIPTYGVGAGGFPGFGVGVGAEAQAAAAAKAAKYGLVPGVGVAPGVGVAPGVGVAPGVGLAPGVGVAPGVGVAPGVGVAPGIGPGGVAAAAKSAAKVAAKAQLRAAAGLGAGIPGLGVGVGVPGLGVGAGVPGLGVGAGVPGFGAVPGALAAAKAAKYGAAVPGVLGGLGALGGVGIPGGVVGAGPAAAAAAAKAAAKAAQFGLVGAAGLGGLGVGGLGVPGVGGLGGIPPAAAAKAAKYGAAGLGGVLGGAGQFPLGGVAARPGFGLSPIFPGGACLGKACGRKRK

SEQ ID NO: 27769 - protein, 294 aa, Homo sapiens
  REGION 1..294: note = ENSP00000406949
MAGLTAAAPRPGVLLLLLSILHPSRPGGVPGAIPGGVPGGVFYPGAGLGALGGGALGPGGKPLKPGLGAFPAVTFPGALVPGGVADAAAAYKAAKAGAGLGGVPGVGGLGVSAGAVVPQPGAGVKPGKVPGVGLPGVYPGGVLPGARFPGVGVLPGVPTGAGVKPKAPGVGPFGGPQPGVPLGYPIKAPKLPGGYGLPYTTGKLPYGYGPGGVAGAAGKAGYPTGTGVGPQAAAAAAAKAAAKFGAGAAGVLPGVGGAGVPGVPGAIPGIGGIAGVGTPAAAAAAAAAAKAAKY

SEQ ID NO: 27770 - protein, 168 aa, Homo sapiens
  REGION 1..168: note = ENSP00000389206
MAGLTAAAPRPGVLLLLLSILHPSRPGGVPGAIPGGVPGGVFYPGAGLGALGGGALGPGGKPLKPGVGPFGGPQPGVPLGYPIKAPKLPGYGPGGVAGAAGKAGYPTGTGVGPQAAAAAAAKAAAKFGAGAAGVLPGVGGAGVPGVPGAIPGIGGIAGVGTPAAAAAA

SEQ ID NO: 27771 - protein, 700 aa, Homo sapiens
  REGION 1..700: note = ENSP00000392575
MAGLTAAAPRPGVLLLLLSILHPSRPGGVPGAIPGGVPGGVFYPALGPGGKPLKPVPGGLAGAGLGAGLGAFPAVTFPGALVPGGVADAAAAYKAAKAGAGLGGVPGVGGLGVSAAPSVPGAVVPQPGAGVKPGKVPGVGLPGVYPGGVLPGARFPGVGVLPGVPTGAGVKPKAPGVGGAFAGIPGVGPFGGPQPGVPLGYPIKAPKLPGGYGLPYTTGKLPYGYGPGGVAGAAGKAGYPTGTGVGPQAAAAAAAKAAAKFGAGAAGVLPGVGGAGVPGVPGAIPGIGGIAGVGTPAAAAAAAAAAKAAKYGAAAGLVPGGPGFGPGVVGVPGAGVPGVGVPGAGIPVVPGAGIPGAAVPGVVSPEAAAKAAAKAAKYGARPGVGVGGIPTYGVGAGGFPGFGVGVGGIPGVAGVPGVGGVPGVGGVPGVGISPEAQAAAAAKAAKYGLVPGVGVAPGVGVAPGVGVAPGVGLAPGVGVAPGVGVAPGVGVAPGIGPGGVAAAAKSAAKVAAKAQLRAAAGLGAGIPGLGVGVGVPGLGVGAGVPGLGVGAGVPGFGAVPGALAAAKAAKYGAAVPGVLGGLGALGGVGIPGGVVGAGPAAAAAAAKAAAKAAQFGLVGAAGLGGLGVGGLGVPGVGGLGGIPPAAAAKAAKYGAAGLGGVLGGAGQFPLGGVAARPGFGLSPIFPGGACLGKACGRKRK

SEQ ID NO: 27772 - protein, 730 aa, Homo sapiens
  REGION 1..730: note = ENSP00000369936
MAGLTAAAPRPGVLLLLLSILHPSRPGGVPGAIPGGVPGGVFYPGAGLGALGGGALGPGGKPLKPVPGGLAGAGLGAGLGAFPAVTFPGALVPGGVADAAAAYKAAKAGAGLGGVPGVGGLGVSAGAVVPQPGAGVKPGKVPGVGLPGVYPGGVLPGARFPGVGVLPGVPTGAGVKPKAPGVGGAFAGIPGVGPFGGPQPGVPLGYPIKAPKLPGGYGLPYTTGKLPYGYGPGGVAGAAGKAGYPTGTGVGPQAAAAAAAKAAAKFGAGAAGVLPGVGGAGVPGVPGAIPGIGGIAGVGTPAAAAAAAAAAKAAKYGAAAGLVPGGPGFGPGVVGVPGAGVPGVGVPGAGIPVVPGAGIPGAAVPGVVSPEAAAKAAAKAAKYGARPGVGVGGIPTYGVGAGGFPGFGVGVGGIPGVAGVPGVGGVPGVGGVPGVGISPEAQAAAAAKAAKYGVGTPAAAAAKAAAKAAQFALLNLAGLVPGVGVAPGVGVAPGVGVAPGVGLAPGVGVAPGVGVAPGVGVAPGIGPGGVAAAAKSAAKVAAKAQLRAAAGLGAGIPGLGVGVGVPGLGVGAGVPGLGVGAGVPGFGAVPGALAAAKAAKYGAAVPGVLGGLGALGGVGIPGGVVGAGPAAAAAAAKAAAKAAQFGLVGAAGLGGLGVGGLGVPGVGGLGGIPPAAAAKAAKYGAAGLGGVLGGAGQFPLGGVAARPGFGLSPIFPGGACLGKACGRKRK

SEQ ID NO: 27773 - protein, 677 aa, Homo sapiens
  REGION 1..677: note = ENSP00000369949
MAGLTAAAPRPGVLLLLLSILHPSRPGGVPGAIPGGVPGGVFYPALGPGGKPLKPVPGGLAGAGLGAGLGAFPAVTFPGALVPGGVADAAAAYKAAKAGAGLGGVPGVGGLGVSAGAVVPQPGAGVKPGKVPGVGLPGVYPGGVLPGARFPGVGVLPGVPTGAGVKPKAPGVGGAFAGIPGVGPFGGPQPGVPLGYPIKAPKLPGGYGLPYTTGKLPYGYGPGGVAGAAGKAGYPTGTGVGPQAAAAAAAKAAAKFGAGAAGVLPGVGGAGVPGVPGAIPGIGGIAGVGTPAAAAAAAAAAKAAKYGAAAGLVPGGPGFGPGVVGVPGAGVPGVGVPGAGIPVVPGAGIPGAAVPGVVSPEAAAKAAAKAAKYGARPGVGVGGIPTYGVGAGGFPGFGVGVGGIPGVAGVPGVGGVPGVGGVPGVGISPEAQAAAAAKAAKYGLVPGVGVAPGVGVAPGVGVAPGVGLAPGVGVAPGVGVAPGVGVAPGIGPGGVAAAAKSAAKVAAKAQLRAAAGLGAGIPGLGVGVGVPGLGVGAGVPGLGVGAGVPGFGAVPGALAAAKAAKYGAAVPGVLGGLGALGGVGIPGGVVGAGPAAAAAAAKAAAKAAQFGLVGAAGLGGLGVGGLGVPGVGGLGGIPPAAAAKAAKYGVAARPGFGLSPIFPGGACLGKACGRKRK

SEQ ID NO: 27774 - protein, 658 aa, Homo sapiens
  REGION 1..658: note = ENSP00000369958
MAGLTAAAPRPGVLLLLLSILHPSRPGGVPGAIPGGVPGGVFYPGAGLGALGGGALGPGGKPLKPVPGGLAGAGLGAGLGAFPAVTFPGALVPGGVADAAAAYKAAKAGAGLGGVPGVGGLGVSAGAVVPQPGAGVKPGKVPGVGLPGVYPGGVLPGARFPGVGVLPGVPTGAGVKPKAPGVGGAFAGIPGVGPFGGPQPGVPLGYPIKAPKLPGYGPGGVAGAAGKAGYPTGTGVGPQAAAAAAAKAAAKFGAGAAGVLPGVGGAGVPGVPGAIPGIGGIAGVGTPAAAAAAAAAAKAAKYGAAAGLVPGGPGFGPGVVGVPGAGVPGVGVPGAGIPVVPGAGIPGAAVPGVVSPEAAAKAAAKAAKYGARPGVGVGGIPTYGVGAGGFPGFGVGVGGIPGVAGVPGVGGVPGVGGVPGVGISPEAQAAAAAKAAKYGLVPGVGVAPGVGVAPGVGVAPGVGLAPGVGVAPGVGVAPGVGVAPGIGPGGVAGAAAGLGAGIPGLGVGVGVPGLGVGAGVPGLGVGAGVPGFGAVPGALAAAKAAKYGAAVPGVLGGLGALGGVGIPGGVVGAGPAAAAAAAKAAAKAAQFGLVGAAGLGGLGVGGLGVPGVGGLGGIPPAAAAKAAKYGVAARPGFGLSPIFPGGACLGKACGRKRK

SEQ ID NO: 27775 - protein, 714 aa, Homo sapiens
  REGION 1..714: note = ENSP00000403162
MAGLTAAAPRPGVLLLLLSILHPSRPGGVPGAIPGGVPGGVFYPALGPGGKPLKPVPGGLAGAGLGAGLGAFPAVTFPGALVPGGVADAAAAYKAAKAGAGLGGVPGVGGLGVSAGAVVPQPGAGVKPGKVPGVGLPGVYPGGVLPGARFPGVGVLPGVPTGAGVKPKAPGVGGAFAGIPGVGPFGGPQPGVPLGYPIKAPKLPGGYGLPYTTGKLPYGYGPGGVAGAAGKAGYPTGTGVGPQAAAAAAAKAAAKFGAGAAGVLPGVGGAGVPGVPGAIPGIGGIAGVGTPAAAAAAAAAAKAAKYGAAAGLVPGGPGFGPGVVGVPGAGVPGVGVPGAGIPVVPGAGIPGAAVPGVVSPEAAAKAAAKAAKYGARPGVGVGGIPTYGVGAGGFPGFGVGVGGIPGVAGVPGVGGVPGVGGVPGVGISPEAQAAAAAKAAKYGVGTPAAAAAKAAAKAAQFGLVPGVGVAPGVGVAPGVGVAPGVGLAPGVGVAPGVGVAPGVGVAPGIGPGGVAAAAKSAAKVAAKAQLRAAAGLGAGIPGLGVGVGVPGLGVGAGVPGLGVGAGVPGFGAVPGALAAAKAAKYGAAVPGVLGGLGALGGVGIPGGVVGAGPAAAAAAAKAAAKAAQFGLVGAAGLGGLGVGGLGVPGVGGLGGIPPAAAAKAAKYGAAGLGGVLGGAGQFPLGGVAARPGFGLSPIFPGGACLGKACGRKRK

SEQ ID NO: 27776 - protein, 711 aa, Homo sapiens
  REGION 1..711: note = ENSP00000349540
MAGLTAAAPRPGVLLLLLSILHPSRPGGVPGAIPGGVPGGVFYPGAGLGALGGGALGPGGKPLKPVPGGLAGAGLGAGLGAFPAVTFPGALVPGGVADAAAAYKAAKAGAGLGGVPGVGGLGVSAAPSVPGAVVPQPGAGVKPGKVPGVGLPGVYPGGVLPGARFPGVGVLPGVPTGAGVKPKAPGVGGAFAGIPGVGPFGGPQPGVPLGYPIKAPKLPGGYGLPYTTGKLPYGYGPGGVAGAAGKAGYPTGTGVGPQAAAAAAAKAAAKFGAGAAGVLPGVGGAGVPGVPGAIPGIGGIAGVGTPAAAAAAAAAAKAAKYGAAAGLVPGGPGFGPGVVGVPGAGVPGVGVPGAGIPVVPGAGIPGAAVPGVVSPEAAAKAAAKAAKYGARPGVGVGGIPTYGVGAGGFPGFGVGVGGIPGVAGVPGVGGVPGVGGVPGVGISPEAQAAAAAKAAKYGVGTPAAAAAKAAAKAAQFGLVPGVGVAPGVGVAPGVGVAPGVGLAPGVGVAPGVGVAPGVGVAPGIGPGGVAAAAKSAAKVAAKAQLRAAAGLGAGIPGLGVGVGVPGLGVGAGVPGLGVGAGVPGFGAVPGALAAAKAAKYGAAVPGVLGGLGALGGVGIPGGVVGAGPAAAAAAAKAAAKAAQFGLVGAAGLGGLGVGGLGVPGVGGLGGIPPAAAAKAAKYGVAARPGFGLSPIFPGGACLGKACGRKRK

SEQ ID NO: 27777 - protein, 214 aa, Homo sapiens
  REGION 1..214: note = ENSP00000411092
MAGLTAAAPRPGVLLLLLSILHPSRPGGVPGAIPGGVPGGVFYPGAGLGALGGGALGPGGKPLKPVPGGLAGAGLGAGLGAFPAVTFPGALVPGGVADAAAAYKAAKAGAGLGGVPGVGGLGVSAGAVVPQPGAGVKPGKVPGVGLPGVYPGGVLPGVGPFGGPQPGVPLGYPIKAPKLPGGYGLPYTTGKLPYGYGPGGVAGAAGKAGYPTGT

SEQ ID NO: 27778 - protein, 692 aa, Homo sapiens
  REGION 1..692: note = ENSP00000391129
MAGLTAAAPRPGVLLLLLSILHPSRPGGVPGAIPGGVPGGVFYPGAGLGALGGGALGPGGKPLKPVPGGLAGAGLGAGLGAFPAVTFPGALVPGGVADAAAAYKAAKAGAGLGGVPGVGGLGVSAAPSVPGAVVPQPGAGVKPGKVPGVGLPGVYPGGVLPGARFPGVGVLPGVPTGAGVKPKAPGVGGAFAGIPGVGPFGGPQPGVPLGYPIKAPKLPGGYGLPYTTGKLPYGYGPGGVAGAAGKAGYPTGTGVGPQAAAAAAAKAAAKFGAGAAGVLPGVGGAGVPGVPGAIPGIGGIAGVGTPAAAAAAAAAAKAAKYGAAAGLVPGGPGFGPGVVGVPGAGVPGVGVPGAGIPVVPGAGIPGAAVPGVVSPEAAAKAAAKAAKYGARPGVGVGGIPTYGVGAGGFPGFGVGVGGIPGVAGVPGVGGVPGVGGVPGVGISPEAQAAAAAKAAKYGLVPGVGVAPGVGVAPGVGVAPGVGLAPGVGVAPGVGVAPGVGVAPGIGPGGVAAAAKSAAKVAAKAQLRAAAGLGAGIPGLGVGVGVPGLGVGAGVPGLGVGAGVPGFGAVPGALAAAKAAKYGAAVPGVLGGLGALGGVGIPGGVVGAGPAAAAAAAKAAAKAAQFGLVGAAGLGGLGVGGLGVPGVGGLGGIPPAAAAKAAKYGVAARPGFGLSPIFPGGACLGKACGRKRK

SEQ ID NO: 27779 - protein, 68 aa, Homo sapiens
  REGION 1..68: note = ENSP00000404138
MAGLTAAAPRPGVLLLLLSILHPSRPGGVPGAIPGGVPGGVFYPGNVHETSTHPGHADDADVHNRCTF

SEQ ID NO: 27780 - protein, 176 aa, Homo sapiens
  REGION 1..176: note = ENSP00000403961
MAGLTAAAPRPGVLLLLLSILHPSRPGGVPGAIPGGVPGGVFYPGAGLGALGGGALGPGGKPLKPVPGGLAGAGLGAGLGAFPAVTFPGALVPGGVADAAAAYKAAKAGAGLGGVPGVGGLGVSAGAVVPQPGAGVKPGKVPGVGGAFAGIPGVGPFGGPQPGVPLGYPIKAPKLP

SEQ ID NO: 27781 - protein, 570 aa, Homo sapiens
  REGION 1..570: note = ENSP00000369926
MAGLTAAAPRPGVLLLLLSILHPSRPGGVPGAIPGGVPGGVFYPGAGLGALGGGALGPGGKPLKPVPGGLAGAGLGAGVGGAFAGIPGVGPFGGPQPGVPLGYPIKAPKLPGYGPGGVAGAAGKAGYPTGTGVGPQAAAAAAAKAAAKFGAGAAGVLPGVGGAGVPGVPGAIPGIGGIAGVGTPAAAAAAAAAAKAAKYGAAAGLVPGGPGFGPGVVGVPGAGVPGVGVPGAGIPVVPGAGIPGAAVPGVVSPEAAAKAAAKAAKYGARPGVGVGGIPTYGVGAGGFPGFGVGVGGIPGVAGVPGVGGVPGVGGVPGVGISPEAQAAAAAKAAKYGLVPGVGVAPGVGVAPGVGVAPGVGLAPGVGVAPGVGVAPGVGVAPGIGPGGVAAAAKSAAKVAAKAQLRAAAGLGAGIPGLGVGVGVPGLGVGAGVPGLGVGAGVPGFGAVPGALAAAKAAKYGAAVPGVLGGLGALGGVGIPGGVVGAGPAAAAAAAKAAAKAAQFGLVGAAGLGGLGVGGLGVPGVGGLGGIPPAAAAKAAKYGVAARPGFGLSPIFPGGACLGKACGRKRK

SEQ ID NO: 27782 - protein, 705 aa, Homo sapiens
  REGION 1..705: note = ENSP00000369950
MAGLTAAAPRPGVLLLLLSILHPSRPGGVPGAIPGGVPGGVFYPGAGLGALGGGALGPGGKPLKPVPGGLAGAGLGAGLGAFPAVTFPGALVPGGVADAAAAYKAAKAGAGLGGVPGVGGLGVSAGAVVPQPGAGVKPGKVPGVGLPGVYPGGVLPGARFPGVGVLPGVPTGAGVKPKAPGVGGAFAGIPGVGPFGGPQPGVPLGYPIKAPKLPGGYGLPYTTGKLPYGYGPGGVAGAAGKAGYPTGTGVGPQAAAAAAAKAAAKFGAGAAGVLPGVGGAGVPGVPGAIPGIGGIAGVGTPAAAAAAAAAAKAAKYGAAAGLVPGGPGFGPGVVGVPGAGVPGVGVPGAGIPVVPGAGIPGAAVPGVVSPEAAAKAAAKAAKYGARPGVGVGGIPTYGVGAGGFPGFGVGVGGIPGVAGVPGVGGVPGVGGVPGVGISPEAQAAAAAKAAKYGLVPGVGVAPGVGVAPGVGVAPGVGLAPGVGVAPGVGVAPGVGVAPGIGPGGVAAAAKSAAKVAAKAQLRAAAGLGAGIPGLGVGVGVPGLGVGAGVPGLGVGAGVPGFGAVPGALAAAKAAKYGAAVPGVLGGLGALGGVGIPGGVVGAGPAAAAAAAKAAAKAAQFGLVGAAGLGGLGVGGLGVPGVGGLGGIPPAAAAKAAKYGAAGLGGVLGGAGQFPLGGVAARPGFGLSPIFPGGACLGKACGRKRK

SEQ ID NO: 27783 - protein, 166 aa, Homo sapiens
  REGION 1..166: note = ENSP00000399499
MAGLTAAAPRPGVLLLLLSILHPSRPGGVPGAIPGGVPGGVFYPGAGLGALGGGALGPGGKPLKPVPGGLAGAGLGAGLGAFPAVTFPGALVPGGVADAAAAYKAAKAGVGPFGGPQPGVPLGYPIKAPKLPGGYGLPYTTGKLPYGYGPGGVAGAAGKAGYPTGT

SEQ ID NO: 27784 - protein, 757 aa, Homo sapiens
  REGION 1..757: note = ENSP00000313565
MAGLTAAAPRPGVLLLLLSILHPSRPGGVPGAIPGGVPGGVFYPGAGLGALGGGALGPGGKPLKPVPGGLAGAGLGAGLGAFPAVTFPGALVPGGVADAAAAYKAAKAGAGLGGVPGVGGLGVSAGAVVPQPGAGVKPGKVPGVGLPGVYPGGVLPGARFPGVGVLPGVPTGAGVKPKAPGVGGAFAGIPGVGPFGGPQPGVPLGYPIKAPKLPGGYGLPYTTGKLPYGYGPGGVAGAAGKAGYPTGTGVGPQAAAAAAAKAAAKFGAGAAGVLPGVGGAGVPGVPGAIPGIGGIAGVGTPAAAAAAAAAAKAAKYGAAAGLVPGGPGFGPGVVGVPGAGVPGVGVPGAGIPVVPGAGIPGAAVPGVVSPEAAAKAAAKAAKYGARPGVGVGGIPTYGVGAGGFPGFGVGVGGIPGVAGVPGVGGVPGVGGVPGVGISPEAQAAAAAKAAKYGVGTPAAAAAKAAAKAAQFGLVPGVGVAPGVGVAPGVGVAPGVGLAPGVGVAPGVGVAPGVGVAPGIGPGGVAAAAKSAAKVAAKAQLRAAAGLGAGIPGLGVGVGVPGLGVGAGVPGLGVGAGVPGFGAGADEGVRRSLSPELREGDPSSSQHLPSTPSSPRVPGALAAAKAAKYGAAVPGVLGGLGALGGVGIPGGVVGAGPAAAAAAAKAAAKAAQFGLVGAAGLGGLGVGGLGVPGVGGLGGIPPAAAAKAAKYGAAGLGGVLGGAGQFPLGGVAARPGFGLSPIFPGGACLGKACGRKRK

SEQ ID NO: 27785 - protein, 60 aa, Homo sapiens
  REGION 1..60: note = ENSP00000412262
VTFPGALVPGGVADAAAAYKAAKAGAGLGGVPGVGGLGVSAGAVVPQPGAGVKPGKVPAL

SEQ ID NO: 27786 - protein, 617 aa, Homo sapiens
  REGION 1..617: note = ENSP00000480955
MAGLTAAAPRPGVLLLLLSILHPSRPGGVPGAIPGGVPGGVFYPALGPGGKPLKPVPGGLAGAGLGAGLGAFPAVTFPGALVPGGVADAAAAYKAAKAGAGLGGVPGVGGLGVSAGAVVPQPGAGVKPGKVPGVGLPGVYPGGVLPGVGPFGGPQPGVPLGYPIKAPKLPGGYGLPYTTGKLPYGYGPGGVAGAAGKAGYPTGTGVGPQAAAAAAAKAAAKFGAGAAGVLPGVGGAGVPGVPGAIPGIGGIAGVGTPAAAAAAAAAAKAAKYGAAAGLVPGGPGFGPGVVGVPGAGVPGVGVPGAGIPVVPGAGIPGAAVPGVVSPEAAAKAAAKAAKYGARPGVGVGGIPTYGVGAGGFPGFGVGVGAEAQAAAAAKAAKYGLVPGVGVAPGVGVAPGVGVAPGVGLAPGVGVAPGVGVAPGVGVAPGIGPGGVAAAAKSAAKVAAKAQLRAAAGLGAGIPGLGVGVGVPGLGVGAGVPGLGVGAGVPGFGAVPGALAAAKAAKYGAAVPGVLGGLGALGGVGIPGGVVGAGPAAAAAAAKAAAKAAQFGLVGAAGLGGLGVGGLGVPGVGGLGGIPPAAAAKAAKYGVAARPGFGLSPIFPGGACLGKACGRKRK

SEQ ID NO: 27787 - protein, 786 aa, Homo sapiens
  REGION 1..786: note = ENSP00000351807
MAGLTAAAPRPGVLLLLLSILHPSRPGGVPGAIPGGVPGGVFYPGAGLGALGGGALGPGGKPLKPVPGGLAGAGLGAGLGAFPAVTFPGALVPGGVADAAAAYKAAKAGAGLGGVPGVGGLGVSAGAVVPQPGAGVKPGKVPGVGLPGVYPGGVLPGARFPGVGVLPGVPTGAGVKPKAPGVGGAFAGIPGVGPFGGPQPGVPLGYPIKAPKLPGGYGLPYTTGKLPYGYGPGGVAGAAGKAGYPTGTGVGPQAAAAAAAKAAAKFGAGAAGVLPGVGGAGVPGVPGAIPGIGGIAGVGTPAAAAAAAAAAKAAKYGAAAGLVPGGPGFGPGVVGVPGAGVPGVGVPGAGIPVVPGAGIPGAAVPGVVSPEAAAKAAAKAAKYGARPGVGVGGIPTYGVGAGGFPGFGVGVGGIPGVAGVPGVGGVPGVGGVPGVGISPEAQAAAAAKAAKYGAAGAGVLGGLVPGAPGAVPGVPGTGGVPGVGTPAAAAAKAAAKAAQFGLVPGVGVAPGVGVAPGVGVAPGVGLAPGVGVAPGVGVAPGVGVAPGIGPGGVAAAAKSAAKVAAKAQLRAAAGLGAGIPGLGVGVGVPGLGVGAGVPGLGVGAGVPGFGAGADEGVRRSLSPELREGDPSSSQHLPSTPSSPRVPGALAAAKAAKYGAAVPGVLGGLGALGGVGIPGGVVGAGPAAAAAAAKAAAKAAQFGLVGAAGLGGLGVGGLGVPGVGGLGGIPPAAAAKAAKYGAAGLGGVLGGAGQFPLGGVAARPGFGLSPIFPGGACLGKACGRKRK

SEQ ID NO: 27788 - protein, 279 aa, Homo sapiens
  REGION 1..279: note = ENSP00000361536
MEAVVNLYQEVMKHADPRIQGYPLMGSPLLMTSILLTYVYFVLSLGPRIMANRKPFQLRGFMIVYNFSLVALSLYIVYEFLMSGWLSTYTWRCDPVDYSNSPEALRMVRVAWLFLFSKFIELMDTVIFILRKKDGQVTFLHVFHHSVLPWSWWWGVKIAPGGMGSFHAMINSSVHVIMYLYYGLSAFGPVAQPYLWWKKHMTAIQLIQFVLVSLHISQYYFMSSCNYQYPVIIHLIWMYGTIFFMLFSNFWYHSYTKGKRLPRALQQNGAPGIAKVKAN

SEQ ID NO: 27789 - protein, 279 aa, Homo sapiens; identical to SEQ ID NO: 27788
  REGION 1..279: note = ENSP00000477602

SEQ ID NO: 27790 - protein, 252 aa, Homo sapiens
  REGION 1..252: note = ENSP00000416024
MEAVVNLYQEVMKHADPRIQGYPLMGSPLLMTSILLTYVYFVLSLGPRIMANRKPFQLRGFMIVYNFSLVALSLYIVYEMVRVAWLFLFSKFIELMDTVIFILRKKDGQVTFLHVFHHSVLPWSWWWGVKIAPGGMGSFHAMINSSVHVIMYLYYGLSAFGPVAQPYLWWKKHMTAIQLIQFVLVSLHISQYYFMSSCNYQYPVIIHLIWMYGTIFFMLFSNFWYHSYTKGKRLPRALQQNGAPGIAKVKAN

SEQ ID NO: 27791 - protein, 296 aa, Homo sapiens
  REGION 1..296: note = ENSP00000346693
MEHLKAFDDEINAFLDNMFGPRDSRVRGWFMLDSYLPTFFLTVMYLLSIWLGNKYMKNRPALSLRGILTLYNLGITLLSAYMLAELILSTWEGGYNLQCQDLTSAGEADIRVAKVLWWYYFSKSVEFLDTIFFVLRKKTSQITFLHVYHHASMFNIWWCVLNWIPCGQSFFGPTLNSFIHILMYSYYGLSVFPSMHKYLWWKKYLTQAQLVQFVLTITHTMSAVVKPCGFPFGCLIFQSSYMLTLVILFLNFYVQTYRKKPMKKDMQEPPAGKEVKNGFSKAYFTAANGVMNKKAQ

SEQ ID NO: 27792 - protein, 299 aa, Homo sapiens
  REGION 1..299: note = ENSP00000306640
MEHFDASLSTYFKALLGPRDTRVKGWFLLDNYIPTFICSVIYLLIVWLGPKYMRNKQPFSCRGILVVYNLGLTLLSLYMFCELVTGVWEGKYNFFCQGTRTAGESDMKIIRVLWWYYFSKLIEFMDTFFFILRKNNHQITVLHVYHHASMLNIWWFVMNWVPCGHSYFGATLNSFIHVLMYSYYGLSSVPSMRPYLWWKKYITQGQLLQFVLTIIQTSCGVIWPCTFPLGWLYFQIGYMISLIALFTNFYIQTYNKKGASRRKDHLKDHQNGSMAAVNGHTNSFSPLENNVKPRKLRKD

SEQ ID NO: 27793 - protein, 88 aa, Homo sapiens
  REGION 1..88: note = ENSP00000359951
MEHFDASLSTYFKALLGPRGISSSVLRMGPPLHTVVGWLQQLQAAHSEEEEKMFHLCGFKHKEVVSQSSLPAVIPQNSLATIASHAPA

SEQ ID NO: 27794 - protein, 326 aa, Homo sapiens
  REGION 1..326: note = ENSP00000359956
MEHFDASLSTYFKALLGPRDTRVKGWFLLDNYIPTFICSVIYLLIVWLGPKYMRNKQPFSCRGILVVYNLGLTLLSLYMFCESKREQPRRSACASRTDPSTQQQLPENRLVTGVWEGKYNFFCQGTRTAGESDMKIIRVLWWYYFSKLIEFMDTFFFILRKNNHQITVLHVYHHASMLNIWWFVMNWVPCGHSYFGATLNSFIHVLMYSYYGLSSVPSMRPYLWWKKYITQGQLLQFVLTIIQTSCGVIWPCTFPLGWLYFQIGYMISLIALFTNFYIQTYNKKGASRRKDHLKDHQNGSMAAVNGHTNSFSPLENNVKPRKLRKD

SEQ ID NO: 27795 - protein, 262 aa, Homo sapiens
  REGION 1..262: note = ENSP00000440728
MEHFDASLSTYFKALLGPRDTRVKGWFLLDNYIPTFICSVIYLLIVWLGPKYMRNKQPFSCRGILVVYNLGLTLLSLYMFCELVTGVWEGKYNFFCQGTRTAGESDMKIIRVLWWYYFSKLIEFMDTFFFILRKNNHQITVLHVYHHASMLNIWWFVMNWVPCGHSSVCADNHPDQLRGHLAVHIPSWLVVFPDWIHDFPDCSLHKLLHSDLQQERGLPKERPPEGPPEWVHGCCEWTHQQLFTPGKQCEAKEAAEGLKSKN

SEQ ID NO: 27796 - protein, 281 aa, Homo sapiens
  REGION 1..281: note = ENSP00000424123
MAFSDLTSRTVHLYDNWIKDADPRVEDWLLMSSPLPQTILLGFYVYFVTSLGPKLMENRKPFELKKAMITYNFFIVLFSVYMCYEFVMSGWGIGYSFRCDIVDYSRSPTALRMARTCWLYYFSKFIELLDTIFFVLRKKNSQVTFLHVFHHTIMPWTWWFGVKFAAGGLGTFHALLNTAVHVVMYSYYGLSALGPAYQKYLWWKKYLTSLQLVQFVIVAIHISQFFFMEDCKYQFPVFACIIMSYSFMFLLLFLHFWYRAYTKGQRLPKTVKNGTCKNKDN

SEQ ID NO: 27797 - protein, 268 aa, Homo sapiens
  REGION 1..268: note = ENSP00000421043
MEKPINILYPRVEDWLLMSSPLPQTILLGFYVYFVTSLGPKLMENRKPFELKKAMITYNFFIVLFSVYMCYEFVMSGWGIGYSFRCDIVDYSRSPTALRMARTCWLYYFSKFIELLDTIFFVLRKKNSQVTFLHVFHHTIMPWTWWFGVKFAAGGLGTFHALLNTAVHVVMYSYYGLSALGPAYQKYLWWKKYLTSLQLVQFVIVAIHISQFFFMEDCKYQFPVFACIIMSYSFMFLLLFLHFWYRAYTKGQRLPKTVKNGTCKNKDN

SEQ ID NO: 27798 - protein, 71 aa, Homo sapiens
  REGION 1..71: note = ENSP00000425127
MAFSDLTSRTVHLYDNWIKDADPRVEDWLLMSSPLPQTILLGFYVYFVTSLGPKLMENRKPFELKKAMITL

SEQ ID NO: 27799 - protein, 165 aa, Homo sapiens
  REGION 1..165: note = ENSP00000424081
MAFSDLTSRTVHLYDNWIKDADPRVEDWLLMSSPLPQTILLGFYVYFVTSLGPKLMENRKPFELKKAMITYNFFIVLFSVYMCYEFVMSGWGIGYSFRCDIVDYSRSPTALRMARTCWLYYFSKFIELLDTIFFVLRKKNSQVTFLHVFHHTIMPWTWWFGVKFA

SEQ ID NO: 27800 - protein, 165 aa, Homo sapiens; identical to SEQ ID NO: 27799
  REGION 1..165: note = ENSP00000426400

SEQ ID NO: 27801 - protein, 88 aa, Homo sapiens
  REGION 1..88: note = ENSP00000422602
MAFSDLTSRTVHLYDNWIKDADPRVEDWLLMSSPLPQTILLGFYVYFVTSLGPKLMENRKPFELKKAMITYNFFIVLFSVYMCYEILF

SEQ ID NO: 27802 - protein, 281 aa, Homo sapiens; identical to SEQ ID NO: 27796
  REGION 1..281: note = ENSP00000402634

SEQ ID NO: 27803 - protein, 379 aa, Homo sapiens
  REGION 1..379: note = ENSP00000457353
MARVGPGRAGVSCQGRGRGRGGSGQRRPPTWEISDSDAEDSAGSEAAARARDPAGERRAAAEALRLLRPEQVLKRLAVCVDTAILEDAGADVLMEALEALGCECRIEPQRPARSLRWTRASPDPCPRSLPPEVWAAGEQELLLLLEPEEFLQGVATLTQISGPTHWVPWISPETTARPHLAVIGLDAYLWSRQHVSRGTQQPESPKVAGAEVAVSWPEVEEALVLLQLWANLDVLLVASWQELSRHVCAVTKALAQYPLKQYRESQAFSFCTAGRWAAGEPVARDGAGLQAAWRRQIRQFSRVSPAVADAVVTAFPSPRLLQQALEACSTERERMGLLADLPVPPSEGGRPRRVGPDLSRRICLFLTTANPDLLLDLGS

SEQ ID NO: 27804 - protein, 190 aa, Homo sapiens
  REGION 1..190: note = ENSP00000457966
  VARIANT 1: note = Any amino acid
XSRQHVSRGTQQPESPKVAGAEVAVSWPEVEEALVLLQLWANLDVLLVASWQELSRHVCAVTKALAQYPLKQYRESQAFSFCTAGRWAAGEPVARDGAGLQAAWRRQIRQFSRVSPAVADAVVTAFPSPRLLQQALEACSTERERMGLLADLPVPPSEGGRPRRVGPDLSRRICLFLTTANPDLLLDLGS

SEQ ID NO: 27805 - protein, 115 aa, Homo sapiens
  REGION 1..115: note = ENSP00000456946
  VARIANT 1: note = Any amino acid
XQAFSFCTAGRWAAGEPVARDGAGLQAAWRRQIRQFSRVSPAVADAVVTAFPSPRLLQQALEACSTERERMGLLADLPVPPSEGGRPRRVGPDLSRRICLFLTTANPDLLLDLGS

SEQ ID NO: 27806 - protein, 1053 aa, Homo sapiens
  REGION 1..1053: note = ENSP00000254528
MWQPRRPWPRVPWRWALALLALVGAGLCHAGPQPGYPARPSARNKNWCAYIVNKNVSCSVLEGSESFIQAQYNCAWNQMPCPSALVYRVNFRPRYVTRYKTVTQLEWRCCPGFRGGDCQEGPKDPVKTLRPTPARPRNSLKKATDNEPSQFSEPRKTLSPTGTAQPSWGVDPKEGPQELQEKKIQVLEEKVLRLTRTVLDLQSSLAGVSENLKHATQDDASRTRAPGLSSQHPKPDTTVSGDTETGQSPGVFNTKESGMKDIKSELAEVKDTLKNKSDKLEELDGKVKGYEGQLRQLQEAAQGPTVTMTTNELYQAYVDSKIDALREELMEGMDRKLADLKNSCEYKLTGLQQQCDDYGSSYLGVIELIGEKETSLRKEINNLRARLQEPSAQANCCDSEKNGDIGQQIKTLDQKIERVAEATRMLNGRLDNEFDRLIVPEPDVDFDAKWNELDARINVTEKNAEEHCFYIEETLRGAINGEVGDLKQLVDQKIQSLEDRLGSVLLQMTNNTGAELSPPGAAALPGVSGSGDERVMMELNHLKDKVQVVEDICLLNIQGKPHGMEGALPNREDRAVRDSLHLLKSLNDTMHRKFQETEQTIQKLQQDFSFLYSQLNHTENDVTHLQKEMSNCRAGENAGMGRFTKVGEQERTVDTLPSPQHPVAHCCSQLEERWQRLQSQVISELDACKECTQGVQREVSMVEGRVSHMEKTCSKLDSISGNLQRIKEGLNKHVSSLWNCVRQMNGTLRSHSRDISGLKNSVQQFYSHVFQISTDLQDLVKFQPSAKAPSPPPPAEAPKEPLQPEPAPPRPSGPATAEDPGRRPVLPQRPPEERPPQPPGSTGVIAETGQAGPPAGAGVSGRGLPRGVDGQTGSGTVPGAEGFAGAPGYPKSPPVASPGAPVPSLVSFSAGLTQKPFPSDGGVVLFNKVLVNDGDVYNPSTGVFTAPYDGRYLITATLTPERDAYVEAVLSVSNASVAQLHTAGYRREFLEYHRPPGALHTCGGPGAFHLIVHLKAGDAVNVVVTGGKLAHTDFDEMYSTFSGVFLYPFLSHL

SEQ ID NO: 27807 - protein, 1977 aa, Homo sapiens
  REGION 1..1977: note = ENSP00000451998
MAARSAPSCHLRLEWVYGYRGHQCRNNLYYTAAKEIVYFVAGVGVVYSPREHRQKFYRGHSDDIISLALHPERVLVATGQVGKEPYICIWDSYTVQTISVLKDVHTHGIACLAFDLDGQRLVSVGLDSKNAVCVWDWKRGKMLSMAPGHTDRIFDISWDLYQPNKLVSCGVKHIKFWSLCGNALTPKRGVFGKTGDLQTILCLACARDELTYSGALNGDIYVWKGINLIRTIQGAHAAGIFSMNACEEGFATGGRDGCIRLWDLTFKPITVIDLRETDQGYKGLSVRSVCWRGDHILVGTQDSEIFEIVVQERNKPFLIMQGHCEGELWALAVHPTKPLAVTGSDDRSVRIWSLVDHALIARCNMEEPIRCAAVNADGIHLALGMKDGSFTVLRVRDMTEVVHIKDRKEAIHELKYSPDGTYLAVGCNDSSVDIYGVAQRYKKVGECLGSLSFITHLDWSSDSRYLQTNDGNGKRLFYRMPGGKEVTSTEEIKGVHWASWTCVSGLEVNGIWPKYSDINDINSVDGNYIGQVLVTADDYGIIKLFRYPCLRKGAKFRKYIGHSAHVTNVRWSHDYQWVISIGGADHSVFQWKFIPERKLKDAVHIAPQESLADSHSDESDSDLSDVPELDSEIEQETQLTYRRQVYKEDLPQLKEQCKEKQKSATSKRRERAPGNSIRLHFVHGYRGYDCRSNLFYTQIGEIVYHVAAVGVIYNRQQNTQRFYLGHDDDILCLTIHPLKDYVATGQVGRDPSIHIWDTETIKPLSILKGHHQYGVSAVDFSADGKRLASVGIDDSHTVVLWDWKKGEKLSIARGSKDKIFVVKMNPYVPDKLITAGIKHMKFWRKAGGGLIGRKGYIGTLGKNDTMMCAVYGWTEEMAFSGTSTGDVCIWRDIFLVKTVKAHDGPVFSMHALEKGFVTGGKDGIVALWDDSFERCLKTYAIKRAALAPGSKGLLLEDNPSIRAISLGHGHILVGTKNGEILEVDKSGPITLLVQGHMEGEVWGLATHPYLPICATVSDDKTLRIWDLSPSHCMLAVRKLKKGGRCCCFSPDGKALAVGLNDGSFLMANADTLEDLVSFHHRKDMISDIRFSPGSGKYLAVASHDSFIDIYNVMSSKRVGICKGATSYITHIDWDIRGKLLQVNTGAKEQLFFEAPRGKKQTIPSVEVEKIAWASWTSVLGLCCEGIWPVIGEVTDVTASCLTSDKMVLATGDDLGFVKLFRYPTKGKFGKFKRYVAHSTHVTNVRWTYDDSMLVTLGGTDMSLMVWTNEMEGYREKRPCDSEESDIDSEEDGGYDSDVTRENEISYTIRALSTNIRPMLGIKPHLQQKEPSIDERQGVVRGSRPPVSRAPPQPEKLQTNNVGKKKRPIEDLVLELIFGYRGRDCRNNVHYLNDGDDIIYHTASVGILHNVATGSQSFYQEHNDDILCLTVNQHPKFINIVATGQVGDSADMSATAPSIHIWDAMNKQTLSILRCYHSKGVCSVSFSATGKLLLSVGLDPEHTITIWRWQEGAKIASRAGHNQRIFVAEFRPDSDTQFVSVGVKHVKFWTLAGRALLSKKGLLSTLEDARMQTMLAIAFGANNLTFTGTISGDVCVWKDHILCRIVARAHNGPVFAMYTTLRDGLIVTGGKERPSKEGGAVKLWDQELRRCRAFRLETGQATDCVRSVCRGKGKILVGTRNAEIIEVGEKNAACNILVNGHVDGPIWGLATHPSRDFFLSAAEDGTVRLWDIADKKMLNKVNLGHAARTVCYSPEGDMVAIGMKNGEFIILLVSSLKIWGKKRDRRCAIHDIRFSPDSRYLAVGSSENSVDFYDLTLGPTLNRISYCKDIPSFVIQMDFSADSSYLQVSSGCYKRHVYEVPSGKHLMDHAAIDRITWATWTSILGDEVLGIWSRHAEKADVNCACVSHSGISLVTGDDFGMVKLFDFPCPEKFAKHKRFLGHSPHVTNIRFTSGDRHVVSAGGDDCSLFVWKCVHTPH

SEQ ID NO: 27808 - protein, 60 aa, Homo sapiens
  REGION 1..60: note = ENSP00000450965
ISDIRFSPGSGKYLAVASHDSFIDIYNVMSSKRVGICKGATSYITHIDWDIRAFTGQHWC

SEQ ID NO: 27809 - protein, 1969 aa, Homo sapiens
  REGION 1..1969: note = ENSP00000370039
MAARSAPSCHLRLEWVYGYRGHQCRNNLYYTAAKEIVYFVAGVGVVYSPREHRQKFYRGHSDDIISLALHPERVLVATGQVGKEPYICIWDSYTVQTISVLKDVHTHGIACLAFDLDGQRLVSVGLDSKNAVCVWDWKRGKMLSMAPGHTDRIFDISWDLYQPNKLVSCGVKHIKFWSLCGNALTPKRGVFGKTGDLQTILCLACARDELTYSGALNGDIYVWKGINLIRTIQGAHAAGIFSMNACEEGFATGGRDGCIRLWDLTFKPITVIDLRETDQGYKGLSVRSVCWRGDHILVGTQDSEIFEIVVQERNKPFLIMQGHCEGELWALAVHPTKPLAVTGSDDRSVRIWSLVDHALIARCNMEEPIRCAAVNADGIHLALGMKDGSFTVLRVRDMTEVVHIKDRKEAIHELKYSPDGTYLAVGCNDSSVDIYGVAQRYKKVGECLGSLSFITHLDWSSDSRYLQTNDGNGKRLFYRMPGGKEVTSTEEIKGVHWASWTCVSGLEVNGIWPKYSDINDINSVDGNYIGQVLVTADDYGIIKLFRYPCLRKGAKFRKYIGHSAHVTNVRWSHDYQWVISIGGADHSVFQWKFIPERKLKDAVHIAPQESLADSHSDESDSDLSDVPELDSEIEQETQLTYRRQVYKEDLPQLKEQCKEKQKSATSKRRERAPGNSIRLHFVHGYRGYDCRSNLFYTQIGEIVYHVAAVGVIYNRQQNTQRFYLGHDDDILCLTIHPLKDYVATGQVGRDPSIHIWDTETIKPLSILKGHHQYGVSAVDFSADGKRLASVGIDDSHTVVLWDWKKGEKLSIARGSKDKIFVVKMNPYVPDKLITAGIKHMKFWRKAGGGLIGRKGYIGTLGKNDTMMCAVYGWTEEMAFSGTSTGDVCIWRDIFLVKTVKAHDGPVFSMHALEKGFVTGGKDGIVALWDDSFERCLKTYAIKRAALAPGSKGLLLEDNPSIRAISLGHGHILVGTKNGEILEVDKSGPITLLVQGHMEGEVWGLATHPYLPICATVSDDKTLRIWDLSPSHCMLAVRKLKKGGRCCCFSPDGKALAVGLNDGSFLMANADTLEDLVSFHHRKDMISDIRFSPGSGKYLAVASHDSFIDIYNVMSSKRVGICKGATSYITHIDWDIRGKLLQVNTGAKEQLFFEAPRGKKQTIPSVEVEKIAWASWTSVLGLCCEGIWPVIGEVTDVTASCLTSDKMVLATGDDLGFVKLFRYPTKGKFGKFKRYVAHSTHVTNVRWTYDDSMLVTLGGTDMSLMVWTNEMEGYREKRPCDSEESDIDSEEDGGYDSDVTRENEISYTIRALSTNIRPMLGIKPHLQQKEPSIDERPPVSRAPPQPEKLQTNNVGKKKRPIEDLVLELIFGYRGRDCRNNVHYLNDGDDIIYHTASVGILHNVATGSQSFYQEHNDDILCLTVNQHPKFINIVATGQVGDSADMSATAPSIHIWDAMNKQTLSILRCYHSKGVCSVSFSATGKLLLSVGLDPEHTITIWRWQEGAKIASRAGHNQRIFVAEFRPDSDTQFVSVGVKHVKFWTLAGRALLSKKGLLSTLEDARMQTMLAIAFGANNLTFTGTISGDVCVWKDHILCRIVARAHNGPVFAMYTTLRDGLIVTGGKERPSKEGGAVKLWDQELRRCRAFRLETGQATDCVRSVCRGKGKILVGTRNAEIIEVGEKNAACNILVNGHVDGPIWGLATHPSRDFFLSAAEDGTVRLWDIADKKMLNKVNLGHAARTVCYSPEGDMVAIGMKNGEFIILLVSSLKIWGKKRDRRCAIHDIRFSPDSRYLAVGSSENSVDFYDLTLGPTLNRISYCKDIPSFVIQMDFSADSSYLQVSSGCYKRHVYEVPSGKHLMDHAAIDRITWATWTSILGDEVLGIWSRHAEKADVNCACVSHSGISLVTGDDFGMVKLFDFPCPEKFAKHKRFLGHSPHVTNIRFTSGDRHVVSAGGDDCSLFVWKCVHTPH

SEQ ID NO: 27810 - protein, 256 aa, Homo sapiens
  REGION 1..256: note = ENSP00000452030
GLLSTLEDARMQTMLAIAFGANNLTFTGTISGDVCVWKDHILCRIVARAHNGPVFAMYTTLRDGLIVTGGKERPSKEGGAVKLWDQELRRCRAFRLETGQATDCVRSVCRGKGKILVGTRNAEIIEVGEKNAACNILVNGHVDGPIWGLATHPSRDFFLSAAEDGTVRLWDIADKMLNKVNLGHAARTVCYSPEGDMVAIGMKNGEFIILLVSSLKIWGKKRDRRCAIHDIRISYCKDIPSFVIQMDFSADSSYLQ

SEQ ID NO: 27811 - protein, 205 aa, Homo sapiens
  REGION 1..205: note = ENSP00000452360
  VARIANT 1: note = Any amino acid
XDGTYLAVGCNDSSVDIYGVAQRYKKVGECLGSLSFITHLDWSSDSRYLQTNDGNGKRLFYRMPGGKEVTSTEEIKGVHWASWTCVSGLEVNGIWPKYSDINDINSVDGNYIGQVLVTADDYGIIKLFRYPCLRKGAKFRKYIGHSAHVTNVRWSHDYQWVISIGGADHSVFQWKFIPERKLKDAVHIAPQGYIHLYLHRHLNLM

SEQ ID NO: 27812 - protein, 167 aa, Homo sapiens
  REGION 1..167: note = ENSP00000352540
MLVLLAFIIAFHITSAALLFIATVDNAWWVGDEFFADVWRICTNNTNCTVINDSFQEYSTLQAVQATMILSTILCCIAFFIFVLQLFRLKQGERFVLTSIIQLMSCLCVMIAASIYTDRREDIHDKNAKFYPVTREGSYGYSYILAWVAFACTFISGMMYLILRKRK

SEQ ID NO: 27813 - protein, 167 aa, Homo sapiens; identical to SEQ ID NO: 27812
  REGION 1..167: note = ENSP00000445712

SEQ ID NO: 27814 - protein, 333 aa, Homo sapiens
  REGION 1..333: note = ENSP00000297375
MEENDPKPGEAAAAVEGQRQPESSPGGGSGGGGGSSPGEADTGRRRALMLPAVLQAPGNHQHPHRITNFFIDNILRPEFGRRKDAGTCCAGAGGGRGGGAGGEGGASGAEGGGGAGGSEQLLGSGSREPRQNPPCAPGAGGPLPAAGSDSPGDGEGGSKTLSLHGGAKKGGDPGGPLDGSLKARGLGGGDLSVSSDSDSSQAGANLGAQPMLWPAWVYCTRYSDRPSSGPRSRKPKKKNPNKEDKRPRTAFTAEQLQRLKAEFQTNRYLTEQRRQSLAQELSLNESQIKIWFQNKRAKIKKATGNKNTLAVHLMAQGLYNHSTTAKEGKSDSE

SEQ ID NO: 27815 - protein, 591 aa, Homo sapiens
  REGION 1..591: note = ENSP00000355809
MSEQSICQARAAVMVYDDANKKWVPAGGSTGFSRVHIYHHTGNNTFRVVGRKIQDHQVVINCAIPKGLKYNQATQTFHQWRDARQVYGLNFGSKEDANVFASAMMHALEVLNSQETGPTLPRQNSQLPAQVQNGPSQEELEIQRRQLQEQQRQKELERERLERERMERERLERERLERERLERERLEQEQLERERQERERQERLERQERLERQERLERQERLDRERQERQERERLERLERERQERERQEQLEREQLEWERERRISSAAAPASVETPLNSVLGDSSASEPGLQAASQPAETPSQQGIVLGPLAPPPPPPLPPGPAQASVALPPPPGPPPPPPLPSTGPPPPPPPPPLPNQVPPPPPPPPAPPLPASGFFLASMSEDNRPLTGLAAAIAGAKLRKVSRMEDTSFPSGGNAIGVNSASSKTDTGRGNGPLPLGGSGLMEEMSALLARRRRIAEKGSTIETEQKEDKGEDSEPVTSKASSTSTPEPTRKPWERTNTMNGSKSPVISRRDSPRKNQIVFDNRSYDSLHRPKSTPLSQPSANGVQTEGLDYDRLKQDILDEMRKELTKLKEELIDAIRQELSKSNTA

SEQ ID NO: 27816 - protein, 802 aa, Homo sapiens
  REGION 1..802: note = ENSP00000489607
MSEQSICQARAAVMVYDDANKKWVPAGGSTGFSRVHIYHHTGNNTFRVVGRKIQDHQVVINCAIPKGLKYNQATQTFHQWRDARQVYGLNFGSKEDANVFASAMMHALEVLNSQETVFYLGPTLPRQNSQLPAQVQNGPSQEELEIQRRQLQEQQRQKELERERLERERMERERLERERLERERLERERLEQEQLERERQERERQERLERQERLERQERLERQERLDRERQERQERERLERLERERQERERQEQLEREQLEWERERRISSAAPSSDSSLYNAPLPEYSSCQPPSAPPPSYAKVISAPVSDATPDYAVVTALPPTSTPPTPPLRHSATRFATSLGSAFHPVLPHYATVPRPLNKNSRPSSPVNTPSSQPPATKPCAWSTSNFSPLPPSPPIMISSPPGKATGPRPVLPVCVSSPVPQMPPSPTAPNGLVDSVTYPVSPPPTSGPAAPPPPPPLPSLASLSHCGSQASPPPSTPIASTPSSKPSVLPSPSAAAPASVETPLNSVLGDSSASEPGLQAASQPAETPSQQGIVLGPLAPPPPPPLPPGPAQASVALPPPPGPPPPPPLPSTGPPPPPPPPPLPNQVPPPPPPPPAPPLPASGFFLASMSEDNRPLTGLAAAIAGAKLRKVSRMEDTSFPSGGNAIGVNSASSKTDTGRGNGPLPLGGSGLMEEMSALLARRRRIAEKGSTIETEQKEDKGEDSEPVTSKASSTSTPEPTRKPWERTNTMNGSKSPVISRPKSTPLSQPSANGVQTEGLDYDRLKQDILDEMRKELTKLKEELIDAIRQELSKSNTA

SEQ ID NO: 27817 - protein, 570 aa, Homo sapiens
  REGION 1..570: note = ENSP00000355808
MSEQSICQARAAVMVYDDANKKWVPAGGSTGFSRVHIYHHTGNNTFRVVGRKIQDHQVVINCAIPKGLKYNQATQTFHQWRDARQVYGLNFGSKEDANVFASAMMHALEVLNSQETGPTLPRQNSQLPAQVQNGPSQEELEIQRRQLQEQQRQKELERERLERERMERERLERERLERERLERERLEQEQLERERQERERQERLERQERLERQERLERQERLDRERQERQERERLERLERERQERERQEQLEREQLEWERERRISSAAAPASVETPLNSVLGDSSASEPGLQAASQPAETPSQQGIVLGPLAPPPPPPLPPGPAQASVALPPPPGPPPPPPLPSTGPPPPPPPPPLPNQVPPPPPPPPAPPLPASGFFLASMSEDNRPLTGLAAAIAGAKLRKVSRMEDTSFPSGGNAIGVNSASSKTDTGRGNGPLPLGGSGLMEEMSALLARRRRIAEKGSTIETEQKEDKGEDSEPVTSKASSTSTPEPTRKPWERTNTMNGSKSPVISRPKSTPLSQPSANGVQTEGLDYDRLKQDILDEMRKELTKLKEELIDAIRQELSKSNTA

SEQ ID NO: 27818 - protein, 242 aa, Homo sapiens
  REGION 1..242: note = ENSP00000489106
  VARIANT 1: note = Any amino acid
XRKIQDHQVVINCAIPKGLKYNQATQTFHQWRDARQVYGLNFGSKEDANVFASAMMHALEVLNSQETGPTLPRQNSQLPAQVQNGPSQEELEIQRRQLQEQQRQKELERERLERERMERERLERERLERERLERERLEQEQLERERQERERQERLERQERLERQERLERQERLDRERQERQERERLERLERERQERERQEQLEREQLEWERERRISSAGKKFTNSSVFLYLSLDDVSCAVMC

SEQ ID NO: 27819 - protein, 213 aa, Homo sapiens
  REGION 1..213: note = ENSP00000284563
MSEQSICQARAAVMVYDDANKKWVPAGGSTGFSRVHIYHHTGNNTFRVVGRKIQDHQVVINCAIPKGLKYNQATQTFHQWRDARQVYGLNFGSKEDANVFASAMMHALEVLNSQETAQSKVTATQDSTNLRCIFCGPTLPRQNSQLPAQVQNGPSQEELEIQRRQLQEQQRQKELERERLERERMERERLERERLERERLERERLEQEQLERE

SEQ ID NO: 27820 - protein, 589 aa, Homo sapiens
  REGION 1..589: note = ENSP00000306356
MSVSVHENRKSRASSGSINIYLFHKSSYADSVLTHLNLLRQQRLFTDVLLHAGNRTFPCHRAVLAACSRYFEAMFSGGLKESQDSEVNFDNSIHPEVLELLLDYAYSSRVIINEENAESLLEAGDMLEFQDIRDACAEFLEKNLHPTNCLGMLLLSDAHQCTKLYELSWRMCLSNFQTIRKNEDFLQLPQDMVVQLLSSEELETEDERLVYESAINWISYDLKKRYCYLPELLQTVRLALLPAIYLMENVAMEELITKQRKSKEIVEEAIRCKLKILQNDGVVTSLCARPRKTGHALFLLGGQTFMCDKLYLVDQKAKEIIPKADIPSPRKEFSACAIGCKVYITGGRGSENGVSKDVWVYDTLHEEWSKAAPMLVARFGHGSAELKHCLYVVGGHTAATGCLPASPSVSLKQVEHYDPTINKWTMVAPLREGVSNAAVVSAKLKLFAFGGTSVSHDKLPKVQCYDQCENRWTVPATCPQPWRYTAAAVLGNQIFIMGGDTEFSACSAYKFNSETYQWTKVGDVTAKRMSCHAVASGNKLYVVGGYFGIQRCKTLDCYDPTLDVWNSITTVPYSLIPTAFVSTWKHLPS

SEQ ID NO: 27821 - protein, 516 aa, Homo sapiens
  REGION 1..516: note = ENSP00000423804
MFSGGLKESQDSEVNFDNSIHPEVLELLLDYAYSSRVIINEENAESLLEAGDMLEFQDIRDACAEFLEKNLHPTNCLGMLLLSDAHQCTKLYELSWRMCLSNFQTIRKNEDFLQLPQDMVVQLLSSEELETEDERLVYESAINWISYDLKKRYCYLPELLQTVRLALLPAIYLMENVAMEELITKQRKSKEIVEEAIRCKLKILQNDGVVTSLCARPRKTGHALFLLGGQTFMCDKLYLVDQKAKEIIPKADIPSPRKEFSACAIGCKVYITGGRGSENGVSKDVWVYDTLHEEWSKAAPMLVARFGHGSAELKHCLYVVGGHTAATGCLPASPSVSLKQVEHYDPTINKWTMVAPLREGVSNAAVVSAKLKLFAFGGTSVSHDKLPKVQCYDQCENRWTVPATCPQPWRYTAAAVLGNQIFIMGGDTEFSACSAYKFNSETYQWTKVGDVTAKRMSCHAVASGNKLYVVGGYFGIQRCKTLDCYDPTLDVWNSITTVPYSLIPTAFVSTWKHLPS

SEQ ID NO: 27822 - protein, 49 aa, Homo sapiens
  REGION 1..49: note = ENSP00000422943
MSVSVHENRKSRASSGSINIYLFHKSSYADSVLTHLNLLRQQRLFTDVL

SEQ ID NO: 27823 - protein, 4 aa, Homo sapiens
  REGION 1..4: note = ENSP00000426889
MSVS

SEQ ID NO: 27824 - protein, 589 aa, Homo sapiens; identical to SEQ ID NO: 27820
  REGION 1..589: note = ENSP00000446289

SEQ ID NO: 27825 - protein, 589 aa, Homo sapiens; identical to SEQ ID NO: 27820
  REGION 1..589: note = ENSP00000479101

SEQ ID NO: 27826 - protein, 643 aa, Homo sapiens
  REGION 1..643: note = ENSP00000261488
MVDAGGVENITQLPQELPQMMAAAADGLGSIAIDTTQLNMSVTDPTAWATAMNNLGMVPVGLPGQQLVSDSICVPGFDPSLNMMTGITPINPMIPGLGLVPPPPPTEVAVVKEIIHCKSCTLFPQNPNLPPPSTRERPPGCKTVFVGGLPENATEEIIQEVFEQCGDITAIRKSKKNFCHIRFAEEFMVDKAIYLSGYRMRLGSSTDKKDSGRLHVDFAQARDDFYEWECKQRMRAREERHRRKLEEDRLRPPSPPAIMHYSEHEAALLAEKLKDDSKFSEAITVLLSWIERGEVNRRSANQFYSMVQSANSHVRRLMNEKATHEQEMEEAKENFKNALTGILTQFEQIVAVFNASTRQKAWDHFSKAQRKNIDIWRKHSEELRNAQSEQLMGIRREEEMEMSDDENCDSPTKKMRVDESALAAQAYALKEENDSLRWQLDAYRNEVELLKQEKEQLFRTEENLTKDQQLQFLQQTMQGMQQQLLTIQEELNNKKSELEQAKEEQSHTQALLKVLQEQLKGTKELVETNGHSHEDSNEINVLTVALVNQDRENNIEKRSQGLKSEKEALLIGIISTFLHVHPFGANIEYLWSYMQQLDSKISANEIEMLLMRLPRMFKQEFTGVGATLEKRWKLCAFEGIKTT

SEQ ID NO: 27827 - protein, 925 aa, Homo sapiens
  REGION 1..925: note = ENSP00000354238
MERDGCAGGGSRGGEGGRAPREGPAGNGRDRGRSHAAEAPGDPQAAASLLAPMDVGEEPLEKAARARTAKDPNTYKVLSLVLSVCVLTTILGCIFGLKPSCAKEVKSCKGRCFERTFGNCRCDAACVELGNCCLDYQETCIEPEHIWTCNKFRCGEKRLTRSLCACSDDCKDKGDCCINYSSVCQGEKSWVEEPCESINEPQCPAGFETPPTLLFSLDGFRAEYLHTWGGLLPVISKLKKCGTYTKNMRPVYPTKTFPNHYSIVTGLYPESHGIIDNKMYDPKMNASFSLKSKEKFNPEWYKGEPIWVTAKYQGLKSGTFFWPGSDVEINGIFPDIYKMYNGSVPFEERILAVLQWLQLPKDERPHFYTLYLEEPDSSGHSYGPVSSEVIKALQRVDGMVGMLMDGLKELNLHRCLNLILISDHGMEQGSCKKYIYLNKYLGDVKNIKVIYGPAARLRPSDVPDKYYSFNYEGIARNLSCREPNQHFKPYLKHFLPKRLHFAKSDRIEPLTFYLDPQWQLALNPSERKYCGSGFHGSDNVFSNMQALFVGYGPGFKHGIEADTFENIEVYNLMCDLLNLTPAPNNGTHGSLNHLLKNPVYTPKHPKEVHPLVQCPFTRNPRDNLGCSCNPSILPIEDFQTQFNLTVAEEKIIKHETLPYGRPRVLQKENTICLLSQHQFMSGYSQDILMPLWTSYTVDRNDSFSTEDFSNCLYQDFRIPLSPVHKCSFYKNNTKVSYGFLSPPQLNKNSSGIYSEALLTTNIVPMYQSFQVIWRYFHDTLLRKYAEERNGVNVVSGPVFDFDYDGRCDSLENLRQKRRVIRNQEILIPTHFFIVLTSCKDTSQTPLHCENLDTLAFILPHRTDNSESCVHGKHDSSWVEELLMLHRARITDVEHITGLSFYQQRKEPVSDILKLKTHLPTFSQED

SEQ ID NO: 27828 - protein, 378 aa, Homo sapiens
  REGION 1..378: note = ENSP00000422424
MERDGCAGGGSRGGEGGRAPREGPAGNGRDRGRSHAAEAPGDPQAAASLLAPMDVGEEPLEKAARARTAKDPNTYKVLSLVLSVCVLTTILGCIFGLKPSCAKEVKSCKGRCFERTFGNCRCDAACVELGNCCLDYQETCIEPEHIWTCNKFRCGEKRLTRSLCACSDDCKDKGDCCINYSSVCQGEKSWVEEPCESINEPQCPAGFETPPTLLFSLDGFRAEYLHTWGGLLPVISKLKKCGTYTKNMRPVYPTKTFPNHYSIVTGLYPESHGIIDNKMYDPKMNASFSLKSKEKFNPEWYKGEPIWVTAKYQGLKSGTFFWPGSDVEINGIFPDIYKMYNGSVPFEERILAVLQWLQLPKDERRTRFFRSFIWTSQQ

SEQ ID NO: 27829 - protein, 915 aa, Homo sapiens
  REGION 1..915: note = ENSP00000259486
MARRSSFQSCQIISLFTFAVGVNICLGFTAHRIKRAEGWEEGPPTVLSDSPWTNISGSCKGRCFELQEAGPPDCRCDNLCKSYTSCCHDFDELCLKTARGWECTKDRCGEVRNEENACHCSEDCLARGDCCTNYQVVCKGESHWVDDDCEEIKAAECPAGFVRPPLIIFSVDGFRASYMKKGSKVMPNIEKLRSCGTHSPYMRPVYPTKTFPNLYTLATGLYPESHGIVGNSMYDPVFDATFHLRGREKFNHRWWGGQPLWITATKQGVKAGTFFWSVVIPHERRILTILQWLTLPDHERPSVYAFYSEQPDFSGHKYGPFGPEESSYGSPFTPAKRPKRKVAPKRRQERPVAPPKKRRRKIHRMDHYAAETRQDKMTNPLREIDKIVGQLMDGLKQLKLHRCVNVIFVGDHGMEDVTCDRTEFLSNYLTNVDDITLVPGTLGRIRSKFSNNAKYDPKAIIANLTCKKPDQHFKPYLKQHLPKRLHYANNRRIEDIHLLVERRWHVARKPLDVYKKPSGKCFFQGDHGFDNKVNSMQTVFVGYGSTFKYKTKVPPFENIELYNVMCDLLGLKPAPNNGTHGSLNHLLRTNTFRPTMPEEVTRPNYPGIMYLQSDFDLGCTCDDKVEPKNKLDELNKRLHTKGSTEERHLLYGRPAVLYRTRYDILYHTDFESGYSEIFLMPLWTSYTVSKQAEVSSVPDHLTSCVRPDVRVSPSFSQNCLAYKNDKQMSYGFLFPPYLSSSPEAKYDAFLVTNMVPMYPAFKRVWNYFQRVLVKKYASERNGVNVISGPIFDYDYDGLHDTEDKIKQYVEGSSIPVPTHYYSIITSCLDFTQPADKCDGPLSVSSFILPHRPDNEESCNSSEDESKWVEELMKMHTARVRDIEHLTSLDFFRKTSRSYPEILTLKTYLHTYESEI

SEQ ID NO: 27830 - protein, 884 aa, Homo sapiens
  REGION 1..884: note = ENSP00000403315
MTRHADRIISLFTFAVGVNICLGFTAHRIKRAEGWEEGPPTVLSDSPWTNISGSCKGRCFELQEAGPPDCRCDNLCKSYTSCCHDFDELCLKTARGWECTKDRCGEVRNEENACHCSEDCLARGDCCTNYQVVCKGESHWVDDDCEEIKAAECPAGFVRPPLIIFSVDGFRASYMKKGSKVMPNIEKLRSCGTHSPYMRPVYPTKTFPNLYTLATGLYPESHGIVGNSMYDPVFDATFHLRGREKFNHRWWGGQPLWITATKQGVKAGTFFWSVVIPHERRILTILQWLTLPDHERPSVYAFYSEQPDFSGHKYGPFGPEMTNPLREIDKIVGQLMDGLKQLKLHRCVNVIFVGDHGMEDVTCDRTEFLSNYLTNVDDITLVPGTLGRIRSKFSNNAKYDPKAIIANLTCKKPDQHFKPYLKQHLPKRLHYANNRRIEDIHLLVERRWHVARKPLDVYKKPSGKCFFQGDHGFDNKVNSMQTVFVGYGSTFKYKTKVPPFENIELYNVMCDLLGLKPAPNNGTHGSLNHLLRTNTFRPTMPEEVTRPNYPGIMYLQSDFDLGCTCDDKVEPKNKLDELNKRLHTKGSTEAETRKFRGSRNENKENINGNFEPRKERHLLYGRPAVLYRTRYDILYHTDFESGYSEIFLMPLWTSYTVSKQAEVSSVPDHLTSCVRPDVRVSPSFSQNCLAYKNDKQMSYGFLFPPYLSSSPEAKYDAFLVTNMVPMYPAFKRVWNYFQRVLVKKYASERNGVNVISGPIFDYDYDGLHDTEDKIKQYVEGSSIPVPTHYYSIITSCLDFTQPADKCDGPLSVSSFILPHRPDNEESCNSSEDESKWVEELMKMHTARVRDIEHLTSLDFFRKTSRSYPEILTLKTYLHTYESEI

SEQ ID NO: 27831 - protein, 498 aa, Homo sapiens
  REGION 1..498: note = ENSP00000429476
MEDVTCDRTEFLSNYLTNVDDITLVPGTLGRIRSKFSNNAKYDPKAIIANLTCKKPDQHFKPYLKQHLPKRLHYANNRRIEDIHLLVERRWHVARKPLDVYKKPSGKCFFQGDHGFDNKVNSMQTVFVGYGSTFKYKTKVPPFENIELYNVMCDLLGLKPAPNNGTHGSLNHLLRTNTFRPTMPEEVTRPNYPGIMYLQSDFDLGCTCDDKNKLDELNKRLHTKGSTEERHLLYGRPAVLYRTRYDILYHTDFESGYSEIFLMPLWTSYTVSKQAEVSSVPDHLTSCVRPDVRVSPSFSQNCLAYKNDKQMSYGFLFPPYLSSSPEAKYDAFLVTNMVPMYPAFKRVWNYFQRVLVKKYASERNGVNVISGPIFDYDYDGLHDTEDKIKQYVEGSSIPVPTHYYSIITSCLDFTQPADKCDGPLSVSSFILPHRPDNEESCNSSEDESKWVEELMKMHTARVRDIEHLTSLDFFRKTSRSYPEILTLKTYLHTYESEI

SEQ ID NO: 27832 - protein, 888 aa, Homo sapiens
  REGION 1..888: note = ENSP00000428291
MARRSSFQSCQIISLFTFAVGVNICLGFTAHRIKRAEGWEEGPPTVLSDSPWTNISGSCKGRCFELQEAGPPDCRCDNLCKSYTSCCHDFDELCLKTARGWECTKDRCGEVRNEENACHCSEDCLARGDCCTNYQVVCKGESHWVDDDCEEIKAAECPAGFVRPPLIIFSVDGFRASYMKKGSKVMPNIEKLRSCGTHSPYMRPVYPTKTFPNLYTLATGLYPESHGIVGNSMYDPVFDATFHLRGREKFNHRWWGGQPLWITATKQGVKAGTFFWSVVIPHERRILTILQWLTLPDHERPSVYAFYSEQPDFSGHKYGPFGPEMTNPLREIDKIVGQLMDGLKQLKLHRCVNVIFVGDHGMEDVTCDRTEFLSNYLTNVDDITLVPGTLGRIRSKFSNNAKYDPKAIIANLTCKKPDQHFKPYLKQHLPKRLHYANNRRIEDIHLLVERRWHVARKPLDVYKKPSGKCFFQGDHGFDNKVNSMQTVFVGYGSTFKYKTKVPPFENIELYNVMCDLLGLKPAPNNGTHGSLNHLLRTNTFRPTMPEEVTRPNYPGIMYLQSDFDLGCTCDDKVEPKNKLDELNKRLHTKGSTEAETRKFRGSRNENKENINGNFEPRKERHLLYGRPAVLYRTRYDILYHTDFESGYSEIFLMPLWTSYTVSKQAEVSSVPDHLTSCVRPDVRVSPSFSQNCLAYKNDKQMSYGFLFPPYLSSSPEAKYDAFLVTNMVPMYPAFKRVWNYFQRVLVKKYASERNGVNVISGPIFDYDYDGLHDTEDKIKQYVEGSSIPVPTHYYSIITSCLDFTQPADKCDGPLSVSSFILPHRPDNEESCNSSEDESKWVEELMKMHTARVRDIEHLTSLDFFRKTSRSYPEILTLKTYLHTYESEI

SEQ ID NO: 27833 - protein, 863 aa, Homo sapiens
  REGION 1..863: note = ENSP00000075322
MARRSSFQSCQIISLFTFAVGVNICLGFTAHRIKRAEGWEEGPPTVLSDSPWTNISGSCKGRCFELQEAGPPDCRCDNLCKSYTSCCHDFDELCLKTARGWECTKDRCGEVRNEENACHCSEDCLARGDCCTNYQVVCKGESHWVDDDCEEIKAAECPAGFVRPPLIIFSVDGFRASYMKKGSKVMPNIEKLRSCGTHSPYMRPVYPTKTFPNLYTLATGLYPESHGIVGNSMYDPVFDATFHLRGREKFNHRWWGGQPLWITATKQGVKAGTFFWSVVIPHERRILTILQWLTLPDHERPSVYAFYSEQPDFSGHKYGPFGPEMTNPLREIDKIVGQLMDGLKQLKLHRCVNVIFVGDHGMEDVTCDRTEFLSNYLTNVDDITLVPGTLGRIRSKFSNNAKYDPKAIIANLTCKKPDQHFKPYLKQHLPKRLHYANNRRIEDIHLLVERRWHVARKPLDVYKKPSGKCFFQGDHGFDNKVNSMQTVFVGYGSTFKYKTKVPPFENIELYNVMCDLLGLKPAPNNGTHGSLNHLLRTNTFRPTMPEEVTRPNYPGIMYLQSDFDLGCTCDDKVEPKNKLDELNKRLHTKGSTEERHLLYGRPAVLYRTRYDILYHTDFESGYSEIFLMPLWTSYTVSKQAEVSSVPDHLTSCVRPDVRVSPSFSQNCLAYKNDKQMSYGFLFPPYLSSSPEAKYDAFLVTNMVPMYPAFKRVWNYFQRVLVKKYASERNGVNVISGPIFDYDYDGLHDTEDKIKQYVEGSSIPVPTHYYSIITSCLDFTQPADKCDGPLSVSSFILPHRPDNEESCNSSEDESKWVEELMKMHTARVRDIEHLTSLDFFRKTSRSYPEILTLKTYLHTYESEI

SEQ ID NO: 27834 - protein, 245 aa, Homo sapiens
  REGION 1..245: note = ENSP00000428304
MARRSSFQSCQIISLFTFAVGVNICLGFTAHRIKRAEGWEEGPPTVLSDSPWTNISGSCKGRCFELQEAGPPDCRCDNLSRGWECTKDRCGEVRNEENACHCSEDCLARGDCCTNYQVVCKGESHWVDDDCEEIKAAECPAGFVRPPLIIFSVDGFRASYMKKGSKVMPNIEKLRSCGTHSPYMRPVYPTKTFPNLYTLATGLYPESHGIVGNSMYDPVFDATFHLRGREKFNHRWWGGQPVSFA

SEQ ID NO: 27835 - protein, 162 aa, Homo sapiens
  REGION 1..162: note = ENSP00000429447
MARRSSFQSCQIISLFTFAVGVNICLGFTAHRIKRAEGWEEGPPTVLSDSPWTNISGSCKGRCFELQEAGPPDCRCDNLCKSYTSCCHDFDELCLKTARGWECTKDRCGEVRNEENACHCSEDCLARGDCCTNYQVVCKGESHWVDDDCEEIKAAECPAGGP

SEQ ID NO: 27836 - protein, 453 aa, Homo sapiens
  REGION 1..453: note = ENSP00000318066
MKLLVILLFSGLITGFRSDSSSSLPPKLLLVSFDGFRADYLKNYEFPHLQNFIKEGVLVEHVKNVFITKTFPNHYSIVTGLYEESHGIVANSMYDAVTKKHFSDSNDKDPFWWNEAVPIWVTNQLQENRSSAAAMWPGTDVPIHDTISSYFMNYNSSVSFEERLNNITMWLNNSNPPVTFATLYWEEPDASGHKYGPEDKENMSRVLKKIDDLIGDLVQRLKMLGLWENLNVIITSDHGMTQCSQDRLINLDSCIDHSYYTLIDLSPVAAILPKINRTEVYNKLKNCSPHMNVYLKEDIPNRFYYQHNDRIQPIILVADEGWTIVLNESSQKLGDHGYDNSLPSMHPFLAAHGPAFHKGYKHSTINIVDIYPMMCHILGLKPHPNNGTFGHTKCLLVDQWCINLPEAIAIVIGSLLVLTMLTCLIIIMQNRLSVPRPFSRLQLQEDDDDPLIG

SEQ ID NO: 27837 - protein, 440 aa, Homo sapiens
  REGION 1..440: note = ENSP00000296741
MAVKLGTLLLALALGLAQPASARRKLLVFLLDGFRSDYISDEALESLPGFKEIVSRGVKVDYLTPDFPSLSYPNYYTLMTGRHCEVHQMIGNYMWDPTTNKSFDIGVNKDSLMPLWWNGSEPLWVTLTKAKRKVYMYYWPGCEVEILGVRPTYCLEYKNVPTDINFANAVSDALDSFKSGRADLAAIYHERIDVEGHHYGPASPQRKDALKAVDTVLKYMTKWIQERGLQDRLNVIIFSDHGMTDIFWMDKVIELNKYISLNDLQQVKDRGPVVSLWPAPGKHSEIYNKLSTVEHMTVYEKEAIPSRFYYKKGKFVSPLTLVADEGWFITENREMLPFWMNSTGRREGWQRGWHGYDNELMDMRGIFLAFGPDFKSNFRAAPIRSVDVYNVMCNVVGITPLPNNGSWSRVMCMLKGRASTAPPVWPSHCALALILLFLLA

SEQ ID NO: 27838 - protein, 194 aa, Homo sapiens
  REGION 1..194: note = ENSP00000423497
MIGNYMWDPTTNKSFDIGVNKDSLMPLWWNGSEPLWVTLTKAKRKVYMYYWPGCEVEILGVRPTYCLEYKNVPTDINFANAVSDALDSFKSGRADLAAIYHERIDVEGHHYGPASPQRKDALKAVDTVLKYMTKWIQERGLQDRLNVIIFSDHGMTDIFWMDKVIELNKYISLNDLQQVKDRGPVVSLWPAPGK

SEQ ID NO: 27839 - protein, 495 aa, Homo sapiens
  REGION 1..495: note = ENSP00000347213
MAGKVRSLLPPLLLAAAGLAGLLLLCVPTRDVREPPALKYGIVLDAGSSHTSMFIYKWPADKENDTGIVGQHSSCDVPGGGISSYADNPSGASQSLVGCLEQALQDVPKERHAGTPLYLGATAGMRLLNLTNPEASTSVLMAVTHTLTQYPFDFRGARILSGQEEGVFGWVTANYLLENFIKYGWVGRWFRPRKGTLGAMDLGGASTQITFETTSPAEDRASEVQLHLYGQHYRVYTHSFLCYGRDQVLQRLLASALQTHGFHPCWPRGFSTQVLLGDVYQSPCTMAQRPQNFNSSARVSLSGSSDPHLCRDLVSGLFSFSSCPFSRCSFNGVFQPPVAGNFVAFSAFFYTVDFLRTSMGLPVATLQQLEAAAVNVCNQTWAQLQARVPGQRARLADYCAGAMFVQQLLSRGYGFDERAFGGVIFQKKAADTAVGWALGYMLNLTNLIPADPPGLRKGTDFSSWVVLLLLFASALLAALVLLLRQVHSAKLPSTI

SEQ ID NO: 27840 - protein, 472 aa, Homo sapiens
  REGION 1..472: note = ENSP00000312494
MAGKVRSLLPPLLLAAAGLAGLLLLCVPTRDVREPPALKYGIVLDAGSSHTSMFIYKWPADKENDTGIVGQHSSCDVPGGGISSYADNPSGASQSLVGCLEQALQDVPKERHAGTPLYLGATAGMRLLNLTNPEASTSVLMAVTHTLTQYPFDFRGARILSGQEEGVFGWVTANYLLENFIKYGWVGRWFRPRKGTLGAMDLGGASTQITFETTSPAEDRASEVQLHLYGQHYRVYTHSFLCYGRDQVLQRLLASALQTHGFHPCWPRGFSTQVLLGDVYQSPCTMAQRPQNFNSSARVSLSGSSDPHLCRDLVSGLFSFSSCPFSRCSFNGVFQPPVAGNFVAFSAFFYTVDFLRTSMGLPVATLQQLEAAAVNVCNQTWAQQLLSRGYGFDERAFGGVIFQKKAADTAVGWALGYMLNLTNLIPADPPGLRKGTDFSSWVVLLLLFASALLAALVLLLRQVHSAKLPSTI

SEQ ID NO: 27841 - protein, 779 aa, Homo sapiens
  REGION 1..779: note = ENSP00000202028
MEEKDYSEADGLSERTTPSKAQKSPQKIAKKYKSAICRVTLLDASEYECEVEKHGRGQVLFDLVCEHLNLLEKDYFGLTFCDADSQKNWLDPSKEIKKQIRSSPWNFAFTVKFYPPDPAQLTEDITRYYLCLQLRADIITGRLPCSFVTHALLGSYAVQAELGDYDAEEHVGNYVSELRFAPNQTRELEERIMELHKTYRGMTPGEAEIHFLENAKKLSMYGVDLHHAKDSEGIDIMLGVCANGLLIYRDRLRINRFAWPKILKISYKRSNFYIKIRPGEYEQFESTIGFKLPNHRSAKRLWKVCIEHHTFFRLVSPEPPPKGFLVMGSKFRYSGRTQAQTRQASALIDRPAPFFERSSSKRYTMSRSLDGAEFSRPASVSENHDAGPDGDKRDEDGESGGQRSEAEEGEVRTPTKIKELKFLDKPEDVLLKHQASINELKRTLKEPNSKLIHRDRDWERERRLPSSPASPSPKGTPEKANERAGLREGSEEKVKPPRPRAPESDTGDEDQDQERDTVFLKDNHLAIERKCSSITVSSTSSLEAEVDFTVIGDYHGSAFEDFSRSLPELDRDKSDSDTEGLLFSRDLNKGAPSQDDESGGIEDSPDRGACSTPDMPQFEPVKTETMTVSSLAIRKKIEPEAVLQTRVSAMDNTQENSLKSGKGAAAMIPGPQTVATEIRSLSPIIGKDVLTSTYGATAETLSTSTTTHVTKTVKGGFSETRIEKRIIITGDEDVDQDQALALAIKEAKLQHPDMLVTKAVVYRETDPSPEERDKKPQES

SEQ ID NO: 27842 - protein, 37 aa, Homo sapiens
  REGION 1..37: note = ENSP00000393106
MEEKDYSEADGLSERTTPSKAQKSPQKIAKKYKSAIC

SEQ ID NO: 27843 - protein, 168 aa, Homo sapiens
  REGION 1..168: note = ENSP00000385244
MTTETGPDSEVKKAQEEAPQQPEAAAAVTTPVTPAGHGHPEANSNEKHPSQQDTRPAEQSLDMEEKDYSEADGLSERTTPSKAQKSPQKIAKKYKSAICRVTLLDASEYECEVEKHGRGQVLFDLVCEHLNLLEKDYFGLTFCDADSQKNWLDPSKEIKKQIRSSPWN

SEQ ID NO: 27844 - protein, 257 aa, Homo sapiens
  REGION 1..257: note = ENSP00000404341
MEEKDYSEADGLSERTTPSKAQKSPQKIAKKYKSAICRVTLLDASEYECEVEKHGRGQVLFDLVCEHLNLLEKDYFGLTFCDADSQKNWLDPSKEIKKQIRSSPWNFAFTVKFYPPDPAQLTEDITRYYLCLQLRADIITGRLPCSFVTHALLGSYAVQAELGDYDAEEHVGNYVSELRFAPNQTRELEERIMELHKTYRGMTPGEAEIHFLENAKKLSMYGVDLHHAKDSEGIDIMLGVCANGLLIYRDRLRINRF

SEQ ID NO: 27845 - protein, 772 aa, Homo sapiens
  REGION 1..772: note = ENSP00000363061
MEEKDYSEADGLSERTTPSKAQKSPQKIAKKYKSAICRVTLLDASEYECEVENWLDPSKEIKKQIRSSPWNFAFTVKFYPPDPAQLTEDITRYYLCLQLRADIITGRLPCSFVTHALLGSYAVQAELGDYDAEEHVGNYVSELRFAPNQTRELEERIMELHKTYRGMTPGEAEIHFLENAKKLSMYGVDLHHAKDSEGIDIMLGVCANGLLIYRDRLRINRFAWPKILKISYKRSNFYIKIRPGEYEQFESTIGFKLPNHRSAKRLWKVCIEHHTFFRLVSPEPPPKGFLVMGSKFRYSGRTQAQTRQASALIDRPAPFFERSSSKRYTMSRSLDGAEFSRPASVSENHDAGPDGDKRDEDGESGGQRSEAEEGEVRTPTKIKELKFLDKPEDVLLKHQASINELKRTLKEPNSKLIHRDRDWERERRLPSSPASPSPKGTPEKANERAGLREGSEEKVKPPRPRAPESDTGDEDQDQERDTVFLKDNHLAIERKCSSITVSSTSSLEAEVDFTVIGDYHGSAFEDFSRSLPELDRDKSDSDTEGLLFSRDLNKGAPSQDDESGGIEDSPDRGACSTPDMPQFEPVKTETMTVSSLAIRKKIEPEAVLQTRVSAMDNTQQVDGSASVGREFIATTPSITTETISTTMENSLKSGKGAAAMIPGPQTVATEIRSLSPIIGKDVLTSTYGATAETLSTSTTTHVTKTVKGGFSETRIEKRIIITGDEDVDQDQALALAIKEAKLQHPDMLVTKAVVYRETDPSPEERDKKPQES

SEQ ID NO: 27846 - protein, 701 aa, Homo sapiens
  REGION 1..701: note = ENSP00000487049
MVFLGRINEVEPAKGLAESLAPTERSVKSLDMEEKDYSEADGLSERTTPSKAQKSPQKIAKKYKSAICRVTLLDASEYECEVEKHGRGQVLFDLVCEHLNLLEKDYFGLTFCDADSQKNWLDPSKEIKKQIRSSPWNFAFTVKFYPPDPAQLTEDITRYYLCLQLRADIITGRLPCSFVTHALLGSYAVQAELGDYDAEEHVGNYVSELRFAPNQTRELEERIMELHKTYRGMTPGEAEIHFLENAKKLSMYGVDLHHAKDSEGIDIMLGVCANGLLIYRDRLRINRFAWPKILKISYKRSNFYIKIRPGEYEQFESTIGFKLPNHRSAKRLWKVCIEHHTFFRLVSPEPPPKGFLVMGSKFRYSGRTQAQTRQASALIDRPAPFFERSSSKRYTMSRSLDGAEFSRPASVSENHDAGPDGDKRDEDGESGGQRSEAEEGEVRTPTKIKELKFLDKPEDVLLKHQASINELKRTLKEPNSKLIHRDRDWERERRLPSSPASPSPKGTPEKANEPVKTETMTVSSLAIRKKIEPEAVLQTRVSAMDNTQQVDGSASVGREFIATTPSITTETISTTMENSLKSGKGAAAMIPGPQTVATEIRSLSPIIGKDVLTSTYGATAETLSTSTTTHVTKTVKGGFSETRIEKRIIITGDEDVDQDQALALAIKEAKLQHPDMLVTKAVVYRETDPSPEERDKKPQES

SEQ ID NO: 27847 - protein, 188 aa, Homo sapiens
  REGION 1..188: note = ENSP00000413262
MTTETGPDSEVKKAQEEAPQQPEAAAAVTTPVTPAGHGHPEANSNEKHPSQQDTRPAEQSLDMEEKDYSEADGLSERTTPSKAQKSPQKIAKKYKSAICRVTLLDASEYECEVEKHGRGQVLFDLVCEHLNLLEKDYFGLTFCDADSQKNWLDPSKEIKKQIRSSPWNFAFTVKFYPPDPAQLTEDIT

SEQ ID NO: 27848 - protein, 114 aa, Homo sapiens
  REGION 1..114: note = ENSP00000396366
MTTETGPDSEVKKAQEEAPQQPEAAAAVTTPVTPAGHGHPEANSNEKHPSQQDTRPAEQSLDMEEKDYSEADGLSERTTPSKAQKSPQKIAKKYKSAICRVTLLDASEYECEVE

SEQ ID NO: 27849 - protein, 59 aa, Homo sapiens
  REGION 1..59: note = ENSP00000408877
MTTETGPDSEVKKAQEEAPQQPEAAAAVTTPVTPAGHGHPEANSNEKHPSQQDTRPAEQ

SEQ ID NO: 27850 - protein, 199 aa, Homo sapiens
  REGION 1..199: note = ENSP00000363056
MEEKDYSEADGLSERTTPSKAQKSPQKIAKKYKSAICRVTLLDASEYECEVEKHGRGQVLFDLVCEHLNLLEKDYFGLTFCDADSQKNWLDPSKEIKKQIRSSPWNFAFTVKFYPPDPAQLTEDITRYYLCLQLRADIITGRLPCSFVTHALLGSYAVQAELGDYDAEEHVGNYVSELRFAPNQTRELEERIMELHKTY

SEQ ID NO: 27851 - protein, 881 aa, Homo sapiens
  REGION 1..881: note = ENSP00000337168
MTTETGPDSEVKKAQEEAPQQPEAAAAVTTPVTPAGHGHPEANSNEKHPSQQDTRPAEQSLDMEEKDYSEADGLSERTTPSKAQKSPQKIAKKYKSAICRVTLLDASEYECEVEKHGRGQVLFDLVCEHLNLLEKDYFGLTFCDADSQKNWLDPSKEIKKQIRSSPWNFAFTVKFYPPDPAQLTEDITRYYLCLQLRADIITGRLPCSFVTHALLGSYAVQAELGDYDAEEHVGNYVSELRFAPNQTRELEERIMELHKTYRGMTPGEAEIHFLENAKKLSMYGVDLHHAKDSEGIDIMLGVCANGLLIYRDRLRINRFAWPKILKISYKRSNFYIKIRPGEYEQFESTIGFKLPNHRSAKRLWKVCIEHHTFFRLVSPEPPPKGFLVMGSKFRYSGRTQAQTRQASALIDRPAPFFERSSSKRYTMSRSLDGAEFSRPASVSENHDAGPDGDKRDEDGESGGQRSEAEEGEVRTPTKIKELKPEQETTPRHKQEFLDKPEDVLLKHQASINELKRTLKEPNSKLIHRDRDWERERRLPSSPASPSPKGTPEKANERAGLREGSEEKVKPPRPRAPESDTGDEDQDQERDTVFLKDNHLAIERKCSSITVSSTSSLEAEVDFTVIGDYHGSAFEDFSRSLPELDRDKSDSDTEGLLFSRDLNKGAPSQDDESGGIEDSPDRGACSTPDMPQFEPVKTETMTVSSLAIRKKIEPEAVLQTRVSAMDNTQQVDGSASVGREFIATTPSITTETISTTMENSLKSGKGAAAMIPGPQTVATEIRSLSPIIGKDVLTSTYGATAETLSTSTTTHVTKTVKGGFSETRIEKRIIITGDEDVDQDQALALAIKEAKLQHPDMLVTKAVVYRETDPSPEERDKKPQES

SEQ ID NO: 27852 - protein, 880 aa, Homo sapiens
  REGION 1..880: note = ENSP00000363052
MTTETGPDSEVKKAQEEAPQQPEAAAAVTTPVTPAGHGHPEANSNEKHPSQQDTRPAEQSLDMEEKDYSEADGLSERTTPSKAQKSPQKIAKKYKSAICRVTLLDASEYECEVEKHGRGQVLFDLVCEHLNLLEKDYFGLTFCDADSQKNWLDPSKEIKKQIRSSPWNFAFTVKFYPPDPAQLTEDITRYYLCLQLRADIITGRLPCSFVTHALLGSYAVQAELGDYDAEEHVGNYVSELRFAPNQTRELEERIMELHKTYRGMTPGEAEIHFLENAKKLSMYGVDLHHAKDSEGIDIMLGVCANGLLIYRDRLRINRFAWPKILKISYKRSNFYIKIRPGEYEQFESTIGFKLPNHRSAKRLWKVCIEHHTFFRLVSPEPPPKGFLVMGSKFRYSGRTQAQTRQASALIDRPAPFFERSSSKRYTMSRSLDGAEFSRPASVSENHDAGPDGDKRDEDGESGGQRSEAEEGEVRTPTKIKELKPEQETTPRHKQEFLDKPEDVLLKHQASINELKRTLKEPNSKLIHRDRDWERERRLPSSPASPSPKGTPEKANERAGLREGSEEKVKPPRPRAPESDTGDEDQDQERDTVFLKDNHLAIERKCSSITVSSTSSLEAEVDFTVIGDYHGSAFEDFSRSLPELDRDKSDSDTEGLLFSRDLNKGAPSQDDESGGIEDSPDRGACSTPDMPQFEPVKTETMTVSSLAIRKKIEPEAVLQTRVSAMDNTQVDGSASVGREFIATTPSITTETISTTMENSLKSGKGAAAMIPGPQTVATEIRSLSPIIGKDVLTSTYGATAETLSTSTTTHVTKTVKGGFSETRIEKRIIITGDEDVDQDQALALAIKEAKLQHPDMLVTKAVVYRETDPSPEERDKKPQES

SEQ ID NO: 27853 - protein, 268 aa, Homo sapiens
  REGION 1..268: note = ENSP00000406464
  VARIANT 1: note = Any amino acid
XRYTMSRSLDGAEFSRPASVSENHDAGPDGDKRDEDGESGGQRSEAEEGEVRTPTKIKELKFLDKPEDVLLKHQASINELKRTLKEPNSKLIHRDRDWERERRLPSSPASPSPKGTPEKANEPVKTETMTVSSLAIRKKIEPEAVLQTRVSAMDNTQVDGSASVGREFIATTPSITTETISTTMENSLKSGKGAAAMIPGPQTVATEIRSLSPIIGKDVLTSTYGATAETLSTSTTTHVTKTVKGGFSETRIEKRIIITGDEDVDQDQ

SEQ ID NO: 27854 - protein, 197 aa, Homo sapiens
  REGION 1..197: note = ENSP00000388281
VLLKHQASINELKRTLKEPNSKLIHRDRDWERERRLPSSPASPSPKGTPEKANEPVKTETMTVSSLAIRKKIEPEAVLQTRVSAMDNTQQVDGSASVGREFIATTPSITTETISTTMENSLKSGKGAAAMIPGPQTVATEIRSLSPIIGKDVLTSTYGATAETLSTSTTTHVTKTVKGGFSETRIEKRIIITGDEDV

SEQ ID NO: 27855 - protein, 1068 aa, Homo sapiens
  REGION 1..1068: note = ENSP00000489867
  VARIANT 1: note = Any amino acid
XDRDWERERRLPSSPASPSPKGTPEKANESQRTQDISQRDLVPEPGAAAGLEVFTQKSLAASPEGSEHWVFIEREYTRPEELGLLKVTTMQQEERQAGLAGILANGRLSKVDVLVDKFKVEVATEEMVGNRRANTQQQGKMIASPEDFESVGEEGPWIRESPGGAALASGRTLAEKLLEGSELRADTREATIRNRCMSDGQPEGQTELRKGLEEPHTCGRPTAPGTRPAEVDVLSPASDKGGLQSFLLDPAHAEARAELSNETDTSFAERSFYLNYEEKDSEDQVLPPPLEERKGRLDAPPGGEPRPTLNSLDLRVSAAASSRSKDEAHMTSPKEGAGTPKNHGGPGDLKGSPAGQTFAEGWEDAQWGVEGEFPHLTASAAREEGTPVSGDLLGKAEESPTEELKKHPPHRGQGVHPDPQACALPRAIPLNVRKPVKPDRGNFPPKERGVVPTQKGGAELKDREASAFLHMEVIIPLPASPGHSEDLAALEEASPSPTSHGSGEPSELREPFLRHVHLSKASPEPKDQVGFVVSPATGGERRPPPITSRKPRVVPEEAEGRIPLGFGFPSGKRREMTSFQAGDQEGSLEDISKTSVANKIRIFETHGAETRRMSEGEARSLPNDVSSEAPVGQAEQQRSTLSDLGFAQLQPPGDFASPKATHSTVIPLATRHFREDTSASYQEAHTELEPVSPNSGCETTLAEATGTGNKSGDAVREEKRSTNLAANTPGKGGRLRFASPSGPQRAGLREGSEEKVKPPRPRAPESDTGDEDQDQERDTVFLKDNHLAIERKCSSITVSSTSSLEAEVDFTVIGDYHGSAFEDFSRSLPELDRDKSDSDTEGLLFSRDLNKGAPSQDDESGGIEDSPDRGACSTPDMPQFEPVKTETMTVSSLAIRKKIEPEAVLQTRVSAMDNTQVDGSASVGREFIATTPSITTETISTTMENSLKSGKGAAAMIPGPQTVATEIRSLSPIIGKDVLTSTYGATAETLSTSTTTHVTKTVKGGFSETRIEKRIIITGDEDVDQDQALALAIKEAKLQHPDMLVTKAVVYRETDPSPEERDKKPQES

SEQ ID NO: 27856 - protein, 119 aa, Homo sapiens
  REGION 1..119: note = ENSP00000390262
  VARIANT 1: note = Any amino acid
XSVGREFIATTPSITTETISTTMIIGKDVLTSTYGATAETLSTSTTTHVTKTVKGGFSETRIEKRIIITGDEDVDQDQALALAIKEAKLQHPDMLVTKAVVYRETDPSPEERDKKPQES

SEQ ID NO: 27857 - protein, 779 aa, Homo sapiens; identical to SEQ ID NO: 27841
  REGION 1..779: note = ENSP00000399214

SEQ ID NO: 27858 - protein, 880 aa, Homo sapiens; identical to SEQ ID NO: 27852
  REGION 1..880: note = ENSP00000363057

SEQ ID NO: 27859 - protein, 900 aa, Homo sapiens
  REGION 1..900: note = ENSP00000363694
MLRFLRRTFGRRSMQRYARGAAGRGAAGLGDERDGGPRGGPAAAASSSALPAAPGGSVFPAGGGPLLTGGAAVHISAAGAAKATLYCRVFLLDGTEVSVDLPKHAKGQDLFDQIVYHLDLVETDYFGLQFLDSAQVAHWLDHAKPIKKQMKIGPAYALHFRVKYYSSEPNNLREEFTRYLFVLQLRHDILSGKLKCPYETAVELAALCLQAELGECELPEHTPELVSEFRFIPNQTEAMEFDIFQRWKECRGKSPAQAELSYLNKAKWLEMYGVDMHVVRGRDGCEYSLGLTPTGILIFEGANKIGLFFWPKITKMDFKKSKLTLVVVEDDDQGREQEHTFVFRLDSARTCKHLWKCAVEHHAFFRLRTPGNSKSNRSDFIRLGSRFRFSGRTEYQATHGSRLRRTSTFERKPSKRYPSRRHSTFKASNPVIAAQLCSKTNPEVHNYQPQYHPNIHPSQPRWHPHSPNVSYPLPSPVLSSSDRLPFGIEENGGTPFLTAASGRHHHQHQHQHQHQHHSNYSLSLTLENKEGPLRSPNSSSKSLTKLSPGTPALFSEAAAHLKKLELETVKAAGPWPPLHININKAEEKKVSEKTLQTPLLPSPVADHVKCNILKAQLENASRVNIQGGKEESPFVNINKKSSLQDASVRSPIPIRVETAQPAVEKPEIKPPRVRKLTRQYSFDEDDLPPDLAEAVGVTTSTTTNTTTAATQVSVPLPSPKVQNVSSPHKSEGKGLLSPGAKSPSDRGGAFTLEPGDLLMDFTEATPLAEPASNPHCAHSRCSPPLSLPMKEETTGVCMYPPIKTRLIKTFPVDTMNPFPDTFTTGPQFTADFRDSKLQCCPGPTSPLIPAATLRPLTETVSTVQTIYTTRKPVSLAASAETLRQELEREKMMKRLLMTEL

SEQ ID NO: 27860 - protein, 518 aa, Homo sapiens
  REGION 1..518: note = ENSP00000363685
MLRFLRRTFGRRSMQRYARGAAGRGAAGLGDERDGGPRGGPAAAASSSALPAAPGGSVFPAGGGPLLTGGAAVHISAAGAAKATLYCRVFLLDGTEVSVDLPKHAKGQDLFDQIVYHLDLVETDYFGLQFLDSAQVAHWLDHAKPIKKQMKIGPAYALHFRVKYYSSEPNNLREEFTRYLFVLQLRHDILSGKLKCPYETAVELAALCLQAELGECELPEHTPELVSEFRFIPNQTEAMEFDIFQRWKECRGKSPAQAELSYLNKAKWLEMYGVDMHVVRGRDGCEYSLGLTPTGILIFEGANKIGLFFWPKITKMDFKKSKLTLVVVEDDDQGREQEHTFVFRLDSARTCKHLWKCAVEHHAFFRLRTPGNSKSNRSDFIRLGSRFRFSGRTEYQATHGSRLRRTSTFERKPSKRYPSRRHSTFKASNPVIAAQLCSKTNPEVHNYQPQYHPNIHPSQPRWHPHSPNVRPSFQDDRSHWKASASGDDSHFDYVHDQNQKNLGGMQSMMYRDKLMTAL

SEQ ID NO: 27861 - protein, 983 aa, Homo sapiens
  REGION 1..983: note = ENSP00000337451
MDCQLSILLLLSCSVLDSFGELIPQPSNEVNLLDSKTIQGELGWISYPSHGWEEISGVDEHYTPIRTYQVCNVMDHSQNNWLRTNWVPRNSAQKIYVELKFTLRDCNSIPLVLGTCKETFNLYYMESDDDHGVKFREHQFTKIDTIAADESFTQMDLGDRILKLNTEIREVGPVNKKGFYLAFQDVGACVALVSVRVYFKKCPFTVKNLAMFPDTVPMDSQSLVEVRGSCVNNSKEEDPPRMYCSTEGEWLVPIGKCSCNAGYEERGFMCQACRPGFYKALDGNMKCAKCPPHSSTQEDGSMNCRCENNYFRADKDPPSMACTRPPSSPRNVISNINETSVILDWSWPLDTGGRKDVTFNIICKKCGWNIKQCEPCSPNVRFLPRQFGLTNTTVTVTDLLAHTNYTFEIDAVNGVSELSSPPRQFAAVSITTNQAAPSPVLTIKKDRTSRNSISLSWQEPEHPNGIILDYEVKYYEKQEQETSYTILRARGTNVTISSLKPDTIYVFQIRARTAAGYGTNSRKFEFETSPDSFSISGESSQVVMIAISAAVAIILLTVVIYVLIGRFCGYKSKHGADEKRLHFGNGHLKLPGLRTYVDPHTYEDPTQAVHEFAKELDATNISIDKVVGAGEFGEVCSGRLKLPSKKEISVAIKTLKVGYTEKQRRDFLGEASIMGQFDHPNIIRLEGVVTKSKPVMIVTEYMENGSLDSFLRKHDAQFTVIQLVGMLRGIASGMKYLSDMGYVHRDLAARNILINSNLVCKVSDFGLSRVLEDDPEAAYTTRGGKIPIRWTSPEAIAYRKFTSASDVWSYGIVLWEVMSYGERPYWEMSNQDVIKAVDEGYRLPPPMDCPAALYQLMLDCWQKDRNNRPKFEQIVSILDKLIRNPGSLKIITSAAARPSNLLLDQSNVDITTFRTTGDWLNGVWTAHCKEIFTGVEYSSCDTIAKISTDDMKKVGVTVVGPQKKIISSIKALETQSKNGPVPV

SEQ ID NO: 27862 - protein, 539 aa, Homo sapiens
  REGION 1..539: note = ENSP00000399926
MDCQLSILLLLSCSVLDSFGELIPQPSNEVNLLDSKTIQGELGWISYPSHGWEEISGVDEHYTPIRTYQVCNVMDHSQNNWLRTNWVPRNSAQKIYVELKFTLRDCNSIPLVLGTCKETFNLYYMESDDDHGVKFREHQFTKIDTIAADESFTQMDLGDRILKLNTEIREVGPVNKKGFYLAFQDVGACVALVSVRVYFKKCPFTVKNLAMFPDTVPMDSQSLVEVRGSCVNNSKEEDPPRMYCSTEGEWLVPIGKCSCNAGYEERGFMCQACRPGFYKALDGNMKCAKCPPHSSTQEDGSMNCRCENNYFRADKDPPSMACTRPPSSPRNVISNINETSVILDWSWPLDTGGRKDVTFNIICKKCGWNIKQCEPCSPNVRFLPRQFGLTNTTVTVTDLLAHTNYTFEIDAVNGVSELSSPPRQFAAVSITTNQAAPSPVLTIKKDRTSRNSISLSWQEPEHPNGIILDYEVKYYEKQEQETSYTILRARGTNVTISSLKPDTIYVFQIRARTAAGYGTNSRKFEFETSPDCMYYFNAV

SEQ ID NO: 27863 - protein, 918 aa, Homo sapiens
  REGION 1..918: note = ENSP00000419190
MDCQLSILLLLSCSVLDSFGELIPQPSNEVNLLDSKTIQGELGWISYPSHGWEEISGVDEHYTPIRTYQVCNVMDHSQNNWLRTNWVPRNSAQKIYVELKFTLRDCNSIPLVLGTCKETFNLYYMESDDDHGVKFREHQFTKIDTIAADESFTQMDLGDRILKLNTEIREVGPVNKKGFYLAFQDVGACVALVSVRVYFKKCPFTVKNLAMFPDTVPMDSQSLVEVRGSCVNNSKEEDPPRMYCSTEGEWLVPIGKCSCNAGYEERGFMCQACRPGFYKALDGNMKCAKCPPHSSTQEDGSMNCRCENNYFRADKDPPSMACTRPPSSPRNVISNINETSVILDWSWPLDTGGRKDVTFNIICKKCGWNIKQCEPCSPNVRFLPRQFGLTNTTVTVTDLLAHTNYTFEIDAVNGVSELSSPPRQFAAVSITTNQAAPSPVLTIKKDRTSRNSISLSWQEPEHPNGIILDYEVKYYEKQEQETSYTILRARGTNVTISSLKPDTIYVFQIRARTAAGYGTNSRKFEFETSPDSFSISGESSQVVMIAISAAVAIILLTVVIYVLIGRFCGYKSKHGADEKRLHFGNGHLKLPGLRTYVDPHTYEDPTQAVHEFAKELDATNISIDKVVGAGEFGEVCSGRLKLPSKKEISVAIKTLKVGYTEKQRRDFLGEASIMGQFDHPNIIRLEGVVTKSKPVMIVTEYMENGSLDSFLRKHDAQFTVIQLVGMLRGIASGMKYLSDMGYVHRDLAARNILINSNLVCKVSDFGLSRVLEDDPEAAYTTRGGKIPIRWTSPEAIAYRKFTSASDVWSYGIVLWEVMSYGERPYWEMSNQDVIKAVDEGYRLPPPMDCPAALYQLMLDCWQKDRNNRPKFEQIVSILDKLIRNPGSLKIITSAAARPSNLLLDQSNVDITTFRTTVT

SEQ ID NO: 27864 - protein, 949 aa, Homo sapiens
  REGION 1..949: note = ENSP00000386276
MAGIFYFALFSCLFGICDAVTGSRVYPANEVTLLDSRSVQGELGWIASPLEGGWEEVSIMDEKNTPIRTYQVCNVMEPSQNNWLRTDWITREGAQRVYIEIKFTLRDCNSLPGVMGTCKETFNLYYYESDNDKERFIRENQFVKIDTIAADESFTQVDIGDRIMKLNTEIRDVGPLSKKGFYLAFQDVGACIALVSVRVFYKKCPLTVRNLAQFPDTITGADTSSLVEVRGSCVNNSEEKDVPKMYCGADGEWLVPIGNCLCNAGHEERSGECQACKIGYYKALSTDATCAKCPPHSYSVWEGATSCTCDRGFFRADNDAASMPCTRPPSAPLNLISNVNETSVNLEWSSPQNTGGRQDISYNVVCKKCGAGDPSKCRPCGSGVHYTPQQNGLKTTKVSITDLLAHTNYTFEIWAVNGVSKYNPNPDQSVSVTVTTNQAAPSSIALVQAKEVTRYSVALAWLEPDRPNGVILEYEVKYYEKDQNERSYRIVRTAARNTDIKGLNPLTSYVFHVRARTAAGYGDFSEPLEVTTNTVPSRIIGDGANSTVLLVSVSGSVVLVVILIAAFVISRRRSKYSKAKQEADEEKHLNQGVRTYVDPFTYEDPNQAVREFAKEIDASCIKIEKVIGVGEFGEVCSGRLKVPGKREICVAIKTLKAGYTDKQRRDFLSEASIMGQFDHPNIIHLEGVVTKCKPVMIITEYMENGSLDAFLRKNDGRFTVIQLVGMLRGIGSGMKYLSDMSYVHRDLAARNILVNSNLVCKVSDFGMSRVLEDDPEAAYTTRGGKIPIRWTAPEAIAYRKFTSASDVWSYGIVMWEVMSYGERPYWDMSNQDVIKAIEEGYRLPPPMDCPIALHQLMLDCWQKERSDRPKFGQIVNMLDKLIRNPNSLKRTGTESSRPNTALLDPSSPEFSAVVSVGDWLQAIKMDRYKDNFTAAGYTTLEAVVHVNQE

SEQ ID NO: 27865 - protein, 986 aa, Homo sapiens
  REGION 1..986: note = ENSP00000386829
MAGIFYFALFSCLFGICDAVTGSRVYPANEVTLLDSRSVQGELGWIASPLEGGWEEVSIMDEKNTPIRTYQVCNVMEPSQNNWLRTDWITREGAQRVYIEIKFTLRDCNSLPGVMGTCKETFNLYYYESDNDKERFIRENQFVKIDTIAADESFTQVDIGDRIMKLNTEIRDVGPLSKKGFYLAFQDVGACIALVSVRVFYKKCPLTVRNLAQFPDTITGADTSSLVEVRGSCVNNSEEKDVPKMYCGADGEWLVPIGNCLCNAGHEERSGECQACKIGYYKALSTDATCAKCPPHSYSVWEGATSCTCDRGFFRADNDAASMPCTRPPSAPLNLISNVNETSVNLEWSSPQNTGGRQDISYNVVCKKCGAGDPSKCRPCGSGVHYTPQQNGLKTTKVSITDLLAHTNYTFEIWAVNGVSKYNPNPDQSVSVTVTTNQAAPSSIALVQAKEVTRYSVALAWLEPDRPNGVILEYEVKYYEKDQNERSYRIVRTAARNTDIKGLNPLTSYVFHVRARTAAGYGDFSEPLEVTTNTVPSRIIGDGANSTVLLVSVSGSVVLVVILIAAFVISRRRSKYSKAKQEADEEKHLNQGVRTYVDPFTYEDPNQAVREFAKEIDASCIKIEKVIGVGEFGEVCSGRLKVPGKREICVAIKTLKAGYTDKQRRDFLSEASIMGQFDHPNIIHLEGVVTKCKPVMIITEYMENGSLDAFLRKNDGRFTVIQLVGMLRGIGSGMKYLSDMSYVHRDLAARNILVNSNLVCKVSDFGMSRVLEDDPEAAYTTRGGKIPIRWTAPEAIAYRKFTSASDVWSYGIVMWEVMSYGERPYWDMSNQDVIKAIEEGYRLPPPMDCPIALHQLMLDCWQKERSDRPKFGQIVNMLDKLIRNPNSLKRTGTESSRPNTALLDPSSPEFSAVVSVGDWLQAIKMDRYKDNFTAAGYTTLEAVVHVNQEDLARIGITAITHQNKILSSVQAMRTQMQQMHGRMVPV

SEQ ID NO: 27866 - protein, 37 aa, Homo sapiens
  REGION 1..37: note = ENSP00000408145
AYRKFTSASDVWSYGIVMWEVMSYGERPYWDMSNQDT

SEQ ID NO: 27867 - protein, 177 aa, Homo sapiens
  REGION 1..177: note = ENSP00000395917
MAGIFYFALFSCLFGICDAVTGSRVYPANEGPPSAPLNLISNVNETSVNLEWSSPQNTGGRQDISYNVVCKKCGAGDPSKCRPCGSGVHYTPQQNGLKTTKVSITDLLAHTNYTFEIWAVNGVSKYNPNPDQSVSVTVTTNQAAPSSIALVQAKEVTRYSVALAWLEPDRPNGVILE

SEQ ID NO: 27868 - protein, 188 aa, Homo sapiens
  REGION 1..188: note = ENSP00000401405
  VARIANT 1: note = Any amino acid
XFHGSLSSTHFTCKIGYYKALSTDATCAKCPPHSYSVWEGATSCTCDRGFFRADNDAASMPCTRPPSAPLNLISNVNETSVNLEWSSPQNTGGRQDISYNVVCKKCGAGDPSKCRPCGSGVHYTPQQNGLKTTKVSITDLLAHTNYTFEIWAVNGVSKYNPNPDQSVSVTVTTNQAAPSSIALVQAKE

SEQ ID NO: 27869 - protein, 38 aa, Homo sapiens
  REGION 1..38: note = ENSP00000391517
MAGIFYFALFSCLFGICDAVTGSRVYPANEVGGSEYHG

SEQ ID NO: 27870 - protein, 126 aa, Homo sapiens
  REGION 1..126: note = ENSP00000410158
MDEKNTPIRTYQVCNVMEPSQNNWLRTDWITREGAQRVYIEIKFTLRDCNSLPGVMGTCKETFNLYYYESDNDKERFIRENQFVKIDTIAADESFTQVDIGDRIMKLNTEIRDVGPLSKKGFYLAF

SEQ ID NO: 27871 - protein, 149 aa, Homo sapiens
  REGION 1..149: note = ENSP00000444085
MAGIFYFALFSCLFGICDAVTGSRVYPANEVTLLDSRSVQGELGWIASPLEGGWEEVSIMDEKNTPIRTYQVCNVMEPSQNNWLRTDWITREGAQRVYIEIKFTLRDCNSLPGVMGTCKETFNLYYYESDNDKERFIRENQFVKIDTIA

SEQ ID NO: 27872 - protein, 91 aa, Homo sapiens
  REGION 1..91: note = ENSP00000404089
MAGIFYFALFSCLFGICDAVTGSRVYPANEVTLLDSRSVQGELGWIASPLEGGWEEVSIMDEKNTPIRTYQVCNVMEPSQNNWLRTDWITR

SEQ ID NO: 27873 - protein, 986 aa, Homo sapiens; identical to SEQ ID NO: 27865
  REGION 1..986: note = ENSP00000281821

SEQ ID NO: 27874 - protein, 547 aa, Homo sapiens
  REGION 1..547: note = ENSP00000420598
MQFPSPPAARSSPAPQAASSSEAAAPATGQPGPSCPVPGTSRRGRPGTPPAGRVEEEEEEEEEDVDKDPHPTQNTCLRCRHFSLRERKREPRRTMGGCEVREFLLQFGFFLPLLTAWPGDCSHVSNNQVVLLDTTTVLGELGWKTYPLNGWDAITEMDEHNRPIHTYQVCNVMEPNQNNWLRTNWISRDAAQKIYVEMKFTLRDCNSIPWVLGTCKETFNLFYMESDESHGIKFKPNQYTKIDTIAADESFTQMDLGDRILKLNTEIREVGPIERKGFYLAFQDIGACIALVSVRVFYKKCPFTVRNLAMFPDTIPRVDSSSLVEVRGSCVKSAEERDTPKLYCGADGDWLVPLGRCICSTGYEEIEGSCHACRPGFYKAFAGNTKCSKCPPHSLTYMEATSVCQCEKGYFRAEKDPPSMACTRPPSAPRNVVFNINETALILEWSPPSDTGGRKDLTYSVICKKCGLDTSQCEDCGGGLRFIPRHTGLINNSVIVLDFVSHVNYTFEIEAMNGVSELSFSPKPFTAITVTTDQDGKFHCCSLKTDP

SEQ ID NO: 27875 - protein, 1130 aa, Homo sapiens
  REGION 1..1130: note = ENSP00000374323
MQFPSPPAARSSPAPQAASSSEAAAPATGQPGPSCPVPGTSRRGRPGTPPAGRVEEEEEEEEEDVDKDPHPTQNTCLRCRHFSLRERKREPRRTMGGCEVREFLLQFGFFLPLLTAWPGDCSHVSNNQVVLLDTTTVLGELGWKTYPLNGWDAITEMDEHNRPIHTYQVCNVMEPNQNNWLRTNWISRDAAQKIYVEMKFTLRDCNSIPWVLGTCKETFNLFYMESDESHGIKFKPNQYTKIDTIAADESFTQMDLGDRILKLNTEIREVGPIERKGFYLAFQDIGACIALVSVRVFYKKCPFTVRNLAMFPDTIPRVDSSSLVEVRGSCVKSAEERDTPKLYCGADGDWLVPLGRCICSTGYEEIEGSCHACRPGFYKAFAGNTKCSKCPPHSLTYMEATSVCQCEKGYFRAEKDPPSMACTRPPSAPRNVVFNINETALILEWSPPSDTGGRKDLTYSVICKKCGLDTSQCEDCGGGLRFIPRHTGLINNSVIVLDFVSHVNYTFEIEAMNGVSELSFSPKPFTAITVTTDQDAPSLIGVVRKDWASQNSIALSWQAPAFSNGAILDYEIKYYEKEHEQLTYSSTRSKAPSVIITGLKPATKYVFHIRVRTATGYSGYSQKFEFETGDETSDMAAEQGQILVIATAAVGGFTLLVILTLFFLITGRCQWYIKAKMKSEEKRRNHLQNGHLRFPGIKTYIDPDTYEDPSLAVHEFAKEIDPSRIRIERVIGAGEFGEVCSGRLKTPGKREIPVAIKTLKGGHMDRQRRDFLREASIMGQFDHPNIIRLEGVVTKRSFPAIGVEAFCPSFLRAGFLNSIQAPHPVPGGGSLPPRIPAGRPVMIVVEYMENGSLDSFLRKHDGHFTVIQLVGMLRGIASGMKYLSDMGYVHRDLAARNILVNSNLVCKVSDFGLSRVLEDDPEAAYTTTGGKIPIRWTAPEAIAYRKFSSASDAWSYGIVMWEVMSYGERPYWEMSNQDVILSIEEGYRLPAPMGCPASLHQLMLHCWQKERNHRPKFTDIVSFLDKLIRNPSALHTLVEDILVMPESPGEVPEYPLFVTVGDWLDSIKMGQYKNNFVAAGFTTFDLISRMSIDDIRRIGVILIGHQRRIVSSIQTLRLHMMHIQEKGFHV

SEQ ID NO: 27876 - protein, 324 aa, Homo sapiens
  REGION 1..324: note = ENSP00000425132
  VARIANT 1: note = Any amino acid
XEEEEEEEDVDKDPHPTQNTCLRCRHFSLRERKREPRRTMGGCEVREFLLQFGFFLPLLTAWPGDCSHVSNNQVVLLDTTTVLGELGWKTYPLNGWDAITEMDEHNRPIHTYQVCNVMEPNQNNWLRTNWISRDAAQKIYVEMKFTLRDCNSIPWVLGTCKETFNLFYMESDESHGIKFKPNQYTKIDTIAADESFTQMDLGDRILKLNTEIREVGPIERKGFYLAFQDIGACIALVSVRVFYKKCPFTVRNLAMFPDTIPRVDSSSLVEVRGSCVKSAEERDTPKLYCGADGDWLVPLGRCICSTGYEEIEGSCHGASKGRCF

SEQ ID NO: 27877 - protein, 208 aa, Homo sapiens
  REGION 1..208: note = ENSP00000421260
MKDSPFQVTKLYWLNEKWDFIASASDMAAEQGQILVIATAAVGGFTLLVILTLFFLITGRCQWYIKAKMKSEEKRRNHLQNGHLRFPGIKTYIDPDTYEDPSLAVHEFAKEIDPSRIRIERVIGAGEFGEVCSGRLKTPGKREIPVAIKTLKGGHMDRQRRDFLREASIMGQFDHPNIIRLEGVVTKKPLEMMTYILRAKGEAGFLKK

SEQ ID NO: 27878 - protein, 373 aa, Homo sapiens
  REGION 1..373: note = ENSP00000419470
MAAEQGQILVIATAAVGGFTLLVILTLFFLITGRCQWYIKAKMKSEEKRRNHLQNGHLRFPGIKTYIDPDTYEDPSLAVHEFAKEIDPSRIRIERVIGAGEFGEVCSGRLKTPGKREIPVAIKTLKGGHMDRQRRDFLREASIMGQFDHPNIIRLEGVVTKSRPVMIVVEYMENGSLDSFLRKHDGHFTVIQLVGMLRGIASGMKYLSDMGYVHRDLAARNILVNSNLVCKVSDFGLSRVLEDDPEAAYTTTGGKIPIRWTAPEAIAYRKFSSASDAWSYGIVMWEVMSYGERPYWEMSNQDVILSIEEGYRLPAPMGCPASLHQLMLHCWQKERNHRPKFTDIVSFLDKLIRNPSALHTLVEDILVSNHESF

SEQ ID NO: 27879 - protein, 398 aa, Homo sapiens
  REGION 1..398: note = ENSP00000421711
MKDSPFQVTKLYWLNEKWDFIASASDMAAEQGQILVIATAAVGGFTLLVILTLFFLITGRCQWYIKAKMKSEEKRRNHLQNGHLRFPGIKTYIDPDTYEDPSLAVHEFAKEIDPSRIRIERVIGAGEFGEVCSGRLKTPGKREIPVAIKTLKGGHMDRQRRDFLREASIMGQFDHPNIIRLEGVVTKRSFPAIGVEAFCPSFLRAGFLNSIQAPHPVPGGGSLPPRIPAGRPVMIVVEYMENGSLDSFLRKHDGHFTVIQLVGMLRGIASGMKYLSDMGYVHRDLAARNILVNSNLVCKVSDFGLSRVLEDDPEAAYTTTRPTNHNKEQSELVKEDGLESLCEQCESSSGYGTGLVLMWKRNRRAMGASGQTRKQCDKRDNPPTDLFQTLTLNLCYSA

SEQ ID NO: 27880 - protein, 241 aa, Homo sapiens
  REGION 1..241: note = ENSP00000424638
MAAEQGQILVIATAAVGGFTLLVILTLFFLITGRCQWYIKAKMKSEEKRRNHLQNGHLRFPGIKTYIDPDTYEDPSLAVHEFAKEIDPSRIRIERVIGAGEFGEVCSGRLKTPGKREIPVAIKTLKGGHMDRQRRDFLREASIMGQFDHPNIIRLEGVVTKRSFPAIGVEAFCPSFLRAGFLNSIQAPHPVPGGGSLPPRIPAGRPVMIVVEYMENGSLDSFLRLYPKAEYNGKQCSRYSI

SEQ ID NO: 27881 - protein, 334 aa, Homo sapiens
  REGION 1..334: note = ENSP00000423950
MKDSPFQVTKLYWLNEKWDFIASASDMAAEQGQILVIATAAVGGFTLLVILTLFFLITGRCQWYIKAKMKSEEKRRNHLQNGHLRFPGIKTYIDPDTYEDPSLAVHEFAKEIDPSRIRIERVIGAGEFGEVCSGRLKTPGKREIPVAIKTLKGGHMDRQRRDFLREASIMGQFDHPNIIRLEGVVTKRSFPAIGVEAFCPSFLRAGFLNSIQAPHPVPGGGSLPPRIPAGRPVMIVVEYMENGSLDSFLRKHDGHFTVIQLVGMLRGIASGMKYLSDMGYVHRDLAARNILVNSNLVCKVSDFGLSRVLEDDPEAAYTTTDLFQTLTLNLCYSA

SEQ ID NO: 27882 - protein, 55 aa, Homo sapiens
  REGION 1..55: note = ENSP00000421353
FVAAGFTTFDLISRMSIDDIRRIGVILIGHQRRIVSSIQTLRLHMMHIQEKGFHV

SEQ ID NO: 27883 - protein, 112 aa, Homo sapiens
  REGION 1..112: note = ENSP00000417435
MDTRTATAELGWTANPASGWEEVSGYDENLNTIRTYQVCNVFEPNQNNWLLTTFINRRGAHRIYTEMRFTVRDCSSLPNVPGSCKETFNLYYYETDSVIATKKSAFWSEAPY

SEQ ID NO: 27884 - protein, 281 aa, Homo sapiens
  REGION 1..281: note = ENSP00000420338
MALDYLLLLLLASAVAAMEETLMDTRTATAELGWTANPASGWEEVSGYDENLNTIRTYQVCNVFEPNQNNWLLTTFINRRGAHRIYTEMRFTVRDCSSLPNVPGSCKETFNLYYYETDSVIATKKSAFWSEAPYLKVDTIAADESFSQVDFGGRLMKVNTEVRSFGPLTRNGFYLAFQDYGACMSLLSVRVFFKKCPSIVQNFAVFPETMTGAESTSLVIARGTCIPNAEEVDVPIKLYCNGDGEWMVPIGRCTCKPGYEPENSVACKVSRPFWRILRQQD

SEQ ID NO: 27885 - protein, 984 aa, Homo sapiens
  REGION 1..984: note = ENSP00000381097
MALDYLLLLLLASAVAAMEETLMDTRTATAELGWTANPASGWEEVSGYDENLNTIRTYQVCNVFEPNQNNWLLTTFINRRGAHRIYTEMRFTVRDCSSLPNVPGSCKETFNLYYYETDSVIATKKSAFWSEAPYLKVDTIAADESFSQVDFGGRLMKVNTEVRSFGPLTRNGFYLAFQDYGACMSLLSVRVFFKKCPSIVQNFAVFPETMTGAESTSLVIARGTCIPNAEEVDVPIKLYCNGDGEWMVPIGRCTCKPGYEPENSVACKACPAGTFKASQEAEGCSHCPSNSRSPAEASPICTCRTGYYRADFDPPEVACTSVPSGPRNVISIVNETSIILEWHPPRETGGRDDVTYNIICKKCRADRRSCSRCDDNVEFVPRQLGLTECRVSISSLWAHTPYTFDIQAINGVSSKSPFPPQHVSVNITTNQAAPSTVPIMHQVSATMRSITLSWPQPEQPNGIILDYEIRYYEKEHNEFNSSMARSQTNTARIDGLRPGMVYVVQVRARTVAGYGKFSGKMCFQTLTDDDYKSELREQLPLIAGSAAAGVVFVVSLVAISIVCSRKRAYSKEAVYSDKLQHYSTGRGSPGMKIYIDPFTYEDPNEAVREFAKEIDVSFVKIEEVIGAGEFGEVYKGRLKLPGKREIYVAIKTLKAGYSEKQRRDFLSEASIMGQFDHPNIIRLEGVVTKSRPVMIITEFMENGALDSFLRQNDGQFTVIQLVGMLRGIAAGMKYLAEMNYVHRDLAARNILVNSNLVCKVSDFGLSRYLQDDTSDPTYTSSLGGKIPVRWTAPEAIAYRKFTSASDVWSYGIVMWEVMSFGERPYWDMSNQDVINAIEQDYRLPPPMDCPAALHQLMLDCWQKDRNSRPRFAEIVNTLDKMIRNPASLKTVATITAVPSQPLLDRSIPDFTAFTTVDDWLSAIKMVQYRDSFLTAGFTSLQLVTQMTSEDLLRIGITLAGHQKKILNSIHSMRVQISQSPTAMA

SEQ ID NO: 27886 - protein, 42 aa, Homo sapiens
  REGION 1..42: note = ENSP00000419688
MDTRTATAELGWTANPASGWEEVSGYDENLNTIRTYQVCNVF

SEQ ID NO: 27887 - protein, 102 aa, Homo sapiens
  REGION 1..102: note = ENSP00000417216
MDTRTATAELGWTANPASGWEEVSGYDENLNTIRTYQVCNVFEPNQNNWLLTTFINRRGAHRIYTEMRFTVRDCSSLPNVPGSCKETFNLYYYETDSVIATK

SEQ ID NO: 27888 - protein, 149 aa, Homo sapiens
  REGION 1..149: note = ENSP00000418352
MDTRTATAELGWTANPASGWEEVSGYDENLNTIRTYQVCNVFEPNQNNWLLTTFINRRGAHRIYTEMRFTVRDCSSLPNVPGSCKETFNLYYYETDSVIATKKSAFWSEAPYLKVDTIAADESFSQVDFGGRLMKVNTEVRSFGPLTRN

SEQ ID NO: 27889 - protein, 545 aa, Homo sapiens
  REGION 1..545: note = ENSP00000419574
MHQVSATMRSITLSWPQPEQPNGIILDYEIRYYEKEHNEFNSSMARSQTNTARIDGLRPGMVYVVQVRARTVAGYGKFSGKMCFQTLTDDDYKSELREQLPLIAGSAAAGVVFVVSLVAISIVCSRKRAYSKEAVYSDKLQHYSTGRGSPGMKIYIDPFTYEDPNEAVREFAKEIDVSFVKIEEVIGAGEFGEVYKGRLKLPGKREIYVAIKTLKAGYSEKQRRDFLSEASIMGQFDHPNIIRLEGVVTKSRPVMIITEFMENGALDSFLRQNDGQFTVIQLVGMLRGIAAGMKYLAEMNYVHRDLAARNILVNSNLVCKVSDFGLSRYLQDDTSDPTYTSSLGGKIPVRWTAPEAIAYRKFTSASDVWSYGIVMWEVMSFGERPYWDMSNQDVINAIEQDYRLPPPMDCPAALHQLMLDCWQKDRNSRPRFAEIVNTLDKMIRNPASLKTVATITAVPSQPLLDRSIPDFTAFTTVDDWLSAIKMVQYRDSFLTAGFTSLQLVTQMTSEDLLRIGITLAGHQKKILNSIHSMRVQISQSPTAMA

SEQ ID NO: 27890 - protein, 935 aa, Homo sapiens
  REGION 1..935: note = ENSP00000353833
MELRVLLCWASLAAALEETLLNTKLETADLKWVTFPQVDGQWEELSGLDEEQHSVRTYEVCDVQRAPGQAHWLRTGWVPRRGAVHVYATLRFTMLECLSLPRAGRSCKETFTVFYYESDADTATALTPAWMENPYIKVDTVAAEHLTRKRPGAEATGKVNVKTLRLGPLSKAGFYLAFQDQGACMALLSLHLFYKKCAQLTVNLTRFPETVPRELVVPVAGSCVVDAVPAPGPSPSLYCREDGQWAEQPVTGCSCAPGFEAAEGNTKCRACAQGTFKPLSGEGSCQPCPANSHSNTIGSAVCQCRVGYFRARTDPRGAPCTTPPSAPRSVVSRLNGSSLHLEWSAPLESGGREDLTYALRCRECRPGGSCAPCGGDLTFDPGPRDLVEPWVVVRGLRPDFTYTFEVTALNGVSSLATGPVPFEPVNVTTDREVPPAVSDIRVTRSSPSSLSLAWAVPRAPSGAVLDYEVKYHEKGAEGPSSVRFLKTSENRAELRGLKRGASYLVQVRARSEAGYGPFGQEHHSQTQLDESEGWREQLALIAGTAVVGVVLVLVVIVVAVLCLRKQSNGREAEYSDKHGQYLIGHGTKVYIDPFTYEDPNEAVREFAKEIDVSYVKIEEVIGAGEFGEVCRGRLKAPGKKESCVAIKTLKGGYTERQRREFLSEASIMGQFEHPNIIRLEGVVTNSMPVMILTEFMENGALDSFLRLNDGQFTVIQLVGMLRGIASGMRYLAEMSYVHRDLAARNILVNSNLVCKVSDFGLSRFLEENSSDPTYTSSLGGKIPIRWTAPEAIAFRKFTSASDAWSYGIVMWEVMSFGERPYWDMSNQDVINAIEQDYRLPPPPDCPTSLHQLMLDCWQKDRNARPRFPQVVSALDKMIRNPASLKIVARENGGDLLRIGVTLAGHQKKILASVQHMKSQAKPGTPGGTGGPAPQY

SEQ ID NO: 27891 - protein, 987 aa, Homo sapiens
  REGION 1..987: note = ENSP00000350896
MELRVLLCWASLAAALEETLLNTKLETADLKWVTFPQVDGQWEELSGLDEEQHSVRTYEVCDVQRAPGQAHWLRTGWVPRRGAVHVYATLRFTMLECLSLPRAGRSCKETFTVFYYESDADTATALTPAWMENPYIKVDTVAAEHLTRKRPGAEATGKVNVKTLRLGPLSKAGFYLAFQDQGACMALLSLHLFYKKCAQLTVNLTRFPETVPRELVVPVAGSCVVDAVPAPGPSPSLYCREDGQWAEQPVTGCSCAPGFEAAEGNTKCRACAQGTFKPLSGEGSCQPCPANSHSNTIGSAVCQCRVGYFRARTDPRGAPCTTPPSAPRSVVSRLNGSSLHLEWSAPLESGGREDLTYALRCRECRPGGSCAPCGGDLTFDPGPRDLVEPWVVVRGLRPDFTYTFEVTALNGVSSLATGPVPFEPVNVTTDREVPPAVSDIRVTRSSPSSLSLAWAVPRAPSGAVLDYEVKYHEKGAEGPSSVRFLKTSENRAELRGLKRGASYLVQVRARSEAGYGPFGQEHHSQTQLDESEGWREQLALIAGTAVVGVVLVLVVIVVAVLCLRKQSNGREAEYSDKHGQYLIGHGTKVYIDPFTYEDPNEAVREFAKEIDVSYVKIEEVIGAGEFGEVCRGRLKAPGKKESCVAIKTLKGGYTERQRREFLSEASIMGQFEHPNIIRLEGVVTNSMPVMILTEFMENGALDSFLRLNDGQFTVIQLVGMLRGIASGMRYLAEMSYVHRDLAARNILVNSNLVCKVSDFGLSRFLEENSSDPTYTSSLGGKIPIRWTAPEAIAFRKFTSASDAWSYGIVMWEVMSFGERPYWDMSNQDVINAIEQDYRLPPPPDCPTSLHQLMLDCWQKDRNARPRFPQVVSALDKMIRNPASLKIVARENGGASHPLLDQRQPHYSAFGSVGEWLRAIKMGRYEESFAAAGFGSFELVSQISAEDLLRIGVTLAGHQKKILASVQHMKSQAKPGTPGGTGGPAPQY

SEQ ID NO: 27892 - protein, 306 aa, Homo sapiens
  REGION 1..306: note = ENSP00000482702
MELRVLLCWASLAAALEETLLNTKLETADLKWVTFPQVDGQWEELSGLDEEQHSVRTYEVCDVQRAPGQAHWLRTGWVPRRGAVHVYATLRFTMLECLSLPRAGRSCKETFTVFYYESDADTATALTPAWMENPYIKVDTVAAEHLTRKRPGAEATGKVNVKTLRLGPLSKAGFYLAFQDQGACMALLSLHLFYKKCAQLTVNLTRFPETVPRELVVPVAGSCVVDAVPAPGPSPSLYCREDGQWAEQPVTGCSCAPGFEAAEGNTKCRGRRGSQQRAVPEDVRKPGRAAGAEAGSQLPGAGTGAL

SEQ ID NO: 27893 - protein, 576 aa, Homo sapiens
  REGION 1..576: note = ENSP00000270460
MSTSSLRRQMKNIVHNYSEAEIKVREATSNDPWGPSSSLMSEIADLTYNVVAFSEIMSMIWKRLNDHGKNWRHVYKAMTLMEYLIKTGSERVSQQCKENMYAVQTLKDFQYVDRDGKDQGVNVREKAKQLVALLRDEDRLREERAHALKTKEKLAQTATASSAAVGSGPPPEAEQAWPQSSGEEELQLQLALAMSKEEADQPPSCGPEDDAQLQLALSLSREEHDKEERIRRGDDLRLQMAIEESKRETGGKEESSLMDLADVFTAPAPAPTTDPWGGPAPMAAAVPTAAPTSDPWGGPPVPPAADPWGGPAPTPASGDPWRPAAPAGPSVDPWGGTPAPAAGEGPTPDPWGSSDGGVPVSGPSASDPWTPAPAFSDPWGGSPAKPSTNGTTAAGGFDTEPDEFSDFDRLRTALPTSGSSAGELELLAGEVPARSPGAFDMSGVRGSLAEAVGSPPPAATPTPTPPTRKTPESFLGPNAALVDLDSLVSRPGPTPPGAKASNPFLPGGGPATGPSVTNPFQPAPPATLTLNQLRLSPVPPVPGAPPTYISPLGGGPGLPPMMPPGPPAPNTNPFLL

SEQ ID NO: 27894 - protein, 550 aa, Homo sapiens
  REGION 1..550: note = ENSP00000085079
MSTSSLRRQMKNIVHNYSEAEIKVREATSNDPWGPSSSLMSEIADLTYNVVAFSEIMSMIWKRLNDHGKNWRHVYKAMTLMEYLIKTGSERVSQQCKENMYAVQTLKDFQYVDRDGKDQGVNVREKAKQLVALLRDEDRLREERAHALKTKEKLAQTATASSAAVGSGPPPEAEQAWPQSSGEEELQLQLALAMSKEEADQEERIRRGDDLRLQMAIEESKRETGGKEESSLMDLADVFTAPAPAPTTDPWGGPAPMAAAVPTAAPTSDPWGGPPVPPAADPWGGPAPTPASGDPWRPAAPAGPSVDPWGGTPAPAAGEGPTPDPWGSSDGGVPVSGPSASDPWTPAPAFSDPWGGSPAKPSTNGTTAGGFDTEPDEFSDFDRLRTALPTSGSSAGELELLAGEVPARSPGAFDMSGVRGSLAEAVGSPPPAATPTPTPPTRKTPESFLGPNAALVDLDSLVSRPGPTPPGAKASNPFLPGGGPATGPSVTNPFQPAPPATLTLNQLRLSPVPPVPGAPPTYISPLGGGPGLPPMMPPGPPAPNTNPFLL

SEQ ID NO: 27895 - protein, 662 aa, Homo sapiens
  REGION 1..662: note = ENSP00000406209
MGDQSWLWNQAAPGVRSPVFACSVEKGNVPLVLSEHLAHSRDPGSGAVRFLISPEPWASAILGTSGLLASPVLPAALDAVTCQHLPQPSSGSRPISPRIGALCPLLLQPGTMSTSSLRRQMKNIVHNYSEAEIKVREATSNDPWGPSSSLMSEIADLTYNVVAFSEIMSMIWKRLNDHGKNWRHVYKAMTLMEYLIKTGSERVSQQCKENMYAVQTLKDFQYVDRDGKDQGVNVREKAKQLVALLRDEDRLREERAHALKTKEKLAQTATASSAAVGSGPPPEAEQAWPQSSGEEELQLQLALAMSKEEADQEERIRRGDDLRLQMAIEESKRETGGKEESSLMDLADVFTAPAPAPTTDPWGGPAPMAAAVPTAAPTSDPWGGPPVPPAADPWGGPAPTPASGDPWRPAAPAGPSVDPWGGTPAPAAGEGPTPDPWGSSDGGVPVSGPSASDPWTPAPAFSDPWGGSPAKPSTNGTTAAGGFDTEPDEFSDFDRLRTALPTSGSSAGELELLAGEVPARSPGAFDMSGVRGSLAEAVGSPPPAATPTPTPPTRKTPESFLGPNAALVDLDSLVSRPGPTPPGAKASNPFLPGGGPATGPSVTNPFQPAPPATLTLNQLRLSPVPPVPGAPPTYISPLGGGPGLPPMMPPGPPAPNTNPFLL

SEQ ID NO: 27896 - protein, 60 aa, Homo sapiens
  REGION 1..60: note = ENSP00000466593
  VARIANT 1: note = Any amino acid
XKPSTNGTTAAGGFDTEPDEFSDFDRLRTALPTSGSSAAYWTRLPPGFYSLNSYRSCFIR

SEQ ID NO: 27897 - protein, 762 aa, Homo sapiens
  REGION 1..762: note = ENSP00000360795
MAAAAQLSLTQLSSGNPVYEKYYRQVDTGNTGRVLASDAAAFLKKSGLPDLILGKIWDLADTDGKGILNKQEFFVALRLVACAQNGLEVSLSSLNLAVPPPRFHDTSSPLLISGTSAAELPWAVKPEDKAKYDAIFDSLSPVNGFLSGDKVKPVLLNSKLPVDILGRVWELSDIDHDGMLDRDEFAVAMFLVYCALEKEPVPMSLPPALVPPSKRKTWVVSPAEKAKYDEIFLKTDKDMDGFVSGLEVREIFLKTGLPSTLLAHIWSLCDTKDCGKLSKDQFALAFHLISQKLIKGIDPPHVLTPEMIPPSDRASLQKNIIGSSPVADFSAIKELDTLNNEIVDLQREKNNVEQDLKEKEDTIKQRTSEVQDLQDEVQRENTNLQKLQAQKQQVQELLDELDEQKAQLEEQLKEVRKKCAEEAQLARSSPELLPSGVTDENEVTTAVTEKVCSELDNNRHSKEEDPFNVDSSSLTGPVADTNLDFFQSDPFVGSDPFKDDPFGKIDPFGGDPFKGSDPFASDCFFRQSTDPFATSSTDPFSAANNSSITSVETLKHNDPFAPGGTVVAASDSATDPFASVFGNESFGGGFADFSTLSKVNNEDPFRSATSSSVSNVVITKNVFEETSVKSEDEPPALPPKIGTPTRPCPLPPGKRSINKLDSPDPFKLNDPFQPFPGNDSPKEKDPEIFCDPFTSATTTTNKEADPSNFANFSAYPSEEDMIEWAKRESEREEEQRLARLNQQEQEDLELAIALSKSEISEA

SEQ ID NO: 27898 - protein, 896 aa, Homo sapiens
  REGION 1..896: note = ENSP00000360798
MAAAAQLSLTQLSSGNPVYEKYYRQVDTGNTGRVLASDAAAFLKKSGLPDLILGKIWDLADTDGKGILNKQEFFVALRLVACAQNGLEVSLSSLNLAVPPPRFHDTSSPLLISGTSAAELPWAVKPEDKAKYDAIFDSLSPVNGFLSGDKVKPVLLNSKLPVDILGRVWELSDIDHDGMLDRDEFAVAMFLVYCALEKEPVPMSLPPALVPPSKRKTWVVSPAEKAKYDEIFLKTDKDMDGFVSGLEVREIFLKTGLPSTLLAHIWSLCDTKDCGKLSKDQFALAFHLISQKLIKGIDPPHVLTPEMIPPSDRASLQKNIIGSSPVADFSAIKELDTLNNEIVDLQREKNNVEQDLKEKEDTIKQRTSEVQDLQDEVQRENTNLQKLQAQKQQVQELLDELDEQKAQLEEQLKEVRKKCAEEAQLISSLKAELTSQESQISTYEEELAKAREELSRLQQETAELEESVESGKAQLEPLQQHLQDSQQEISSMQMKLMEMKDLENHNSQLNWCSSPHSILVNGATDYCSLSTSSSETANLNEHVEGQSNLESEPIHQESPARSSPELLPSGVTDENEVTTAVTEKVCSELDNNRHSKEEDPFNVDSSSLTGPVADTNLDFFQSDPFVGSDPFKDDPFGKIDPFGGDPFKGSDPFASDCFFRQSTDPFATSSTDPFSAANNSSITSVETLKHNDPFAPGGTVVAASDSATDPFASVFGNESFGGGFADFSTLSKVNNEDPFRSATSSSVSNVVITKNVFEETSVKSEDEPPALPPKIGTPTRPCPLPPGKRSINKLDSPDPFKLNDPFQPFPGNDSPKEKDPEIFCDPFTSATTTTNKEADPSNFANFSAYPSEEDMIEWAKRESEREEEQRLARLNQQEQEDLELAIALSKSEISEA

SEQ ID NO: 27899 - protein, 90 aa, Homo sapiens
  REGION 1..90: note = ENSP00000474739
  VARIANT 1: note = Any amino acid
XAAAQLSLTQLSSGNPVYEKYYRQVDTGNTGRVLASDAAAFLKKSGLPDLILGKIWDLADTDGKGILNKQHDTSSPLLISGTSAAELPWA

SEQ ID NO: 27900 - protein, 126 aa, Homo sapiens
  REGION 1..126: note = ENSP00000448636
MRANDALQVLGLLFSLARGSEVGNSQAVCPGTLNGLSVTGDAENQYQTLYKLYERCEVVMGNLEIVLTGHNADLSFLQWIREVTGYVLVAMNEFSTLPLPNLRVVRGTQVYDGKFAIFVMLNYNTN

SEQ ID NO: 27901 - protein, 116 aa, Homo sapiens
  REGION 1..116: note = ENSP00000449138
MGNLEIVLTGHNADLSFLQWIREVTGYVLVAMNEFSTLPLPNLRVVRGTQVYDGKFAIFVMLNYNTNSSHALRQLRLTQLTEILSGGVYIEKNDKLCHMDTIDWRDIVRDRDAEIV

SEQ ID NO: 27902 - protein, 1342 aa, Homo sapiens
  REGION 1..1342: note = ENSP00000267101
MRANDALQVLGLLFSLARGSEVGNSQAVCPGTLNGLSVTGDAENQYQTLYKLYERCEVVMGNLEIVLTGHNADLSFLQWIREVTGYVLVAMNEFSTLPLPNLRVVRGTQVYDGKFAIFVMLNYNTNSSHALRQLRLTQLTEILSGGVYIEKNDKLCHMDTIDWRDIVRDRDAEIVVKDNGRSCPPCHEVCKGRCWGPGSEDCQTLTKTICAPQCNGHCFGPNPNQCCHDECAGGCSGPQDTDCFACRHFNDSGACVPRCPQPLVYNKLTFQLEPNPHTKYQYGGVCVASCPHNFVVDQTSCVRACPPDKMEVDKNGLKMCEPCGGLCPKACEGTGSGSRFQTVDSSNIDGFVNCTKILGNLDFLITGLNGDPWHKIPALDPEKLNVFRTVREITGYLNIQSWPPHMHNFSVFSNLTTIGGRSLYNRGFSLLIMKNLNVTSLGFRSLKEISAGRIYISANRQLCYHHSLNWTKVLRGPTEERLDIKHNRPRRDCVAEGKVCDPLCSSGGCWGPGPGQCLSCRNYSRGGVCVTHCNFLNGEPREFAHEAECFSCHPECQPMEGTATCNGSGSDTCAQCAHFRDGPHCVSSCPHGVLGAKGPIYKYPDVQNECRPCHENCTQGCKGPELQDCLGQTLVLIGKTHLTMALTVIAGLVVIFMMLGGTFLYWRGRRIQNKRAMRRYLERGESIEPLDPSEKANKVLARIFKETELRKLKVLGSGVFGTVHKGVWIPEGESIKIPVCIKVIEDKSGRQSFQAVTDHMLAIGSLDHAHIVRLLGLCPGSSLQLVTQYLPLGSLLDHVRQHRGALGPQLLLNWGVQIAKGMYYLEEHGMVHRNLAARNVLLKSPSQVQVADFGVADLLPPDDKQLLYSEAKTPIKWMALESIHFGKYTHQSDVWSYGVTVWELMTFGAEPYAGLRLAEVPDLLEKGERLAQPQICTIDVYMVMVKCWMIDENIRPTFKELANEFTRMARDPPRYLVIKRESGPGIAPGPEPHGLTNKKLEEVELEPELDLDLDLEAEEDNLATTTLGSALSLPVGTLNRPRGSQSLLSPSSGYMPMNQGNLGESCQESAVSGSSERCPRPVSLHPMPRGCLASESSEGHVTGSEAELQEKVSMCRSRSRSRSPRPRGDSAYHSQRHSLLTPVTPLSPPGLEEEDVNGYVMPDTHLKGTPSSREGTLSSVGLSSVLGTEEEDEDEEYEYMNRRRRHSPPHPPRPSSLEELGYEYMDVGSDLSASLGSTQSCPLHPVPIMPTAGTTPDEDYEYMNRQRDGGGPGGDYAAMGACPASEQGYEEMRAFQGPGHQAPHVHYARLKTLRSLEATDSAFDNPDYWHSRLFPKANAQRT

SEQ ID NO: 27903 - protein, 183 aa, Homo sapiens
  REGION 1..183: note = ENSP00000415753
MRANDALQVLGLLFSLARGSEVGNSQAVCPGTLNGLSVTGDAENQYQTLYKLYERCEVVMGNLEIVLTGHNADLSFLQWIREVTGYVLVAMNEFSTLPLPNLRVVRGTQVYDGKFAIFVMLNYNTNSSHALRQLRLTQLTGQFPMVPSGLTPQPAQDWYLLDDDPRLLTLSASSKVPVTLAAV

SEQ ID NO: 27904 - protein, 43 aa, Homo sapiens
  REGION 1..43: note = ENSP00000448671
MRANDALQVPRAQSTSTQMFRMNVGPAMRTAPRGVKDQSFKTV

SEQ ID NO: 27905 - protein, 921 aa, Homo sapiens
  REGION 1..921: note = ENSP00000448483
MRANDALQVLGLLFSLARGSEVGNSQAVCPGTLNGLSVTGDAENQYQTLYKLYERCEVVMGNLEIVLTGHNADLSFLQWIREVTGYVLVAMNEFSTLPLPNLRVVRGTQVYDGKFAIFVMLNYNTNSSHALRQLRLTQLTEILSGGVYIEKNDKLCHMDTIDWRDIVRDRDAEIVVKDNGRSCPPCHEVCKGRCWGPGSEDCQTLTKTICAPQCNGHCFGPNPNQCCHDECAGGCSGPQDTDCFACRHFNDSGACVPRCPQPLVYNKLTFQLEPNPHTKYQYGGVCVASCPHNFVVDQTSCVRACPPDKMEVDKNGLKMCEPCGGLCPKACEGTGSGSRFQTVDSSNIDGFVNCTKILGNLDFLITGLNGDPWHKIPALDPEKLNVFRTVREITGYLNIQSWPPHMHNFSVFSNLTTIGGRSLYNRGFSLLIMKNLNVTSLGFRSLKEISAGRIYISANRQLCYHHSLNWTKVLRGPTEERLDIKHNRPRRDCVAEGKVCDPLCSSGGCWGPGPGQCLSCRNYSRGGVCVTHCNFLNGEPREFAHEAECFSCHPECQPMEGTATCNGSGSDTCAQCAHFRDGPHCVSSCPHGVLGAKGPIYKYPDVQNECRPCHENCTQGCKGPELQDCLGQTLVLIGKTHLTMALTVIAGLVVIFMMLGGTFLYWRGRRIQNKRAMRRYLERGESIEPLDPSEKANKVLARIFKETELRKLKVLGSGVFGTVHKGVWIPEGESIKIPVCIKVIEDKSGRQSFQAVTDHMLAIGSLDHAHIVRLLGLCPGSSLQLVTQYLPLGSLLDHVRQHRGALGPQLLLNWGVQIAKGMYYLEEHGMVHRNLAARNVLLKSPSQVQVADFGVADLLPPDDKQLLYSEAKTPIKWMALESIHFGKYTHQSDVWSYGQCIWMPSLPSLAPVSNLPFETPS

SEQ ID NO: 27906 - protein, 331 aa, Homo sapiens
  REGION 1..331: note = ENSP00000447510
MRANDALQVLGLLFSLARGSEVGNSQAVCPGTLNGLSVTGDAENQYQTLYKLYERCEVVMGNLEIVLTGHNADLSFLQWIREVTGYVLVAMNEFSTLPLPNLRVVRGTQVYDGKFAIFVMLNYNTNSSHALRQLRLTQLTEILSGGVYIEKNDKLCHMDTIDWRDIVRDRDAEIVVKDNGRSCPPCHEVCKGRCWGPGSEDCQTLTKTICAPQCNGHCFGPNPNQCCHDECAGGCSGPQDTDCFACRHFNDSGACVPRCPQPLVYNKLTFQLEPNPHTKYQYGGVCVASCPHNFVVDQTSCVRACPPDKMEVDKNGLKMCEPCGGLCPKAF

SEQ ID NO: 27907 - protein, 115 aa, Homo sapiens
  REGION 1..115: note = ENSP00000449713
MGNLEIVLTGHNADLSFLQWIREVTGYVLVAMNEFSTLPLPNLRVVRGTQVYDGKFAIFVMLNYNTNSSHALRQLRLTQLTEILSGGVYIEKNDKLCHMDTIDWRDIVRDRDAEI

SEQ ID NO: 27908 - protein, 1283 aa, Homo sapiens
  REGION 1..1283: note = ENSP00000408340
MGNLEIVLTGHNADLSFLQWIREVTGYVLVAMNEFSTLPLPNLRVVRGTQVYDGKFAIFVMLNYNTNSSHALRQLRLTQLTEILSGGVYIEKNDKLCHMDTIDWRDIVRDRDAEIVVKDNGRSCPPCHEVCKGRCWGPGSEDCQTLTKTICAPQCNGHCFGPNPNQCCHDECAGGCSGPQDTDCFACRHFNDSGACVPRCPQPLVYNKLTFQLEPNPHTKYQYGGVCVASCPHNFVVDQTSCVRACPPDKMEVDKNGLKMCEPCGGLCPKACEGTGSGSRFQTVDSSNIDGFVNCTKILGNLDFLITGLNGDPWHKIPALDPEKLNVFRTVREITGYLNIQSWPPHMHNFSVFSNLTTIGGRSLYNRGFSLLIMKNLNVTSLGFRSLKEISAGRIYISANRQLCYHHSLNWTKVLRGPTEERLDIKHNRPRRDCVAEGKVCDPLCSSGGCWGPGPGQCLSCRNYSRGGVCVTHCNFLNGEPREFAHEAECFSCHPECQPMEGTATCNGSGSDTCAQCAHFRDGPHCVSSCPHGVLGAKGPIYKYPDVQNECRPCHENCTQGCKGPELQDCLGQTLVLIGKTHLTMALTVIAGLVVIFMMLGGTFLYWRGRRIQNKRAMRRYLERGESIEPLDPSEKANKVLARIFKETELRKLKVLGSGVFGTVHKGVWIPEGESIKIPVCIKVIEDKSGRQSFQAVTDHMLAIGSLDHAHIVRLLGLCPGSSLQLVTQYLPLGSLLDHVRQHRGALGPQLLLNWGVQIAKGMYYLEEHGMVHRNLAARNVLLKSPSQVQVADFGVADLLPPDDKQLLYSEAKTPIKWMALESIHFGKYTHQSDVWSYGVTVWELMTFGAEPYAGLRLAEVPDLLEKGERLAQPQICTIDVYMVMVKCWMIDENIRPTFKELANEFTRMARDPPRYLVIKRESGPGIAPGPEPHGLTNKKLEEVELEPELDLDLDLEAEEDNLATTTLGSALSLPVGTLNRPRGSQSLLSPSSGYMPMNQGNLGESCQESAVSGSSERCPRPVSLHPMPRGCLASESSEGHVTGSEAELQEKVSMCRSRSRSRSPRPRGDSAYHSQRHSLLTPVTPLSPPGLEEEDVNGYVMPDTHLKGTPSSREGTLSSVGLSSVLGTEEEDEDEEYEYMNRRRRHSPPHPPRPSSLEELGYEYMDVGSDLSASLGSTQSCPLHPVPIMPTAGTTPDEDYEYMNRQRDGGGPGGDYAAMGACPASEQGYEEMRAFQGPGHQAPHVHYARLKTLRSLEATDSAFDNPDYWHSRLFPKANAQRT

SEQ ID NO: 27909 - protein, 81 aa, Homo sapiens
  REGION 1..81: note = ENSP00000482073
LDIKHNRPRRDCVAEGKVCDPLCSSGGCWGPGPGQCLSCRNYSRGGVCVTHCNFLNGYSKGSQSRMGGGGALQWNCSGGIQ

SEQ ID NO: 27910 - protein, 649 aa, Homo sapiens
  REGION 1..649: note = ENSP00000448946
CLSCRNYSRGGVCVTHCNFLNGEPREFAHEAECFSCHPECQPMEGTATCNGSGSDTCAQCAHFRDGPHCVSSCPHGVLGAKGPIYKYPDVQNECRPCHENCTQGCKGPELQDCLGQTLVLIGKTHLTMALTVIAGLVVIFMMLGGTFLYWRGRRIQNKRAMRRYLERGESIEPLDPSEKTPIKWMALESIHFGKYTHQSDVWSYGVTVWELMTFGAEPYAGLRLAEVPDLLEKGERLAQPQICTIDVYMVMVKCWMIDENIRPTFKELANEFTRMARDPPRYLVIKRESGPGIAPGPEPHGLTNKKLEEVELEPELDLDLDLEAEEDNLATTTLGSALSLPVGTLNRPRGSQSLLSPSSGYMPMNQGNLGESCQESAVSGSSERCPRPVSLHPMPRGCLASESSEGHVTGSEAELQEKVSMCRSRSRSRSPRPRGDSAYHSQRHSLLTPVTPLSPPGLEEEDVNGYVMPDTHLKGTPSSREGTLSSVGLSSVLGTEEEDEDEEYEYMNRRRRHSPPHPPRPSSLEELGYEYMDVGSDLSASLGSTQSCPLHPVPIMPTAGTTPDEDYEYMNRQRDGGGPGGDYAAMGACPASEQGYEEMRAFQGPGHQAPHVHYARLKTLRSLEATDSAFDNPDYWHSRLFPKANAQRT

SEQ ID NO: 27911 - protein, 583 aa, Homo sapiens
  REGION 1..583: note = ENSP00000449129
MLAIGSLDHAHIVRLLGLCPGSSLQLVTQYLPLGSLLDHVRQHRGALGPQLLLNWGVQIAKGMYYLEEHGMVHRNLAARNVLLKSPSQVQVADFGVADLLPPDDKQLLYSEAKTPIKWMALESIHFGKYTHQSDVWSYGVTVWELMTFGAEPYAGLRLAEVPDLLEKGERLAQPQICTIDVYMVMVKCWMIDENIRPTFKELANEFTRMARDPPRYLVIKRESGPGIAPGPEPHGLTNKKLEEVELEPELDLDLDLEAEEDNLATTTLGSALSLPVGTLNRPRGSQSLLSPSSGYMPMNQGNLGESCQESAVSGSSERCPRPVSLHPMPRGCLASESSEGHVTGSEAELQEKVSMCRSRSRSRSPRPRGDSAYHSQRHSLLTPVTPLSPPGLEEEDVNGYVMPDTHLKGTPSSREGTLSSVGLSSVLGTEEEDEDEEYEYMNRRRRHSPPHPPRPSSLEELGYEYMDVGSDLSASLGSTQSCPLHPVPIMPTAGTTPDEDYEYMNRQRDGGGPGGDYAAMGACPASEQGYEEMRAFQGPGHQAPHVHYARLKTLRSLEATDSAFDNPDYWHSRLFPKANAQRT

SEQ ID NO: 27912 - protein, 462 aa, Homo sapiens
  REGION 1..462: note = ENSP00000448729
MPMSTILPVTSPCLPATGVTVWELMTFGAEPYAGLRLAEVPDLLEKGERLAQPQICTIDVYMVMVKCWMIDENIRPTFKELANEFTRMARDPPRYLVIKRESGPGIAPGPEPHGLTNKKLEEVELEPELDLDLDLEAEEDNLATTTLGSALSLPVGTLNRPRGSQSLLSPSSGYMPMNQGNLGESCQESAVSGSSERCPRPVSLHPMPRGCLASESSEGHVTGSEAELQEKVSMCRSRSRSRSPRPRGDSAYHSQRHSLLTPVTPLSPPGLEEEDVNGYVMPDTHLKGTPSSREGTLSSVGLSSVLGTEEEDEDEEYEYMNRRRRHSPPHPPRPSSLEELGYEYMDVGSDLSASLGSTQSCPLHPVPIMPTAGTTPDEDYEYMNRQRDGGGPGGDYAAMGACPASEQGYEEMRAFQGPGHQAPHVHYARLKTLRSLEATDSAFDNPDYWHSRLFPKANAQRT

SEQ ID NO: 27913 - protein, 1308 aa, Homo sapiens
  REGION 1..1308: note = ENSP00000342235
MKPATGLWVWVSLLVAAGTVQPSDSQSVCAGTENKLSSLSDLEQQYRALRKYYENCEVVMGNLEITSIEHNRDLSFLRSVREVTGYVLVALNQFRYLPLENLRIIRGTKLYEDRYALAIFLNYRKDGNFGLQELGLKNLTEILNGGVYVDQNKFLCYADTIHWQDIVRNPWPSNLTLVSTNGSSGCGRCHKSCTGRCWGPTENHCQTLTRTVCAEQCDGRCYGPYVSDCCHRECAGGCSGPKDTDCFACMNFNDSGACVTQCPQTFVYNPTTFQLEHNFNAKYTYGAFCVKKCPHNFVVDSSSCVRACPSSKMEVEENGIKMCKPCTDICPKACDGIGTGSLMSAQTVDSSNIDKFINCTKINGNLIFLVTGIHGDPYNAIEAIDPEKLNVFRTVREITGFLNIQSWPPNMTDFSVFSNLVTIGGRVLYSGLSLLILKQQGITSLQFQSLKEISAGNIYITDNSNLCYYHTINWTTLFSTINQRIVIRDNRKAENCTAEGMVCNHLCSSDGCWGPGPDQCLSCRRFSRGRICIESCNLYDGEFREFENGSICVECDPQCEKMEDGLLTCHGPGPDNCTKCSHFKDGPNCVEKCPDGLQGANSFIFKYADPDRECHPCHPNCTQGCNGPTSHDCIYYPWTGHSTLPQHARTPLIAAGVIGGLFILVIVGLTFAVYVRRKSIKKKRALRRFLETELVEPLTPSGTAPNQAQLRILKETELKRVKVLGSGAFGTVYKGIWVPEGETVKIPVAIKILNETTGPKANVEFMDEALIMASMDHPHLVRLLGVCLSPTIQLVTQLMPHGCLLEYVHEHKDNIGSQLLLNWCVQIAKGMMYLEERRLVHRDLAARNVLVKSPNHVKITDFGLARLLEGDEKEYNADGGKMPIKWMALECIHYRKFTHQSDVWSYGVTIWELMTFGGKPYDGIPTREIPDLLEKGERLPQPPICTIDVYMVMVKCWMIDADSRPKFKELAAEFSRMARDPQRYLVIQGDDRMKLPSPNDSKFFQNLLDEEDLEDMMDAEEYLVPQAFNIPPPIYTSRARIDSNRSEIGHSPPPAYTPMSGNQFVYRDGGFAAEQGVSVPYRAPTSTIPEAPVAQGATAEIFDDSCCNGTLRKPVAPHVQEDSSTQRYSADPTVFAPERSPRGELDEEGYMTPMRDKPKQEYLNPVEENPFVSRRKNGDLQALDNPEYHNASNGPPKAEDEYVNEPLYLNTFANTLGKAEYLKNNILSMPEKAKKAFDNPDYWNHSLPPRSTLQHPDYLQEYSTKYFYKQNGRIRPIVAENPEYLSEFSLKPGTVLPPPPYRHRNTVV

SEQ ID NO: 27914 - protein, 1292 aa, Homo sapiens
  REGION 1..1292: note = ENSP00000403204
MKPATGLWVWVSLLVAAGTVQPSDSQSVCAGTENKLSSLSDLEQQYRALRKYYENCEVVMGNLEITSIEHNRDLSFLRSVREVTGYVLVALNQFRYLPLENLRIIRGTKLYEDRYALAIFLNYRKDGNFGLQELGLKNLTEILNGGVYVDQNKFLCYADTIHWQDIVRNPWPSNLTLVSTNGSSGCGRCHKSCTGRCWGPTENHCQTLTRTVCAEQCDGRCYGPYVSDCCHRECAGGCSGPKDTDCFACMNFNDSGACVTQCPQTFVYNPTTFQLEHNFNAKYTYGAFCVKKCPHNFVVDSSSCVRACPSSKMEVEENGIKMCKPCTDICPKACDGIGTGSLMSAQTVDSSNIDKFINCTKINGNLIFLVTGIHGDPYNAIEAIDPEKLNVFRTVREITGFLNIQSWPPNMTDFSVFSNLVTIGGRVLYSGLSLLILKQQGITSLQFQSLKEISAGNIYITDNSNLCYYHTINWTTLFSTINQRIVIRDNRKAENCTAEGMVCNHLCSSDGCWGPGPDQCLSCRRFSRGRICIESCNLYDGEFREFENGSICVECDPQCEKMEDGLLTCHGPGPDNCTKCSHFKDGPNCVEKCPDGLQGANSFIFKYADPDRECHPCHPNCTQGCNGPTSHDCIYYPWTGHSTLPQHARTPLIAAGVIGGLFILVIVGLTFAVYVRRKSIKKKRALRRFLETELVEPLTPSGTAPNQAQLRILKETELKRVKVLGSGAFGTVYKGIWVPEGETVKIPVAIKILNETTGPKANVEFMDEALIMASMDHPHLVRLLGVCLSPTIQLVTQLMPHGCLLEYVHEHKDNIGSQLLLNWCVQIAKGMMYLEERRLVHRDLAARNVLVKSPNHVKITDFGLARLLEGDEKEYNADGGKMPIKWMALECIHYRKFTHQSDVWSYGVTIWELMTFGGKPYDGIPTREIPDLLEKGERLPQPPICTIDVYMVMVKCWMIDADSRPKFKELAAEFSRMARDPQRYLVIQGDDRMKLPSPNDSKFFQNLLDEEDLEDMMDAEEYLVPQAFNIPPPIYTSRARIDSNRNQFVYRDGGFAAEQGVSVPYRAPTSTIPEAPVAQGATAEIFDDSCCNGTLRKPVAPHVQEDSSTQRYSADPTVFAPERSPRGELDEEGYMTPMRDKPKQEYLNPVEENPFVSRRKNGDLQALDNPEYHNASNGPPKAEDEYVNEPLYLNTFANTLGKAEYLKNNILSMPEKAKKAFDNPDYWNHSLPPRSTLQHPDYLQEYSTKYFYKQNGRIRPIVAENPEYLSEFSLKPGTVLPPPPYRHRNTVV

SEQ ID NO: 27915 - protein, 731 aa, Homo sapiens
  REGION 1..731: note = ENSP00000260943
  VARIANT 1: note = Any amino acid
XKPATGLWVWVSLLVAAGTVQPSDSQSVCAGTENKLSSLSDLEQQYRALRKYYENCEVVMGNLEITSIEHNRDLSFLRSVREVTGYVLVALNQFRYLPLENLRIIRGTKLYEDRYALAIFLNYRKDGNFGLQELGLKNLTEILNGGVYVDQNKFLCYADTIHWQDIVRNPWPSNLTLVSTNGSSGCGRCHKSCTGRCWGPTENHCQTLTRTVCAEQCDGRCYGPYVSDCCHRECAGGCSGPKDTDCFACMNFNDSGACVTQCPQTFVYNPTTFQLEHNFNAKYTYGAFCVKKCPHNFVVDSSSCVRACPSSKMEVEENGIKMCKPCTDICPKACDGIGTGSLMSAQTVDSSNIDKFINCTKINGNLIFLVTGIHGDPYNAIEAIDPEKLNVFRTVREITGFLNIQSWPPNMTDFSVFSNLVTIGGRVLYSGLSLLILKQQGITSLQFQSLKEISAGNIYITDNSNLCYYHTINWTTLFSTINQRIVIRDNRKAENCTAEGMVCNHLCSSDGCWGPGPDQCLSCRRFSRGRICIESCNLYDGEFREFENGSICVECDPQCEKMEDGLLTCHGPGPDNCTKCSHFKDGPNCVEKCPDGLQGANSFIFKYADPDRECHPCHPNCTQGCIGSSIEDCIGLMDRTPLIAAGVIGGLFILVIVGLTFAVYVRRKSIKKKRALRRFLETELVEPLTPSGTAPNQAQLRILKETELKRVKVLGSGAFGTVYKGIWVPEG

SEQ ID NO: 27916 - protein, 128 aa, Homo sapiens
  REGION 1..128: note = ENSP00000405564
MGNLEITSIEHNRDLSFLRSVREVTGYVLVALNQFRYLPLENLRIIRGTKLYEDRYALAIFLNYRKDGNFGLQELGLKNLTEILNGGVYVDQNKFLCYADTIHWQDIVRNPWPSNLTLVSTNGSSGCG

SEQ ID NO: 27917 - protein, 1266 aa, Homo sapiens [sequence omitted]

SEQ ID NO: 27918 - protein, 1412 aa, Homo sapiens
  REGION 1..1412: note = ENSP00000284037
MTTKRSLFVRLVPCRCLRGEEETVTTLDYSHCSLEQVPKEIFTFEKTLEELYLDANQIEELPKQLFNCQSLHKLSLPDNDLTTLPASIANLINLRELDVSKNGIQEFPENIKNCKVLTIVEASVNPISKLPDGFSQLLNLTQLYLNDAFLEFLPANFGRLTKLQILELRENQLKMLPKTMNRLTQLERLDLGSNEFTEVPEVLEQLSGLKEFWMDANRLTFIPGFIGSLKQLTYLDVSKNNIEMVEEGISTCENLQDLLLSSNSLQQLPETIGSLKNITTLKIDENQLMYLPDSIGGLISVEELDCSFNEVEALPSSIGQLTNLRTFAADHNYLQQLPPEIGSWKNITVLFLHSNKLETLPEEMGDMQKLKVINLSDNRLKNLPFSFTKLQQLTAMWLSDNQSKPLIPLQKETDSETQKMVLTNYMFPQQPRTEDVMFISDNESFNPSLWEEQRKQRAQVAFECDEDKDEREAPPREGNLKRYPTPYPDELKNMVKTVQTIVHRLKDEETNEDSGRDLKPHEDQQDINKDVGVKTSESTTTVKSKVDEREKYMIGNSVQKISEPEAEISPGSLPVTANMKASENLKHIVNHDDVFEESEELSSDEEMKMAEMRPPLIETSINQPKVVALSNNKKDDTKETDSLSDEVTHNSNQNNSNCSSPSRMSDSVSLNTDSSQDTSLCSPVKQTHIDINSKIRQEDENFNSLLQNGDILNSSTEEKFKAHDKKDFNLPEYDLNVEERLVLIEKSVDSTATADDTHKLDHINMNLNKLITNDTFQPEIMERSKTQDIVLGTSFLSINSKEETEHLENGNKYPNLESVNKVNGHSEETSQSPNRTEPHDSDCSVDLGISKSTEDLSPQKSGPVGSVVKSHSITNMEIGGLKIYDILSDNGPQQPSTTVKITSAVDGKNIVRSKSATLLYDQPLQVFTGSSSSSDLISGTKAIFKFDSNHNPEEPNIIRGPTSGPQSAPQIYGPPQYNIQYSSSAAVKDTLWHSKQNPQIDHASFPPQLLPRSESTENQSYAKHSANMNFSNHNNVRANTAYHLHQRLGPARHGEMWAISPNDRLIPAVTRSTIQRQSSVSSTASVNLGDPGSTRRAQIPEGDYLSYREFHSAGRTPPMMPGSQRPLSARTYSIDGPNASRPQSARPSINEIPERTMSVSDFNYSRTSPSKRPNARVGSEHSLLDPPGKSKVPRDWREQVLRHIEAKKLEKKHPQTSSSGDPCQDGIFISGQQNYSSATLSHKDVPPDSLMKMPLSNGQMGQPLRPQANYSQIHHPPQASVARHPSREQLIDYLMLKVAHQPPYTQPHCSPRQGHELAKQEIRVRVEKDPELGFSISGGVGGRGNPFRPDDDGIFVTRVQPEGPASKLLQPGDKIIQANGYSFINIEHGQAVSLLKTFQNTVELIIVREVSS

SEQ ID NO: 27919 - protein, 1371 aa, Homo sapiens
  REGION 1..1371: note = ENSP00000370330
MTTKRSLFVRLVPCRCLRGEEETVTTLDYSHCSLEQVPKEIFTFEKTLEELYLDANQIEELPKQLFNCQSLHKLSLPDNDLTTLPASIANLINLRELDVSKNGIQEFPENIKNCKVLTIVEASVNPISKLPDGFSQLLNLTQLYLNDAFLEFLPANFGRLTKLQILELRENQLKMLPKTMNRLTQLERLDLGSNEFTEVPEVLEQLSGLKEFWMDANRLTFIPGFIGSLKQLTYLDVSKNNIEMVEEGISTCENLQDLLLSSNSLQQLPETIGSLKNITTLKIDENQLMYLPDSIGGLISVEELDCSFNEVEALPSSIGQLTNLRTFAADHNYLQQLPPEIGSWKNITVLFLHSNKLETLPEEMGDMQKLKVINLSDNRLKNLPFSFTKLQQLTAMWLSDNQSKPLIPLQKETDSETQKMVLTNYMFPQQPRTEDVMFISDNESFNPSLWEEQRKQRAQVAFECDEDKDEREAPPREGNLKRYPTPYPDELKNMVKTVQTIVHRLKDEETNEDSGRDLKPHEDQQDINKDVGVKTSESTTTVKSKVDEREKYMIGNSVQKISEPEAEISPGSLPVTANMKASENLKHIVNHDDVFEESEELSSDEEMKMAEMRPPLIETSINQPKVVALSNNKKDDTKETDSLSDEVTHNSNQNNSNCSSPSRMSDSVSLNTDSSQDTSLCSPVKQTHIDINSKIRQEDENFNSLLQNGDILNSSTEEKFKAHDKKDFNLPEYDLNVEERLVLIEKSVDSTATADDTHKLDHINMNLNKLITNDTFQPEIMERSKTQDIVLGTSFLSINSKEETEHLENGNKYPNLESVNKVNGHSEETSQSPNRTEPHDSDCSVDLGISKSTEDLSPQKSGPVGSVVKSHSITNMEIGGLKIYDILSDNGPQQPSTTVKITSAVDGKNIVRSKSATLLYDQPLQVFTGSSSSSDLISGTKAIFKFDSNHNPEEPNIIRGPTSGPQSAPQIYGPPQYNIQYSSSAAVKDTLWHSKQNPQIDHASFPPQLLPRSESTENQSYAKHSANMNFSNHNNVRANTAYHLHQRLGPARHGEMWAISPNDRLIPAVTRSTIQRQSSVSSTASVNLGDPGSTRRAQIPEGDYLSYREFHSAGRTPPMMPGSQRPLSARTYSIDGPNASRPQSARPSINEIPERTMSVSDFNYSRTSPSKRPNARVGSEHSLLDPPGKSKVPRDWREQVLRHIEAKKLEKMPLSNGQMGQPLRPQANYSQIHHPPQASVARHPSREQLIDYLMLKVAHQPPYTQPHCSPRQGHELAKQEIRVRVEKDPELGFSISGGVGGRGNPFRPDDDGIFVTRVQPEGPASKLLQPGDKIIQANGYSFINIEHGQAVSLLKTFQNTVELIIVREVSS

SEQ ID NO: 27920 - protein, 610 aa, Homo sapiens
  REGION 1..610: note = ENSP00000397833
MTTKRSLFVRLVPCRCLRGEEETVTTLDYSHCSLEQVPKEIFTFEKTLEELYLDANQIEELPKQLFNCQSLHKLSLPDNDLTTLPASIANLINLRELDVSKNGIQEFPENIKNCKVLTIVEASVNPISKLPDGFSQLLNLTQLYLNDAFLEFLPANFGRLTKLQILELRENQLKMLPKTMNRLTQLERLDLGSNEFTEVPEVLEQLSGLKEFWMDANRLTFIPGFIGSLKQLTYLDVSKNNIEMVEEGISTCENLQDLLLSSNSLQQLPETIGSLKNITTLKIDENQLMYLPDSIGGLISVEELDCSFNEVEALPSSIGQLTNLRTFAADHNYLQQLPPEIGSWKNITVLFLHSNKLETLPEEMGDMQKLKVINLSDNRLKNLPFSFTKLQQLTAMWLSDNQSMLSRSFNSNFTTVSSFHCGSSRDLHGSQGSLALSVADRRGSGGHIFRMPLSNGQMGQPLRPQANYSQIHHPPQASVARHPSREQLIDYLMLKVAHQPPYTQPHCSPRQGHELAKQEIRVRVEKDPELGFSISGGVGGRGNPFRPDDDGIFVTRVQPEGPASKLLQPGDKIIQANGYSFINIEHGQAVSLLKTFQNTVELIIVREVSS

SEQ ID NO: 27921 - protein, 1346 aa, Homo sapiens
  REGION 1..1346: note = ENSP00000370325
MTTKRSLFVRLVPCRCLRGEEETVTTLDYSHCSLEQVPKEIFTFEKTLEELYLDANQIEELPKQLFNCQSLHKLSLPDNDLTTLPASIANLINLRELDVSKNGIQEFPENIKNCKVLTIVEASVNPISKLPDGFSQLLNLTQLYLNDAFLEFLPANFGRLTKLQILELRENQLKMLPKTMNRLTQLERLDLGSNEFTEVPEVLEQLSGLKEFWMDANRLTFIPGFIGSLKQLTYLDVSKNNIEMVEEGISTCENLQDLLLSSNSLQQLPETIGSLKNITTLKIDENQLMYLPDSIGGLISVEELDCSFNEVEALPSSIGQLTNLRTFAADHNYLQQLPPEIGSWKNITVLFLHSNKLETLPEEMGDMQKLKVINLSDNRLKNLPFSFTKLQQLTAMWLSDNQSKPLIPLQKETDSETQKMVLTNYMFPQQPRTEDVMFISDNESFNPSLWEEQRKQRAQVAFECDEDKDEREAPPREGNLKRYPTPYPDELKNMVKTVQTIVHRLKDEETNEDSGRDLKPHEDQQDINKDVGVKTSESTTTVKSKVDEREKYMIGNSVQKISEPEAEISPGSLPVTANMKASENLKHIVNHDDVFEESEELSSDEEMKMAEMRPPLIETSINQPKVVALSNNKKDDTKETDSLSDEVTHNSNQNNSNCSSPSRMSDSVSLNTDSSQDTSLCSPVKQTHIDINSKIRQEDENFNSLLQNGDILNSSTEEKFKAHDKKDFNLPEYDLNVEERLVLIEKSVDSTATADDTHKLDHINMNLNKLITNDTFQPEIMERSKTQDIVLGTSFLSINSKEETEHLENGNKYPNLESVNKVNGHSEETSQSPNRTEPHDSDCSVDLGISKSTEDLSPQKSGPVGSVVKSHSITNMEIGGLKIYDILSDNGPQQPSTTVKITSAVDGKNIVRSKSATLLYDQPLQVFTGSSSSSDLISGTKAIFKFDSNHNPEEPNIIRGPTSGPQSAPQIYGPPQYNIQYSSSAAVKDTLWHSKQNPQIDHASFPPQLLPRSESTENQSYAKHSANMNFSNHNNVRANTAYHLHQRLGPARHGEMWAISPNDRLIPAVTRSTIQRQSSVSSTASVNLGDPGSTRRAQIPEGDYLSYREFHSAGRTPPMMPGSQRPLSARTYSIDGPNASRPQSARPSINEIPERTMSVSDFNYSRTSPSKRPNARVGSEHSLLDPPGKSKVPRDWREQVLRHIEAKKLEKMPLSNGQMGQPLRPQANYSQIHHPPQASVARHPSREQLIDYLMLKVAHQPPYTQPHCSPRQGHELAKQEIRVRVEKDPELGFSISGGVGGRGNPFRPDDDANGYSFINIEHGQAVSLLKTFQNTVELIIVREVSS

SEQ ID NO: 27922 - protein, 1367 aa, Homo sapiens
  REGION 1..1367: note = ENSP00000422766
MTTKRSLFVRLVPCRCLRGEEETVTTLDYSHCSLEQVPKEIFTFEKTLEELYLDANQIEELPKQLFNCQSLHKLSLPDNDLTTLPASIANLINLRELDVSKNGIQEFPENIKNCKVLTIVEASVNPISKLPDGFSQLLNLTQLYLNDAFLEFLPANFGRLTKLQILELRENQLKMLPKTMNRLTQLERLDLGSNEFTEVPEVLEQLSGLKEFWMDANRLTFIPGFIGSLKQLTYLDVSKNNIEMVEEGISTCENLQDLLLSSNSLQQLPETIGSLKNITTLKIDENQLMYLPDSIGGLISVEELDCSFNEVEALPSSIGQLTNLRTFAADHNYLQQLPPEIGSWKNITVLFLHSNKLETLPEEMGDMQKLKVINLSDNRLKNLPFSFTKLQQLTAMWLSDNQSKPLIPLQKETDSETQKMVLTNYMFPQQPRTEDVMFISDNESFNPSLWEEQRKQRAQVAFECDEDKDEREAPPREGNLKRYPTPYPDELKNMVKTVQTIVHRLKDEETNEDSGRDLKPHEDQQDINKDTSESTTTVKSKVDEREKYMIGNSVQKISEPEAEISPGSLPVTANMKASENLKHIVNHDDVFEESEELSSDEEMKMAEMRPPLIETSINQPKVVALSNNKKDDTKETDSLSDEVTHNSNQNNSNCSSPSRMSDSVSLNTDSSQDTSLCSPVKQTHIDINSKIRQEDENFNSLLQNGDILNSSTEEKFKAHDKKDFNLPEYDLNVEERLVLIEKSVDSTATADDTHKLDHINMNLNKLITNDTFQPEIMERSKTQDIVLGTSFLSINSKEETEHLENGNKYPNLESVNKVNGHSEETSQSPNRTEPHDSDCSVDLGISKSTEDLSPQKSGPVGSVVKSHSITNMEIGGLKIYDILSDNGPQQPSTTVKITSAVDGKNIVRSKSATLLYDQPLQVFTGSSSSSDLISGTKAIFKFDSNHNPEEPNIIRGPTSGPQSAPQIYGPPQYNIQYSSSAAVKDTLWHSKQNPQIDHASFPPQLLPRSESTENQSYAKHSANMNFSNHNNVRANTAYHLHQRLGPARHGEMWAISPNDRLIPAVTRSTIQRQSSVSSTASVNLGDPGSTRRAQIPEGDYLSYREFHSAGRTPPMMPGSQRPLSARTYSIDGPNASRPQSARPSINEIPERTMSVSDFNYSRTSPSKRPNARVGSEHSLLDPPGKSKVPRDWREQVLRHIEAKKLEKMPLSNGQMGQPLRPQANYSQIHHPPQASVARHPSREQLIDYLMLKVAHQPPYTQPHCSPRQGHELAKQEIRVRVEKDPELGFSISGGVGGRGNPFRPDDDGIFVTRVQPEGPASKLLQPGDKIIQANGYSFINIEHGQAVSLLKTFQNTVELIIVREVSS

SEQ ID NO: 27923 - protein, 1419 aa, Homo sapiens
  REGION 1..1419: note = ENSP00000426632
MTTKRSLFVRLVPCRCLRGEEETVTTLDYSHCSLEQVPKEIFTFEKTLEELYLDANQIEELPKQLFNCQSLHKLSLPDNDLTTLPASIANLINLRELDVSKNGIQEFPENIKNCKVLTIVEASVNPISKLPDGFSQLLNLTQLYLNDAFLEFLPANFGRLTKLQILELRENQLKMLPKTMNRLTQLERLDLGSNEFTEVPEVLEQLSGLKEFWMDANRLTFIPGFIGSLKQLTYLDVSKNNIEMVEEGISTCENLQDLLLSSNSLQQLPETIGSLKNITTLKIDENQLMYLPDSIGGLISVEELDCSFNEVEALPSSIGQLTNLRTFAADHNYLQQLPPEIGSWKNITVLFLHSNKLETLPEEMGDMQKLKVINLSDNRLKNLPFSFTKLQQLTAMWLSDNQSKPLIPLQKETDSETQKMVLTNYMFPQQPRTEDVMFISDNESFNPSLWEEQRKQRAQVAFECDEDKDEREAPPREGNLKRYPTPYPDELKNMVKTVQTIVHRLKDEETNEDSGRDLKPHEDQQDINKDVGVKTSESTTTVKSKVDEREKYMIGNSVQKISEPEAEISPGSLPVTANMKASENLKHIVNHDDVFEESEELSSDEEMKMAEMRPPLIETSINQPKVVALSNNKKDDTKETDSLSDEVTHNSNQNNSNCSSPSRMSDSVSLNTDSSQDTSLCSPVKQTHIDINSKIRQEDENFNSLLQNGDILNSSTEEKFKAHDKKDFNLPEYDLNVEERLVLIEKSVDSTATADDTHKLDHINMNLNKLITNDTFQPEIMERSKTQDIVLGTSFLSINSKEETEHLENGNKYPNLESVNKVNGHSEETSQSPNRTEPHDSDCSVDLGISKSTEDLSPQKSGPVGSVVKSHSITNMEIGGLKIYDILSDNGPQQPSTTVKITSAVDGKNIVRSKSATLLYDQPLQVFTGSSSSSDLISGTKAIFKFDSNHNPEEPNIIRGPTSGPQSAPQIYGPPQYNIQYSSSAAVKDTLWHSKQNPQIDHASFPPQLLPRSESTENQSYAKHSANMNFSNHNNVRANTAYHLHQRLGPARHGEMWAISPNDRLIPAVTRSTIQRQSSVSSTASVNLGDPGSTRRAQIPEGDYLSYREFHSAGRTPPMMPGSQRPLSARTYSIDGPNASRPQSARPSINEIPERTMSVSDFNYSRTSPSKRPNARVGSEHSLLDPPGKSKVPRDWREQVLRHIEAKKLEKSMLSRSFNSNFTTVSSFHCGSSRDLHGSQGSLALSVADRRGSGGHIFRMPLSNGQMGQPLRPQANYSQIHHPPQASVARHPSREQLIDYLMLKVAHQPPYTQPHCSPRQGHELAKQEIRVRVEKDPELGFSISGGVGGRGNPFRPDDDGIFVTRVQPEGPASKLLQPGDKIIQANGYSFINIEHGQAVSLLKTFQNTVELIIVREVSS

SEQ ID NO: 27924 - protein, 1302 aa, Homo sapiens
  REGION 1..1302: note = ENSP00000422015
MTTKRSLFVRLVPCRCLRGEEETVTTLDYSHCSLEQVPKEIFTFEKTLEELYLDANQIEELPKQLFNCQSLHKLSLPDNDLTTLPASIANLINLRELDVSKNGIQEFPENIKNCKVLTIVEASVNPISKLPDGFSQLLNLTQLYLNDAFLEFLPANFGRLTKLQILELRENQLKMLPKTMNRLTQLERLDLGSNEFTEVPEVLEQLSGLKEFWMDANRLTFIPGFIGSLKQLTYLDVSKNNIEMVEEGISTCENLQDLLLSSNSLQQLPETIGSLKNITTLKIDENQLMYLPDSIGGLISVEELDCSFNEVEALPSSIGQLTNLRTFAADHNYLQQLPPEIGSWKNITVLFLHSNKLETLPEEMGDMQKLKVINLSDNRLKNLPFSFTKLQQLTAMWLSDNQSKPLIPLQKETDSETQKMVLTNYMFPQQPRTEDVMFISDNESFNPSLWEEQRKQRAQVAFECDEDKDEREAPPREGNLKRYPTPYPDELKNMVKTVQTIVHRLKDEETNEDSGRDLKPHEDQQDINKDVGVKTSESTTTVKSKVDEREKYMIGNSVQKISEPEAEISPGSLPVTANMKASENLKHIVNHDDVFEESEELSSDEEMKMAEMRPPLIETSINQPKVVALSNNKKDDTKETDSLSDEVTHNSNQNNSNCSSPSRMSDSVSLNTDSSQDTSLCSPVKQTHIDINSKIRQEDENFNSLLQNGDILNSSTEEKFKAHDKKDFNLPEYDLNVEERLVLIEKSVDSTATADDTHKLDHINMNLNKLITNDTFQPEIMERSKTQDIVLGTSFLSINSKEETEHLENGNKYPNLESVNKVNGHSEETSQSPNRTEPHDSDCSVDLGISKSTEDLSPQKSGPVGSVVKSHSITNMEIGGLKIYDILSDNGPQQPSTTVKITSAVDGKNIVRSKSATLLYDQPLQVFTGSSSSSDLISGTKAIFKFDSNHNPEEPNIIRGPTSGPQSAPQIYGPPQYNIQYSSSAAVKDTLWHSKQNPQIDHASFPPQLLPRSESTENQSYAKHSANMNFSNHNNVRANTAYHLHQRLGPARHGEMWAISPNDRLIPAVTRSTIQRQSSVSSTASVNLGDPGSTRRAQIPEGDYLSYREFHSAGRTPPMMPGSQRPLSARTYSIDGPNASRPQSARPSINEIPERTMSVSDFNYSRTSPSKRPNARVGSEHSLLDPPGKSKVPRDWREQVLRHIEAKKLEKIRVRVEKDPELGFSISGGVGGRGNPFRPDDDGIFVTRVQPEGPASKLLQPGDKIIQANGYSFINIEHGQAVSLLKTFQNTVELIIVREVSS

SEQ ID NO: 27925 - protein, 197 aa, Homo sapiens
  REGION 1..197: note = ENSP00000425728
  VARIANT 1: note = Any amino acid
XSYREFHSAGRTPPMMPGSQRPLSARTYSIDGPNASRPQSARPSINEIPERTMSVSDFNYSRTSPSKRPNARVGSEHSLLDPPGKSKVPRDWREQVLRHIEAKKLEKSMLSRSFNSNFTTVSSFHCGSSRDLHGSQGSLALSVADRRGSGGHIFRKHPQTSSSGDPCQDGIFISGQQNYSSATLSHKDVPPDSLMKV

SEQ ID NO: 27926 - protein, 158 aa, Homo sapiens
  REGION 1..158: note = ENSP00000423959
SMLSRSFNSNFTTVSSFHCGSSRDLHGSQGSLALSVADRRGSGGHIFRKHPQTSSSGDPCQDGIFISGQQNYSSATLSHKDVPPDSLMKMPLSNGQMGQPLRPQANYSQIHHPPQASVARHPSREQLIDYLMLKVAHQPPYTQPHCSPRQGHELAKQE

SEQ ID NO: 27927 - protein, 1302 aa, Homo sapiens; identical to SEQ ID NO: 27924
  REGION 1..1302: note = ENSP00000370322

SEQ ID NO: 27928 - protein, 957 aa, Homo sapiens
  REGION 1..957: note = ENSP00000288221
MYGSARTITNLEGSPSRSPRLPRSPRLGHRRTSSGGGGGTGKTLSMENIQSLNAAYATSGPMYLSDHEGVASTTYPKGTMTLGRATNRAVYGGRVTAMGSSPNIASAGLSHTDVLSYTDQHGGLTGSSHHHHHQVPSMLRQVRDSTMLDLQAQLKELQRENDLLRKELDIKDSKLGSSMNSIKTFWSPELKKERVLRKEEAARMSVLKEQMRVSHEENQHLQLTIQALQDELRTQRDLNHLLQQESGNRGAEHFTIELTEENFRRLQAEHDRQAKELFLLRKTLEEMELRIETQKQTLNARDESIKKLLEMLQSKGLPSKSLEDDNERTRRMAEAESQVSHLEVILDQKEKENIHLREELHRRSQLQPEPAKTKALQTVIEMKDTKIASLERNIRDLEDEIQMLKANGVLNTEDREEEIKQIEVYKSHSKFMKTKIDQLKQELSKKESELLALQTKLETLSNQNSDCKQHIEVLKESLTAKEQRAAILQTEVDALRLRLEEKESFLNKKTKQLQDLTEEKGTLAGEIRDMKDMLEVKERKINVLQKKIENLQEQLRDKDKQLTNLKDRVKSLQTDSSNTDTALATLEEALSEKERIIERLKEQRERDDRERLEEIESFRKENKDLKEKVNALQAELTEKESSLIDLKEHASSLASAGLKRDSKLKSLEIAIEQKKEECSKLEAQLKKAHNIEDDSRMNPEFADQIKQLDKEASYYRDECGKAQAEVDRLLEILKEVENEKNDKDKKIAELESLTLRHMKDQNKKVANLKHNQQLEKKKNAQLLEEVRRREDSMADNSQHLQIEELMNALEKTRQELDATKARLASTQQSLAEKEAHLANLRIERRKQLEEILEMKQEALLAAISEKDANIALLELSASKKKKTQEEVMALKREKDRLVHQLKQQTQNRMKLMADNYDDDHHHYHHHHHHHHHRSPGRSQHSNHRPSPDQDDEEGIWA

SEQ ID NO: 27929 - protein, 957 aa, Homo sapiens; identical to SEQ ID NO: 27928
  REGION 1..957: note = ENSP00000417445

SEQ ID NO: 27930 - protein, 528 aa, Homo sapiens
  REGION 1..528: note = ENSP00000417280
  VARIANT 1: note = Any amino acid
XRSQLQPEPAKTKALQTVIEMKDTKIASLERNIRDLEDEIQMLKANGVLNTEDREEEIKQIEVYKSHSKFMKTKIDQLKQELSKKESELLALQTKLETLSNQNSDCKQHIEVLKESLTAKEQRAAILQTEVDALRLRLEEKESFLNKKTKQLQDLTEEKGTLAGEIRDMKDMLEVKERKINVLQKKIENLQEQLRDKDKQLTNLKDRVKSLQTDSSNTDTALATLEEALSEKERIIERLKEQRERDDRERLEEIESFRKENKDLKEKVNALQAELTEKESSLIDLKEHASSLASAGLKRDSKLKSLEIAIEQKKEECSKLEAQLKKQAEQLFNQMYNPAHNIEDDSRMNPEFADQIKQLDKEASYYRDECGKAQAEVDRLLEILKEVENEKNDKDKKIAELERHMKDQNKKVANLKHNQQLEKKKNAQLLEEVRRREDSMADNSQHLQIEELMNALEKTRQELDATKARLASTQQSLAEKEAHLANLRIERRKQLEEILEMKQEALLAAISEKDANIALLELSASKKK

SEQ ID NO: 27931 - protein, 957 aa, Homo sapiens; identical to SEQ ID NO: 27928
  REGION 1..957: note = ENSP00000483127

SEQ ID NO: 27932 - protein, 290 aa, Homo sapiens
  REGION 1..290: note = ENSP00000377374
MPFDFRRFDIYRKVPKDLTQPTYTGAIISICCCLFILFLFLSELTGFITTEVVNELYVDDPDKDSGGKIDVSLNISLPNLHCELVGLDIQDEMGRHEVGHIDNSMKIPLNNGAGCRFEGQFSINKVPGNFHVSTHSATAQPQNPDMTHVIHKLSFGDTLQVQNIHGAFNALGGADRLTSNPLASHDYILKIVPTVYEDKSGKQRYSYQYTVANKEYVAYSHTGRIIPAIWFRYDLSPITVKYTERRQPLYRFITTICAIIGGTFTVAGILDSCIFTASEAWKKIQLGKMH

SEQ ID NO: 27933 - protein, 70 aa, Homo sapiens
  REGION 1..70: note = ENSP00000489795
MPFDFRRFDIYRKVPKDLTQPTYTGAIISICCCLFILFLFLSELTGFITTEVPTLGEESVQASWQWLTQS

SEQ ID NO: 27934 - protein, 55 aa, Homo sapiens
  REGION 1..55: note = ENSP00000428064
MPFDFRRFDIYRKVPKDLTQPTYTGAIISICCCLFILFLFLSELTGFITTEVGWA

SEQ ID NO: 27935 - protein, 138 aa, Homo sapiens
  REGION 1..138: note = ENSP00000427713
MPFDFRRFDIYRKVPKDLTQPTYTGAIISICCCLFILFLFLSELTGFITTEVVNELYVDDPDKDSGGKIDVSLNISLPNLHCELVGLDIQDEMGRHEVGHIDNSMKIPLNNGAGCRFEGQFSINKEVDQQPDVRVCVF

SEQ ID NO: 27936 - protein, 105 aa, Homo sapiens
  REGION 1..105: note = ENSP00000429501
MERWAMRVNELYVDDPDKDSGGKIDVSLNISLPNLHCELVGLDIQDEMGRHEVGHIDNSMKIPLNNGAGCRFEGQFSINKVPGNFHVSTHSATAQPQNPDMTHVI

SEQ ID NO: 27937 - protein, 159 aa, Homo sapiens
  REGION 1..159: note = ENSP00000325127
MERWAMRVNELYVDDPDKDSGGKIDVSLNISLPNLHCELVGLDIQDEMGRHEVGHIDNSMKIPLNNGAGCRFEGQFSINKVWKPCLSPFYLLPFPAVSPLPGNWLWRHSLDLTLTQPPASEGSCPAAWPFLLRIWMGVQAPWGFKPLMAGSGRSYSSLQ

SEQ ID NO: 27938 - protein, 54 aa, Homo sapiens
  REGION 1..54: note = ENSP00000428116
  VARIANT 1: note = Any amino acid
XVNELYVDDPDKDSGGKIDVSLNISLPNLHCEFFGPQTMSSWRSPARPAPAMDE

SEQ ID NO: 27939 - protein, 374 aa, Homo sapiens
  REGION 1..374: note = ENSP00000315614
MGCSSSALNKAGDSSRFPSVTSNEHFSTAEESESCFAQPKPHALGRESTVDGNVQRESRPPLQKLKVSAEPTANGVKPLQEQPLAKDVAPGRDATDQSGSTEKTQPGEGLEESGPPQPGGKEDAPAAEGKKKDAGAGTEAESLKGNAEAQPLGPEAKGQPLQAAVEKDSLRAVEVTENPQTAAEMKPLGTTENVLTLQIAGELQPQGTVGKDEQAPLLETISKENESPEILEGSQFVETAEEQQLQATLGKEEQPQLLERIPKENVTPEVLDRSQLVEKPVMNDPFHKTPEGPGNMEQIQPEGIVGSMEHPARNVEAGAYVEMIRNIHTNEEDQRIEGETGEKVETDMENEKVSEGAETKEEETGEVVDLSAAT

SEQ ID NO: 27940 - protein, 56 aa, Homo sapiens
  REGION 1..56: note = ENSP00000440297
MGCSSSALNKAGDSSRFPSGETGEKVETDMENEKVSEGAETKEEETGEVVDLSAAT

SEQ ID NO: 27941 - protein, 284 aa, Homo sapiens
  REGION 1..284: note = ENSP00000387047
MTDVPATFTQAECNGDKPPENGQQTITKISEELTDVDSPLPHYRVEPSLEGALTKGSQEERRKLQGNMLLNSSMEDKMLKENPEEKLFIVHKAITDLSLQETSADEMTFREGHQWEKIPLSGSNQEIRRQKERITEQPLKEEEDEDRKNKGHQAAEIEWLGFRKPSQADMLHSKHDEEQKVWDEEIDDDDDDNCNNDEDEVRVIEFKKKHEEVSQFKEEGDASEDSPLSSASSQAVTPDEQPTLGKKSDISRNAYSRYNTISYRKIRKGNTKQRIDEFESMMHL

SEQ ID NO: 27942 - protein, 297 aa, Homo sapiens
  REGION 1..297: note = ENSP00000380453
MKTLSPDRIQPHIMTDVPATFTQAECNGDKPPENGQQTITKISEELTDVDSPLPHYRVEPSLEGALTKGSQEERRKLQGNMLLNSSMEDKMLKENPEEKLFIVHKAITDLSLQETSADEMTFREGHQWEKIPLSGSNQEIRRQKERITEQPLKEEEDEDRKNKGHQAAEIEWLGFRKPSQADMLHSKHDEEQKVWDEEIDDDDDDNCNNDEDEVRVIEFKKKHEEVSQFKEEGDASEDSPLSSASSQAVTPDEQPTLGKKSDISRNAYSRYNTISYRKIRKGNTKQRIDEFESMMHL

SEQ ID NO: 27943 - protein, 84 aa, Homo sapiens
  REGION 1..84: note = ENSP00000387339
MTDVPATFTQAECNGDKPPENGQQTITKISEELTDVDSPLPHYRVEPSLEGALTKGSQEERRKLQGNMLLNSSMEDKMLKGWSI

SEQ ID NO: 27944 - protein, 264 aa, Homo sapiens
  REGION 1..264: note = ENSP00000410646
MTDVPATFTQAECNGDKPPENGQQTITKISEELTDVDSPLPHYRVEPSLEGALTKGSQEERRKLQGNMLLNSSMEDKMLKETSADEMTFREGHQWEKIPLSGSNQEIRRQKERITEQPLKEEEDEDRKNKGHQAAEIEWLGFRKPSQADMLHSKHDEEQKVWDEEIDDDDDDNCNNDEDEVRVIEFKKKHEEVSQFKEEGDASEDSPLSSASSQAVTPDEQPTLGKKSDISRNAYSRYNTISYRKIRKGNTKQRIDEFESMMHL

SEQ ID NO: 27945 - protein, 160 aa, Homo sapiens
  REGION 1..160: note = ENSP00000398149
MTDVPATFTQAECNGDKPPENGQQTITKISEELTDVDSPLPHYRVEPSLEGALTKGSQEERRKLQGNMLLNSSMEDKMLKENPEEKLFIVHKAITDLSLQETSADEMTFREGHQWEKIPLSGSNQEIRRQKERITEQPLKEEEDEDRKNKGHQAAEIEWL

SEQ ID NO: 27946 - protein, 152 aa, Homo sapiens
  REGION 1..152: note = ENSP00000389595
MTDVPATFTQAECNGDKPPENGQQTITKISEELTDVDSPLPHYRVEPSLEGALTKGSQEERRKLQGNMLLNSSMEDKMLKENPEEKLFIVHKAITDLSLQETSADEMTFREGHQWEKIPLSGSNQEIRRQKERITEQPLKEEEDEDRKNKGH

SEQ ID NO: 27947 - protein, 146 aa, Homo sapiens
  REGION 1..146: note = ENSP00000387049
MTDVPATFTQAECNGDKPPENGQQTITKISEELTDVDSPLPHYRVEPSLEGALTKGSQEERRKLQGNMLLNSSMEDKMLKENPEEKLFIVHKAITDLSLQETSADEMTFREDGVSLLLPRLECNGAISADCNLCLQGSSDSPASAS

SEQ ID NO: 27948 - protein, 146 aa, Homo sapiens; identical to SEQ ID NO: 27947
  REGION 1..146: note = ENSP00000387325

SEQ ID NO: 27949 - protein, 111 aa, Homo sapiens
  REGION 1..111: note = ENSP00000410934
MTDVPATFTQAECNGDKPPENGQQTITKISEELTDVDSPLPHYRVEPSLEGALTKGSQEERRKLQGNMLLNSSMEDKMLKEEKLFIVHKAITDLSLQETSADEMTFREGHQ

SEQ ID NO: 27950 - protein, 508 aa, Homo sapiens
  REGION 1..508: note = ENSP00000424992
MLLNRMSSDDRHLGSSCGSFIKTEPSSPSSGIDALSHHSPSGSSDASGGFGLALGTHANGLDSPPMFAGAGLGGTPCRKSYEDCASGIMEDSAIKCEYMLNAIPKRLCLVCGDIASGYHYGVASCEACKAFFKRTIQGNIEYSCPATNECEITKRRRKSCQACRFMKCLKVGMLKEGVRLDRVRGGRQKYKRRLDSESSPYLSLQISPPAKKPLTKIVSYLLVAEPDKLYAMPPPGMPEGDIKALTTLCDLADRELVVIIGWAKHIPGFSSLSLGDQMSLLQSAWMEILILGIVYRSLPYDDKLVYAEDYIMDEEHSRLAGLLELYRAILQLVRRYKKLKVEKEEFVTLKALALANSDSMYIEDLEAVQKLQDLLHEALQDYELSQRHEEPWRTGKLLLTLPLLRQTAAKAVQHFYSVKLQGKVPMHKLFLEMLEAKVGQEQLRGSPKDERMSSHDGKCPFQSAAFTSRDQSNSPGIPNPRPSSPTPLNERGRQISPSTRTPGGQGKH

SEQ ID NO: 27951 - protein, 500 aa, Homo sapiens
  REGION 1..500: note = ENSP00000423004
MSSDDRHLGSSCGSFIKTEPSSPSSGIDALSHHSPSGSSDASGGFGLALGTHANGLDSPPMFAGAGLGGTPCRKSYEDCASGIMEDSAIKCEYMLNAIPKRLCLVCGDIASGYHYGVASCEACKAFFKRTIQGNIEYSCPATNECEITKRRRKSCQACRFMKCLKVGMLKEGVRLDRVRGGRQKYKRRLDSESSPYLSLQISPPAKKPLTKIVSYLLVAEPDKLYAMPPPGMPEGDIKALTTLCDLADRELVVIIGWAKHIPGFSSLSLGDQMSLLQSAWMEILILGIVYRSLPYDDKLVYAEDYIMDEEHSRLAGLLELYRAILQLVRRYKKLKVEKEEFVTLKALALANSDSMYIEDLEAVQKLQDLLHEALQDYELSQRHEEPWRTGKLLLTLPLLRQTAAKAVQHFYSVKLQGKVPMHKLFLEMLEAKAWARADSLQEWRPLEQVPSPLHRATKRQHVHFLTPLPPPPSVAWVGTAQAGYHLEVFLPQRAGWPRAA

SEQ ID NO: 27952 - protein, 508 aa, Homo sapiens
  REGION 1..508: note = ENSP00000370270
MSSDDRHLGSSCGSFIKTEPSSPSSGIDALSHHSPSGSSDASGGFGLALGTHANGLDSPPMFAGAGLGGTPCRKSYEDCASGIMEDSAIKCEYMLNAIPKRLCLVCGDIASGYHYGVASCEACKAFFKRTIQGNIEYSCPATNECEITKRRRKSCQACRFMKCLKVGMLKEGVRLDRVRGGRQKYKRRLDSESSPYLSLQISPPAKKPLTKIVSYLLVAEPDKLYAMPPPGMPEGDIKALTTLCDLADRELVVIIGWAKHIPGFSSLSLGDQMSLLQSAWMEILILGIVYRSLPYDDKLVYAEDYIMDEEHSRLAGLLELYRAILQLVRRYKKLKVEKEEFVTLKALALANSDSMYIEDLEAVQKLQDLLHEALQDYELSQRHEEPWRTGKLLLTLPLLRQTAAKAVQHFYSVKLQGKVPMHKLFLEMLEAKVGQEQLRGSPKDERMSSHDGKCPFQSAAFTSRDQSNSPGIPNPRPSSPTPLNERGRQISPSTRTPGGQGKHLWLTM

SEQ ID NO: 27953 - protein, 433 aa, Homo sapiens
  REGION 1..433: note = ENSP00000451658
MSSDDRHLGSSCGSFIKTEPSSPSSGIDALSHHSPSGSSDASGGFGLALGTHANGLDSPPMFAGAGLGGTPCRKSYEDCASGIMEDSAIKCEYMLNAIPKRLCLVCGDIASGYHYGVASCEACKAFFKRTIQGNIEYSCPATNECEITKRRRKSCQACRFMKCLKVGMLKEGVRLDRVRGGRQKYKRRLDSESSPYLSLQISPPAKKPLTKIVSYLLVAEPDKLYAMPPPGMPEGDIKALTTLCDLADRELVVIIGWAKHIPGFSSLSLGDQMSLLQSAWMEILILGIVYRSLPYDDKLVYAEDYIMDEEHSRLAGLLELYRAILQLVRRYKKLKVEKEEFVTLKALALANSDSMYIEDLEAVQKLQDLLHEALQDYELSQRHEEPWRTGKLLLTLPLLRQTAAKAVQHFYSVKLQGKVPMHKLFLEMLEAKV

SEQ ID NO: 27954 - protein, 508 aa, Homo sapiens; identical to SEQ ID NO: 27952
  REGION 1..508: note = ENSP00000422488

SEQ ID NO: 27955 - protein, 53 aa, Homo sapiens
  REGION 1..53: note = ENSP00000466958
MSIAGVAAQEIRVPLKTGFLHNGRAMGNMRKTYWSSRSEFKNTGRKLPGTVGD

SEQ ID NO: 27956 - protein, 462 aa, Homo sapiens
  REGION 1..462: note = ENSP00000366702
MSIAGVAAQEIRVPLKTGFLHNGRAMGNMRKTYWSSRSEFKNNFLNIDPITMAYSLNSSAQERLIPLGHASKSAPMNGHCFAENGPSQKSSLPPLLIPPSENLGPHEEDQVVCGFKKLTVNGVCASTPPLTPIKNSPSLFPCAPLCERGSRPLPPLPISEALSLDDTDCEVEFLTSSDTDFLLEDSTLSDFKYDVPGRRSFRGCGQINYAYFDTPAVSAADLSYVSDQNGGVPDPNPPPPQTHRRLRRSHSGPAGSFNKPAIRISNCCIHRASPNSDEDKPEVPPRVPIPPRPVKPDYRRWSAEVTSSTYSDEDRPPKVPPREPLSPSNSRTPSPKSLPSYLNGVMPPTQSFAPDPKYVSSKALQRQNSEGSASKVPCILPIIENGKKVSSTHYYLLPERPPYLDKYEKFFREAEETNGGAQIQPLPADCGISSATEKPDSKTKMDLGGHVKRKHLSYVVSP

SEQ ID NO: 27957 - protein, 79 aa, Homo sapiens
  REGION 1..79: note = ENSP00000465100
MSIAGVAAQEIRVPLKTGFLHNGRAMGNMRKTYWSSRSEFKNNFLNIDPITMAYSLNSSAQERLIPLGMYSENLITVSI

SEQ ID NO: 27958 - protein, 74 aa, Homo sapiens
  REGION 1..74: note = ENSP00000466454
MSIAGVAAQEIRVPLKTGFLHNGRAMGNMRKTYWSSRSEFKKACFQICSDEWPLLCRKWSISKVQLAPSSYSPK

SEQ ID NO: 27959 - protein, 52 aa, Homo sapiens
  REGION 1..52: note = ENSP00000467030
MSIAGVAAQEIRVPLKTGFLHNGRAMGNMRKTYWSSRSEFKNFLSFQQLFKY

SEQ ID NO: 27960 - protein, 435 aa, Homo sapiens
  REGION 1..435: note = ENSP00000355907
MSNKDRHIDSSCSSFIKTEPSSPASLTDSVNHHSPGGSSDASGSYSSTMNGHQNGLDSPPLYPSAPILGGSGPVRKLYDDCSSTIVEDPQTKCEYMLNSMPKRLCLVCGDIASGYHYGVASCEACKAFFKRTIQGNIEYSCPATNECEITKRRRKSCQACRFMKCLKVGMLKEGVRLDRVRGGRQKYKRRIDAENSPYLNPQLVQPAKKPYNKIVSHLLVAEPEKIYAMPDPTVPDSDIKALTTLCDLADRELVVIIGWAKHIPGFSTLSLADQMSLLQSAWMEILILGVVYRSLSFEDELVYADDYIMDEDQSKLAGLLDLNNAILQLVKKYKSMKLEKEEFVTLKAIALANSDSMHIEDVEAVQKLQDVLHEALQDYEAGQHMEDPRRAGKMLMTLPLLRQTSTKAVQHFYNIKLEGKVPMHKLFLEMLEAKV

SEQ ID NO: 27961 - protein, 470 aa, Homo sapiens
  REGION 1..470: note = ENSP00000355904
MWRECDWGLGAVKSDLACVPSAKRLLCRMSNKDRHIDSSCSSFIKTEPSSPASLTDSVNHHSPGGSSDASGSYSSTMNGHQNGLDSPPLYPSAPILGGSGPVRKLYDDCSSTIVEDPQTKCEYMLNSMPKRLCLVCGDIASGYHYGVASCEACKAFFKRTIQGNIEYSCPATNECEITKRRRKSCQACRFMKCLKVGMLKEGVRLDRVRGGRQKYKRRIDAENSPYLNPQLVQPAKKPLLWSDPADNKIVSHLLVAEPEKIYAMPDPTVPDSDIKALTTLCDLADRELVVIIGWAKHIPGFSTLSLADQMSLLQSAWMEILILGVVYRSLSFEDELVYADDYIMDEDQSKLAGLLDLNNAILQLVKKYKSMKLEKEEFVTLKAIALANSDSMHIEDVEAVQKLQDVLHEALQDYEAGQHMEDPRRAGKMLMTLPLLRQTSTKAVQHFYNIKLEGKVPMHKLFLEMLEAKV

SEQ ID NO: 27962 - protein, 458 aa, Homo sapiens
  REGION 1..458: note = ENSP00000386171
MDSVELCLPESFSLHYEEELLCRMSNKDRHIDSSCSSFIKTEPSSPASLTDSVNHHSPGGSSDASGSYSSTMNGHQNGLDSPPLYPSAPILGGSGPVRKLYDDCSSTIVEDPQTKCEYMLNSMPKRLCLVCGDIASGYHYGVASCEACKAFFKRTIQGNIEYSCPATNECEITKRRRKSCQACRFMKCLKVGMLKEGVRLDRVRGGRQKYKRRIDAENSPYLNPQLVQPAKKPYNKIVSHLLVAEPEKIYAMPDPTVPDSDIKALTTLCDLADRELVVIIGWAKHIPGFSTLSLADQMSLLQSAWMEILILGVVYRSLSFEDELVYADDYIMDEDQSKLAGLLDLNNAILQLVKKYKSMKLEKEEFVTLKAIALANSDSMHIEDVEAVQKLQDVLHEALQDYEAGQHMEDPRRAGKMLMTLPLLRQTSTKAVQHFYNIKLEGKVPMHKLFLEMLEAKV

SEQ ID NO: 27963 - protein, 435 aa, Homo sapiens; identical to SEQ ID NO: 27960
  REGION 1..435: note = ENSP00000353108

SEQ ID NO: 27964 - protein, 435 aa, Homo sapiens; identical to SEQ ID NO: 27960
  REGION 1..435: note = ENSP00000354584

SEQ ID NO: 27965 - protein, 435 aa, Homo sapiens; identical to SEQ ID NO: 27960
  REGION 1..435: note = ENSP00000355905

SEQ ID NO: 27966 - protein, 435 aa, Homo sapiens; identical to SEQ ID NO: 27960
  REGION 1..435: note = ENSP00000352077

SEQ ID NO: 27967 - protein, 435 aa, Homo sapiens; identical to SEQ ID NO: 27960
  REGION 1..435: note = ENSP00000419594

SEQ ID NO: 27968 - protein, 396 aa, Homo sapiens
  REGION 1..396: note = ENSP00000418629
MSNKDRHIDSSCSSFIKTEPSSPASLTDSVNHHSPGGSSDASGSYSSTMNGHQNGLDSPPLYPSAPILGGSGPVRKLYDDCSSTIVEDPQTKCEYMLNSMPKRLCLVCGDIASGYHYGVASCEACKAFFKRTIQGVRLDRVRGGRQKYKRRIDAENSPYLNPQLVQPAKKPYNKIVSHLLVAEPEKIYAMPDPTVPDSDIKALTTLCDLADRELVVIIGWAKHIPGFSTLSLADQMSLLQSAWMEILILGVVYRSLSFEDELVYADDYIMDEDQSKLAGLLDLNNAILQLVKKYKSMKLEKEEFVTLKAIALANSDSMHIEDVEAVQKLQDVLHEALQDYEAGQHMEDPRRAGKMLMTLPLLRQTSTKAVQHFYNIKLEGKVPMHKLFLEMLEAKV

SEQ ID NO: 27969 - protein, 435 aa, Homo sapiens; identical to SEQ ID NO: 27960
  REGION 1..435: note = ENSP00000419155

SEQ ID NO: 27970 - protein, 435 aa, Homo sapiens; identical to SEQ ID NO: 27960
  REGION 1..435: note = ENSP00000417374

SEQ ID NO: 27971 - protein, 354 aa, Homo sapiens
  REGION 1..354: note = ENSP00000419514
MSNKDRHIDSSCSSFIKTEPSSPASLTDSVNHHSPGGSSDASGSYSSTMNGHQNGLDSPPLYPSAPILGGSGPVRKLYDDCSSTIVEDPQTKCEYMLNSMPKRLCLVCGDIASGYHYGVASCEACKAFFKRTIQGNIEYSCPATNECEITKRRRKSCQACRFMKCLKVGMLKEGVRLDRVRGGRQKYKRRIDAENSPYLNPQLVQPAKKPYNKIVSHLLVAEPEKIYAMPDPTVPDSDIKALTTLCDLADRELVVIIGWAKHIPGFSTLSLADQMSLLQSAWMEILILGVVYRSLSFEDELVYADDYIMDEDQSKLAGLLDLNNAILQLVKKYKSMKLEKEEFVTLKAIALANS

SEQ ID NO: 27972 - protein, 47 aa, Homo sapiens
  REGION 1..47: note = ENSP00000466343
MWRECDWGLGAVKSDLACVPSAKRREPLAREETGLLMNANRRSSICA

SEQ ID NO: 27973 - protein, 92 aa, Homo sapiens
  REGION 1..92: note = ENSP00000417900
MSNKDRHIDSSCSSFIKTEPSSPASLTDSVNHHSPGGSSDASGSYSSTMNGHQNGLDSPPLYPSAPILGGSGPVRKLYDDCSSTIVEDPQTK

SEQ ID NO: 27974 - protein, 55 aa, Homo sapiens
  REGION 1..55: note = ENSP00000420370
MSNKDRHIDSSCSSFIKTEPSSPASLTDSVNHHSPGGSSDASGSYSSTMNGHQNG

SEQ ID NO: 27975 - protein, 50 aa, Homo sapiens
  REGION 1..50: note = ENSP00000418895
MSNKDRHIDSSCSSFIKTEPSSPASLTDSVNHHSPGGSSDASGSYSSTMN

SEQ ID NO: 27976 - protein, 435 aa, Homo sapiens; identical to SEQ ID NO: 27960
  REGION 1..435: note = ENSP00000481528

SEQ ID NO: 27977 - protein, 435 aa, Homo sapiens; identical to SEQ ID NO: 27960
  REGION 1..435: note = ENSP00000375761

SEQ ID NO: 27978 - protein, 435 aa, Homo sapiens; identical to SEQ ID NO: 27960
  REGION 1..435: note = ENSP00000355225

SEQ ID NO: 27979 - protein, 893 aa, Homo sapiens
  REGION 1..893: note = ENSP00000251527
MTPPSRAEAGVRRSRVPSEGRWRGAEPPGISASTQPASAGRAARHCGAMSGARGEGPEAGAGGAGGRAAPENPGGVLSVELPGLLAQLARSFALLLPVYALGYLGLSFSWVLLALALLAWCRRSRGLKALRLCRALALLEDEERVVRLGVRACDLPAWVHFPDTERAEWLNKTVKHMWPFICQFIEKLFRETIEPAVRGANTHLSTFSFTKVDVGQQPLRINGVKVYTENVDKRQIILDLQISFVGNCEIDLEIKRYFCRAGVKSIQIHGTMRVILEPLIGDMPLVGALSIFFLRKPLLEINWTGLTNLLDVPGLNGLSDTIILDIISNYLVLPNRITVPLVSEVQIAQLRFPVPKGVLRIHFIEAQDLQGKDTYLKGLVKGKSDPYGIIRVGNQIFQSRVIKENLSPKWNEVYEALVYEHPGQELEIELFDEDPDKDDFLGSLMIDLIEVEKERLLDEWFTLDEVPKGKLHLRLEWLTLMPNASNLDKVLTDIKADKDQANDGLSSALLILYLDSARNLPSGKKISSNPNPVVQMSVGHKAQESKIRYKTNEPVWEENFTFFIHNPKRQDLEVEVRDEQHQCSLGNLKVPLSQLLTSEDMTVSQRFQLSNSGPNSTIKMKIALRVLHLEKRERPPDHQHSAQVKRPSVSKEGRKTSIKSHMSGSPGPGGSNTAPSTPVIGGSDKPGMEEKAQPPEAGPQGLHDLGRSSSSLLASPGHISVKEPTPSIASDISLPIATQELRQRLRQLENGTTLGQSPLGQIQLTIRHSSQRNKLIVVVHACRNLIAFSEDGSDPYVRMYLLPDKRRSGRRKTHVSKKTLNPVFDQSFDFSVSLPEVQRRTLDVAVKNSGGFLSKDKGLLGKVLVALASEELAKGWTQWYDLTEDGTRPQAMT

SEQ ID NO: 27980 - protein, 884 aa, Homo sapiens
  REGION 1..884: note = ENSP00000275418
SASTQPASAGRAARHCGAMSGARGEGPEAGAGGAGGRAAPENPGGVLSVELPGLLAQLARSFALLLPVYALGYLGLSFSWVLLALALLAWCRRSRGLKALRLCRALALLEDEERVVRLGVRACDLPAWVHFPDTERAEWLNKTVKHMWPFICQFIEKLFRETIEPAVRGANTHLSTFSFTKVDVGQQPLRINGVKVYTENVDKRQIILDLQISFVGNCEIDLEIKRYFCRAGVKSIQIHGTMRVILEPLIGDMPLVGALSIFFLRKPLLEINWTGLTNLLDVPGLNGLSDTIILDIISNYLVLPNRITVPLVSEVQIAQLRFPVPKGVLRIHFIEAQDLQGKDTYLKGLVKGKSDPYGIIRVGNQIFQSRVIKENLSPKWNEVYEALVYEHPGQELEIELFDEDPDKDDFLGSLMIDLIEVEKERLLDEWFTLDEVPKGKLHLRLEWLTLMPNASNLDKVLTDIKADKDQANDGLSSALLILYLDSARNLPSNPLEFNPDVLKKTAVQRALKSGKKISSNPNPVVQMSVGHKAQESKIRYKTNEPVWEENFTFFIHNPKRQDLEVEVRDEQHQCSLGNLKVPLSQLLTSEDMTVSQRFQLSNSGPNSTIKMKIALRVLHLEKRERPPDHQHSAQVKRPSVSKEGRKTSIKSHMSGSPGPGGSNTAPSTPVIGGSDKPGMEEKAQPPEAGPQGLHDLGRSSSSLLASPGHISVKEPTPSIASDISLPIATQELRQRLRQLENGTTLGQSPLGQIQLTIRHSSQRNKLIVVVHACRNLIAFSEDGSDPYVRMYLLPDKRRSGRRKTHVSKKTLNPVFDQSFDFSVSLPEVQRRTLDVAVKNSGGFLSKDKGLLGKVLVALASEELAKGWTQWYDLTEDGTRPQAMT

SEQ ID NO: 27981 - protein, 921 aa, Homo sapiens
  REGION 1..921: note = ENSP00000481296
MTANRDAALSSHRHPGCAQRPRTPTFASSSQRRSAFGFDDGNFPGLGERSHAPGSRLGARRRAKTARGLRGHRQRGAGAGLSRPGSARAPSPPRPGAPENPGGVLSVELPGLLAQLARSFALLLPVYALGYLGLSFSWVLLALALLAWCRRSRGLKALRLCRALALLEDEERVVRLGVRACDLPAWVHFPDTERAEWLNKTVKHMWPFICQFIEKLFRETIEPAVRGANTHLSTFSFTKVDVGQQPLRINGVKVYTENVDKRQIILDLQISFVGNCEIDLEIKRYFCRAGVKSIQIHGTMRVILEPLIGDMPLVGALSIFFLRKPLLEINWTGLTNLLDVPGLNGLSDTIILDIISNYLVLPNRITVPLVSEVQIAQLRFPVPKGVLRIHFIEAQDLQGKDTYLKGLVKGKSDPYGIIRVGNQIFQSRVIKENLSPKWNEVYEALVYEHPGQELEIELFDEDPDKDDFLGSLMIDLIEVEKERLLDEWFTLDEVPKGKLHLRLEWLTLMPNASNLDKVLTDIKADKDQANDGLSSALLILYLDSARNLPSGKKISSNPNPVVQMSVGHKAQESKIRYKTNEPVWEENFTFFIHNPKRQDLEVEVRDEQHQCSLGNLKVPLSQLLTSEDMTVSQRFQLSNSGPNSTIKMKIALRVLHLEKRERPPDHQHSAQVKRPSVSKEGRKTSIKSHMSGSPGPGGSNTAPSTPVIGGSDKPGMEEKAQPPEAGPQGLHDLGRSSSSLLASPGHISVKEPTPSIASDISLPIATQELRQRLRQLENGTTLGQSPLGQIQLTIRHSSQRNKLIVVVHACRNLIAFSEDGSDPYVRMYLLPDKRRSGRRKTHVSKKTLNPVFDQSFDFSVSLPEVQRRTLDVAVKNSGGFLSKDKGLLGKVLVALASEELAKGWTQWYDLTEDGTRPQAMT

SEQ ID NO: 27982 - protein, 404 aa, Homo sapiens
  REGION 1..404: note = ENSP00000421288
MISLIIPPKDQISRVAKMLADEFGTASNIKSRVNRLSVLGAITSVQQRLKLYNKVPPNGLVVYCGTIVTEEGKEKKVNIDFEPFKPINTSLYLCDNKFHTEALTALLSDDSKFGFIVIDGSGALFGTLQGNTREVLHKFTVDLPKKHGRGGQSALRFARLRMEKRHNYVRKVAETAVQLFISGDKVNVAGLVLAGSADFKTELSQSDMFDQRLQSKVLKLVDISYGGENGFNQAIELSTEVLSNVKFIQEKKLIGRYFDEISQDTGKYCFGVEDTLKALEMGAVEILIVYENLDIMRYVLHCQGTEEEKILYLTPEQEKDKSHFTDKETGQEHELIESMPLLEWFANNYKKFGATLEIVTDKSQEGSQFVKGFGGIGGILRYRVDFQGMEYQGGDDEFFDLDDY

SEQ ID NO: 27983 - protein, 437 aa, Homo sapiens
  REGION 1..437: note = ENSP00000353741
MADDPSAADRNVEIWKIKKLIKSLEAARGNGTSMISLIIPPKDQISRVAKMLADEFGTASNIKSRVNRLSVLGAITSVQQRLKLYNKVPPNGLVVYCGTIVTEEGKEKKVNIDFEPFKPINTSLYLCDNKFHTEALTALLSDDSKFGFIVIDGSGALFGTLQGNTREVLHKFTVDLPKKHGRGGQSALRFARLRMEKRHNYVRKVAETAVQLFISGDKVNVAGLVLAGSADFKTELSQSDMFDQRLQSKVLKLVDISYGGENGFNQAIELSTEVLSNVKFIQEKKLIGRYFDEISQDTGKYCFGVEDTLKALEMGAVEILIVYENLDIMRYVLHCQGTEEEKILYLTPEQEKDKSHFTDKETGQEHELIESMPLLEWFANNYKKFGATLEIVTDKSQEGSQFVKGFGGIGGILRYRVDFQGMEYQGGDDEFFDLDDY

SEQ ID NO: 27984 - protein, 423 aa, Homo sapiens
  REGION 1..423: note = ENSP00000422203
MKQDVLNCTEGPIHSNGTSMISLIIPPKDQISRVAKMLADEFGTASNIKSRVNRLSVLGAITSVQQRLKLYNKVPPNGLVVYCGTIVTEEGKEKKVNIDFEPFKPINTSLYLCDNKFHTEALTALLSDDSKFGFIVIDGSGALFGTLQGNTREVLHKFTVDLPKKHGRGGQSALRFARLRMEKRHNYVRKVAETAVQLFISGDKVNVAGLVLAGSADFKTELSQSDMFDQRLQSKVLKLVDISYGGENGFNQAIELSTEVLSNVKFIQEKKLIGRYFDEISQDTGKYCFGVEDTLKALEMGAVEILIVYENLDIMRYVLHCQGTEEEKILYLTPEQEKDKSHFTDKETGQEHELIESMPLLEWFANNYKKFGATLEIVTDKSQEGSQFVKGFGGIGGILRYRVDFQGMEYQGGDDEFFDLDDY

SEQ ID NO: 27985 - protein, 95 aa, Homo sapiens
  REGION 1..95: note = ENSP00000422272
MADDPSAADRNVEIWKIKKLIKSLEAARGNGTSMISLIIPPKDQISRVAKMLADEFGTASNIKSRVNRLSVLGAITSVQQRLKLYNKGSYSTTFR

SEQ ID NO: 27986 - protein, 208 aa, Homo sapiens
  REGION 1..208: note = ENSP00000461082
MISLIIPPKDQISRVAKMLADEFGTASNIKSRVNRLSVLGAITSVQQRLKLYNKVPPNGLVVYCGTIVTEEGKEKKVNIDFEPFKPINTSLYLCDNKFHTEALTALLSDDSKFGFIVIDGSGALFGTLQGNTREVLHKFTVDLPKKHGRGGQSALRFARLRMEKRHNYVRKVAETAVQLFISGDKVNVAGLVLAGSADFKTELSQSDM

SEQ ID NO: 27987 - protein, 119 aa, Homo sapiens
  REGION 1..119: note = ENSP00000425689
MISLIIPPKDQISRVAKMLADEFGTASNIKSRVNRLSVLGAITSVQQRLKLYNKVPPNGLVVYCGTIVTEEGKEKKVNIDFEPFKPINTSLYLCDNKFHTEALTALLSDDSKFGFIVID

SEQ ID NO: 27988 - protein, 1264 aa, Homo sapiens
  REGION 1..1264: note = ENSP00000365645
MQTSEMDRKREAFLEHLKQKYPHHASAIMGHQERLRDQTRSPKLSHSPQPPSLGDPVEHLSETSADSLEAMSEGDAPTPFSRGSRTRASLPVVRSTNQTKERSLGVLYLQYGDETKQLRMPNEITSADTIRALFVSAFPQQLTMKMLESPSVAIYIKDESRNVYYELNDVRNIQDRSLLKVYNKDPAHAFNHTPKTMNGDMRMQRELVYARGDGPGAPRPGSTAHPPHAIPNSPPSTPVPHSMPPSPSRIPYGGTRSMVVPGNATIPRDRISSLPVSRPISPSPSAILERRDVKPDEDMSGKNIAMYRNEGFYADPYLYHEGRMSIASSHGGHPLDVPDHIIAYHRTAIRSASAYCNPSMQAEMHMEQSLYRQKSRKYPDSHLPTLGSKTPPASPHRVSDLRMIDMHAHYNAHGPPHTMQPDRASPSRQAFKKEPGTLVYIEKPRSAAGLSSLVDLGPPLMEKQVFAYSTATIPKDRETRERMQAMEKQIASLTGLVQSALFKGPITSYSKDASSEKMMKTTANRNHTDSAGTPHVSGGKMLSALESTVPPSQPPPVGTSAIHMSLLEMRRSVAELRLQLQQMRQLQLQNQELLRAMMKKAELEISGKVMETMKRLEDPVQRQRVLVEQERQKYLHEEEKIVKKLCELEDFVEDLKKDSTAASRLVTLKDVEDGAFLLRQVGEAVATLKGEFPTLQNKMRAILRIEVEAVRFLKEEPHKLDSLLKRVRSMTDVLTMLRRHVTDGLLKGTDAAQAAQYMAMEKATAAEVLKSQEEAAHTSGQPFHSTGAPGDAKSEVVPLSGMMVRHAQSSPVVIQPSQHSVALLNPAQNLPHVASSPAVPQEATSTLQMSQAPQSPQIPMNGSAMQSLFIEEIHSVSAKNRAVSIEKAEKKWEEKRQNLDHYNGKEFEKLLEEAQANIMKSIPNLEMPPATGPLPRGDAPVDKVELSEDSPNSEQDLEKLGGKSPPPPPPPPRRSYLPGSGLTTTRSGDVVYTGRKENITAKASSEDAGPSPQTRATKYPAEEPASAWTPSPPPVTTSSSKDEEEEEEEGDKIMAELQGSSGAPQTSRMPVPMSAKNRPGTLDKPGKQSKLQDPRQYRQANGSAKKSGGDFKPTSPSLPASKIPALSPSSGKSSSLPSSSGDSSNLPNPPATKPSIASNPLSPQTGPPAHSASLIPSVSNGSLKFQSLTHTGKGHHLSFSPQSQNGRAPPPLSFSSSPPSPASSVSLNQGAKGTRTIHTPSLTSYKAQNGSSSKATPSTAKETS

SEQ ID NO: 27989 - protein, 165 aa, Homo sapiens
  REGION 1..165: note = ENSP00000489926
MSKPSRLARPFFSNAASKLPSARRDDLNSKQKKNSLGEKILRTGSEGNLVKQQQVQTAATPAQRKATPHKEQGKGNLHVTSPEDAECRRTKERLSNGNSRGSVSKSSRNIPRRHTLGGPRSSKEILGMQTSEMDRKREAFLEHLKQKYPHHASAIMGHQERLRDQ

SEQ ID NO: 27990 - protein, 933 aa, Homo sapiens
  REGION 1..933: note = ENSP00000365639
MEENESQKCEPCLPYSADRRQMQEQGKGNLHVTSPEDAECRRTKERLSNGNSRGSVSKSSRNIPRRHTLGGPRSSKEILGMQTSEMDRKREAFLEHLKQKYPHHASAIMGHQERLRDQTRSPKLSHSPQPPSLGDPVEHLSETSADSLEAMSEGDAPTPFSRGSRTRASLPVVRSTNQTKERSLGVLYLQYGDETKQLRMPNEITSADTIRALFVSAFPQQLTMKMLESPSVAIYIKDESRNVYYELNDVRNIQDRSLLKVYNKDPAHAFNHTPKTMNGDMRMQRELVYARGDGPGAPRPGSTAHPPHAIPNSPPSTPVPHSMPPSPSRIPYGGTRSMVVPGNATIPRDRISSLPVSRPISPSPSAILERRDVKPDEDMSGKNIAMYRNEGFYADPYLYHEGRMSIASSHGGHPLDVPDHIIAYHRTAIRSASAYCNPSMQAEMHMEQSLYRQKSRKYPDSHLPTLGSKTPPASPHRVSDLRMIDMHAHYNAHGPPHTMQPDRASPSRQAFKKEPGTLVYIEKPRSAAGLSSLVDLGPPLMEKQVFAYSTATIPKDRETSEKMMKTTANRNHTDSAGTPHVSGGKMLSALESTVPPSQPPPVGTSAIHMSLLEMRRSVAELRLQLQQMRQLQLQNQELLRAMMKKAELEISGKVMETMKRLEDPVQRQRVLVEQERQKYLHEEEKIVKKLCELEDFVEDLKKDSTAASRLVTLKDVEDGAFLLRQVGEAVATLKGEFPTLQNKMRAILRIEVEAVRFLKEEPHKLDSLLKRVRSMTDVLTMLRRHVTDGLLKGTDAAQAAQYMAMEKATAAEVLKSQEEAAHTSGQPFHSTGAPGDAKSEVVPLSGMMVRHAQSSPVVIQPSQHSVALLNPAQNLPHVASSPAVPQEATSTLQMSQAPQSPQIPMNGSAMQSLFIEEIHSVSAKNRAVSIEKA

SEQ ID NO: 27991 - protein, 1943 aa, Homo sapiens
  REGION 1..1943: note = ENSP00000365637
MEENESQKCEPCLPYSADRRQMQEQGKGNLHVTSPEDAECRRTKERLSNGNSRGSVSKSSRNIPRRHTLGGPRSSKEILGMQTSEMDRKREAFLEHLKQKYPHHASAIMGHQERLRDQTRSPKLSHSPQPPSLGDPVEHLSETSADSLEAMSEGDAPTPFSRGSRTRASLPVVRSTNQTKERSLGVLYLQYGDETKQLRMPNEITSADTIRALFVSAFPQQLTMKMLESPSVAIYIKDESRNVYYELNDVRNIQDRSLLKVYNKDPAHAFNHTPKTMNGDMRMQRELVYARGDGPGAPRPGSTAHPPHAIPNSPPSTPVPHSMPPSPSRIPYGGTRSMVVPGNATIPRDRISSLPVSRPISPSPSAILERRDVKPDEDMSGKNIAMYRNEGFYADPYLYHEGRMSIASSHGGHPLDVPDHIIAYHRTAIRSASAYCNPSMQAEMHMEQSLYRQKSRKYPDSHLPTLGSKTPPASPHRVSDLRMIDMHAHYNAHGPPHTMQPDRASPSRQAFKKEPGTLVYIEKPRSAAGLSSLVDLGPPLMEKQVFAYSTATIPKDRETRERMQAMEKQIASLTGLVQSALFKGPITSYSKDASSEKMMKTTANRNHTDSAGTPHVSGGKMLSALESTVPPSQPPPVGTSAIHMSLLEMRRSVAELRLQLQQMRQLQLQNQELLRAMMKKAELEISGKVMETMKRLEDPVQRQRVLVEQERQKYLHEEEKIVKKLCELEDFVEDLKKDSTAASRLVTLKDVEDGAFLLRQVGEAVATLKGEFPTLQNKMRAILRIEVEAVRFLKEEPHKLDSLLKRVRSMTDVLTMLRRHVTDGLLKGTDAAQAAQYMAMEKATAAEVLKSQEEAAHTSGQPFHSTGAPGDAKSEVVPLSGMMVRHAQSSPVVIQPSQHSVALLNPAQNLPHVASSPAVPQEATSTLQMSQAPQSPQIPMNGSAMQSLFIEEIHSVSAKNRAVSIEKAEKKWEEKRQNLDHYNGKEFEKLLEEAQANIMKSIPNLEMPPATGPLPRGDAPVDKVELSEDSPNSEQDLEKLGGKSPPPPPPPPRRSYLPGSGLTTTRSGDVVYTGRKENITAKASSEDAGPSPQTRATKYPAEEPASAWTPSPPPVTTSSSKDEEEEEEEGDKIMAELQAFQKCSFMDVNSNSHAEPSRADSHVKDTRSGATVPPKEKKNLEFFHEDVRKSDVEYENGPQMEFQKVTTGAVRPSDPPKWERGMENSISDASRTSEYKTEIIMKENSISNMSLLRDSRNYSQETVPKASFGFSGISPLEDEINKGSKISGLQYSIPDTENQTLNYGKTKEMEKQNTDKCHVSSHTRLTESSVHDFKTEDQEVITTDFGQVVLRPKEARHANVNPNEDGESSSSSPTEENAATDNIAFMITETTVQVLSSGEVHDIVSQKGEDIQTVNIDARKEMTPRQEGTDNEDPVVCLDKKPVIIIFDEPMDIRSAYKRLSTIFEECDEELERMMMEEKIEEEEEEENGDSVVQNNNTSQMSHKKVAPGNLRTGQQVETKSQPHSLATETRNPGGQEMNRTELNKFSHVDSPNSECKGEDATDDQFESPKKKFKFKFPKKQLAALTQAIRTGTKTGKKTLQVVVYEEEEEDGTLKQHKEAKRFEIARSQPEDTPENTVRRQEQPSIESTSPISRTDEIRKNTYRTLDSLEQTIKQLENTISEMSPKALVDTSCSSNRDSVASSSHIAQEASPRPLLVPDEGPTALEPPTSIPSASRKGSSGAPQTSRMPVPMSAKNRPGTLDKPGKQSKLQDPRQYRQANGSAKKSGGDFKPTSPSLPASKIPALSPSSGKSSSLPSSSGDSSNLPNPPATKPSIASNPLSPQTGPPAHSASLIPSVSNGSLKFQSLTHTGKGHHLSFSPQSQNGRAPPPLSFSSSPPSPASSVSLNQGAKGTRTIHTPSLTSYKAQNGSSSKATPSTAKETS

SEQ ID NO: 27992 - protein, 180 aa, Homo sapiens
  REGION 1..180: note = ENSP00000489052
MEENESQKCEPCLPYSADRRQMQEQGKGNLHVTSPEDAECRRTKERLSNGNSRGSVSKSSRNIPRRHTLGGPRSSKEILGMQTSEMDRKREAFLEHLKQKYPHHASAIMGHQERLRDQALKGMLISLQAELDIQRQGAPNCLTVLNHPVWVTRSSIYQRRPLILWKPCLRGMLQPLFPEA

SEQ ID NO: 27993 - protein, 783 aa, Homo sapiens
  REGION 1..783: note = ENSP00000404798
MSEGDAPTPFSRGSRTRASLPVVRSTNQTKERSLGVLYLQYGDETKQLRMPNEITSADTIRALFVSAFPQQLTMKMLESPSVAIYIKDESRNVYYELNDVRNIQDRSLLKVYNKDPAHAFNHTPKTMNGDMRMQRELVYARGDGPGAPRPGSTAHPPHAIPNSPPSTPVPHSMPPSPSRIPYGGTRSMVVPGNATIPRDRISSLPVSRPISPSPSAILERRDVKPDEDMSGKNIAMYRNEGFYADPYLYHEGRMSIASSHGGHPLDVPDHIIAYHRTAIRSASAYCNPSMQAEMHMEQSLYRQKSRKYPDSHLPTLGSKTPPASPHRVSDLRMIDMHAHYNAHGPPHTMQPDRASPSRQAFKKEPGTLVYIEKPRSAAGLSSLVDLGPPLMEKQVFAYSTATIPKDRETSEKMMKTTANRNHTDSAGTPHVSGGKMLSALESTVPPSQPPPVGTSAIHMSLLEMRRSVAELRLQLQQMRQLQLQNQELLRAMMKKAELEISGKVMETMKRLEDPVQRQRVLVEQERQKYLHEEEKIVKKLCELEDFVEDLKKDSTAASRLVTLKDVEDGAFLLRQVGEAVATLKGEFPTLQNKMRAILRIEVEAVRFLKEEPHKLDSLLKRVRSMTDVLTMLRRHVTDGLLKGTDAAQAAQYMAMEKATAAEVLKSQEEAAHTSGQPFHSTGAPGDAKSEVVPLSGMMVRHAQSSPVVIQPSQHSVALLNPAQNLPHVASSPAVPQEATSTLQMSQAPQSPQIPMNGSAMQSLFIEEIHSVSAKNRAVSIEKA

SEQ ID NO: 27994 - protein, 932 aa, Homo sapiens
  REGION 1..932: note = ENSP00000302343
MQRELVYARGDGPGAPRPGSTAHPPHAIPNSPPSTPVPHSMPPSPSRIPYGGTRSMVVPGNATIPRDRISSLPVSRPISPSPSAILERRDVKPDEDMSGKNIAMYRNEGFYADPYLYHEGRMSIASSHGGHPLDVPDHIIAYHRTAIRSASAYCNPSMQAEMHMEQSLYRQKSRKYPDSHLPTLGSKTPPASPHRVSDLRMIDMHAHYNAHGPPHTMQPDRASPSRQAFKKEPGTLVYIEKPRSAAGLSSLVDLGPPLMEKQVFAYSTATIPKDRETSEKMMKTTANRNHTDSAGTPHVSGGKMLSALESTVPPSQPPPVGTSAIHMSLLEMRRSVAELRLQLQQMRQLQLQNQELLRAMMKKAELEISGKVMETMKRLEDPVQRQRVLVEQERQKYLHEEEKIVKKLCELEDFVEDLKKDSTAASRLVTLKDVEDGAFLLRQVGEAVATLKGEFPTLQNKMRAILRIEVEAVRFLKEEPHKLDSLLKRVRSMTDVLTMLRRHVTDGLLKGTDAAQAAQYMAMEKATAAEVLKSQEEAAHTSGQPFHSTGAPGDAKSEVVPLSGMMVRHAQSSPVVIQPSQHSVALLNPAQNLPHVASSPAVPQEATSTLQMSQAPQSPQIPMNGSAMQSLFIEEIHSVSAKNRAVSIEKAEKKWEEKRQNLDHYNGKEFEKLLEEAQANIMKSIPNLEMPPATGPLPRGDAPVDKVELSEDSPNSEQDLEKLGGKSPPPPPPPPRRSYLPGSGLTTTRSGDVVYTGRKENITAKASSEDAGPSPQTRATKYPAEEPASAWTPSPPPVTTSSSKDEEEEEEEGDKIMAELQAFQKCSFMDVNSNSHAEPSRADSHVKDTRSGATVPPKEKKNLEFFHEDVRKSDVEYENGPQMEFQKGSSGAPQTSRMPVPMSAKNRPGTLDKPGKQSKLQDPRQYRQVVLP

SEQ ID NO: 27995 - protein, 866 aa, Homo sapiens
  REGION 1..866: note = ENSP00000379723
MQRELVYARGDGPGAPRPGSTAHPPHAIPNSPPSTPVPHSMPPSPSRIPYGGTRSMVVPGNATIPRDRISSLPVSRPISPSPSAILERRDVKPDEDMSGKNIAMYRNEGFYADPYLYHEGRMSIASSHGGHPLDVPDHIIAYHRTAIRSASAYCNPSMQAEMHMEQSLYRQKSRKYPDSHLPTLGSKTPPASPHRVSDLRMIDMHAHYNAHGPPHTMQPDRASPSRQAFKKEPGTLVYIEKPRSAAGLSSLVDLGPPLMEKQVFAYSTATIPKDRETSEKMMKTTANRNHTDSAGTPHVSGGKMLSALESTVPPSQPPPVGTSAIHMSLLEMRRSVAELRLQLQQMRQLQLQNQELLRAMMKKAELEISGKVMETMKRLEDPVQRQRVLVEQERQKYLHEEEKIVKKLCELEDFVEDLKKDSTAASRLVTLKDVEDGAFLLRQVGEAVATLKGEFPTLQNKMRAILRIEVEAVRFLKEEPHKLDSLLKRVRSMTDVLTMLRRHVTDGLLKGTDAAQAAQYMAMEKATAAEVLKSQEEAAHTSGQPFHSTGAPGDAKSEVVPLSGMMVRHAQSSPVVIQPSQHSVALLNPAQNLPHVASSPAVPQEATSTLQMSQAPQSPQIPMNGSAMQSLFIEEIHSVSAKNRAVSIEKAEKKWEEKRQNLDHYNGKEFEKLLEEAQANIMKSIPNLEMPPATGPLPRGDAPVDKVELSEDSPNSEQDLEKLGGKSPPPPPPPPRRSYLPGSGLTTTRSGDVVYTGRKENITAKASSEDAGPSPQTRATKYPAEEPASAWTPSPPPVTTSSSKDEEEEEEEGDKIMAELQGSSGAPQTSRMPVPMSAKNRPGTLDKPGKQSKLQDPRQYRQVVLP

SEQ ID NO: 27996 - protein, 906 aa, Homo sapiens
  REGION 1..906: note = ENSP00000379722
MQRELVYARGDGPGAPRPGSTAHPPHAIPNSPPSTPVPHSMPPSPSRIPYGGTRSMVVPGNATIPRDRISSLPVSRPISPSPSAILERRDVKPDEDMSGKNIAMYRNEGFYADPYLYHEGRMSIASSHGGHPLDVPDHIIAYHRTAIRSASAYCNPSMQAEMHMEQSLYRQKSRKYPDSHLPTLGSKTPPASPHRVSDLRMIDMHAHYNAHGPPHTMQPDRASPSRQAFKKEPGTLVYIEKPRSAAGLSSLVDLGPPLMEKQVFAYSTATIPKDRETSEKMMKTTANRNHTDSAGTPHVSGGKMLSALESTVPPSQPPPVGTSAIHMSLLEMRRSVAELRLQLQQMRQLQLQNQELLRAMMKKAELEISGKVMETMKRLEDPVQRQRVLVEQERQKYLHEEEKIVKKLCELEDFVEDLKKDSTAASRLVTLKDVEDGAFLLRQVGEAVATLKGEFPTLQNKMRAILRIEVEAVRFLKEEPHKLDSLLKRVRSMTDVLTMLRRHVTDGLLKGTDAAQAAQYMAMEKATAAEVLKSQEEAAHTSGQPFHSTGAPGDAKSEVVPLSGMMVRHAQSSPVVIQPSQHSVALLNPAQNLPHVASSPAVPQEATSTLQMSQAPQSPQIPMNGSAMQSLFIEEIHSVSAKNRAVSIEKAEKKWEEKRQNLDHYNGKEFEKLLEEAQANIMKSIPNLEMPPATGPLPRGDAPVDKVELSEDSPNSEQDLEKLGGKSPPPPPPPPRRSYLPGSGLTTTRSGDVVYTGRKENITAKASSEDAGPSPQTRATKYPAEEPASAWTPSPPPVTTSSSKDEEEEEEEGDKIMAELQAFQKCSFMDVNSNSHAEPSRADSHVKDTRSGATVPPKEKKGSSGAPQTSRMPVPMSAKNRPGTLDKPGKQSKLQDPRQYRQVVLP

SEQ ID NO: 27997 - protein, 1465 aa, Homo sapiens
  REGION 1..1465: note = ENSP00000365634
MQRELVYARGDGPGAPRPGSTAHPPHAIPNSPPSTPVPHSMPPSPSRIPYGGTRSMVVPGNATIPRDRISSLPVSRPISPSPSAILERRDVKPDEDMSGKNIAMYRNEGFYADPYLYHEGRMSIASSHGGHPLDVPDHIIAYHRTAIRSASAYCNPSMQAEMHMEQSLYRQKSRKYPDSHLPTLGSKTPPASPHRVSDLRMIDMHAHYNAHGPPHTMQPDRASPSRQAFKKEPGTLVYIEKPRSAAGLSSLVDLGPPLMEKQVFAYSTATIPKDRETSEKMMKTTANRNHTDSAGTPHVSGGKMLSALESTVPPSQPPPVGTSAIHMSLLEMRRSVAELRLQLQQMRQLQLQNQELLRAMMKKAELEISGKVMETMKRLEDPVQRQRVLVEQERQKYLHEEEKIVKKLCELEDFVEDLKKDSTAASRLVTLKDVEDGAFLLRQVGEAVATLKGEFPTLQNKMRAILRIEVEAVRFLKEEPHKLDSLLKRVRSMTDVLTMLRRHVTDGLLKGTDAAQAAQYMAMEKATAAEVLKSQEEAAHTSGQPFHSTGAPGDAKSEVVPLSGMMVRHAQSSPVVIQPSQHSVALLNPAQNLPHVASSPAVPQEATSTLQMSQAPQSPQIPMNGSAMQSLFIEEIHSVSAKNRAVSIEKAEKKWEEKRQNLDHYNGKEFEKLLEEAQANIMKSIPNLEMPPATGPLPRGDAPVDKVELSEDSPNSEQDLEKLGGKSPPPPPPPPRRSYLPGSGLTTTRSGDVVYTGRKENITAKASSEDAGPSPQTRATKYPAEEPASAWTPSPPPVTTSSSKDEEEEEEEGDKIMAELQAFQKCSFMDVNSNSHAEPSRADSHVKDTRSGATVPPKEKKNLEFFHEDVRKSDVEYENGPQMEFQKVTTGAVRPSDPPKWERGMENSISDASRTSEYKTEIIMKENSISNMSLLRDSRNYSQETVPKASFGFSGISPLEDEINKGSKISGLQYSIPDTENQTLNYGKTKEMEKQNTDKCHVSSHTRLTESSVHDFKTEDQEVITTDFGQVVLRPKEARHANVNPNEDGESSSSSPTEENAATDNIAFMITETTVQVLSSGEVHDIVSQKGEDIQTVNIDARKEMTPRQEGTDNEDPVVCLDKKPVIIIFDEPMDIRSAYKRLSTIFEECDEELERMMMEEKIEEEEEEENGDSVVQNNNTSQMSHKKVAPGNLRTGQQVETKSQPHSLATETRNPGGQEMNRTELNKFSHVDSPNSECKGEDATDDQFESPKKKFKFKFPKKQLAALTQAIRTGTKTGKKTLQVVVYEEEEEDGTLKQHKEAKRFEIARSQPEDTPENTVRRQEQPSIESTSPISRTDEIRKNTYRTLDSLEQTIKQLENTISEMSPKALVDTSCSSNRDSVASSSHIAQEASPRPLLVPDEGPTALEPPTSIPSASRKGSSGAPQTSRMPVPMSAKNRPGTLDKPGKQSKLQDPRQYRQVVLP

SEQ ID NO: 27998 - protein, 453 aa, Homo sapiens
  REGION 1..453: note = ENSP00000489575
  VARIANT 1: note = Any amino acid
XDKIMAELQAFQKCSFMDVNSNSHAEPSRADSHVKDTRSGATVPPKEKKGIFGSWRTKQSKNLEFFHEDVRKSDVEYENGPQMEFQKVTTGAVRPSDPPKWERGMENSISDASRTSEYKTEIIMKENSISNMSLLRDSRNYSQETVPKASFGFSGISPLEDEINKGSKISGLQYSIPDTENQTLNYGKTKEMEKQNTDKCHVSSHTRLTESSVHDFKTEDQEVITTDFGQVVLRPKEARHANVNPNEDGESSSSSPTEENAATDNIAFMITETTVQVLSSGEVHDIVSQKGEDIQTVNIDARKEMTPRQEGTDNEDPVVCLDKKPVIIIFDEPMDIRSAYKRLSTIFEECDEELERMMMEEKIEEEEEEENGDSVVQNNNTSQMSHKKVAPGNLRTGQQVETKSQPHSLATETRNPGGQEMNRTELNKFSHVDSPNSECKGEDATDDQFESPK

SEQ ID NO: 27999 - protein, 1349 aa, Homo sapiens
  REGION 1..1349: note = ENSP00000392625
MEENESQKCEPCLPYSADRRQMQEQGKGNLHVTSPEDAECRRTKERLSNGNSRGSVSKSSRNIPRRHTLGGPRSSKEILGMQTSEMDRKREAFLEHLKQKYPHHASAIMGHQERLRDQTRSPKLSHSPQPPSLGDPVEHLSETSADSLEAMSEGDAPTPFSRGSRTRASLPVVRSTNQTKERSLGVLYLQYGDETKQLRMPNEITSADTIRALFVSAFPQQLTMKMLESPSVAIYIKDESRNVYYELNDVRNIQDRSLLKVYNKDPAHAFNHTPKTMNGDMRMQRELVYARGDGPGAPRPGSTAHPPHAIPNSPPSTPVPHSMPPSPSRIPYGGTRSMVVPGNATIPRDRISSLPVSRPISPSPSAILERRDVKPDEDMSGKNIAMYRNEGFYADPYLYHEGRMSIASSHGGHPLDVPDHIIAYHRTAIRSASAYCNPSMQAEMHMEQSLYRQKSRKYPDSHLPTLGSKTPPASPHRVSDLRMIDMHAHYNAHGPPHTMQPDRASPSRQAFKKEPGTLVYIEKPRSAAGLSSLVDLGPPLMEKQVFAYSTATIPKDRETSEKMMKTTANRNHTDSAGTPHVSGGKMLSALESTVPPSQPPPVGTSAIHMSLLEMRRSVAELRLQLQQMRQLQLQNQELLRAMMKKAELEISGKVMETMKRLEDPVQRQRVLVEQERQKYLHEEEKIVKKLCELEDFVEDLKKDSTAASRLVTLKDVEDGAFLLRQVGEAVATLKGEFPTLQNKMRAILRIEVEAVRFLKEEPHKLDSLLKRVRSMTDVLTMLRRHVTDGLLKGTDAAQAAQYMAMEKATAAEVLKSQEEAAHTSGQPFHSTGAPGDAKSEVVPLSGMMVRHAQSSPVVIQPSQHSVALLNPAQNLPHVASSPAVPQEATSTLQMSQAPQSPQIPMNGSAMQSLFIEEIHSVSAKNRAVSIEKAEKKWEEKRQNLDHYNGKEFEKLLEEAQANIMKSIPNLEMPPATGPLPRGDAPVDKVELSEDSPNSEQDLEKLGGKSPPPPPPPPRRSYLPGSGLTTTRSGDVVYTGRKENITAKASSEDAGPSPQTRATKYPAEEPASAWTPSPPPVTTSSSKDEEEEEEEGDKIMAELQAFQKCSFMDVNSNSHAEPSRADSHVKDTRSGATVPPKEKKGSSGAPQTSRMPVPMSAKNRPGTLDKPGKQSKLQDPRQYRQANGSAKKSGGDFKPTSPSLPASKIPALSPSSGKSSSLPSSSGDSSNLPNPPATKPSIASNPLSPQTGPPAHSASLIPSVSNGSLKFQSLTHTGKGHHLSFSPQSQNGRAPPPLSFSSSPPSPASSVSLNQGAKGTRTIHTPSLTSYKAQNGSSSKATPSTAKETS

SEQ ID NO: 28000 - protein, 1374 aa, Homo sapiens
  REGION 1..1374: note = ENSP00000365635
MEENESQKCEPCLPYSADRRQMQEQGKGNLHVTSPEDAECRRTKERLSNGNSRGSVSKSSRNIPRRHTLGGPRSSKEILGMQTSEMDRKREAFLEHLKQKYPHHASAIMGHQERLRDQTRSPKLSHSPQPPSLGDPVEHLSETSADSLEAMSEGDAPTPFSRGSRTRASLPVVRSTNQTKERSLGVLYLQYGDETKQLRMPNEITSADTIRALFVSAFPQQLTMKMLESPSVAIYIKDESRNVYYELNDVRNIQDRSLLKVYNKDPAHAFNHTPKTMNGDMRMQRELVYARGDGPGAPRPGSTAHPPHAIPNSPPSTPVPHSMPPSPSRIPYGGTRSMVVPGNATIPRDRISSLPVSRPISPSPSAILERRDVKPDEDMSGKNIAMYRNEGFYADPYLYHEGRMSIASSHGGHPLDVPDHIIAYHRTAIRSASAYCNPSMQAEMHMEQSLYRQKSRKYPDSHLPTLGSKTPPASPHRVSDLRMIDMHAHYNAHGPPHTMQPDRASPSRQAFKKEPGTLVYIEKPRSAAGLSSLVDLGPPLMEKQVFAYSTATIPKDRETSEKMMKTTANRNHTDSAGTPHVSGGKMLSALESTVPPSQPPPVGTSAIHMSLLEMRRSVAELRLQLQQMRQLQLQNQELLRAMMKKAELEISGKVMETMKRLEDPVQRQRVLVEQERQKYLHEEEKIVKKLCELEDFVEDLKKDSTAASRLVTLKDVEDGAFLLRQVGEAVATLKGEFPTLQNKMRAILRIEVEAVRFLKEEPHKLDSLLKRVRSMTDVLTMLRRHVTDGLLKGTDAAQAAQYMAMEKATAAEVLKSQEEAAHTSGQPFHSTGAPGDAKSEVVPLSGMMVRHAQSSPVVIQPSQHSVALLNPAQNLPHVASSPAVPQEATSTLQMSQAPQSPQIPMNGSAMQSLFIEEIHSVSAKNRAVSIEKAEKKWEEKRQNLDHYNGKEFEKLLEEAQANIMKSIPNLEMPPATGPLPRGDAPVDKVELSDSPNSEQDLEKLGGKSPPPPPPPPRRSYLPGSGLTTTRSGDVVYTGRKENITAKASSEDAGPSPQTRATKYPAEEPASAWTPSPPPVTTSSSKDEEEEEEEGDKIMAELQAFQKCSFMDVNSNSHAEPSRADSHVKDTRSGATVPPKEKKNLEFFHEDVRKSDVEYENGPQMEFQKGSSGAPQTSRMPVPMSAKNRPGTLDKPGKQSKLQDPRQYRQANGSAKKSGGDFKPTSPSLPASKIPALSPSSGKSSSLPSSSGDSSNLPNPPATKPSIASNPLSPQTGPPAHSASLIPSVSNGSLKFQSLTHTGKGHHLSFSPQSQNGRAPPPLSFSSSPPSPASSVSLNQGAKGTRTIHTPSLTSYKAQNGSSSKATPSTAKETS

SEQ ID NO: 28001 - protein, 1264 aa, Homo sapiens; identical to SEQ ID NO: 27988
  REGION 1..1264: note = ENSP00000389680

SEQ ID NO: 28002 - protein, 499 aa, Homo sapiens
  REGION 1..499: note = ENSP00000296486
MCELYSKRDTLGLRKKHIGPSCKVFFASDPIKIVRAQRQYMFDENGEQYLDCINNVAHVGHCHPGVVKAALKQMELLNTNSRFLHDNIVEYAKRLSATLPEKLSVCYFTNSGSEANDLALRLARQFRGHQDVITLDHAYHGHLSSLIEISPYKFQKGKDVKKEFVHVAPTPDTYRGKYREDHADSASAYADEVKKIIEDAHNSGRKIAAFIAESMQSCGGQIIPPAGYFQKVAEYVHGAGGVFIADEVQVGFGRVGKHFWSFQMYGEDFVPDIVTMGKPMGNGHPVACVVTTKEIAEAFSSSGMEYFNTYGGNPVSCAVGLAVLDIIENEDLQGNAKRVGNYLTELLKKQKAKHTLIGDIRGIGLFIGIDLVKDHLKRTPATAEAQHIIYKMKEKRVLLSADGPHRNVLKIKPPMCFTEEDAKFMVDQLDRILTVLEEAMGTKTESVTSENTPCKTKMLKEAHIELLRDSTTDSKENPSRKRNGMCTDTHSLLSKRLKT

SEQ ID NO: 28003 - protein, 493 aa, Homo sapiens
  REGION 1..493: note = ENSP00000392269
MCELYSKRDTLGLRKKHIGPSCKVFFASDPIKIVRAQRQYMFDENGEQYLDCINNVAHGVVKAALKQMELLNTNSRFLHDNIVEYAKRLSATLPEKLSVCYFTNSGSEANDLALRLARQFRGHQDVITLDHAYHGHLSSLIEISPYKFQKGKDVKKEFVHVAPTPDTYRGKYREDHADSASAYADEVKKIIEDAHNSGRKIAAFIAESMQSCGGQIIPPAGYFQKVAEYVHGAGGVFIADEVQVGFGRVGKHFWSFQMYGEDFVPDIVTMGKPMGNGHPVACVVTTKEIAEAFSSSGMEYFNTYGGNPVSCAVGLAVLDIIENEDLQGNAKRVGNYLTELLKKQKAKHTLIGDIRGIGLFIGIDLVKDHLKRTPATAEAQHIIYKMKEKRVLLSADGPHRNVLKIKPPMCFTEEDAKFMVDQLDRILTVLEEAMGTKTESVTSENTPCKTKMLKEAHIELLRDSTTDSKENPSRKRNGMCTDTHSLLSKRLKT

SEQ ID NO: 28004 - protein, 441 aa, Homo sapiens
  REGION 1..441: note = ENSP00000427065
MGHCHPGVVKAALKQMELLNTNSRFLHDNIVEYAKRLSATLPEKLSVCYFTNSGSEANDLALRLARQFRGHQDVITLDHAYHGHLSSLIEISPYKFQKGKDVKKEFVHVAPTPDTYRGKYREDHADSASAYADEVKKIIEDAHNSGRKIAAFIAESMQSCGGQIIPPAGYFQKVAEYVHGAGGVFIADEVQVGFGRVGKHFWSFQMYGEDFVPDIVTMGKPMGNGHPVACVVTTKEIAEAFSSSGMEYFNTYGGNPVSCAVGLAVLDIIENEDLQGNAKRVGNYLTELLKKQKAKHTLIGDIRGIGLFIGIDLVKDHLKRTPATAEAQHIIYKMKEKRVLLSADGPHRNVLKIKPPMCFTEEDAKFMVDQLDRILTVLEEAMGTKTESVTSENTPCKTKMLKEAHIELLRDSTTDSKENPSRKRNGMCTDTHSLLSKRLKT

SEQ ID NO: 28005 - protein, 459 aa, Homo sapiens
  REGION 1..459: note = ENSP00000423240
MFDENGEQYLDCINNVAHVGHCHPGVVKAALKQMELLNTNSRFLHDNIVEYAKRLSATLPEKLSVCYFTNSGSEANDLALRLARQFRGHQDVITLDHAYHGHLSSLIEISPYKFQKGKDVKKEFVHVAPTPDTYRGKYREDHADSASAYADEVKKIIEDAHNSGRKIAAFIAESMQSCGGQIIPPAGYFQKVAEYVHGAGGVFIADEVQVGFGRVGKHFWSFQMYGEDFVPDIVTMGKPMGNGHPVACVVTTKEIAEAFSSSGMEYFNTYGGNPVSCAVGLAVLDIIENEDLQGNAKRVGNYLTELLKKQKAKHTLIGDIRGIGLFIGIDLVKDHLKRTPATAEAQHIIYKMKEKRVLLSADGPHRNVLKIKPPMCFTEEDAKFMVDQLDRILTVLEEAMGTKTESVTSENTPCKTKMLKEAHIELLRDSTTDSKENPSRKRNGMCTDTHSLLSKRLKT

SEQ ID NO: 28006 - protein, 64 aa, Homo sapiens
  REGION 1..64: note = ENSP00000422050
MCELYSKRDTLGLRKKHIGPSCKVFFASDPIKIVRAQRQYMFDENGEQYLDCINNVAHDPKPTT

SEQ ID NO: 28007 - protein, 49 aa, Homo sapiens
  REGION 1..49: note = ENSP00000426871
MCELYSKRDTLGLRKKHIGGTLSPRSGQSCPETDGTAKYKFSIPPRQHC

SEQ ID NO: 28008 - protein, 60 aa, Homo sapiens
  REGION 1..60: note = ENSP00000421217
MELLNTNSRFLHDNIVEYAKRLSATLPEKLSVCYFTNSGSEANDLALRLARQFRGHQDVI

SEQ ID NO: 28009 - protein, 70 aa, Homo sapiens
  REGION 1..70: note = ENSP00000426525
MGHCHPGVVKAALKQMELLNTNSRFLHDNIVEYAKRLSATLPEKLSVCYFTNSGSEANDLALRLARQFRG

SEQ ID NO: 28010 - protein, 485 aa, Homo sapiens
  REGION 1..485: note = ENSP00000376436
MSYFVDSAGSSPVPYSAPRPAVVRQGPSNTYEDPRMNCGFQSNYHQQRPCYPFWDEMATQEVPTGLEHCVSDMECADVPLLTPSSKEMMSQALKATFSGFTKEQQRLGIPKDPRQWTETHVRDWVMWAVNEFSLKGVDFQKFCMNGAALCALGKDCFLELAPDFVGDILWEHLEILQKEDVKPYQVNGVNPAYPESRYTSDYFISYGIEHAQCVPPSEFSEPSFITESYQTLHPISSEELLSLKYENDYPSVILRDPLQTDTLQNDYFAIKQEVVTPDNMCMGRTSRGKLGGQDSFESIESYDSCDRLTQSWSSQSSFNSLQRVPSYDSFDSEDYPAALPNHKPKGTFKDYVRDRADLNKDKPVIPAAALAGYTGSGPIQLWQFLLELLTDKSCQSFISWTGDGWEFKLSDPDEVARRWGKRKNKPKMNYEKLSRGLRYYYDKNIIHKTAGKRYVYRFVCDLQSLLGYTPEELHAMLDVKPDADE

SEQ ID NO: 28011 - protein, 354 aa, Homo sapiens
  REGION 1..354: note = ENSP00000433500
MKAAVDLKPTLTIIKTEKVDLELFPSPDMECADVPLLTPSSKEMMSQALKATFSGFTKEQQRLGIPKDPRQWTETHVRDWVMWAVNEFSLKGVDFQKFCMNGAALCALGKDCFLELAPDFVGDILWEHLEILQKEDVKPYQVNGVNPAYPESRYTSDYFISYGIEHAQCVPPSEFSEPSFITESYQTLHPISSEELLSLKYENDYPSVILRDPLQTDTLQNDYFAIKQEVVTPDNMCMGRTSRGSGPIQLWQFLLELLTDKSCQSFISWTGDGWEFKLSDPDEVARRWGKRKNKPKMNYEKLSRGLRYYYDKNIIHKTAGKRYVYRFVCDLQSLLGYTPEELHAMLDVKPDADE

SEQ ID NO: 28012 - protein, 272 aa, Homo sapiens
  REGION 1..272: note = ENSP00000435666
MKAAVDLKPTLTIIKTEKVDLELFPSPDMECADVPLLTPSSKEMMSQALKATFSGFTKEQQRLGIPKDPRQWTETHVRDWVMWAVNEFSLKGVDFQKFCMNGAALCALGKDCFLELAPDFVGDILWEHLEILQKEDVKPYQVNGVNPAYPESRYTSDYFISYGIEHAQCVPPSEFSEPSFITESYQTLHPISSEELLSLKYENDYPSVILRDPLQTDTLQNDYFAIKQEVVTPDNMCMGRTSRGKLGGQDSFESIESYDSCGQEMGKEEKQT

SEQ ID NO: 28013 - protein, 441 aa, Homo sapiens
  REGION 1..441: note = ENSP00000324578
MKAAVDLKPTLTIIKTEKVDLELFPSPDMECADVPLLTPSSKEMMSQALKATFSGFTKEQQRLGIPKDPRQWTETHVRDWVMWAVNEFSLKGVDFQKFCMNGAALCALGKDCFLELAPDFVGDILWEHLEILQKEDVKPYQVNGVNPAYPESRYTSDYFISYGIEHAQCVPPSEFSEPSFITESYQTLHPISSEELLSLKYENDYPSVILRDPLQTDTLQNDYFAIKQEVVTPDNMCMGRTSRGKLGGQDSFESIESYDSCDRLTQSWSSQSSFNSLQRVPSYDSFDSEDYPAALPNHKPKGTFKDYVRDRADLNKDKPVIPAAALAGYTGSGPIQLWQFLLELLTDKSCQSFISWTGDGWEFKLSDPDEVARRWGKRKNKPKMNYEKLSRGLRYYYDKNIIHKTAGKRYVYRFVCDLQSLLGYTPEELHAMLDVKPDADE

SEQ ID NO: 28014 - protein, 46 aa, Homo sapiens
  REGION 1..46: note = ENSP00000476649
MECADVPLLTPSSKEMMSQALKATFSGFTKEQQRLGIPKDPRQWTE

SEQ ID NO: 28015 - protein, 225 aa, Homo sapiens
  REGION 1..225: note = ENSP00000441430
MKAAVDLKPTLTIIKTEKVDLELFPSPGKLGGQDSFESIESYDSCDRLTQSWSSQSSFNSLQRVPSYDSFDSEDYPAALPNHKPKGTFKDYVRDRADLNKDKPVIPAAALAGYTGSGPIQLWQFLLELLTDKSCQSFISWTGDGWEFKLSDPDEVARRWGKRKNKPKMNYEKLSRGLRYYYDKNIIHKTAGKRYVYRFVCDLQSLLGYTPEELHAMLDVKPDADE

SEQ ID NO: 28016 - protein, 477 aa, Homo sapiens
  REGION 1..477: note = ENSP00000405327
MDGFYDQQVPYMVTNSQRGRNCNEKPTNVRKRKFINRDLAHDSEELFQDLSQLQETWLAEAQVPDNDEQFVPDYQAESLAFHGLPLKIKKEPHSPCSEISSACSQEQPFKFSYGEKCLYNVSAYDQKPQVGMRPSNPPTPSSTPVSPLHHASPNSTHTPKPDRAFPAHLPPSQSIPDSSYPMDHRFRRQLSEPCNSFPPLPTMPREGRPMYQRQMSEPNIPFPPQGFKQEYHDPVYEHNTMVGSAASQSFPPPLMIKQEPRDFAYDSEVPSCHSIYMRQEGFLAHPSRTEGCMFEKGPRQFYDDTCVVPEKFDGDIKQEPGMYREGPTYQRRGSLQLWQFLVALLDDPSNSHFIAWTGRGMEFKLIEPEEVARRWGIQKNRPAMNYDKLSRSLRYYYEKGIMQKVAGERYVYKFVCDPEALFSMAFPDNQRPLLKTDMERHINEEDTVPLSHFDESMAYMPEGGCCNPHPYNEGYVY

SEQ ID NO: 28017 - protein, 454 aa, Homo sapiens
  REGION 1..454: note = ENSP00000385381
MDGFYDQQVPYMVTNSQRGRNCNEKPTNVRKRKFINRDLAHDSEELFQDLSQLQETWLAEAQVPDNDEQFVPDYQAESLAFHGLPLKIKKEPHSPCSEISSACSQEQPFKFSYGEKCLYNVSAYDQKPQVGMRPSNPPTPSSTPVSPLHHASPNSTHTPKPDRAFPAHLPPSQSIPDSSYPMDHRFRRQLSEPCNSFPPLPTMPREGRPMYQRQMSEPNIPFPPQGFKQEYHDPVYEHNTMVGSAASQSFPPPLMIKQEPRDFAYDSGCMFEKGPRQFYDDTCVVPEKFDGDIKQEPGMYREGPTYQRRGSLQLWQFLVALLDDPSNSHFIAWTGRGMEFKLIEPEEVARRWGIQKNRPAMNYDKLSRSLRYYYEKGIMQKVAGERYVYKFVCDPEALFSMAFPDNQRPLLKTDMERHINEEDTVPLSHFDESMAYMPEGGCCNPHPYNEGYVY

SEQ ID NO: 28018 - protein, 491 aa, Homo sapiens
  REGION 1..491: note = ENSP00000384085
MSGRGDGGQQQLLHSKFLAGFVCHIEKNESQRGRNCNEKPTNVRKRKFINRDLAHDSEELFQDLSQLQETWLAEAQVPDNDEQFVPDYQAESLAFHGLPLKIKKEPHSPCSEISSACSQEQPFKFSYGEKCLYNVSAYDQKPQVGMRPSNPPTPSSTPVSPLHHASPNSTHTPKPDRAFPAHLPPSQSIPDSSYPMDHRFRRQLSEPCNSFPPLPTMPREGRPMYQRQMSEPNIPFPPQGFKQEYHDPVYEHNTMVGSAASQSFPPPLMIKQEPRDFAYDSEVPSCHSIYMRQEGFLAHPSRTEGCMFEKGPRQFYDDTCVVPEKFDGDIKQEPGMYREGPTYQRRGSLQLWQFLVALLDDPSNSHFIAWTGRGMEFKLIEPEEVARRWGIQKNRPAMNYDKLSRSLRYYYEKGIMQKVAGERYVYKFVCDPEALFSMAFPDNQRPLLKTDMERHINEEDTVPLSHFDESMAYMPEGGCCNPHPYNEGYVY

SEQ ID NO: 28019 - protein, 437 aa, Homo sapiens
  REGION 1..437: note = ENSP00000384138
MLQDLSASVFFPPCSQHRTLAQVPDNDEQFVPDYQAESLAFHGLPLKIKKEPHSPCSEISSACSQEQPFKFSYGEKCLYNVSAYDQKPQVGMRPSNPPTPSSTPVSPLHHASPNSTHTPKPDRAFPAHLPPSQSIPDSSYPMDHRFRRQLSEPCNSFPPLPTMPREGRPMYQRQMSEPNIPFPPQGFKQEYHDPVYEHNTMVGSAASQSFPPPLMIKQEPRDFAYDSEVPSCHSIYMRQEGFLAHPSRTEGCMFEKGPRQFYDDTCVVPEKFDGDIKQEPGMYREGPTYQRRGSLQLWQFLVALLDDPSNSHFIAWTGRGMEFKLIEPEEVARRWGIQKNRPAMNYDKLSRSLRYYYEKGIMQKVAGERYVYKFVCDPEALFSMAFPDNQRPLLKTDMERHINEEDTVPLSHFDESMAYMPEGGCCNPHPYNEGYVY

SEQ ID NO: 28020 - protein, 477 aa, Homo sapiens; identical to SEQ ID NO: 28016
  REGION 1..477: note = ENSP00000385551

SEQ ID NO: 28021 - protein, 367 aa, Homo sapiens
  REGION 1..367: note = ENSP00000413836
MDGFYDQQVPYMVTNSQRGRNCNEKPTNVRKRKFINRDLAHDSEELFQDLSQLQETWLAEAQVPDNDEQFVPDYQAESLAFHGLPLKIKKEPHSPCSEISSACSQEQPFKFSYGEKCLYNVSAYDQKPQVGMRPSNPPTPSSTPVSPLHHASPNSTHTPKPDRAFPAHLPPSQSIPDSSYPMDHRFRRQLSEPCNSFPPLPTMPREGRPMYQRQMSEPNIPFPPQGFKQEYHDPVYEHNTMVGSAASQSFPPPLMIKQEPRDFAYDSEVPSCHSIYMRQEGFLAHPSRTEGCMFEKGPRQFYDDTCVVPEKFDGFSNVALSVIILRGICLSTDHRRHQTRARNVSGRTHIPTARITSALAVFGSSSG

SEQ ID NO: 28022 - protein, 459 aa, Homo sapiens
  REGION 1..459: note = ENSP00000385686
MDGFYDQQVPYMVTNSQRGRNCNEKPTNVRKRKFINRDLAHDSEELFQDLSQLQETWLAEVAFHGLPLKIKKEPHSPCSEISSACSQEQPFKFSYGEKCLYNVSAYDQKPQVGMRPSNPPTPSSTPVSPLHHASPNSTHTPKPDRAFPAHLPPSQSIPDSSYPMDHRFRRQLSEPCNSFPPLPTMPREGRPMYQRQMSEPNIPFPPQGFKQEYHDPVYEHNTMVGSAASQSFPPPLMIKQEPRDFAYDSEVPSCHSIYMRQEGFLAHPSRTEGCMFEKGPRQFYDDTCVVPEKFDGDIKQEPGMYREGPTYQRRGSLQLWQFLVALLDDPSNSHFIAWTGRGMEFKLIEPEEVARRWGIQKNRPAMNYDKLSRSLRYYYEKGIMQKVAGERYVYKFVCDPEALFSMAFPDNQRPLLKTDMERHINEEDTVPLSHFDESMAYMPEGGCCNPHPYNEGYVY

SEQ ID NO: 28023 - protein, 288 aa, Homo sapiens
  REGION 1..288: note = ENSP00000393078
MLQDLSASVFFPPCSQHRTLVAFHGLPLKIKKEPHSPCSEISSACSQEQPFKFSYGEKCLYNVSAYDQKPQVGMRPSNPPTPSSTPVSPLHHASPNSTHTPKPDRAFPAHLPPSQSIPDSSYPMDHRFRRQLSEPCNSFPPLPTMPREGRPMYQRQMSEPNIPFPPQGFKQEYHDPVYEHNTMVGSAASQSFPPPLMIKQEPRDFAYDSEVPSCHSIYMRQEGFLAHPSRTEGCMFEKGPRQFYDDTCVVPEKFDGDIKQEPGMYREGPTYQRRGSLQLWQFLVALLD

SEQ ID NO: 28024 - protein, 173 aa, Homo sapiens
  REGION 1..173: note = ENSP00000394710
MLQDLSASVFFPPCSQHRTLAQVPDNDEQFVPDYQAESLAFHGLPLKIKKEPHSPCSEISSACSQEQPFKFSYGEKCLYNVRFRRQLSEPCNSFPPLPTMPREGRPMYQRQMSEPNIPFPPQGFKQEYHDPVYEHNTMVGSAASQSFPPPLMIKQEPRDFAYDSEVPSCHSIY

SEQ ID NO: 28025 - protein, 123 aa, Homo sapiens
  REGION 1..123: note = ENSP00000391043
MDGFYDQQVPYMVTNSQRGRNCNEKPTNVRKRKFINRDLAHDSEELFQDLSQLQETWLAEAQVPDNDEQFVPDYQAESLAFHGLPLKIKKEPHSPCSEISSACSQEQPFKFSYGEKCLYNVSA

SEQ ID NO: 28026 - protein, 95 aa, Homo sapiens
  REGION 1..95: note = ENSP00000410819
MDGFYDQQVPYMVTNSQRGRNCNEKPTNVRKRKFINRDLAHDSEELFQDLSQLQETWLAEAQVPDNDEQFVPDYQAESLAFHGLPLKIKKEPHSP

SEQ ID NO: 28027 - protein, 20 aa, Homo sapiens
  REGION 1..20: note = ENSP00000406931
MDGFYDQQVPYMVTNSQRGR

SEQ ID NO: 28028 - protein, 419 aa, Homo sapiens
  REGION 1..419: note = ENSP00000411626
MLQDLSASVFFPPCSQHRTLVAFHGLPLKIKKEPHSPCSEISSACSQEQPFKFSYGEKCLYNVSAYDQKPQVGMRPSNPPTPSSTPVSPLHHASPNSTHTPKPDRAFPAHLPPSQSIPDSSYPMDHRFRRQLSEPCNSFPPLPTMPREGRPMYQRQMSEPNIPFPPQGFKQEYHDPVYEHNTMVGSAASQSFPPPLMIKQEPRDFAYDSEVPSCHSIYMRQEGFLAHPSRTEGCMFEKGPRQFYDDTCVVPEKFDGDIKQEPGMYREGPTYQRRGSLQLWQFLVALLDDPSNSHFIAWTGRGMEFKLIEPEEVARRWGIQKNRPAMNYDKLSRSLRYYYEKGIMQKVAGERYVYKFVCDPEALFSMAFPDNQRPLLKTDMERHINEEDTVPLSHFDESMAYMPEGGCCNPHPYNEGYVY

SEQ ID NO: 28029 - protein, 459 aa, Homo sapiens; identical to SEQ ID NO: 28022
  REGION 1..459: note = ENSP00000242066

SEQ ID NO: 28030 - protein, 374 aa, Homo sapiens
  REGION 1..374: note = ENSP00000382293
MLQDLSASVFFPPCSQHRTLAQVPDNDEQFVPDYQAESLAFHGLPLKIKKEPHSPCSEISSACSQEQPFKFSYGEKCLYNVRFRRQLSEPCNSFPPLPTMPREGRPMYQRQMSEPNIPFPPQGFKQEYHDPVYEHNTMVGSAASQSFPPPLMIKQEPRDFAYDSEVPSCHSIYMRQEGFLAHPSRTEGCMFEKGPRQFYDDTCVVPEKFDGDIKQEPGMYREGPTYQRRGSLQLWQFLVALLDDPSNSHFIAWTGRGMEFKLIEPEEVARRWGIQKNRPAMNYDKLSRSLRYYYEKGIMQKVAGERYVYKFVCDPEALFSMAFPDNQRPLLKTDMERHINEEDTVPLSHFDESMAYMPEGGCCNPHPYNEGYVY

SEQ ID NO: 28031 - protein, 143 aa, Homo sapiens
  REGION 1..143: note = ENSP00000327316
MKAGCSIVEKPEGGGGYQFPDWAYKTESSPGSRQIQLWHFILELLQKEEFRHVIAWQQGEYGEFVIKDPDEVARLWGRRKCKPQMNYDKLSRALRYYYNKRILHKTKGKRFTYKFNFNKLVMPNYPFINIRSSGKIQTLLVGN

SEQ ID NO: 28032 - protein, 512 aa, Homo sapiens
  REGION 1..512: note = ENSP00000357175
MKAGCSIVEKPEGGGGYQFPDWAYKTESSPGSRQIQLWHFILELLQKEEFRHVIAWQQGEYGEFVIKDPDEVARLWGRRKCKPQMNYDKLSRALRYYYNKRILHKTKGKRFTYKFNFNKLVMPNYPFINIRSSGVVPQSAPPVPTASSRFHFPPLDTHSPTNDVQPGRFSASSLTASGQESSNGTDRKTELSELEDGSAADWRRGVDPVSSRNAIGGGGIGHQKRKPDIMLPLFARPGMYPDPHSPFAVSPIPGRGGVLNVPISPALSLTPTIFSYSPSPGLSPFTSSSCFSFNPEEMKHYLHSQACSVFNYHLSPRTFPRYPGLMVPPLQCQMHPEESTQFSIKLQPPPVGRKNRERVESSEESAPVTTPTMASIPPRIKVEPASEKDPESLRQSAREKEEHTQEEGTVPSRTIEEEKGTIFARPAAPPIWPSVPISTPSGEPLEVTEDSEDRPGKEPSAPEKKEDALMPPKLRLKRRWNDDPEARELSKSGKFLWNGSGPQGLATAAADA

SEQ ID NO: 28033 - protein, 484 aa, Homo sapiens
  REGION 1..484: note = ENSP00000321835
MERRMKAGYLDQQVPYTFSSKSPGNGSLREALIGPLGKLMDPGSLPPLDSEDLFQDLSHFQETWLAEAQVPDSDEQFVPDFHSENLAFHSPTTRIKKEPQSPRTDPALSCSRKPPLPYHHGEQCLYSSAYDPPRQIAIKSPAPGALGQSPLQPFPRAEQRNFLRSSGTSQPHPGHGYLGEHSSVFQQPLDICHSFTSQGGGREPLPAPYQHQLSEPCPPYPQQSFKQEYHDPLYEQAGQPAVDQGGVNGHRYPGAGVVIKQEQTDFAYDSDVTGCASMYLHTEGFSGPSPGDGAMGYGYEKPLRPFPDDVCVVPEKFEGDIKQEGVGAFREGPPYQRRGALQLWQFLVALLDDPTNAHFIAWTGRGMEFKLIEPEEVARLWGIQKNRPAMNYDKLSRSLRYYYEKGIMQKVAGERYVYKFVCEPEALFSLAFPDNQRPALKAEFDRPVSEEDTVPLSHLDESPAYLPELAGPAQPFGPKGGYSY

SEQ ID NO: 28034 - protein, 484 aa, Homo sapiens; identical to SEQ ID NO: 28033
  REGION 1..484: note = ENSP00000377273

SEQ ID NO: 28035 - protein, 445 aa, Homo sapiens
  REGION 1..445: note = ENSP00000440023
MDPGSLPPLDSEDLFQDLSHFQETWLAEAQVPDSDEQFVPDFHSENLAFHSPTTRIKKEPQSPRTDPALSCSRKPPLPYHHGEQCLYSSAYDPPRQIAIKSPAPGALGQSPLQPFPRAEQRNFLRSSGTSQPHPGHGYLGEHSSVFQQPLDICHSFTSQGGGREPLPAPYQHQLSEPCPPYPQQSFKQEYHDPLYEQAGQPAVDQGGVNGHRYPGAGVVIKQEQTDFAYDSDVTGCASMYLHTEGFSGPSPGDGAMGYGYEKPLRPFPDDVCVVPEKFEGDIKQEGVGAFREGPPYQRRGALQLWQFLVALLDDPTNAHFIAWTGRGMEFKLIEPEEVARLWGIQKNRPAMNYDKLSRSLRYYYEKGIMQKVAGERYVYKFVCEPEALFSLAFPDNQRPALKAEFDRPVSEEDTVPLSHLDESPAYLPELAGPAQPFGPKGGYSY

SEQ ID NO: 28036 - protein, 430 aa, Homo sapiens
  REGION 1..430: note = ENSP00000441749
MERRMKAGYLDQQVPYTFSSKSPGNGSLREALIGPLGKLMDPGSLPPLDSEDLFQDLSHFQETWLAEAQVPDSDEQFVPDFHSENLAFHSPTTRIKKEPQSPRTDPALSCSRKPPLPYHHGEQCLYSSSVFQQPLDICHSFTSQGGGREPLPAPYQHQLSEPCPPYPQQSFKQEYHDPLYEQAGQPAVDQGGVNGHRYPGAGVVIKQEQTDFAYDSDVTGCASMYLHTEGFSGPSPGDGAMGYGYEKPLRPFPDDVCVVPEKFEGDIKQEGVGAFREGPPYQRRGALQLWQFLVALLDDPTNAHFIAWTGRGMEFKLIEPEEVARLWGIQKNRPAMNYDKLSRSLRYYYEKGIMQKVAGERYVYKFVCEPEALFSLAFPDNQRPALKAEFDRPVSEEDTVPLSHLDESPAYLPELAGPAQPFGPKGGYSY

SEQ ID NO: 28037 - protein, 484 aa, Homo sapiens; identical to SEQ ID NO: 28033
  REGION 1..484: note = ENSP00000465718

SEQ ID NO: 28038 - protein, 207 aa, Homo sapiens
  REGION 1..207: note = ENSP00000468636
MYLHTEGFSGPSPGDGAMGYGYEKPLRPFPDDVCVVPEKFEGDIKQEGVGAFREGPPYQRRGALQLWQFLVALLDDPTNAHFIAWTGRGMEFKLIEPEEVARLWGIQKNRPAMNYDKLSRSLRYYYEKGIMQKVAGERYVYKFVCEPEALFSLAFPDNQRPALKAEFDRPVSEEDTVPLSHLDESPAYLPELAGPAQPFGPKGGYSY

SEQ ID NO: 28039 - protein, 28 aa, Homo sapiens
  REGION 1..28: note = ENSP00000466673
MDPGSLPPLDSEDLFQDLSHFQETWLAE

SEQ ID NO: 28040 - protein, 445 aa, Homo sapiens; identical to SEQ ID NO: 28035
  REGION 1..445: note = ENSP00000443846

SEQ ID NO: 28041 - protein, 510 aa, Homo sapiens
  REGION 1..510: note = ENSP00000306894
MDGFYDQQVPFMVPGKSRSEECRGRPVIDRKRKFLDTDLAHDSEELFQDLSQLQEAWLAEAQVPDDEQFVPDFQSDNLVLHAPPPTKIKRELHSPSSELSSCSHEQALGANYGEKCLYNYCAYDRKPPSGFKPLTPPTTPLSPTHQNPLFPPPQATLPTSGHAPAAGPVQGVGPAPAPHSLPEPGPQQQTFAVPRPPHQPLQMPKMMPENQYPSEQRFQRQLSEPCHPFPPQPGVPGDNRPSYHRQMSEPIVPAAPPPPQGFKQEYHDPLYEHGVPGMPGPPAHGFQSPMGIKQEPRDYCVDSEVPNCQSSYMRGGYFSSSHEGFSYEKDPRLYFDDTCVVPERLEGKVKQEPTMYREGPPYQRRGSLQLWQFLVTLLDDPANAHFIAWTGRGMEFKLIEPEEVARRWGIQKNRPAMNYDKLSRSLRYYYEKGIMQKVAGERYVYKFVCDPDALFSMAFPDNQRPFLKAESECHLSEEDTLPLTHFEDSPAYLLDMDRCSSLPYAEGFAY

SEQ ID NO: 28042 - protein, 510 aa, Homo sapiens; identical to SEQ ID NO: 28041
  REGION 1..510: note = ENSP00000413755

SEQ ID NO: 28043 - protein, 89 aa, Homo sapiens
  REGION 1..89: note = ENSP00000399707
  VARIANT 1: note = Any amino acid
XVPAAPPPPQGFKQEYHDPLYEHGVPGMPGPPAHGFQSPMGIKQEPRDYCVDSEVPNCQSSYMRGGYFSSSHEGCSALGHPEEPASHEL

SEQ ID NO: 28044 - protein, 150 aa, Homo sapiens
  REGION 1..150: note = ENSP00000389707
MDGFYDQQVPFMVPGKSRSEECRGRPVIDRKRKFLDTDLAHDSEELFQDLSQLQEAWLAEAQVPDDEQFVPDFQSDNLVLHAPPPTKIKRELHSPSSELSSCSHEQALGANYGEKCLYNYCAYDRKPPSGFKPLTPPTTPLSPTHQNPLF

SEQ ID NO: 28045 - protein, 140 aa, Homo sapiens
  REGION 1..140: note = ENSP00000412171
MDGFYDQQVPFMVPGKSRSEECRGRPVIDRKRKFLDTDLAHDSEELFQDLSQLQEAWLAEAQVPDDEQFVPDFQSDNLVLHAPPPTKIKRELHSPSSELSSCSHEQALGANYGEKCLYNYCAYDRKPPSGFKPLTPPTTP

SEQ ID NO: 28046 - protein, 132 aa, Homo sapiens
  REGION 1..132: note = ENSP00000405157
MDGFYDQQVPFMVPGKSRSEECRGRPVIDRKRKFLDTDLAHDSEELFQDLSQLQEAWLAEAQVPDDEQFVPDFQSDNLVLHAPPPTKIKRELHSPSSELSSCSHEQALGANYGEKCLYNYCAYDRKPPSGFK

SEQ ID NO: 28047 - protein, 132 aa, Homo sapiens
  REGION 1..132: note = ENSP00000388737
MDGFYDQQVPFMVPGKSRSEECRGRPVIDRKRKFLDTDLAHDSEELFQDLSQLQEAWLAEAQVPDDEQFVPDFQSDNPFLFKLPQEFMIPFQFQFVAILYSPGSLSSFSKSAVQSGASCPTSNQDQTGAAQP

SEQ ID NO: 28048 - protein, 152 aa, Homo sapiens
  REGION 1..152: note = ENSP00000377490
MRLPLSHSPEHVEMALLSNILAAYSFVSENPERAALYFVSGVCIGLVLTLAALVIRISCHTDCRRRPGKKFLQDRESSSDSSDSEDGSEDTVSDLSVRRHRRFERTLNKNVFTSAEELERAQRLEERERIIREIWMNGQPEVPGTRSLNRYY

SEQ ID NO: 28049 - protein, 152 aa, Homo sapiens; identical to SEQ ID NO: 28048
  REGION 1..152: note = ENSP00000386435

SEQ ID NO: 28050 - protein, 140 aa, Homo sapiens
  REGION 1..140: note = ENSP00000386835
MKGSKSFVLQKMFSCSKNPERAALYFVSGVCIGLVLTLAALVIRISCHTDCRRRPGKKFLQDRESSSDSSDSEDGSEDTVSDLSVRRHRRFERTLNKNVFTSAEELERAQRLEERERIIREIWMNGQPEVPGTRSLNRYY

SEQ ID NO: 28051 - protein, 152 aa, Homo sapiens; identical to SEQ ID NO: 28048
  REGION 1..152: note = ENSP00000386930

SEQ ID NO: 28052 - protein, 142 aa, Homo sapiens
  REGION 1..142: note = ENSP00000398249
MRLPLSHSPEHVEMALLSNILAAYSFVSENPERAALYFVSGVCIGLVLTLAALVIRISCHTDCRRRPGKKFLQDRESSSDSSDSEDGSEDTVSDLSVRRHRRFERTLNKNVFTSAEELERAQRLEERERIIREIWMNGQPEV

SEQ ID NO: 28053 - protein, 101 aa, Homo sapiens
  REGION 1..101: note = ENSP00000388105
MRLPLSHSPEHVEMALLSNILAAYSFVSENPERAALYFVSGVCIGLVLTLAALVIRISCHTDCRRRPGKKFLQDRESSSDSSDSEDGSEDTVSDLSVRRHR

SEQ ID NO: 28054 - protein, 152 aa, Homo sapiens; identical to SEQ ID NO: 28048
  REGION 1..152: note = ENSP00000233712

SEQ ID NO: 28055 - protein, 245 aa, Homo sapiens
  REGION 1..245: note = ENSP00000315476
MAGLELLSDQGYRVDGRRAGELRKIQARMGVFAQADGSAYIEQGNTKALAVVYGPHEIRGSRARALPDRALVNCQYSSATFSTGERKRRPHGDRKSCEMGLQLRQTFEAAILTQLHPRSQIDIYVQVLQADGGTYAACVNAATLAVLDAGIPMRDFVCACSAGFVDGTALADLSHVEEAAGGPQLALALLPASGQIALLEMDARLHEDHLERVLEAAAQAARDVHTLLDRVVRQHVREASILLGD

SEQ ID NO: 28056 - protein, 156 aa, Homo sapiens
  REGION 1..156: note = ENSP00000432661
MAGLELLSDQGYRVDGRRAGELRKIQARMGVFAQADGSAYIEQGNTKALAVVYGPHEIRGSRARALPDRALVNCQYSSATFSTGATGRWWDLCSLCECSHAGSAGCRDTHERLCVCVLSWLRGRHSPGGPQPCGGSSWWPPAGPGPAASLRTDCAA

SEQ ID NO: 28057 - protein, 261 aa, Homo sapiens
  REGION 1..261: note = ENSP00000436539
MFVNLGWQGMGQGWTQGSQLKGARGRHMQDRERKTGGFVLEVTQLPLAEALKVEGEADPQRTVECELEGVGLAHVSVLFQIRGSRARALPDRALVNCQYSSATFSTGERKRRPHGDRKSCEMGLQLRQTFEAAILTQLHPRSQIDIYVQVLQADGGTYAACVNAATLAVLDAGIPMRDFVCACSAGFVDGTALADLSHVEEAAGGPQLALALLPASGQIALLEMDARLHEDHLERVLEAAAQAARDVHTLLDRVVRQHVRE

SEQ ID NO: 28058 - protein, 1989 aa, Homo sapiens
  REGION 1..1989: note = ENSP00000265843
MTKVPPAFDFSFLNDEEARKILQVLERNEELQRAEKDRISKLQKTKRDIRWLQGVTGEWFEEIQRKKFCNETDVSQMLKQPLTYRLSKEMAKNDPIELPTSRSKNVTNQKKPTPFSSRMSFRSSFASLFSFRKSGKETSKLPSLGQKGCDGHAGPPMPVRGAAVQAKIYNSPLENHLVDSTFVPKPAVMREESGMPPPWDASLLENEFFQVLDDLDSKLAQEQSASSVNTRTPLNYGSRTQFGHFYSSGNRHGNITERHKKHYNETSNMSIYDILRPGTPREGFKTFSPRTSTIYDMYRTREPRVFKEDYVQKNTFGSTSLCFDSRQRSALPATGHFTARSLHFPATTQSKSGFIPPRHQQSPKRTPLSSIIWNRSDSSRDRENQEEFLRAPSPMEIDPADKYVYPRGFQENKRYESYHSQNVYQRVSLNAPMENAMSPDTFENSENMPFYHQSNTFTRSFFSNTFGRSGEQRRFGQGPFWGQEKGHSFWSDFHRSRKSFSSSDRDFEMISMEANSVSAIHGHNVSSEHWESFSSGYGTDVSRGQEEPHPWQFDFQRSTLDSMVVSHGNETQLTPHFGTPNVCSMTGSSYHVKSSELVSQQDSSPVEVHINKEASSFGIAQTLASSFKTSFSQISDDRRNPQSPNLQNPTVTLQKIFPNKPASHPMRSHTEVTVTSSNSVDSLPLAKSQPNILVTEVNNEKDLNESISEEDKQLSKMDQTNKAGEIPQPVSQTGISNSLPDFQNPLSQDSAKSNGFGFNASTIISSKKSPRVFSRKDTSKMYIPHTDKSNDIKQDKRFTENRKLGSTASLPFIQEHRTPPSFPRTDQGCHQELTVNNEDISRIITNNHWSSALTDTQNAQYSKCKLTPGHKTSCDSLDLSSAALPDSSPSKNSSLDAPVVPSTTVFSRRSPSDKDPSLGEREEKDNAGKNQKNQFIVSHSENQERNDSPVPTHDEVVDVKCHSHSPFRNERGKGKIRHHISCIEKLSKTESISVPTSDHRSLIEANQSNSKVSELDTIYCTLPRKSSSFLIHGRQSGSKIMAASLRNGPPPFQIKNNVEDAMGNYMLNKFSPSSPESANECSKVLSDSALEAPEATERMTNVKSSGSTSVRKGPLPFLINRAMSCPSGEPHASTGREGRKKPLTSGMDASELTPRAWERIISPVESDSSVRDCSLTKRQHQKENFQEYTEKEGKMAASRRSVFALSNEDPLPFCSDLSGKERGKTLHKVKTTSTFSVSGDEDNVKCLEVVSIYYTLPRKPSKKFCNLLQQYTQNTNLLIESPQVETETFPNALEKDKQNYSTREQSGTPSCENLKMSVNSDQTLTTENMTAFRLSNRGPLAPTLQEMASVEAAVSLPEEESKAREIFSDNLAKTPLGDSENKKERGKKLQSETLHTSLMLQRKNVSEEKSENCQQSINSSNSGPSSLPALSEVNIGNSQTRRSSWECTGSGRAIPFTGSGKCPQKDHTSTAVGDGSSGSQPREGRGDIGTNCQKMTNKTLSHSESQVFALTPALHKLQLGEETQSDEPNLESLQSEPRELPQRSQEANMTESRKAEDEMQKSAWDQPSLPEGNKNKTNLDDLVKGENRSSVKHRLAAMSKASRKFPAKDVSPRRHVATIFPQSGSRSGFDHLSLGTVECNPLFPEPTPKSAESIGESRLSENGKHVKKSENLLPITVLPNREPSTHVSNQKSNSISQRHQNEFKNVSESPSKHENSKDVTAAQNLVRESGAPSPITFTSLREAEFSDNQRRLSPPFPLEPAQKSRVSSPLASFLQQQRSASSLEWEPEPHLYRSKSLKSINVHGDLLRKSHPPKVRERHFSESTSIDNALSRLTLGNEFSVNNGYSRRFRSFSELPSCDGNESWAYRSGTKTGPRSAISIYRPIDYGIFGKEQQLAFLENVKRSLTQGRLWKPSFLKNPGFLKDDLRNPPNPSESLSSNSPSSQVPEDGLSPSEPLNIYEDDPVDSDCDTDTTTDDEYYLDENDKESEL

SEQ ID NO: 28059 - protein, 1982 aa, Homo sapiens
  REGION 1..1982: note = ENSP00000432546
MSLSFLNDEEARKILQVLERNEELQRAEKDRISKLQKTKRDIRWLQGVTGEWFEEIQRKKFCNETDVSQMLKQPLTYRLSKEMAKNDPIELPTSRSKNVTNQKKPTPFSSRMSFRSSFASLFSFRKSGKETSKLPSLGQKGCDGHAGPPMPVRGAAVQAKIYNSPLENHLVDSTFVPKPAVMREESGMPPPWDASLLENEFFQVLDDLDSKLAQEQSASSVNTRTPLNYGSRTQFGHFYSSGNRHGNITERHKKHYNETSNMSIYDILRPGTPREGFKTFSPRTSTIYDMYRTREPRVFKEDYVQKNTFGSTSLCFDSRQRSALPATGHFTARSLHFPATTQSKSGFIPPRHQQSPKRTPLSSIIWNRSDSSRDRENQEEFLRAPSPMEIDPADKYVYPRGFQENKRYESYHSQNVYQRVSLNAPMENAMSPDTFENSENMPFYHQSNTFTRSFFSNTFGRSGEQRRFGQGPFWGQEKGHSFWSDFHRSRKSFSSSDRDFEMISMEANSVSAIHGHNVSSEHWESFSSGYGTDVSRGQEEPHPWQFDFQRSTLDSMVVSHGNETQLTPHFGTPNVCSMTGSSYHVKSSELVSQQDSSPVEVHINKEASSFGIAQTLASSFKTSFSQISDDRRNPQSPNLQNPTVTLQKIFPNKPASHPMRSHTEVTVTSSNSVDSLPLAKSQPNILVTEVNNEKDLNESISEEDKQLSKMDQTNKAGEIPQPVSQTGISNSLPDFQNPLSQDSAKSNGFGFNASTIISSKKSPRVFSRKDTSKMYIPHTDKSNDIKQDKRFTENRKLGSTASLPFIQEHRTPPSFPRTDQGCHQELTVNNEDISRIITNNHWSSALTDTQNAQYSKCKLTPGHKTSCDSLDLSSAALPDSSPSKNSSLDAPVVPSTTVFSRRSPSDKDPSLGEREEKDNAGKNQKNQFIVSHSENQERNDSPVPTHDEVVDVKCHSHSPFRNERGKGKIRHHISCIEKLSKTESISVPTSDHRSLIEANQSNSKVSELDTIYCTLPRKSSSFLIHGRQSGSKIMAASLRNGPPPFQIKNNVEDAMGNYMLNKFSPSSPESANECSKVLSDSALEAPEATERMTNVKSSGSTSVRKGPLPFLINRAMSCPSGEPHASTGREGRKKPLTSGMDASELTPRAWERIISPVESDSSVRDCSLTKRQHQKENFQEYTEKEGKMAASRRSVFALSNEDPLPFCSDLSGKERGKTLHKVKTTSTFSVSGDEDNVKCLEVVSIYYTLPRKPSKKFCNLLQQYTQNTNLLIESPQVETETFPNALEKDKQNYSTREQSGTPSCENLKMSVNSDQTLTTENMTAFRLSNRGPLAPTLQEMASVEAAVSLPEEESKAREIFSDNLAKTPLGDSENKKERGKKLQSETLHTSLMLQRKNVSEEKSENCQQSINSSNSGPSSLPALSEVNIGNSQTRRSSWECTGSGRAIPFTGSGKCPQKDHTSTAVGDGSSGSQPREGRGDIGTNCQKMTNKTLSHSESQVFALTPALHKLQLGEETQSDEPNLESLQSEPRELPQRSQEANMTESRKAEDEMQKSAWDQPSLPEGNKNKTNLDDLVKGENRSSVKHRLAAMSKASRKFPAKDVSPRRHVATIFPQSGSRSGFDHLSLGTVECNPLFPEPTPKSAESIGESRLSENGKHVKKSENLLPITVLPNREPSTHVSNQKSNSISQRHQNEFKNVSESPSKHENSKDVTAAQNLVRESGAPSPITFTSLREAEFSDNQRRLSPPFPLEPAQKSRVSSPLASFLQQQRSASSLEWEPEPHLYRSKSLKSINVHGDLLRKSHPPKVRERHFSESTSIDNALSRLTLGNEFSVNNGYSRRFRSFSELPSCDGNESWAYRSGTKTGPRSAISIYRPIDYGIFGKEQQLAFLENVKRSLTQGRLWKPSFLKNPGFLKDDLRNPPNPSESLSSNSPSSQVPEDGLSPSEPLNIYEDDPVDSDCDTDTTTDDEYYLDENDKESEL

SEQ ID NO: 28060 - protein, 1733 aa, Homo sapiens
  REGION 1..1733: note = ENSP00000432683
MLKQPLTYRLSKEMAKNDPIELPTSRSKNVTNQKKPTPFSSRMSFRSSFASLFSFRKSGKETSKLPSLGQKGCDGHAGPPMPVRGAAVQAKIYNSPLENHLVDSTFVPKPAVMREESGMPPPWDASLLENEFFQVLDDLDSKLAQEQSASSVNTRTPLNYGSRTQFGHFYSSGNRHGNITERHKKHYNETSNMSIYDILRPGTPREGFKTFSPRTSTIYDMYRTREPRVFKEDYVQKNTFGSTSLCFDSRQRSALPATGHFTARSLHFPATTQSKSGFIPPRHQQSPKRTPLSSIIWNRSDSSRDRENQEEFLRAPSPMEIDPADKYVYPRGFQENKRYESYHSQNVYQRVSLNAPMENAMSPDTFENSENMPFYHQSNTFTRSFFSNTFGRSGEQRRFGQGPFWGQEKGHSFWSDFHRSRKSFSSSDRDFEMISMEANSVSAIHGHNVSSEHWESFSSGYGTDVSRGQEEPHPWQFDFQRSTLDSMVVSHGNETQLTPHFGTPNVCSMTGSSYHVKSSELVSQQDSSPVEVHINKEASSFGIAQTLASSFKTSFSQISDDRRNPQSPNLQNPTVTLQKIFPNKPASHPMRSHTEVTVTSSNSVDSLPLAKSQPNILVTEVNNEKDLNESISEEDKQLSKMDQTNKAGEIPQPVSQTGISNSLPDFQNPLSQDSAKSNGFGFNASTIISSKKSPRVFSRKDTSKMYIPHTDKSNDIKQDKRFTENRKLGSTASLPFIQEHRTPPSFPRTDQGCHQELTVNNEDISRIITNNHWSSALTDTQNAQYSKCKLTPGHKTSCDSLDLSSAALPDSSPSKNSSLDAPVVPSTTVFSRRSPSDKDPSLGEREEKDNAGKNQKNQFIVSHSENQERNDSPVPTHDEVVDVKCHSHSPFRNERGKGKIRHHISCIEKLSKTESISVPTSDHRSLIEANQSNSKVSELDTIYCTLPRKSSSFLIHGRQSGSKIMAASLRNGPPPFQIKNNVEDAMGNYMLNKFSPSSPESANECSKVLSDSALEAPEATERMTNVKSSGSTSVRKGPLPFLINRAMSCPSGEPHASTGREGRKKPLTSGMDASELTPRAWERIISPVESDSSVRDCSLTKRQHQKENFQEYTEKEGKMAASRRSVFALSNEDPLPFCSDLSGKERGKTLHKVKTTSTFSVSGDEDNVKCLEVVSIYYTLPRKPSKKFCNLLQQYTQNTNLLIESPQVETETFPNALEKDKQNYSTREQSGTPSCENLKMSVNSDQTLTTENMTAFRLSNRGPLAPTLQEMASVEAAVSLPEEESKAREIFSDNLAKTPLGDSENKKERGKKLQSETLHTSLMLQRKNVSEEKSENCQQSINSSNSGPSSLPALSEVNIGNSQTRRSSWECTGSGRAIPFTGSGKCPQKDHTSTAVGDGSSGSQPREGRGDIGTNCQKMTNKTLSHSESQVFALTPALHKLQLGEETQSDEPNLESLQSEPRELPQRSQEANMTESRKAEDEMQKSAWDQPSLPEGNKNKTNLDDLVKGENRSSVKHRLAAMSKASRKFPAKDVSPRRHVATIFPQSGSRSGFDHLSLGTVECNPLFPEPTPKSAESIGESRLSENGKHVKKSENLLPITVLPNREPSTHVSNQKSNSISQRHQNEFKNVSESPSKHENSKDVTAAQNLVRESGAPSPITFTSLREAEFSDNQRRLSPPFPLEPAQKSRVSSPLASFLQQQRSASSLEWEPEPHLYRSKSLKSINVHGDLLRK

SEQ ID NO: 28061 - protein, 1192 aa, Homo sapiens
  REGION 1..1192: note = ENSP00000446434
MREESGMPPPWDASLLENEFFQVLDDLDSKLAQEQSASSVNTRTPLNYGSRTQFGHFYSSGNRHGNITERHKKHYNETSNMSIYDILRPGTPREGFKTFSPRTSTIYDMYRTREPRVFKEDYVQKNTFGSTSLCFDSRQRSALPATGHFTARSLHFPATTQSKSGFIPPRHQQSPKRTPLSSIIWNRSDSSRDRENQEEFLRAPSPMEIDPADKYVYPRGFQENKRYESYHSQNVYQRVSLNAPMENAMSPDTFENSENMPFYHQSNTFTRSFFSNTFGRSGEQRRFGQGPFWGQEKGHSFWSDFHRSRKSFSSSDRDFEMISMEANSVSAIHGHNVSSEHWESFSSGYGTDVSRGQEEPHPWQFDFQRSTLDSMVVSHGNETQLTPHFGTPNVCSMTGSSYHVKSSELVSQQDSSPVEVHINKEASSFGIAQTLASSFKTSFSQISDDRRNPQSPNLQNPTVTLQKIFPNKPASHPMRSHTEVTVTSSNSVDSLPLAKSQPNILVTEVNNEKDLNESISEEDKQLSKMDQTNKAGEIPQPVSQTGISNSLPDFQNPLSQDSAKSNGFGFNASTIISSKKSPRVFSRKDTSKMYIPHTDKSNDIKQDKRFTENRKLGSTASLPFIQEHRTPPSFPRTDQGCHQELTVNNEDISRIITNNHWSSALTDTQNAQYSKCKLTPGHKTSCDSLDLSSAALPDSSPSKNSSLDAPVVPSTTVFSRRSPSDKDPSLGEREEKDNAGKNQKNQFIVSHSENQERNDSPVPTHDEVVDVKCHSHSPFRNERGKGKIRHHISCIEKLSKTESISVPTSDHRSLIEANQSNSKVSELDTIYCTLPRKSSSFLIHGRQSGSKIMAASLRNGPPPFQIKNNVEDAMGNYMLNKFSPSSPESANECSKVLSDSALEAPEATERMTNVKSSGSTSVRKGPLPFLINRAMSCPSGEPHASTGREGRKKPLTSGMDASELTPRAWERIISPVESDSSVRDCSLTKRQHQKENFQEYTEKEGKMAASRRSVFALSNEDPLPFCSDLSGKERGKTLHKVKTTSTFSVSGDEDNVKCLEVVSIYYTLPRKPSKKFCNLLQQYTQNTNLLIESPQVETETFPNALEKDKQNYSTREQSGTPSCENLKMSVNSDQTLTTENMTAFRLSNRGPLAPTLQEMASVEAAVSLPEEESKAREIFSDNLAKTPLGDSE

SEQ ID NO: 28062 - protein, 544 aa, Homo sapiens
  REGION 1..544: note = ENSP00000482691
MPVRGAAVQAKIYNSPLENHLVDSTFVPKPAVMREESGMPPPWDASLLENEFFQVLDDLDSKLAQEQSASSVNTRTPLNYGSRTQFGHFYSSGNRHGNITERHKKHYNETSNMSIYDILRPGTPREGFKTFSPRTSTIYDMYRTREPRVFKEDYVQKNTFGSTSLCFDSRQRSALPATGHFTARSLHFPATTQSKSGFIPPRHQQSPKRTPLSSIIWNRSDSSRDRENQEEFLRAPSPMEIDPADKYVYPRGFQENKRYESYHSQNVYQRVSLNAPMENAMSPDTFENSENMPFYHQSNTFTRSFFSNTFGRSGEQRRFGQGPFWGQEKGHSFWSDFHRSRKSFSSSDRDFEMISMEANSVSAIHGHNVSSEHWESFSSGYGTDVSRGQEEPHPWQFDFQRSTLDSMVVSHGNETQLTPHFGTPNVCSMTGSSYHVKSSELVSQQDSSPVEVHINKEASSFGIAQTLASSFKTSFSQISDDRRNPQSPNLQNPTVTLQKIFPNKPASHPMRSHTEVTVTSSNSVDSLPLAKSQPNILVTEVNNE

SEQ ID NO: 28063 - protein, 79 aa, Homo sapiens
  REGION 1..79: note = ENSP00000433909
MLKQPLTYRLSKEMAKNDPIELPTSRSKNVTNQKKPTPFSSRMSFRSSFASLFSFRKSGKETSKLPSLGQKGCDGHAGP

SEQ ID NO: 28064 - protein, 330 aa, Homo sapiens
  REGION 1..330: note = ENSP00000359131
MRCCHICKLPGRVMGIRVLRLSLVVILVLLLVAGALTALLPSVKEDKMLMLRREIKSQGKSTMDSFTLIMQTYNRTDLLLKLLNHYQAVPNLHKVIVVWNNIGEKAPDELWNSLGPHPIPVIFKQQTANRMRNRLQVFPELETNAVLMVDDDTLISTPDLVFAFSVWQQFPDQIVGFVPRKHVSTSSGIYSYGSFEMQAPGSGNGDQYSMVLIGASFFNSKYLELFQRQPAAVHALIDDTQNCDDIAMNFIIAKHIGKTSGIFVKPVNMDNLEKETNSGYSGMWHRAEHALQRSYCINKLVNIYDSMPLRYSNIMISQFGFPYANYKRKI

SEQ ID NO: 28065 - protein, 330 aa, Homo sapiens; identical to SEQ ID NO: 28064
  REGION 1..330: note = ENSP00000359132

SEQ ID NO: 28066 - protein, 266 aa, Homo sapiens
  REGION 1..266: note = ENSP00000403363
MRTWNSGGTKCCHICKLPGRVMGIRVLRLSLVVILVLLLVAGALTALLPSVKEDKMLMLRREIKSQGKSTMDSFTLIMQTYNRTDLLLKLLNHYQAVPNLHKVIVVWNNIGEKAPDELWNSLGPHPIPVIFKQQTANRMRNRLQVFPELETNAVLMVDDDTLISTPDLVFAFSVWQQFPDQIVGFVPRKHVSTSSGIYSYGSFEMQAPGSGNGDQYSMVLIGASFFNSKYLELFQRQPAAVHALIDDTQNCDDIAMNFIIAKHIGK

SEQ ID NO: 28067 - protein, 117 aa, Homo sapiens
  REGION 1..117: note = ENSP00000392255
MGIRVLRLSLVVILVLLLVAGALTALLPSVKEDKMLMLRREIKSQGKSTMDSFTLIMQTYNRTDLLLKLLNHYQAVPNLHKVIVVWNNIGEKAPDELWNSLGPHPIPVIFKQQTANR

SEQ ID NO: 28068 - protein, 147 aa, Homo sapiens
  REGION 1..147: note = ENSP00000444385
MRCCHICKLPGRVMGIRVLRLSLVVILVLLLVAGALTALLPSVKEDKMLMLRREIKSQGKSTMDSFTLIMQTYNRTDLLLKLLNHYQAVPNLHKVIVVWNNIGEKAPDELWNSLGPHPIPVIFKQQTANRMRNRLQVFPELETNAIS

SEQ ID NO: 28069 - protein, 592 aa, Homo sapiens
  REGION 1..592: note = ENSP00000373394
MEMQDLTSPHSRLSGSSESPSGPKLGNSHINSNSMTPNGTEVKTEPMSSSETASTTADGSLNNFSGSAIGSSSFSPRPTHQFSPPQIYPSNRPYPHILPTPSSQTMAAYGQTQFTTGMQQATAYATYPQPGQPYGISSYGALWAGIKTEGGLSQSQSPGQTGFLSYGTSFSTPQPGQAPYSYQMQGSSFTTSSGIYTGNNSLTNSSGFNSSQQDYPSYPSFGQGQYAQYYNSSPYPAHYMTSSNTSPTTPSTNATYQLQEPPSGITSQAVTDPTAEYSTIHSPSTPIKDSDSDRLRRGSDGKSRGRGRRNNNPSPPPDSDLERVFIWDLDETIIVFHSLLTGSYANRYGRDPPTSVSLGLRMEEMIFNLADTHLFFNDLEECDQVHIDDVSSDDNGQDLSTYNFGTDGFPAAATSANLCLATGVRGGVDWMRKLAFRYRRVKEIYNTYKNNVGGLLGPAKREAWLQLRAEIEALTDSWLTLALKALSLIHSRTNCVNILVTTTQLIPALAKVLLYGLGIVFPIENIYSATKIGKESCFERIIQRFGRKVVYVVIGDGVEEEQGAKKHAMPFWRISSHSDLMALHHALELEYL

SEQ ID NO: 28070 - protein, 212 aa, Homo sapiens
  REGION 1..212: note = ENSP00000428391
MEMQDLTSPHSRLSGSSESPSGPKLGNSHINSNSMTPNGTEVKTEPMSSSETASTTADGSLNNFSGSAIGSSSFSPRPTHQFSPPQIYPSNLPQECNKLQPMPRTHSQDSRTAFPHMASRLKVDCHSLSHLDRQDFSAMAQASVPLNLDRHHTATRCKVAVLQHHQEYIQEIIHSQIPLDLIVHSRTIRLIPVLARVSTHSIITAHRIQHII

SEQ ID NO: 28071 - protein, 592 aa, Homo sapiens; identical to SEQ ID NO: 28069
  REGION 1..592: note = ENSP00000342626

SEQ ID NO: 28072 - protein, 586 aa, Homo sapiens
  REGION 1..586: note = ENSP00000303221
MEMQDLTSPHSRLSGSSESPSGPKLGNSHINSNSMTPNGTEVKTEPMSSSETASTTADGSLNNFSGSAIGSSSFSPRPTHQFSPPQIYPSKPYPHILPTPSSQTMAAYGQTQFTTGMQQATAYATYPQPGQPYGISSYGIKTEGGLSQSQSPGQTGFLSYGTSFSTPQPGQAPYSYQMQGSSFTTSSGIYTGNNSLTNSSGFNSSQQDYPSYPSFGQGQYAQYYNSSPYPAHYMTSSNTSPTTPSTNATYQLQEPPSGITSQAVTDPTAEYSTIHSPSTPIKDSDSDRLRRGSDGKSRGRGRRNNNPSPPPDSDLERVFIWDLDETIIVFHSLLTGSYANRYGRDPPTSVSLGLRMEEMIFNLADTHLFFNDLEECDQVHIDDVSSDDNGQDLSTYNFGTDGFPAAATSANLCLATGVRGGVDWMRKLAFRYRRVKEIYNTYKNNVGGLLGPAKREAWLQLRAEIEALTDSWLTLALKALSLIHSRTNCVNILVTTTQLIPALAKVLLYGLGIVFPIENIYSATKIGKESCFERIIQRFGRKVVYVVIGDGVEEEQGAKKHAMPFWRISSHSDLMALHHALELEYL

SEQ ID NO: 28073 - protein, 558 aa, Homo sapiens
  REGION 1..558: note = ENSP00000373393
MLLFPQVAVKTEPMSSSETASTTADGSLNNFSGSAIGSSSFSPRPTHQFSPPQIYPSKPYPHILPTPSSQTMAAYGQTQFTTGMQQATAYATYPQPGQPYGISSYGALWAGIKTEGGLSQSQSPGQTGFLSYGTSFSTPQPGQAPYSYQMQGSSFTTSSGIYTGNNSLTNSSGFNSSQQDYPSYPSFGQGQYAQYYNSSPYPAHYMTSSNTSPTTPSTNATYQLQEPPSGITSQAVTDPTAEYSTIHSPSTPIKDSDSDRLRRGSDGKSRGRGRRNNNPSPPPDSDLERVFIWDLDETIIVFHSLLTGSYANRYGRDPPTSVSLGLRMEEMIFNLADTHLFFNDLEECDQVHIDDVSSDDNGQDLSTYNFGTDGFPAAATSANLCLATGVRGGVDWMRKLAFRYRRVKEIYNTYKNNVGGLLGPAKREAWLQLRAEIEALTDSWLTLALKALSLIHSRTNCVNILVTTTQLIPALAKVLLYGLGIVFPIENIYSATKIGKESCFERIIQRFGRKVVYVVIGDGVEEEQGAKKHAMPFWRISSHSDLMALHHALELEYL

SEQ ID NO: 28074 - protein, 591 aa, Homo sapiens
  REGION 1..591: note = ENSP00000373395
MEMQDLTSPHSRLSGSSESPSGPKLGNSHINSNSMTPNGTEVKTEPMSSSETASTTADGSLNNFSGSAIGSSSFSPRPTHQFSPPQIYPSKPYPHILPTPSSQTMAAYGQTQFTTGMQQATAYATYPQPGQPYGISSYGALWAGIKTEGGLSQSQSPGQTGFLSYGTSFSTPQPGQAPYSYQMQGSSFTTSSGIYTGNNSLTNSSGFNSSQQDYPSYPSFGQGQYAQYYNSSPYPAHYMTSSNTSPTTPSTNATYQLQEPPSGITSQAVTDPTAEYSTIHSPSTPIKDSDSDRLRRGSDGKSRGRGRRNNNPSPPPDSDLERVFIWDLDETIIVFHSLLTGSYANRYGRDPPTSVSLGLRMEEMIFNLADTHLFFNDLEECDQVHIDDVSSDDNGQDLSTYNFGTDGFPAAATSANLCLATGVRGGVDWMRKLAFRYRRVKEIYNTYKNNVGGLLGPAKREAWLQLRAEIEALTDSWLTLALKALSLIHSRTNCVNILVTTTQLIPALAKVLLYGLGIVFPIENIYSATKIGKESCFERIIQRFGRKVVYVVIGDGVEEEQGAKKHAMPFWRISSHSDLMALHHALELEYL

SEQ ID NO: 28075 - protein, 557 aa, Homo sapiens
  REGION 1..557: note = ENSP00000410176
MEMQDLTSPHSRLSGSSESPSGPKLGNSHINSNSMTPNGTEVKTEPMSSSETASTTADGSLNNFSGSAIGSSSFSPRPTHQFSPPQIYPSNRPYPHILPTPSSQTMAAYGQTQFTTGMQQATAYATYPQPGQPYGISSYGIKTEGGLSQSQSPGQTGFLSYGTSFSTPQPGQAPYSYQMQGSSFTTSSGIYTGNNSLTNSSGFNSSQQDYPSYPSFGQGQYAQYYNSSPYPAHYMTSSNTSPTTPSTNATYQLQEPPSGITSQAVTDPTAEYSTIHSPSTPIKDSDSDRLRRGSDGKSRGRGRRNNNPSPPPDSDLERVFIWDLDETIIVFHSLLTGSYANRYGRECDQVHIDDVSSDDNGQDLSTYNFGTDGFPAAATSANLCLATGVRGGVDWMRKLAFRYRRVKEIYNTYKNNVGGLLGPAKREAWLQLRAEIEALTDSWLTLALKALSLIHSRTNCVNILVTTTQLIPALAKVLLYGLGIVFPIENIYSATKIGKESCFERIIQRFGRKVVYVVIGDGVEEEQGAKKHAMPFWRISSHSDLMALHHALELEYL

SEQ ID NO: 28076 - protein, 41 aa, Homo sapiens
  REGION 1..41: note = ENSP00000428517
MEEMIFNLADTHLFFNDLEESRASRESMMLVKLGRRKPSSA

SEQ ID NO: 28077 - protein, 559 aa, Homo sapiens
  REGION 1..559: note = ENSP00000373392
MLLFPQVAVKTEPMSSSETASTTADGSLNNFSGSAIGSSSFSPRPTHQFSPPQIYPSNRPYPHILPTPSSQTMAAYGQTQFTTGMQQATAYATYPQPGQPYGISSYGALWAGIKTEGGLSQSQSPGQTGFLSYGTSFSTPQPGQAPYSYQMQGSSFTTSSGIYTGNNSLTNSSGFNSSQQDYPSYPSFGQGQYAQYYNSSPYPAHYMTSSNTSPTTPSTNATYQLQEPPSGITSQAVTDPTAEYSTIHSPSTPIKDSDSDRLRRGSDGKSRGRGRRNNNPSPPPDSDLERVFIWDLDETIIVFHSLLTGSYANRYGRDPPTSVSLGLRMEEMIFNLADTHLFFNDLEECDQVHIDDVSSDDNGQDLSTYNFGTDGFPAAATSANLCLATGVRGGVDWMRKLAFRYRRVKEIYNTYKNNVGGLLGPAKREAWLQLRAEIEALTDSWLTLALKALSLIHSRTNCVNILVTTTQLIPALAKVLLYGLGIVFPIENIYSATKIGKESCFERIIQRFGRKVVYVVIGDGVEEEQGAKKHAMPFWRISSHSDLMALHHALELEYL

SEQ ID NO: 28078 - protein, 3144 aa, Homo sapiens
  REGION 1..3144: note = ENSP00000424243
MTDKSIVILSLMVFHSSFINGKTCRRQLVEEWHPQPSSYVVNWTLTENICLDFYRDCWFLGVNTKIDTSGNQAVPQICPLQIQLGDILVISSEPSLQFPEINLMNVSETSFVGCVQNTTTEDQLLFGCRLKGMHTVNSKWLSVGTHYFITVMASGPSPCPLGLRLNVTVKQQFCQESLSSEFCSGHGKCLSEAWSKTYSCHCQPPFSGKYCQELDACSFKPCKNNGSCINKRENWDEQAYECVCHPPFTGKNCSEIIGQCQPHVCFHGNCSNITSNSFICECDEQFSGPFCEVSAKPCVSLLFWKRGICPNSSSAYTYECPKGSSSQNGETDVSEFSLVPCQNGTDCIKISNDVMCICSPIFTDLLCKSIQTSCESFPLRNNATCKKCEKDYPCSCISGFTEKNCEKAIDHCKLLSINCLNEEWCFNIIGRFKYVCIPGCTKNPCWFLKNVYLIHQHLCYCGVTFHGICQDKGPAQFEYVWQLGFAGSEGEKCQGVIDAYFFLAANCTEDATYVNDPEDNNSSCWFPHEGTKEICANGCSCLSEEDSQEYRYLCFLRWAGNMYLENTTDDQENECQHEAVCKDEINRPRCSCSLSYIGRLCVVNVDYCLGNHSISVHGLCLALSHNCNCSGLQRYERNICEIDTEDCKSASCKNGTTSTHLRGYFFRKCVPGFKGTQCEIDIDECASHPCKNGATCIDQPGNYFCQCVPPFKVVDGFSCLCNPGYVGIRCEQDIDDCILNACEHNSTCKDLHLSYQCVCLSDWEGNFCEQESNECKMNPCKNNSTCTDLYKSYRCECTSGWTGQNCSEEINECDSDPCMNGGLCHESTIPGQFVCLCPPLYTGQFCHQRYNLCDLLHNPCRNNSTCLALVDANQHCICREEFEGKNCEIDVKDCLFLSCQDYGDCEDMVNNFRCICRPGFSGSLCEIEINECSSEPCKNNGTCVDLTNRFFCNCEPEYHGPFCELDVNKCKISPCLDEENCVYRTDGYNCLCAPGYTGINCEINLDECLSEPCLHDGVCIDGINHYTCDCKSGFFGTHCETNANDCLSNPCLHGRCTELINEYPCSCDADGTSTQCKIKINDCTSIPCMNEGFCQKSAHGFTCICPRGYTGAYCEKSIDNCAEPELNSVICLNGGICVDGPGHTFDCRCLPGFSGQFCEININECSSSPCLHGADCEDHINGYVCKCQPGWSGHHCENELECIPNSCVHELCMENEPGSTCLCTPGFMTCSIGLLCGDEIRRITCLTPIFQRTDPISTQTYTIPPSETLVSSFPSIKATRIPAIMDTYPVDQGPKQTGIVKHDILPTTGLATLRISTPLESYLLQELIVTRELSAKHSLLSSADVSSSRFLNFGIRDPAQIVQDKTSVSHMPIRTSAATLGFFFPDRRARTPFIMSSLMSDFIFPTQSLLFENCQTVALSATPTTSVIRSIPGADIELNRQSLLSRGFLLIAASISATPVVSRGAQEDIEEYSADSLISRREHWRLLSPSMSPIFPAKVIISKQVTILNSSALHRFSTKAFNPSEYQAITEASSNQRLTNIKSQAADSLRELSQTCATCSMTEIKSSREFSDQVLHSKQSHFYETFWMNSAILASWYALMGAQTITSGHSFSSATEITPSVAFTEVPSLFPSKKSAKRTILSSSLEESITLSSNLDVNLCLDKTCLSIVPSQTISSDLMNSDLTSKMTTDELSVSENILKLLKIRQYGITMGPTEVLNQESLLDMEKSKGSHTLFKLHPSDSSLDFELNLQIYPDVTLKTYSEITHANDFKNNLPPLTGSVPDFSEVTTNVAFYTVSATPALSIQTSSSMSVIRPDWPYFTDYMTSLKKEVKTSSEWSKWELQPSVQYQEFPTASRHLPFTRSLTLSSLESILAPQRLMISDFSCVRYYGDSYLEFQNVALNPQNNISLEFQTFSSYGLLLYVKQDSNLVDGFFIQLFIENGTLKYHFYCPGEAKFKSINTTVRVDNGQKYTLLIRQELDPCNAELTILGRNTQICESINHVLGKPLPKSGSVFIGGFPDLHGKIQMPVPVKNFTGCIEVIEINNWRSFIPSKAVKNYHINNCRSQGFMLSPTASFVDASDVTQGVDTMWTSVSPSVAAPSVCQQDVCHNGGTCHAIFLSSGIVSFQCDCPLHFTGRFCEKDAGLFFPSFNGNSYLELPFLKFVLEKEHNRTVTIYLTIKTNSLNGTILYSNGNNCGKQFLHLFLVEGRPSVKYGCGNSQNILTVSANYSINTNAFTPITIRYTTPVGSPGVVCMIEMTADGKPPVQKKDTEISHASQAYFESMFLGHIPANVQIHKKAGPVYGFRGCILDLQVNNKEFFIIDEARHGKNIENCHVPWCAHHLCRNNGTCISDNENLFCECPRLYSGKLCQFASCENNPCGNGATCVPKSGTDIVCLCPYGRSGPLCTDAINITQPRFSGTDAFGYTSFLAYSRISDISFHYEFHLKFQLANNHSALQNNLIFFTGQKGHGLNGDDFLAVGLLNGSVVYSYNLGSGIASIRSEPLNLSLGVHTVHLGKFFQEGWLKVDDHKNKSIIAPGRLVGLNVFSQFYVGGYSEYTPDLLPNGADFKNGFQGCIFTLQVRTEKDGHFRGLGNPEGHPNAGRSVGQCHASPCSLMKCGNGGTCIESGTSVYCNCTTGWKGSFCTETVSTCDPEHDPPHHCSRGATCISLPHGYTCFCPLGTTGIYCEQALSISDPSFRSNELSWMSFASFHVRKKTHIQLQFQPLAADGILFYAAQHLKAQSGDFLCISLVNSSVQLRYNLGDRTIILETLQKVTINGSTWHIIKAGRVGAEGYLDLDGINVTEKASTKMSSLDTNTDFYIGGVSSLNLVNPMAIENEPVGFQGCIRQVIINNQELQLTEFGAKGGSNVGDCDGTACGYNTCRNGGECTVNGTTFSCRCLPDWAGNTCNQSVSCLNNLCLHQSLCIPDQSFSYSCLCTLGWVGRYCENKTSFSTAKFMGNSYIKYIDPNYRMRNLQFTTISLNFSTTKTEGLIVWMGIAQNEENDFLAIGLHNQTLKIAVNLGERISVPMSYNNGTFCCNKWHHVVVIQNQTLIKAYINNSLILSEDIDPHKNFVALNYDGICYLGGFEYGRKVNIVTQEIFKTNFVGKIKDVVFFQEPKNIELIKLEGYNVYDGDEQNEVT

SEQ ID NO: 28079 - protein, 3165 aa, Homo sapiens
  REGION 1..3165: note = ENSP00000359655
MTDKSIVILSLMVFHSSFINGKTCRRQLVEEWHPQPSSYVVNWTLTENICLDFYRDCWFLGVNTKIDTSGNQAVPQICPLQIQLGDILVISSEPSLQFPEINLMNVSETSFVGCVQNTTTEDQLLFGCRLKGMHTVNSKWLSVGTHYFITVMASGPSPCPLGLRLNVTVKQQFCQESLSSEFCSGHGKCLSEAWSKTYSCHCQPPFSGKYCQELDACSFKPCKNNGSCINKRENWDEQAYECVCHPPFTGKNCSEIIGQCQPHVCFHGNCSNITSNSFICECDEQFSGPFCEVSAKPCVSLLFWKRGICPNSSSAYTYECPKGSSSQNGETDVSEFSLVPCQNGTDCIKISNDVMCICSPIFTDLLCKSIQTSCESFPLRNNATCKKCEKDYPCSCISGFTEKNCEKAIDHCKLLSINCLNEEWCFNIIGRFKYVCIPGCTKNPCWFLKNVYLIHQHLCYCGVTFHGICQDKGPAQFEYVWQLGFAGSEGEKCQGVIDAYFFLAANCTEDATYVNDPEDNNSSCWFPHEGTKEICANGCSCLSEEDSQEYRYLCFLRWAGNMYLENTTDDQENECQHEAVCKDEINRPRCSCSLSYIGRLCVVNVDYCLGNHSISVHGLCLALSHNCNCSGLQRYERNICEIDTEDCKSASCKNGTTSTHLRGYFFRKCVPGFKGTQCEIDIDECASHPCKNGATCIDQPGNYFCQCVPPFKVVDGFSCLCNPGYVGIRCEQDIDDCILNACEHNSTCKDLHLSYQCVCLSDWEGNFCEQESNECKMNPCKNNSTCTDLYKSYRCECTSGWTGQNCSEEINECDSDPCMNGGLCHESTIPGQFVCLCPPLYTGQFCHQRYNLCDLLHNPCRNNSTCLALVDANQHCICREEFEGKNCEIDVKDCLFLSCQDYGDCEDMVNNFRCICRPGFSGSLCEIEINECSSEPCKNNGTCVDLTNRFFCNCEPEYHGPFCELDVNKCKISPCLDEENCVYRTDGYNCLCAPGYTGINCEINLDECLSEPCLHDGVCIDGINHYTCDCKSGFFGTHCETNANDCLSNPCLHGRCTELINEYPCSCDADGTSTQCKIKINDCTSIPCMNEGFCQKSAHGFTCICPRGYTGAYCEKSIDNCAEPELNSVICLNGGICVDGPGHTFDCRCLPGFSGQFCEININECSSSPCLHGADCEDHINGYVCKCQPGWSGHHCENELECIPNSCVHELCMENEPGSTCLCTPGFMTCSIGLLCGDEIRRITCLTPIFQRTDPISTQTYTIPPSETLVSSFPSIKATRIPAIMDTYPVDQGPKQTGIVKHDILPTTGLATLRISTPLESYLLQELIVTRELSAKHSLLSSADVSSSRFLNFGIRDPAQIVQDKTSVSHMPIRTSAATLGFFFPDRRARTPFIMSSLMSDFIFPTQSLLFENCQTVALSATPTTSVIRSIPGADIELNRQSLLSRGFLLIAASISATPVVSRGAQEDIEEYSADSLISRREHWRLLSPSMSPIFPAKVIISKQVTILNSSALHRFSTKAFNPSEYQAITEASSNQRLTNIKSQAADSLRELSQTCATCSMTEIKSSREFSDQVLHSKQSHFYETFWMNSAILASWYALMGAQTITSGHSFSSATEITPSVAFTEVPSLFPSKKSAKRTILSSSLEESITLSSNLDVNLCLDKTCLSIVPSQTISSDLMNSDLTSKMTTDELSVSENILKLLKIRQYGITMGPTEVLNQESLLDMEKSKGSHTLFKLHPSDSSLDFELNLQIYPDVTLKTYSEITHANDFKNNLPPLTGSVPDFSEVTTNVAFYTVSATPALSIQTSSSMSVIRPDWPYFTDYMTSLKKEVKTSSEWSKWELQPSVQYQEFPTASRHLPFTRSLTLSSLESILAPQRLMISDFSCVRYYGDSYLEFQNVALNPQNNISLEFQTFSSYGLLLYVKQDSNLVDGFFIQLFIENGTLKYHFYCPGEAKFKSINTTVRVDNGQKYTLLIRQELDPCNAELTILGRNTQICESINHVLGKPLPKSGSVFIGGFPDLHGKIQMPVPVKNFTGCIEVIEINNWRSFIPSKAVKNYHINNCRSQGFMLSPTASFVDASDVTQGVDTMWTSVSPSVAAPSVCQQDVCHNGGTCHAIFLSSGIVSFQCDCPLHFTGRFCEKDAGLFFPSFNGNSYLELPFLKFVLEKEHNRTVTIYLTIKTNSLNGTILYSNGNNCGKQFLHLFLVEGRPSVKYGCGNSQNILTVSANYSINTNAFTPITIRYTTPVGSPGVVCMIEMTADGKPPVQKKDTEISHASQAYFESMFLGHIPANVQIHKKAGPVYGFRGCILDLQVNNKEFFIIDEARHGKNIENCHVPWCAHHLCRNNGTCISDNENLFCECPRLYSGKLCQFASCENNPCGNGATCVPKSGTDIVCLCPYGRSGPLCTDAINITQPRFSGTDAFGYTSFLAYSRISDISFHYEFHLKFQLANNHSALQNNLIFFTGQKGHGLNGDDFLAVGLLNGSVVYSYNLGSGIASIRSEPLNLSLGVHTVHLGKFFQEGWLKVDDHKNKSIIAPGRLVGLNVFSQFYVGGYSEYTPDLLPNGADFKNGFQGCIFTLQVRTEKDGHFRGLGNPEGHPNAGRSVGQCHASPCSLMKCGNGGTCIESGTSVYCNCTTGWKGSFCTETVSTCDPEHDPPHHCSRGATCISLPHGYTCFCPLGTTGIYCEQALILIVILEKPKPAERKVKKEALSISDPSFRSNELSWMSFASFHVRKKTHIQLQFQPLAADGILFYAAQHLKAQSGDFLCISLVNSSVQLRYNLGDRTIILETLQKVTINGSTWHIIKAGRVGAEGYLDLDGINVTEKASTKMSSLDTNTDFYIGGVSSLNLVNPMAIENEPVGFQGCIRQVIINNQELQLTEFGAKGGSNVGDCDGTACGYNTCRNGGECTVNGTTFSCRCLPDWAGNTCNQSVSCLNNLCLHQSLCIPDQSFSYSCLCTLGWVGRYCENKTSFSTAKFMGNSYIKYIDPNYRMRNLQFTTISLNFSTTKTEGLIVWMGIAQNEENDFLAIGLHNQTLKIAVNLGERISVPMSYNNGTFCCNKWHHVVVIQNQTLIKAYINNSLILSEDIDPHKNFVALNYDGICYLGGFEYGRKVNIVTQEIFKTNFVGKIKDVVFFQEPKNIELIKLEGYNVYDGDEQNEVT

SEQ ID NO: 28080 - protein, 473 aa, Homo sapiens
  REGION 1..473: note = ENSP00000381585
  VARIANT 1: note = Any amino acid
XSINTNAFTPITIRYTTPVGSPGVVCMIEMTADGKPPVQKKDTEISHASQAYFESMFLGHIPANVQIHKKAGPVYGFRGCILDLQVNNKEFFIIDEARHGKNIENCHVPWCAHHLCRNNGTCISDNENLFCECPRLYSGKLCQFASCENNPCGNGATCVPKSGTDIVCLCPYGRSGPLCTDAINITQPRFSGTDAFGYTSFLAYSRISDISFHYEFHLKFQLANNHSALQNNLIFFTGQKGHGLNGDDFLAVGLLNGSVVYSYNLGSGIASIRSEPLNLSLGVHTVHLGKFFQEGWLKVDDHKNKSIIAPGRLVGLNVFSQFYVGGYSEYTPDLLPNGADFKNGFQGCIFTLQVRTEKDGHFRGLGNPEGHPNAGRSVGQCHASPCSLMKCGNGGTCIESGTSVYCNCTTGWKGSFCTETVSTCDPEHDPPHHCSRGATCISLPHGYTCFCPLGTTGIYCEQGHQFIGKDVFK

SEQ ID NO: 28081 - protein, 619 aa, Homo sapiens
  REGION 1..619: note = ENSP00000377042
MTDKSIVILSLMVFHSSFINGKTCRRQLVEEWHPQPSSYVVNWTLTENICLDFYRDCWFLGVNTKIDTSGNQAVPQICPLQIQLGDILVISSEPSLQFPEINLMNVSETSFVGCVQNTTTEDQLLFGCRLKGMHTVNSKWLSVGTHYFITVMASGPSPCPLGLRLNVTVKQQFCQESLSSEFCSGHGKCLSEAWSKTYSCHCQPPFSGKYCQELDACSFKPCKNNGSCINKRENWDEQAYECVCHPPFTGKNCSEIIGQCQPHVCFHGNCSNITSNSFICECDEQFSGPFCEVSAKPCVSLLFWKRGICPNSSSAYTYECPKGSSSQNGETDVSEFSLVPCQNGTDCIKISNDVMCICSPIFTDLLCKSIQTSCESFPLRNNATCKKCEKDYPCSCISGFTEKNCEKAIDHCKLLSINCLNEEWCFNIIGRFKYVCIPGCTKNPCWFLKNVYLIHQHLCYCGVTFHGICQDKGPAQFEYVWQLGFAGSEGEKCQGVIDAYFFLAANCTEDATYVNDPEDNNSSCWFPHEGTKEICANGCSCLSEEDSQEYRYLCFLRWAGNMYLENTTDDQENECQHEAVCKDEINRPRRILNTVIPHQIQQHIERFIQHDQVGFIVRI

SEQ ID NO: 28082 - protein, 594 aa, Homo sapiens
  REGION 1..594: note = ENSP00000341818
MTDKSIVILSLMVFHSSFINGKTCRRQLVEEWHPQPSSYVVNWTLTENICLDFYRDCWFLGVNTKIDTSGNQAVPQICPLQIQLGDILVISSEPSLQFPEINLMNVSETSFVGCVQNTTTEDQLLFGCRLKGMHTVNSKWLSVGTHYFITVMASGPSPCPLGLRLNVTVKQQFCQESLSSEFCSGHGKCLSEAWSKTYSCHCQPPFSGKYCQELDACSFKPCKNNGSCINKRENWDEQAYECVCHPPFTGKNCSEIIGQCQPHVCFHGNCSNITSNSFICECDEQFSGPFCEVSAKPCVSLLFWKRGICPNSSSAYTYECPKGSSSQNGETDVSEFSLVPCQNGTDCIKISNDVMCICSPIFTDLLCKSIQTSCESFPLRNNATCKKCEKDYPCSCISGFTEKNCEKAIDHCKLLSINCLNEEWCFNIIGRFKYVCIPGCTKNPCWFLKNVYLIHQHLCYCGVTFHGICQDKGPAQFEYVWQLGFAGSEGEKCQGVIDAYFFLAANCTEDATYVNDPEDNNSSCWFPHEGTKEICANGCSCLSEEDSQEYRYLCFLRWAGNMYLENTTDDQENECQHEAVCKDEINRPRYLCII

SEQ ID NO: 28083 - protein, 152 aa, Homo sapiens
  REGION 1..152: note = ENSP00000420530
MNVSETSFVGCVQNTTTEDQLLFGCRLKGMHTVNSKWLSVGTHYFITVMASGPSPCPLGLRLNVTVKQQFCQESLSSEFCSGHGKCLSEAWSKTYSCHCQPPFSGKYCQELDACSFKPCKNNGSCINKRENWDEQAYECVCHPPFTGLLGGK

SEQ ID NO: 28084 - protein, 295 aa, Homo sapiens
  REGION 1..295: note = ENSP00000334145
METPAWPRVPRPETAVARTLLLGWVFAQVAGASGTTNTVAAYNLTWKSTNFKTILEWEPKPVNQVYTVQISTKSGDWKSKCFYTTDTECDLTDEIVKDVKQTYLARVFSYPAGNVESTGSAGEPLYENSPEFTPYLETNLGQPTIQSFEQVGTKVNVTVEDERTLVRRNNTFLSLRDVFGKDLIYTLYYWKSSSSGKKTAKTNTNEFLIDVDKGENYCFSVQAVIPSRTVNRKSTDSPVECMGQEKGEFREIFYIIGAVVFVVIILVIILAISLHKCRKAGVGQSWKENSPLNVS

SEQ ID NO: 28085 - protein, 238 aa, Homo sapiens
  REGION 1..238: note = ENSP00000359226
METPAWPRVPRPETAVARTLLLGWVFAQVAGASGTTNTVAAYNLTWKSTNFKTILEWEPKPVNQVYTVQISTKSGDWKSKCFYTTDTECDLTDEIVKDVKQTYLARVFSYPAGNVESTGSAGEPLYENSPEFTPYLETNLGQPTIQSFEQVGTKVNVTVEDERTLVRRNNTFLSLRDVFGKDLIYTLYYWKSSSSGKKYSTSLELWYLWSSSLSSSWLYLYTSVERQEWGRAGRRTPH

SEQ ID NO: 28086 - protein, 372 aa, Homo sapiens
  REGION 1..372: note = ENSP00000219368
MAPAPPPAASFSPSEVQRRLAAGACWVRRGARLYDLSSFVRHHPGGEQLLRARAGQDISADLDGPPHRHSANARRWLEQYYVGELRGEQQGSMENEPVALEETQKTDPAMEPRFKVVDWDKDLVDWRKPLLWQVGHLGEKYDEWVHQPVTRPIRLFHSDLIEGLSKTVWYSVPIIWVPLVLYLSWSYYRTFAQGNVRLFTSFTTEYTVAVPKSMFPGLFMLGTFLWSLIEYLIHRFLFHMKPPSDSYYLIMLHFVMHGQHHKAPFDGSRLVFPPVPASLVIGVFYLCMQLILPEAVGGTVFAGGLLGYVLYDMTHYYLHFGSPHKGSYLYSLKAHHVKHHFAHQKSGFGISTKLWDYCFHTLTPEKPHLKTQ

SEQ ID NO: 28087 - protein, 156 aa, Homo sapiens
  REGION 1..156: note = ENSP00000455126
MAPAPPPAASFSPSEVQRRLAAGACWVRRGARLYDLSSFVRHHPGGEQLLRARAGQDISADLDGPPHRHSANARRWLEQYYVGELRGEQQGSMENEPVALEETQKTDPAMEPRFKVVDWDKSTRWQCPSPCSPGSSCWGHSSGASSSTSSTASCST

SEQ ID NO: 28088 - protein, 192 aa, Homo sapiens
  REGION 1..192: note = ENSP00000464576
MPSFQLPAMATSTMASFSHKDTEKGSMENEPVALEETQKTDPAMEPRFKVVDWDKDLVDWRKPLLWQVGHLGEKYDEWVHQPVTRPIRLFHSDLIEGLSKTVWYSVPIIWVPLVLYLSWSYYRTFAQGNVRLFTSFTTEYTVAVPKSMFPGLFMLGTFLWSLIEYLIHRFLFHMKPPSDSYYLIMLHFVMHG

SEQ ID NO: 28089 - protein, 18 aa, Homo sapiens
  REGION 1..18: note = ENSP00000479548
  VARIANT 1: note = Any amino acid
XLFTSFTTGNASFFPDLP

SEQ ID NO: 28090 - protein, 384 aa, Homo sapiens
  REGION 1..384: note = ENSP00000362187
MAFLMKKKKFKFQTTFTLEELTAVPFVNGVLFCKVRLLDGGDFVSLSSREEVQENCVRWRKRFTFVCKMSANPATGLLDPCVFRVSVRKELKGGKAYSKLGFADLNLAEFAGSGSTVRCCLLEGYDTKNTRQDNSILKVTIGMFLLSGDPCFKTPPSTAKSISIPGQDSSLQLTCKGGGTSSGGSSTNSLTGSRPPKARPTILSSGLPEEPDQNLSSPEEVFHSGHSRNSSYASQQSKISGYSTEHSRSSSLSDLTHRRNTSTSSSASGGLGMTVEGPEGSEREHRPPEKPPRPPRPLHLSDRSFRRKKDSVESHPTWVDDTRIDADAIVEKIVQSQDFTDGSNTEDSNLRLFVSRDGSATLSGIQLATRVSSGVYEPVVIESH

SEQ ID NO: 28091 - protein, 242 aa, Homo sapiens
  REGION 1..242: note = ENSP00000362176
MFLLSGDPCFKTPPSTAKSISIPGQDSSLQLTCKGGGTSSGGSSTNSLTGSRPPKARPTILSSGLPEEPDQNLSSPEEVFHSGHSRNSSYASQQSKISGYSTEHSRSSSLSDLTHRRNTSTSSSASGGLGMTVEGPEGSEREHRPPEKPPRPPRPLHLSDRSFRRKKDSVESHPTWVDDTRIDADAIVEKIVQSQDFTDGSNTEDSNLRLFVSRDGSATLSGIQLATRVSSGVYEPVVIESH

SEQ ID NO: 28092 - protein, 360 aa, Homo sapiens
  REGION 1..360: note = ENSP00000359052
MMKKKKFKFKVDFELEELSSVPFVNGVLFCKMRLLDGGSFTAESSREVVQANCVRWRKKFSFMCKMSASAATGILDPCIYRVSVRKELKGGKAYAKLGFADLNLAEFAGSGNTTRRCLLEGYDTKNTRQDNSILKVLISMQLMSGDPCFKTPPSTSMSIPIAGESESLQEDRKGGETLKVHLGIADLSAKSASVPDELGACGHSRTSSYASQQSKVSGYSTCHSRSSSFSELCHRRNTSVGSTSTGVESILEPCDEIEQKIAEPNLDTADKEDTASEKLSRCPVKQDSVESQLKRVDDTRVDADDIVEKILQSQDFSLDSSAEEEGLRLFVGPGGSTTFGSHHLPNRVGSGAYEQVVIKR

SEQ ID NO: 28093 - protein, 355 aa, Homo sapiens
  REGION 1..355: note = ENSP00000386084
MMKKKKFKFKVDFELEELSSVPFVNGVLFCKMRLLDGGSFTAESSREVVQANCVRWRKKFSFMCKMSASAATGILDPCIYRVSVRKELKGGKAYAKLGFADLNLAEFAGSGNTTRRCLLEGYDTKNTRQDNSILKVLISMQLMSGDPCFKTPPSTSMSIPIAGESESLQEDRKGGETLKVHLGIADLSAKSASVPDELGACGHSRTSSYASQQSKVSGYSTCHSRSSSFSELCHRRNTSVGSTSTGVESILEPCDEIEQKIAEPNLDTADKEDTASEKLSRCPVKQDSVESQLKRVDDTRVDADDIVEKILQSQDFSLDSSAEEEGLRLFVGPGGSTTFGSHHLPNSALEAPSLL

SEQ ID NO: 28094 - protein, 144 aa, Homo sapiens
  REGION 1..144: note = ENSP00000354270
MYSEIQRERADIGGLMARPEYREWNPELIKPKKLLNPVKASRSHQELHRELLMNHRRGLGVDSKPELQRVLEHRRRNQLIKKKKEELEAKRLQCPFEQELLRRQQRLNQLEKPPEKEEDHAPEFIKVRENLRRIATLTSEEREL

SEQ ID NO: 28095 - protein, 144 aa, Homo sapiens; identical to SEQ ID NO: 28094
  REGION 1..144: note = ENSP00000377991

SEQ ID NO: 28096 - protein, 135 aa, Homo sapiens
  REGION 1..135: note = ENSP00000419529
MYSEIQRERADIGGLMARPEYREWNPELIKPKKLLNPVKASRSHQELHRELLMNHRRGLGVDSKPELQRVLEHRRRNQLIKKKKEELEAKRLQCPFEQELLRRQQRLNQVGDGHPAGTTHPPGLSSREELCCGHS

SEQ ID NO: 28097 - protein, 175 aa, Homo sapiens
  REGION 1..175: note = ENSP00000419124
MGAAQGKKKTYSPQARFHSENEKQRRNGSAAMYSEIQRERADIGGLMARPEYREWNPELIKPKKLLNPVKASRSHQELHRELLMNHRRGLGVDSKPELQRVLEHRRRNQLIKKKKEELEAKRLQCPFEQELLRRQQRLNQLEKPPEKEEDHAPEFIKVRENLRRIATLTSEEREL

SEQ ID NO: 28098 - protein, 172 aa, Homo sapiens
  REGION 1..172: note = ENSP00000400858
MAQRLGEWARGPSDATGLYRAVLLRSAAMYSEIQRERADIGGLMARPEYREWNPELIKPKKLLNPVKASRSHQELHRELLMNHRRGLGVDSKPELQRVLEHRRRNQLIKKKKEELEAKRLQCPFEQELLRRQQRLNQLEKPPEKEEDHAPEFIKVRENLRRIATLTSEEREL

SEQ ID NO: 28099 - protein, 105 aa, Homo sapiens
  REGION 1..105: note = ENSP00000418038
MYSEIQRERADIGGLMARPEYREWNPELIKPKKLLNPVKASRSHQELHRELLMNHRRGLGVDSKPELQRVLEHRRRNQLIKKKKEELEAKRLQCPFEQELLRRQQ

SEQ ID NO: 28100 - protein, 131 aa, Homo sapiens
  REGION 1..131: note = ENSP00000367731
MAEPDYIEDDNPELIRPQKLINPVKTSRNHQDLHRELLMNQKRGLAPQNKPELQKVMEKRKRDQVIKQKEEEAQKKKSDLEIELLKRQQKLEQLELEKQKLQEEQENAPEFVKVKGNLRRTGQEVAQAQES

SEQ ID NO: 28101 - protein, 306 aa, Homo sapiens
  REGION 1..306: note = ENSP00000181796
MSTWKARLTKRLKSPSRSMHPFPCSALLACFGNTRESASFNQSGVADTHSTVRVQPVAKAGRQPRHPSAEGAPEKRQDSSTHAERNGSANRNSSHRTAAQPAETPEDVPGSLDDGADCEAVVFHASIPRPSIIDTPKEEEFREEPKCLELEQKMTSDSPPEDIDHKDSYLITRSIMAEPDYIEDDNPELIRPQKLINPVKTSRNHQDLHRELLMNQKRGLAPQNKPELQKVMEKRKRDQVIKQKEEEAQKKKSDLEIELLKRQQKLEQLELEKQKLQEEQENAPEFVKVKGNLRRTGQEVAQAQES

SEQ ID NO: 28102 - protein, 131 aa, Homo sapiens; identical to SEQ ID NO: 28100
  REGION 1..131: note = ENSP00000418120

SEQ ID NO: 28103 - protein, 131 aa, Homo sapiens; identical to SEQ ID NO: 28100
  REGION 1..131: note = ENSP00000367728

SEQ ID NO: 28104 - protein, 160 aa, Homo sapiens
  REGION 1..160: note = ENSP00000420273
MSTWKARLTKRLKSPSRSMHPFPCSALLACFGNTRESASFNQSGVADTHSTVRVQPVAKAGRQPRHPSAEGAPEKRQDSSTHAERNGSANRNSSHRTAAQPAETPEDVPGSLDDGADCEAVVFHASIPRPSIIDTPKEEEFREEPKCLELEQKMTSGECS

SEQ ID NO: 28105 - protein, 131 aa, Homo sapiens; identical to SEQ ID NO: 28100
  REGION 1..131: note = ENSP00000367726

SEQ ID NO: 28106 - protein, 131 aa, Homo sapiens; identical to SEQ ID NO: 28100
  REGION 1..131: note = ENSP00000367719

SEQ ID NO: 28107 - protein, 131 aa, Homo sapiens; identical to SEQ ID NO: 28100
  REGION 1..131: note = ENSP00000417782

SEQ ID NO: 28108 - protein, 131 aa, Homo sapiens; identical to SEQ ID NO: 28100
  REGION 1..131: note = ENSP00000367723

SEQ ID NO: 28109 - protein, 51 aa, Homo sapiens
  REGION 1..51: note = ENSP00000418365
MAEPDYIEDDNPELIRPQKLINPVKTSRNHQDLHRELLMNQKRILVWLEIH

SEQ ID NO: 28110 - protein, 131 aa, Homo sapiens; identical to SEQ ID NO: 28100
  REGION 1..131: note = ENSP00000418330

SEQ ID NO: 28111 - protein, 131 aa, Homo sapiens; identical to SEQ ID NO: 28100
  REGION 1..131: note = ENSP00000419603

SEQ ID NO: 28112 - protein, 130 aa, Homo sapiens
  REGION 1..130: note = ENSP00000420444
MAEPDYIEDDNPELIRPQKLINPVKTSRNHQDLHRELLMNQKRGLAPQNKPELQKVMEKRKRDQVIKQKEEEAQKKKSDLEIELLKRQQKLEQLELEKQKLQEEQENAPEFVKVKGNLRRTGQEVAQAQE

SEQ ID NO: 28113 - protein, 128 aa, Homo sapiens
  REGION 1..128: note = ENSP00000413676
MAEPDYIEDDNPELIRPQKLINPVKTSRNHQDLHRELLMNQKRGLAPQNKPELQKVMEKRKRDQVIKQKEEEAQKKKSDLEIELLKRQQKLEQLELEKQKLQEEQENAPEFVKVKGNLRRTGQEVAQA

SEQ ID NO: 28114 - protein, 126 aa, Homo sapiens
  REGION 1..126: note = ENSP00000420249
MAEPDYIEDDNPELIRPQKLINPVKTSRNHQDLHRELLMNQKRGLAPQNKPELQKVMEKRKRDQVIKQKEEEAQKKKSDLEIELLKRQQKLEQLELEKQKLQEEQENAPEFVKVKGNLRRTGQEVA

SEQ ID NO: 28115 - protein, 124 aa, Homo sapiens
  REGION 1..124: note = ENSP00000418395
MAEPDYIEDDNPELIRPQKLINPVKTSRNHQDLHRELLMNQKRGLAPQNKPELQKVMEKRKRDQVIKQKEEEAQKKKSDLEIELLKRQQKLEQLELEKQKLQEEQENAPEFVKVKGNLRRTGQE

SEQ ID NO: 28116 - protein, 101 aa, Homo sapiens
  REGION 1..101: note = ENSP00000417242
MAEPDYIEDDNPELIRPQKLINPVKTSRNHQDLHRELLMNQKRGLAPQNKPELQKVMEKRKRDQVIKQKEEEAQKKKSDLEIELLKRQQKLEQLELEKQKL

SEQ ID NO: 28117 - protein, 93 aa, Homo sapiens
  REGION 1..93: note = ENSP00000420314
MAEPDYIEDDNPELIRPQKLINPVKTSRNHQDLHRELLMNQKRGLAPQNKPELQKVMEKRKRDQVIKQKEEEAQKKKSDLEIELLKRQQKLEQ

SEQ ID NO: 28118 - protein, 90 aa, Homo sapiens
  REGION 1..90: note = ENSP00000397949
MAEPDYIEDDNPELIRPQKLINPVKTSRNHQDLHRELLMNQKRGLAPQNKPELQKVMEKRKRDQVIKQKEEEAQKKKSDLEIELLKRQQK

SEQ ID NO: 28119 - protein, 84 aa, Homo sapiens
  REGION 1..84: note = ENSP00000417845
MAEPDYIEDDNPELIRPQKLINPVKTSRNHQDLHRELLMNQKRGLAPQNKPELQKVMEKRKRDQVIKQKEEEAQKKKSDLEIEL

SEQ ID NO: 28120 - protein, 67 aa, Homo sapiens
  REGION 1..67: note = ENSP00000419064
MAEPDYIEDDNPELIRPQKLINPVKTSRNHQDLHRELLMNQKRGLAPQNKPELQKVMEKRKRDQVIK

SEQ ID NO: 28121 - protein, 131 aa, Homo sapiens; identical to SEQ ID NO: 28100
  REGION 1..131: note = ENSP00000479842

SEQ ID NO: 28122 - protein, 133 aa, Homo sapiens
  REGION 1..133: note = ENSP00000422965
MSDDAGDTLATGDKAEVTEMPNSDSLPEDAEVHCDSAAVSHEPTPADPRGEGHENAAVQGAGAAAIGPPVQPQDANALEPPLNGDVTEDTLAECIDSVSLEAEPRSEIPLQEQNYLAVDSPPSGGGWAGWGSW

SEQ ID NO: 28123 - protein, 356 aa, Homo sapiens
  REGION 1..356: note = ENSP00000424115
MLSAITNVVQNTGKSVLTGGLDALEFIGKKTMNVLAESDPGFKRTKTLMERTVSLSQMLREAKEKEKQRLAQQLTMERTAHYGMLFDEYQGLSHLEALEILSNESESKVQSFLASLDGEKLELLKNDLISIKDIFAAKELENEENQEEQGLEEKGEEFARMLTELLFELHVAATPDKLNKAMKRAHDWVEEDQTVVSVDVAKVSEEETKKEEKEEKSQDPQEDKKEEKKTKTIEEVYMSSIESLAEVTARCIEQLHKVAELILHGQEEEKPAQDQAKVLIKLTTAMCNEVASLSKKFTNSLTTVGSNKKAEVLNPMISSVLLEGCNSTTYIQDAFQLLLPVLQVSHIQTSCLKAQP

SEQ ID NO: 28124 - protein, 563 aa, Homo sapiens
  REGION 1..563: note = ENSP00000351740
MSDDAGDTLATGDKAEVTEMPNSDSLPEDAEVHCDSAAVSHEPTPADPRGEGHENAAVQGAGAAAIGPPVQPQDANALEPPLNGDVTEDTLAECIDSVSLEAEPRSEIPLQEQNYLAVDSPPSGGGWAGWGSWGKSLLSSASATVGHGLTAVKEKAGATLRIHGVNSGSSEGAQPNTENGVPEITDAATDQGPAESPPTSPSSASRGMLSAITNVVQNTGKSVLTGGLDALEFIGKKTMNVLAESDPGFKRTKTLMERTVSLSQMLREAKEKEKQRLAQQLTMERTAHYGMLFDEYQGLSHLEALEILSNESESKVQSFLASLDGEKLELLKNDLISIKDIFAAKELENEENQEEQGLEEKGEEFARMLTELLFELHVAATPDKLNKAMKRAHDWVEEDQTVVSVDVAKVSEEETKKEEKEEKSQDPQEDKKEEKKTKTIEEVYMSSIESLAEVTARCIEQLHKVAELILHGQEEEKPAQDQAKVLIKLTTAMCNEVASLSKKFTNSLTTVGSNKKAEVLNPMISSVLLEGCNSTTYIQDAFQLLLPVLQVSHIQTSCLKAQP

SEQ ID NO: 28125 - protein, 453 aa, Homo sapiens
  REGION 1..453: note = ENSP00000240364
MAGAAAGGRGGGAWGPGRGGAGGLRRGCSPPAPAGSPRAGLQPLRATIPFQLQQPHQRRDGGGRAASVPCSVAPEKSVCRPQPLQVRRTFSLDTILSSYLLGQWPRDADGAFTCCTNDKATQTPLSWQELEGERASSCAHKRSASWGSTDHRKEISKLKQQLQRTKLSRSGKEKERGSPLLGDHAVRGALRASPPSFPSGSPVLRLSPCLHRSLEGLNQELEEVFVKEQGEEELLRILDIPDGHRAPAPPQSGSCDHPLLLLEPGNLASSPSMSLASPQPCGLASHEEHRGAAEELASTPNDKASSPGHPAFLEDGSPSPVLAFAASPRPNHSYIFKREPPEGCEKVRVFEEATSPGPDLAFLTSCPDKNKVHFNPTGSAFCPVNLMKPLFPGMGFIFRNCPSNPGSPLPPASPRPPPRKDPEASKASPLPFEPWQRTPPSEEPVLFQSSLMV

SEQ ID NO: 28126 - protein, 181 aa, Homo sapiens
  REGION 1..181: note = ENSP00000465808
MSLASPQPCGLASHEEHRGAAEELASTPNDKASSPGHPAFLEDGSPSPVLAFAASPRPNHSYIFKREPPEGCEKVRVFEEATSPGPDLAFLTSCPDKNKVHFNPTGSAFCPVNLMKPLFPGMGFIFRNCPSNPGSPLPPASPRPPPRKDPEASKASPLPFEPWQRTPPSEEPVLFQSSLMV

SEQ ID NO: 28127 - protein, 55 aa, Homo sapiens
  REGION 1..55: note = ENSP00000467070
ASPPSFPSGSPVLRLSPCLHRSLEGLNQELEEVFVKEQGEEELLRSPGHRRSLPS

SEQ ID NO: 28128 - protein, 230 aa, Homo sapiens
  REGION 1..230: note = ENSP00000427326
MWLFFPLCYHPPTPLSWQELEGERASSCAHKRSASWGSTDHRKEISKLKQQLQRTKLSRSGKEKERGSPLLGDHAVRGALRASPPSFPSGSPVLRLSPCLHRSLEGLNQELEEVFVKEQGEEELLRILDIPDGHRAPAPPQSGSCDHPLLLLEPGNLASSPSMSLASPQPCGLASHEEHRGAAEELASTPNDKASSPGHPAFLEDGSPSPVLAFAASPRPNHSYIFKREP

SEQ ID NO: 28129 - protein, 223 aa, Homo sapiens
  REGION 1..223: note = ENSP00000421412
MAGAAAGGRGGGAWGPGRGGAGGLRRGCSPPAPAGSPRAGLQPLRATIPFQLQQPHQRRDGGGRAASVPCSVAPEKSVCRPQPLQVRRTFSLDTILSSYLLGQWPRDADGAFTCCTNDKATQISKLKQQLQRTKLSRSGKEKERGSPLLGDHAVRGALRASPPSFPSGSPVLRLSPCLHRSLEGLNQELEEVFVKEQGEEELLRILDIPDGHRAPAPPQSGSC

SEQ ID NO: 28130 - protein, 152 aa, Homo sapiens
  REGION 1..152: note = ENSP00000359821
MAQEKMKLGFKSLPSSTTADGNILRRVNSAPLINGLGFNSQVLQADMLRIRTNRTTFRNRRSLLLPPPPFHGSISRLHQIKQEEAMDLINRETMSEWKLQSEIQISHSWEEGLKLNDNGLQKSSSLKCIDLTPVSSMASSIKKTGKSTSSYF

SEQ ID NO: 28131 - protein, 79 aa, Homo sapiens
  REGION 1..79: note = ENSP00000485120
MAQEKMKLGFKSLPSSTTADGNILRRVNSAPLINGLGFNSQVLQADMLRIRTNRTTFRNRRSLEITSPTSVEQKPKDLF

SEQ ID NO: 28132 - protein, 195 aa, Homo sapiens
  REGION 1..195: note = ENSP00000359820
MAQEKMKLGFKSLPSSTTADGNILRRVNSAPLINGLGFNSQVLQADMLRIRTNRTTFRNRRSLLLPPPPFHGSISRLHQIKQEEAMDLINRETMSEWKLQSEIQISHSWEEGLKLVKWHFNINQKRFSKAQPTCFLLILPNCQKIMCIYFQLLLMETTAMLDLLVIRQLKSALSQTLLCHLLILVLICSSRQTFN

SEQ ID NO: 28133 - protein, 115 aa, Homo sapiens
  REGION 1..115: note = ENSP00000402477
MAYFPGTGRTDQETQLDLSLCGREPESLENLFLDPDMAQEKMKLGFKSLPSSTTADGNILRRVNSAPLINGLGFNSQVLQADMLRIRTNRTTFRNRRSLEITSPTSVEQKPKDLF

SEQ ID NO: 28134 - protein, 301 aa, Homo sapiens
  REGION 1..301: note = ENSP00000481212
MDPKAGGGGEEDDCVDSGAETGGSDYSHLSSTSSELSVEEAQDPFLVSIHIIADPGESQPLQEAIDNVLAWIHPDLPLFRVSERRASRRRRKPPKGAQPALAVVLFLQEEYGEEQILQLHRTLQQPPWRHHHTEQVHGRFLPYLPCSQDFFTLAPGTPLWAIRPVHYGKEIVRFTVYCRYDNYADSLRFYQLILRRSPSQKKADFCIFPIFSNLDVDIQFSLKRLPCDQCPVPTDSSVLEFRVRDIGELVPLLPNPCSPISEGRWQTEDHDGNKILLQVLGGRLSVCLGDLRNQLALPQTL

SEQ ID NO: 28135 - protein, 546 aa, Homo sapiens
  REGION 1..546: note = ENSP00000324625
MDPKAGGGGEEDDCVDSGAETGGSDYSHLSSTSSELSVEEAQDPFLVSIHIIADPGESQPLQEAIDNVLAWIHPDLPLFRVSERRASRRRRKPPKGAQPALAVVLFLQEEYGEEQILQLHRTLQQPPWRHHHTEQVHGRFLPYLPCSQDFFTLAPGTPLWAIRPVHYGKEIVRFTVYCRYDNYADSLRFYQLILRRSPSQKKADFCIFPIFSNLDVDIQFSLKRLPCDQCPVPTDSSVLEFRVRDIGELVPLLPNPCSPISEGRWQTEDHDGNKILLQAQRVHKKFPKPGRVHHASEKKRHSTPLPSTAVPSHTPGSSQQSPLNSPHPGPIRTGLPPGHQQEFAGRANSTPNPPWSFQRSKSLFCLPTGGPSLASSAEPQWFSNTGAPGHRASEWRHGHLLSIDDLEGAQETDVDTGLRLSSSDLSVVSAYSAPSRFCSTVETPLPSERCSSHWAAHKDSREGPLPTVSRVTTEASWASLPFFTKRSSSSSATARAAPPAPSTSTLTDSSPQLPCDTPKVKQTDGDMPPPPGSAGPGDNDMEEFYI

SEQ ID NO: 28136 - protein, 582 aa, Homo sapiens
  REGION 1..582: note = ENSP00000280057
MDPKAGGGGEEDDCVDSGAETGGSDYSHLSSTSNGFSTWRMPCCLFLYCTHGDKEKGRWSLQVEHTWPSGELSVEEAQDPFLVSIHIIADPGESQPLQEAIDNVLAWIHPDLPLFRVSERRASRRRRKPPKGAQPALAVVLFLQEEYGEEQILQLHRTLQQPPWRHHHTEQVHGRFLPYLPCSQDFFTLAPGTPLWAIRPVHYGKEIVRFTVYCRYDNYADSLRFYQLILRRSPSQKKADFCIFPIFSNLDVDIQFSLKRLPCDQCPVPTDSSVLEFRVRDIGELVPLLPNPCSPISEGRWQTEDHDGNKILLQAQRVHKKFPKPGRVHHASEKKRHSTPLPSTAVPSHTPGSSQQSPLNSPHPGPIRTGLPPGHQQEFAGRANSTPNPPWSFQRSKSLFCLPTGGPSLASSAEPQWFSNTGAPGHRASEWRHGHLLSIDDLEGAQETDVDTGLRLSSSDLSVVSAYSAPSRFCSTVETPLPSERCSSHWAAHKDSREGPLPTVSRVTTEASWASLPFFTKRSSSSSATARAAPPAPSTSTLTDSSPQLPCDTPKVKQTDGDMPPPPGSAGPGDNDMEEFYI

SEQ ID NO: 28137 - protein, 281 aa, Homo sapiens
  REGION 1..281: note = ENSP00000388551
MLPKSRRALTIQEIAALARSSLHGISQVVKDHVTKPTAMAQGRVAHLIEWKGWSKPSDSPAALESAFSSYSDLSEGEQEARFAAGVAEQFAIAEAKLRAWSSVDGEDSTDDSYDEDFAGGMDTDMAGQLPLGPHLQDLFTGHRFSRPVRQGSVEPESDCSQTVSPDTLCSSLCSLEDGLLGSPARLASQLLGDELLLAKLPPSRESAFRSLGPLEAQDSLYNSPLTESCLSPAEEEPAPCKDCQPLCPPLTGSWERQRQASDLASSGVVSLDEDEAEPEEQ

SEQ ID NO: 28138 - protein, 251 aa, Homo sapiens
  REGION 1..251: note = ENSP00000414050
MAQGRVAHLIEWKGWSKPSDSPAALESAFSSYSDLSEGEQEARFAAGVAEQFAIAEAKLRAWSSVDGEDSTDDSYDEDFAGGMDTDMAGQLPLGPHLQDLFTGHRFSRPVRQGSVEPESDCSQTVSPDTLCSSLCSLEDGLLGSPARLASQLLGDELLLAKLPPSRESAFRSLGPLEAQDSLYNSPLTEGWLLPSRSLWVEPSLKGPCPAGLVLCFIHLSIVSKSSSFFLKTEGFWSVFSVGSSLLWEALE

SEQ ID NO: 28139 - protein, 281 aa, Homo sapiens; identical to SEQ ID NO: 28137
  REGION 1..281: note = ENSP00000340974

SEQ ID NO: 28140 - protein, 123 aa, Homo sapiens
  REGION 1..123: note = ENSP00000399875
MLPKSRRALTIQEIAALARSSLHGISQVVKDHVTKPTAMAQGRVAHLIEWKGWSKPSDSPAALESAFSSYSDLSEGEQEARFAAGVAEQFAIAEAKLRAWSSVDGEDSTDDSYDEDFAGGMDT

SEQ ID NO: 28141 - protein, 231 aa, Homo sapiens
  REGION 1..231: note = ENSP00000414913
MLPKSRRALTIQEIAALARSSLHGISQVVKDHVTKPTAMAQGRVAHLIEWKGWSKPSDSPAALESAFSSYSDLSEGEQEARFAAGVAEQFAIAEAKLRAWSSVDGEDSTDDSYDEDFAGGMDTDMAGQLPLGPHLQDLFTGHRFSRPVRQGSVEPESDCSQTVSPDTLCSSLCSLEDGLLGSPARLASQLLGDELLLAKLPPSRESAFRSLGPLEAQDSLYNSPLTESCLS

SEQ ID NO: 28142 - protein, 359 aa, Homo sapiens
  REGION 1..359: note = ENSP00000491845
MPMISVLGKMFLWQREGPGGRWTCQTSRRVSSDPAWAVEWIELPRGLSLSSLGSARTLRGWSRSSRPSSVDSQDLPEVNVGDTVAMLPKSRRALTIQEIAALARSSLHGISQVVKDHVTKPTAMAQGRVAHLIEWKGWSKPSDSPAALESAFSSYSDLSEGEQEARFAAGVAEQFAIAEAKLRAWSSVDGEDSTDDSYDEDFAGGMDTDMAGQLPLGPHLQDLFTGHRFSRPVRQGSVEPESDCSQTVSPDTLCSSLCSLEDGLLGSPARLASQLLGDELLLAKLPPSRESAFRSLGPLEAQDSLYNSPLTESCLSPAEEEPAPCKDCQPLCPPLTGSWERQRQASDLGLAPALPEPMG

SEQ ID NO: 28143 - protein, 366 aa, Homo sapiens
  REGION 1..366: note = ENSP00000373360
MPMISVLGKMFLWQREGPGGRWTCQTSRRVSSDPAWAVEWIELPRGLSLSSLGSARTLRGWSRSSRPSSVDSQDLPEVNVGDTVAMLPKSRRALTIQEIAALARSSLHGISQVVKDHVTKPTAMAQGRVAHLIEWKGWSKPSDSPAALESAFSSYSDLSEGEQEARFAAGVAEQFAIAEAKLRAWSSVDGEDSTDDSYDEDFAGGMDTDMAGQLPLGPHLQDLFTGHRFSRPVRQGSVEPESDCSQTVSPDTLCSSLCSLEDGLLGSPARLASQLLGDELLLAKLPPSRESAFRSLGPLEAQDSLYNSPLTESCLSPAEEEPAPCKDCQPLCPPLTGSWERQRQASDLASSGVVSLDEDEAEPEEQ

SEQ ID NO: 28144 - protein, 281 aa, Homo sapiens; identical to SEQ ID NO: 28137
  REGION 1..281: note = ENSP00000390588

SEQ ID NO: 28145 - protein, 335 aa, Homo sapiens
  REGION 1..335: note = ENSP00000310135
MFLATLSFLLPFAHPFGTVSCEYMLGSPLSSLAQVNLSPFSHPKVHMDPNYCHPSTSLHLCSLAWSFTRLLHPPLSPGISQVVKDHVTKPTAMAQGRVAHLIEWKGWSKPSDSPAALESAFSSYSDLSEGEQEARFAAGVAEQFAIAEAKLRAWSSVDGEDSTDDSYDEDFAGGMDTDMAGQLPLGPHLQDLFTGHRFSRPVRQGSVEPESDCSQTVSPDTLCSSLCSLEDGLLGSPARLASQLLGDELLLAKLPPSRESAFRSLGPLEAQDSLYNSPLTESCLSPAEEEPAPCKDCQPLCPPLTGSWERQRQASDLASSGVVSLDEDEAEPEEQ

SEQ ID NO: 28146 - protein, 217 aa, Homo sapiens
  REGION 1..217: note = ENSP00000425089
  VARIANT 1: note = Any amino acid
XELDFSALCPKISLTVAAKELSVSDTDVSEVSWTDNGTFNLSEGYTPQTDTSDDLDRPSEEVFSRDLSDFPSLENGMGTNDEDELSLGLPTELKRKKEQLDSGHRPSKETQSAAGLTLPLNSDQTFHLMSNLAGDVITAAVTAAIKDQLEGVQQALSQAAPIPEEDTDTEEGDDFELLDQSELDQIESELGLTQDQEAEAQQNKKSSGFLSNLLGGH

SEQ ID NO: 28147 - protein, 356 aa, Homo sapiens
  REGION 1..356: note = ENSP00000382691
MPEGEDFGPGKSWEVINSKPDERPRLSHCIAESWMNFSIFLQEMSLFKQQSPGKFCLLVCSVCTFFTILGSYIPGVILSYLLLLCAFLCPLFKCNDIGQKIYSKIKSVLLKLDFGIGEYINQKKRERSEADKEKSHKDDSELDFSALCPKISLTVAAKELSVSDTDVSEVSWTDNGTFNLSEGYTPQTDTSDDLDRPSEEVFSRDLSDFPSLENGMGTNDEDELSLGLPTELKRKKEQLDSGHRPSKETQSAAGLTLPLNSDQTFHLMSNLAGDVITAAVTAAIKDQLEGVQQALSQAAPIPEEDTDTEEGDDFELLDQSELDQIESELGLTQDQEAEAQQNKKSSGFLSNLLGGH

SEQ ID NO: 28148 - protein, 497 aa, Homo sapiens
  REGION 1..497: note = ENSP00000304642
MASPAPPEHAEEGCPAPAAEEQAPPSPPPPQASPAERQQQEEEAQEAGAAEGAGLQVEEAAGRAAAAVTWLLGEPVLWLGCRADELLSWKRPLRSLLGFVAANLLFWFLALTPWRVYHLISVMILGRVIMQIIKDMVLSRTRGAQLWRSLSESWEVINSKPDERPRLSHCIAESWMNFSIFLQEMSLFKQQSPGKFCLLVCSVCTFFTILGSYIPGVILSYLLLLCAFLCPLFKCNDIGQKIYSKIKSVLLKLDFGIGEYINQKKRERSEADKEKSHKDDSELDFSALCPKISLTVAAKELSVSDTDVSEVSWTDNGTFNLSEGYTPQTDTSDDLDRPSEEVFSRDLSDFPSLENGMGTNDEDELSLGLPTELKRKKEQLDSGHRPSKETQSAAGLTLPLNSDQTFHLMSNLAGDVITAAVTAAIKDQLEGVQQALSQAAPIPEEDTDTEEGDDFELLDQSELDQIESELGLTQDQEAEAQQNKKSSGFLSNLLGGH

SEQ ID NO: 28149 - protein, 1406 aa, Homo sapiens
  REGION 1..1406: note = ENSP00000378710
MSEIQGTVEFSVELHKFYNVDLFQRGYYQIRVTLKVSSRIPHRLSASIAGQTESSSLHSACVHDSTVHSRVFQILYRNEEVPINDAVVFRVHLLLGGERMEDALSEVDFQLKVDLHFTDSEQQLRDVAGAPMVSSRTLGLHFHPRNGLHHQVPVMFDYFHLSVISVTVHAALVALQQPLISFTRPGRGSWLGKGGPDTGQEQSIISLENLVFGAGYCKPTSSEGSFYITSENCMQHAHKWHRDLCLLLLHAYRGLRLHFLVIMRDIPELPHTELEALAVEETLSQLCSELQMLNNPEKIAEQISKDLAWLTSHMMTLWTQFLDTVTLHSQVTTYLTQEHHTLRVRRFSEAFFYMEHQKLAVLTFQENLIQTHSQLSLDIRNSEYLTSMPPLPAECLDIDGDWNTLPVIFEDRYVDCPATGHNLSVYPNFDVPVTSPTIMNLKDKEDNCMVNSNLSFREDLVLSTIKPSQMDSDEEVIRCPEPGENVATQNHMDMCSESQVYISIGEFQNKAGVPEDECWTGQTSDAGTYPVADVDTSRRSPGPEDGQAPVLTYIDVKSSNKNPSRAEPLVAFNAQHESRSSRDKYGLDRTGLSKVVVGGSHQNAISSDKTTLHELSTLGKGIDQEGKMVLLSLKLTPSEPCDPLSSTLREPLDIRSSLKDSHTEEQEELSVLSGVIKRSSSIISDSGIESEPSSVAWSEARSRALELPSDREVLHPFVRRHALHRNSLEGGHTESNTSLPSGIQASLTSISSLPFEEDEREVALTKLTKSVSAPHISSPEEAAEDADTKQQDGGFAEPSDMHSKSQGSPGSCSQLCGDSGTDAGADHPLVEIVLDADNQQGPGYIDIPKGKGKQFDAQGHCLPDGRTENTPGVETKGLNLKIPRVIALENPRTRSLHRALEETPKGMPKDLNVGQQALSNSGISEVEGLSQHQVPELSCTSAADAINRNSTGQQSQSGSPCIMDDTAFNRGVNAFPEAKHKAGTVCPTVTHSVHSQVLKNQELKAGTSIMGSHLTSAETFTLDSLKAVEVVNLSVSCTATCLPFSSVPKETPARAGFSSKQTLFPITHQPLGSFGVVSTHSSTLDEEVSERMFSFYQAKEKFKKELKIEGFLYSDLTVLASDIPYFPPEEEEENLEDGIHLVVCVHGLDGNSADLRLVKTFIELGLPGGKLDFLMSEKNQMDTFADFDTMTDRLLDEIIQHIQLYNLSISRISFIGHSLGNIIIRSVLTRPRFRYYLNKLHTFLSLSGPHLGTLYNNSTLVSTGLWLMQKLKKSGSLLQLTFRDNADLRKCFLYQLSQKTGLQYFKNVVLVASPQDRYVPFHSARIEMCKTALKDRHTGPVYAEMINNLLGPLVEAKDCTLIRHNVFHALPNTANTLIGRAAHIAVLDSELFLEKFFLVAGLNYFK

SEQ ID NO: 28150 - protein, 43 aa, Homo sapiens
  REGION 1..43: note = ENSP00000429874
MSEIQGTVEFSVELHKFYNVDLFQRGMQSEFGISRAGDISKSS

SEQ ID NO: 28151 - protein, 1141 aa, Homo sapiens
  REGION 1..1141: note = ENSP00000276737
MSEIQGTVEFSVELHKFYNVDLFQRGYYQIRVTLKVSSRIPHRLSASIAGQTESSSLHSACVHDSTVHSRVFQILYRNEEVPINDAVVFRVHLLLGGERMEDALSEVDFQLKVDLHFTDSEQQLRDVAGAPMVSSRTLGLHFHPRNGLHHQVPVMFDYFHLSVISVTVHAALVALQQPLISFTRPGRGSWLGKGGPDTGQEQSIISLENLVFGAGYCKPTSSEGSFYITSENCMQHAHKWHRDLCLLLLHAYRGLRLHFLVIMRDIPELPHTELEALAVEETLSQLCSELQMLNNPEKIAEQISKDLAWLTSHMMTLWTQFLDTVTLHSQVTTYLTQEHHTLRVRRFSEAFFYMEHQKLAVLTFQENLIQTHSQLSLDIRNSEYLTSMPPLPAECLDIDGDWNTLPVIFEDRYVDCPATGHNLSVYPNFDVPVTSPTIMNLKDKEDNCMVNSNLSFREDLVLSTIKPSQMDSDEEVIRCPEPGENVATQNHMDMCSESQVYISIGEFQNKAGVPEDECWTGQTSDAGTYPVADVDTSRRSPGPEDGQAPVLTYIDVKSSNKNPSRAEPLVAFNAQHESRSSRDKYGLDRTGLSKVVVGGSHQNAISSDKTTLHELSTLGKGIDQEGKMVLLSLKLTPSEPCDPLSSTLREPLDIRSSLKDSHTEEQEELSVLSGVIKRSSSIISDSGIESEPSSVAWSEARSRALELPSDREVLHPFVRRHALHRNSLEGGHTESNTSLPSGIQASLTSISSLPFEEDEREVALTKLTKSVSAPHISSPEEAAEDADTKQQDGGFAEPSDMHSKSQGSPGSCSQLCGDSGTDAGADHPLVEIVLDADNQQGPGYIDIPKGKGKQFDAQGHCLPDGRTENTPGVETKGLNLKIPRVIALENPRTRSLHRALEETPKGMPKDLNVGQQALSNSGISEVEGLSQHQVPELSCTSAADAINRNSTGQQSQSGSPCIMDDTAFNRGVNAFPEAKHKAGTVCPTVTHSVHSQVLKNQELKAGTSIMGSHLTSAETFTLDSLKAVEVVNLSVSCTATCLPFSSVPKETPARAGFSSKQTLFPITHQPLGSFGVVSTHSSTLDEEVSERMFRGRGRKFGRWNSPGCLCPWPGWEQCRPPAGKDFHRTGAPWRKTGLPNV

SEQ ID NO: 28152 - protein, 451 aa, Homo sapiens
  REGION 1..451: note = ENSP00000430088
EPSSVAWSEARSRALELPSDREVLHPFVRRHALHRNSLEGGHTESNTSLPSGIQASLTSISSLPFEEDEREVALTKLTKSVSAPHISSPEEAAEDADTKQQDGGFAEPSDMHSKSQGSPGSCSQLCGDSGTDAGADHPLVEIVLDADNQQGPGYIDIPKGKGKQFDAQGHCLPDGRTENTPGVETKGLNLKIPRVIALENPRTRSLHRALEETPKGMPKDLNVGQQALSNSGISEVEGLSQHQVPELSCTSAADAINRNSTGQQSQSGSPCIMDDTAFNRGVNAFPEAKHKAGTVCPTVTHSVHSQVLKNQELKAGTSIMGSHLTSAETFTLDSLKAVEVVNLSVSCTATCLPFSSVPKETPARAGFSSKQTLFPITHQPLGSFGVVSTHSSTLDEEVSERMFRGRGRKFGRWNSPGCLCPWPGWEQCRPPAGKDFHRTGAPWRKTGLPNV

SEQ ID NO: 28153 - protein, 153 aa, Homo sapiens
  REGION 1..153: note = ENSP00000160713
MSEIQGTVEFSVELHKFYNVDLFQRGYYQIRVTLKVSSRIPHRLSASIAGQTESSSLHSACVHDSTVHSRVFQILYRNEEVPINDAVVFRVHLLLGGERMEDALSEVDFQLKVDLHFTDSEQQLRDVAGAPMVSSRTLGLHFHPRNGLHHQVP

SEQ ID NO: 28154 - protein, 68 aa, Homo sapiens
  REGION 1..68: note = ENSP00000428017
MSEIQGTVEFSVELHKFYNVDLFQRGYYQIRVTLKVSSRIPHRLSASIAGQTEVLNIHMSEQEPAQGK

SEQ ID NO: 28155 - protein, 214 aa, Homo sapiens
  REGION 1..214: note = ENSP00000284486
MSVPQIHVEEVGAEEGAGAAAPPDDHLRSLKALTEKLRLETRRPSYLEWQARLEEHTWPFPRPAAEPQASLEEGERGGQEPLLPLREAGQHPPSARSASQGARPLSTGKLEGFQSIDEAIAWLRKELTEMRLQDQQLARQLMRLRGDINKLKIEHTCRLHRRMLNDATYELEERDELADLFCDSPLASSFSLSTPLKLIGVTKMNINSRRFSLC

SEQ ID NO: 28156 - protein, 214 aa, Homo sapiens; identical to SEQ ID NO: 28155
  REGION 1..214: note = ENSP00000432232

SEQ ID NO: 28157 - protein, 214 aa, Homo sapiens; identical to SEQ ID NO: 28155
  REGION 1..214: note = ENSP00000436655

SEQ ID NO: 28158 - protein, 91 aa, Homo sapiens
  REGION 1..91: note = ENSP00000431951
MSVPQIHVEEVGAEEGAGAAAPPDDHLRSLKALTEKLRLETRRPSYLEWQARLEEHTWPFPRPAAEPQASLEEGERGGQEPLLPLREAGQH

SEQ ID NO: 28159 - protein, 826 aa, Homo sapiens
  REGION 1..826: note = ENSP00000304108
MARLCRRVPCTLLLGLAVVLLKARLVPAAARAELSRSDLSLIQQQQQQQQQQQQQQKQLEEAEEERTEVPGATSTLTVPVSVFMLKVQVNDIISRQYLSQAVVEVFVNYTKTNSTVTKSNGAVLIKVPYKLGLSLTIIAYKDGYVLTPLPWKTRRMPIYSSVTLSLFPQSQANIWLFEDTVLITGKLADAKSQPSVQFSKALIKLPDNHHISNVTGYLTVLQQFLKVDNFLHTTGITLNKPGFENIELTPLAAICVKIYSGGKELKVNGSIQVSLPLLRLNDISAGDRIPAWTFDMNTGAWVNHGRGMVKEHNNHLIWTYDAPHLGYWIAAPLPGTRGSGINEDSKDITAYHTVFLTAILGGTIVIVIGFFAVLLCYCRDKCGTPQKRERNITKLEVLKRDQTTSTTHINHISTVKVALKAEDKSQLFNAKNSSYSPQKKEPSKAETEERVSMVKTRDDFKIYNEDVSFLSVNQNNYSRNPTQSLEPNVGSKQPKHINNNLSSSLGDAQDEKRYLTGNEEAYGRSHIPEQLMHIYSQPIAILQTSDLFSTPEQLHTAKSATLPRKGQLVYGQLMEPVNRENFTQTLPKMPIHSHAQPPDAREEDIILEGQQSLPSQASDWSRYSSSLLESVSVPGTLNEAVVMTPFSSELQGISEQTLLELSKGKPSPHPRAWFVSLDGKPVAQVRHSFIDLKKGKRTQSNDTSLDSGVDMNELHSSRKLEREKTFIKSMHQPKILYLEDLDLSSSESGTTVCSPEDPALRHILDGGSGVIMEHPGEESPGRKSTVEDFEANTSPTKRRGRPPLAKRDSKTNIWKKREERPLIPIN

SEQ ID NO: 28160 - protein, 238 aa, Homo sapiens
  REGION 1..238: note = ENSP00000478477
MARLCRRVPCTLLLGLAVVLLKARLVPAAARAELSRSDLSLIQQQQQQQQQQQQQQKQLEEAEEERTEVPGATSTLTVPVSVFMLKVQVNDIISRQYLSQAVVEVFVNYTKTNSTVTKSNGAVLIKVPYKLGLSLTIIAYKDGYVLTPLPWKTRRMPIYSSVTLSLFPQSQANIWLFEDTVLITGKLADAKSQPSVQFSKALIKLPDNHHISNVTGYLTVLQQFLKVDNFLHTTGITQ

SEQ ID NO: 28161 - protein, 162 aa, Homo sapiens
  REGION 1..162: note = ENSP00000384897
MDQEAEEIARCLLQKMADTNEFIQRAAGQSLRAMVENVTLARSLVVLTSAGVYHRNPLIRKYAAEHLSAVLEQIGAEKLLSGTRDSTDMLVHNLVRLAQDSNQDTRFYGRKMVNILMANTKFDAFLKQSLPSYDLQKVMAAIKQQGIEDNDELPSAKGRKVL

SEQ ID NO: 28162 - protein, 69 aa, Homo sapiens
  REGION 1..69: note = ENSP00000402415
MGTRDDVPEAKVLVPVAVYCGSIPRTSAGPRVLPPGSINSSLPHGEGSLQPEPRALLNNEEPSQLLRGL

SEQ ID NO: 28163 - protein, 1019 aa, Homo sapiens
  REGION 1..1019: note = ENSP00000368876
MGTRDDVPEAKVLVPVAVYCGSIPRTSAGPRVLPPGSINSSLPHGEGSLQPEPRALLNNEEPSQLLRGLGQLGGLKLDTPSKGWQARNGHPRNLRALSLGDQPLVLLPSPESEANSVARDTIQIKDKLKKRRLSEGLAASSRASLDPGGGPQGVPLHSTIPRATSQRLLRVPRPMPLIQSIPTTPEASGVKEKGLDLPGSIPGPHELRPGAQEAQISWQYLHCNDEKMQKSLGAIVIPPIPKARTVAATPSRVPGSLPSPLPPGQGVLTGLRAPRTRLARGSGPREKTPASLEPKPLASPIRDRPAAAKKPALPFSQSAPTLTAFSFDCAREACPPLKEEDQKEIGTKIQVTISKSAREKMQLKQMKEMELLRRLEEPRTGQELTSQCLGSQRAFMKEGLLPLRGSGTLSVPTRLSGPCRNDVSIILRKWASRASLPSIPISRQEPRFARHASANSLPAVLTLGSPEWEEEEEMDLRACKELRPFSNPELGLRDALQCLNSSDWQMKEKGLVSIQRLAACHSEVLTGKLHDVCLVVTGEVTNLRSKVSHLAISTLGDLFQALKKNMDQEAEEIARCLLQKMADTNEFIQRAAGQSLRAMVENVTLARSLVVLTSAGVYHRNPLIRKYAAEHLSAVLEQIGAEKLLSGTRDSTDMLVHNLVRLAQDSNQDTRFYGRKMVNILMANTKFDAFLKQSLPSYDLQKVMAAIKQQGIEDNDELPSAKGRKVLRSLVVCENGLPIKEGLSCNGPRLVGLRSTLQGRGEMVEQLRELTRLLEAKDFRSRMEGVGQLLELCKAKTELVTAHLVQVFDAFTPRLQDSNKKVNQWALESFAKMIPLLRESLHPMLLSIIITVADNLNSKNSGIYAAAVAVLDAMVESLDNLCLLPALAGRVRFLSGRAVLDVTDRLAVLVASVYPRKPQAVERHVLPILWHFLNTATRNGTLPGPSGNIRGVVCRLSRSLQEHMGSRLLDFAASQPKHVLKTLQELLDSESLGGSRKATDRGVAPDSKTTGSSYPFQLD

SEQ ID NO: 28164 - protein, 112 aa, Homo sapiens
  REGION 1..112: note = ENSP00000396739
MKEKGLVSIQRLAACHSEVLTGKLHDVCLVVTGEVTNLRSKVSHLAISTLGDLFQALKKNMDQEAEEIARCLLQKMADTNEFIQRAAGQSLRAMVENVTLARSLVVLTSAGV

SEQ ID NO: 28165 - protein, 479 aa, Homo sapiens
  REGION 1..479: note = ENSP00000429763
MVSKDTGKCILTTSESEVEPAACLALEMKYALDPNRQIKKRNKALQVRFKDICEAQNEQRDTQLSSGQLGEKREAKPVSCRAAYRKYMTVPARRSIPNVTKSTGVQTSPDLKKCYQTFPLDRKKGNLKSLPAADPFKSQNNGFLTDAKEKNEAGPMEEARPCGAGRVHKTTALVFHSNQHMNTVDQPLGVNCTEPCKSPEPLSYGEAALQNSTRPPSEEPDYQLLGRAKQDRGRPNSEEPAPPALRRVFKTEVATVYAPALSARAPEPGLSDSAAASQWSLCPADDERRRATHLNGLQAPSETALACSPPMQCLSPECSEQPSQTHTPPGLGNQPSPTAVAAGEECQRIVPHTEVVDLKAQLQMMENLISSSQETIKVLLGVIQELEKGEAHREGLSYRTGQDTANCDTCRNSACIIYSVELDFKQQEDKLQPVLRKLHPIEETQVIPSPYSQETYSSTPKQKSKTESKKHGRWKLWFL

SEQ ID NO: 28166 - protein, 455 aa, Homo sapiens
  REGION 1..455: note = ENSP00000428730
MVSKDTGKCILTTSESEVEPAACLALEMKYALDPNRQIKKRNKALQVRFKDICEAQNEQRDTQLSSGQLGEKREAKPVSCRAAYRKYMTVPARRSIPNVTKSTGVQTSPDLKKCYQTFPLDRKKGNLKSLPAADPFKSQNNGFLTDAKEKNEAGPMEEARPCGAGRVHKTTALVFHSNQHMNTVDQPLGVNCTEPCKSPEPLSYGEAALQNSTRPPSEEPDYQLLGRAKQDRGRPNSEEPAPPALRRVFKTEVATVYAPALSARAPEPGLSDSAAASQWSLCPADDERRRATHLNGLQAPSETALACSPPMQCLSPECSEQPSQTHTPPGLGNQPSPTAVAAGEECQRIVPHTEVVDLKAQLQMMENLISSSQETIKVLLGVIQELEKGEAHREGVELDFKQQEDKLQPVLRKLHPIEETQVIPSPYSQETYSSTPKQKSKTESKKHGRWKLWFL

SEQ ID NO: 28167 - protein, 455 aa, Homo sapiens; identical to SEQ ID NO: 28166
  REGION 1..455: note = ENSP00000479733

SEQ ID NO: 28168 - protein, 519 aa, Homo sapiens
  REGION 1..519: note = ENSP00000465976
MTCPDKPGQLINWFICSLCVPRVRKLWSSRRPRTRRNLLLGTACAIYLGFLVSQVGRASLQHGQAAEKGPHRSRDTAEPSFPEIPLDGTLAPPESQGNGSTLQPNVVYITLRSKRSKPANIRGTVKPKRRKKHAVASAAPGQEALVGPSLQPQEAAREADAVAPGYAQGANLVKIGERPWRLVRGPGVRAGGPDFLQPSSRESNIRIYSESAPSWLSKDDIRRMRLLADSAVAGLRPVSSRSGARLLVLEGGAPGAVLRCGPSPCGLLKQPLDMSEVFAFHLDRILGLNRTLPSVSRKAEFIQDGRPCPIILWDASLSSASNDTHSSVKLTWGTYQQLLKQKCWQNGRVPKPESGCTEIHHHEWSKMALFDFLLQIYNRLDTNCCGFRPRKEDACVQNGLRPKCDDQGSAALAHIIQRKHDPRHLVFIDNKGFFDRSEDNLNFKLLEGIKEFPASAVSVLKSQHLRQKLLQSLFLDKVYWESQGGRQGIEKLIDVIEHRAKILITYINAHGVKVLPMNE

SEQ ID NO: 28169 - protein, 519 aa, Homo sapiens; identical to SEQ ID NO: 28168
  REGION 1..519: note = ENSP00000296530

SEQ ID NO: 28170 - protein, 527 aa, Homo sapiens
  REGION 1..527: note = ENSP00000377396
MTCPDKPGQLINWFICSLCVPRVRKLWSSRRPRTRRNLLLGTACAIYLGFLVSQVGRASLQHGQAAEKGPHRSRDTAEPSFPEIPLDGTLAPPESQGNGSTLQPNVVYITLRSKRSKPANIRGTVKPKRRKKHAVASAAPGQEALVGPSLQPQEAAREADAVAPGYAQGANLVKIGERPWRLVRGPGVRAGGPDFLQPSSRESNIRIYSESAPSWLSKDDIRRMRLLADSAVAGLRPVSSRSGARLLVLEGGAPGAVLRCGPSPCGLLKQPLDMSEVFAFHLDRILGLNRTLPSVSRKAEFIQAAAAACLSMRLAFFIFPAWEDMRVPGKCCIGHARLTWGTYQQLLKQKCWQNGRVPKPESGCTEIHHHEWSKMALFDFLLQIYNRLDTNCCGFRPRKEDACVQNGLRPKCDDQGSAALAHIIQRKHDPRHLVFIDNKGFFDRSEDNLNFKLLEGIKEFPASAVSVLKSQHLRQKLLQSLFLDKVYWESQGGRQGIEKLIDVIEHRAKILITYINAHGVKVLPMNE

SEQ ID NO: 28171 - protein, 187 aa, Homo sapiens
  REGION 1..187: note = ENSP00000466811
MLLISETLQDGRPCPIILWDASLSSASNDTHSSVKLTWGTYQQLLKQKCWQNGRVPKPESGCTEIHHHEWSKMALFDFLLQIYNRLDTNCCGFRPRKEDACVQNGLRPKCDDQGSAALAHIIQRKHDPRHLVFIDNKGFFDRSEDNLNFKLLEGIKEFPASAVSVLKSQHLRQKLLQSLFLDKVYWE

SEQ ID NO: 28172 - protein, 108 aa, Homo sapiens
  REGION 1..108: note = ENSP00000465491
MALFDFLLQIYNRLDTNCCGFRPRKEDACVQNGLRPKCDDQGSAALAHIIQRKHDPRHLVFIDNKGFFDRSEDNLNFKLLEGIKEFPASAVSVLKSQHLRQKLLQSLF

SEQ ID NO: 28173 - protein, 191 aa, Homo sapiens
  REGION 1..191: note = ENSP00000468648
  VARIANT 1: note = Any amino acid
XFSTHGSHLDSSSSSVSFHALGILYFPSLGGYESSREMLYWTCKNGRPCPIILWDASLSSASNDTHSSVKLTWGTYQQLLKQKCWQNGRVPKPESGCTEIHHHEWSKMALFDFLLQIYNRLDTNCCGFRPRKEDACVQNGLRPKCDDQGSAALAHIIQRKHDPRHLVFIDNKGFFDRSEDNLNFKLLEGIK

SEQ ID NO: 28174 - protein, 331 aa, Homo sapiens
  REGION 1..331: note = ENSP00000466873
MTCPDKPGQLINWFICSLCVPRVRKLWSSRRPRTRRNLLLGTACAIYLGFLVSQVGRASLQHGQAAEKGPHRSRDTAEPSFPEIPLDGTLAPPESQGNGSTLQPNVVYITLRSKRSKPANIRGTVKPKRRKKHAVASAAPGQEALVGPSLQPQEAAREADAVAPGYAQGANLVKIGERPWRLVRGPGVRAGGPDFLQPSSRESNIRIYSESAPSWLSKDDIRRMRLLADSAVAGLRPVSSRSGARLLVLEGGAPGAVLRCGPSPCGLLKQPLDMSEVFAFHLDRILGLNRTLPSVSRKAEFIQGNRFTCFVICSCWGFWFIFFFPSLSFSK

SEQ ID NO: 28175 - protein, 9 aa, Homo sapiens
  REGION 1..9: note = ENSP00000466595
MTCPDKPGQ

SEQ ID NO: 28176 - protein, 133 aa, Homo sapiens [sequence omitted]

SEQ ID NO: 28177 - protein, 133 aa, Homo sapiens [sequence omitted]

SEQ ID NO: 28178 - protein, 52 aa, Homo sapiens [sequence omitted]

SEQ ID NO: 28179 - protein, 140 aa, Homo sapiens
  REGION 1..140: note = ENSP00000295569
MRSPRMRVCAKSVLLSHWLFLAYVLMVCCKLMSASSQHLRGHAGHHQIKQGTCEVVAVHRCCNKNRIEERSQTVKCSCFPGQVAGTTRAQPSCVEASIVIQKWWCHMNPCLEGEDCKVLPDYSGWSCSSGNKVKTTKVTR

SEQ ID NO: 28180 - protein, 77 aa, Homo sapiens
  REGION 1..77: note = ENSP00000419439
MRSPRMRVCAKSVLLSHWLFLAYVLMVCCKLMSASSQHLRGHAGHHQIKQGTCEVVAVHRCCNKNRIEERSQTVKCS

SEQ ID NO: 28181 - protein, 57 aa, Homo sapiens
  REGION 1..57: note = ENSP00000489092
MRSPRMRVCAKSVLLSHWLFLAYVLMVCCKLMSASSQHLRGHAGHHQIKQGTCEVVA

SEQ ID NO: 28182 - protein, 541 aa, Homo sapiens
  REGION 1..541: note = ENSP00000468308
MPGLRRDRLLTLLLLGALLSADLYFHLWPQVQRQLRPRERPRGCPCTGRASSLARDSAAAASDPGTIVHNFSRTEPRTEPAGGSHSGSSSKLQALFAHPLYNVPEEPPLLGAEDSLLASQEALRYYRRKVARWNRRHKMYREQMNLTSLDPPLQLRLEASWVQFHLGINRHGLYSRSSPVVSKLLQDMRHFPTISADYSQDEKALLGACDCTQIVKPSGVHLKLVLRFSDFGKAMFKPMRQQRDEETPVDFFYFIDFQRHNAEIAAFHLDRILDFRRVPPTVGRIVNVTKEILEVTKNEILQSVFFVSPASNVCFFAKCPYMCKTEYAVCGNPHLLEGSLSAFLPSLNLAPRLSVPNPWIRSYTLAGKEEWEVNPLYCDTVKQIYPYNNSQRLLNVIDMAIFDFLIGNMDRHHYEMFTKFGDDGFLIHLDNARGFGRHSHDEISILSPLSQCCMIKKKTLLHLQLLAQADYRLSDVMRESLLEDQLSPVLTEPHLLALDRRLQTILRTVEGCIVAHGQQSVIVDGPVEQLAPDSGQANLTS

SEQ ID NO: 28183 - protein, 21 aa, Homo sapiens
  REGION 1..21: note = ENSP00000467884
QRHNAEIAAFHLDREYGPAPL

SEQ ID NO: 28184 - protein, 127 aa, Homo sapiens
  REGION 1..127: note = ENSP00000464910
  VARIANT 1: note = Any amino acid
XFHLWPQVQRQLRPRERPRGCPCTGRASSLARDSAAAASDPGTIVHNFSRTEPRTEPAGGSHSGSSSKLQALFAHPLYNVPEEPPLLGAEDSLLASQEALRYYRRKVARWNRPQFLLLKGRGGVCDP

SEQ ID NO: 28185 - protein, 145 aa, Homo sapiens
  REGION 1..145: note = ENSP00000481085
MFTSPSEGKPGNMDRHHYEMFTKFGDDGFLIHLDNARGFGRHSHDEISILSPLSQCCMIKKKTLLHLQLLAQADYRLSDVMRESLLEDQLSPVLTEPHLLALDRRLQTILRTVEGCIVAHGQQSVIVDGPVEQLAPDSGQANLTS

SEQ ID NO: 28186 - protein, 297 aa, Homo sapiens
  REGION 1..297: note = ENSP00000349805
MTMESREMDCYLRRLKQELMSMKEVGDGLQDQMNCMMGALQELKLLQVQTALEQLEISGGGPVPGSPEGPRTQCEHPCWEGGRGPARPTVCSPSSQPSLGSSTKFPSHRSVCGRDLAPLPRTQPHQSCAQQGPERVEPDDWTSTLMSRGRNRQPLVLGDNVFADLVGNWLDLPELEKGGEKGETGGAREPKGEKGQPQELGRRFALTANIFKKFLRSVRPDRDRLLKEKPGWVTPMVPESRTGRSQKVKKRSLSKGSGHFPFPGTGEHRRGENPPTSCPKALEHSPSGFDINTAVWV

SEQ ID NO: 28187 - protein, 114 aa, Homo sapiens
  REGION 1..114: note = ENSP00000436075
MTMESREMDCYLRRLKQELMSMKEVGDGLQDQMNCMMGALQELKLLQVQTALEQLEISGGGPVPGSPEGPRTQCEHPCWEGGRGPARPTVCSPSSQPSLEQPEPTSGAFPIRCS

SEQ ID NO: 28188 - protein, 282 aa, Homo sapiens
  REGION 1..282: note = ENSP00000408238
MRQLMSMKEVGDGLQDQMNCMMGALQELKLLQVQTALEQLEISGGGPVPGSPEGPRTQCEHPCWEGGRGPARPTVCSPSSQPSLGSSTKFPSHRSVCGRDLAPLPRTQPHQSCAQQGPERVEPDDWTSTLMSRGRNRQPLVLGDNVFADLVGNWLDLPELEKGGEKGETGGAREPKGEKGQPQELGRRFALTANIFKKFLRSVRPDRDRLLKEKPGWVTPMVPESRTGRSQKVKKRSLSKGSGHFPFPGTGEHRRGENPPTSCPKALEHSPSGFDINTAVWV

SEQ ID NO: 28189 - protein, 181 aa, Homo sapiens
  REGION 1..181: note = ENSP00000437205
MTMESREMDCYLRRLKQELAPCFLSPLQMSMKEVGDGLQDQMNCMMGALQELKLLQVQTALEQLEISGGGPVPGSPEGPRTQCEHPCWEGGRGPARPTVCSPSSQPSLGSSTKFPSHRSVCGRDLAPLPRTQPHQSCAQQGPERVEPDDWTSTLMSRGRNRQPLVLGDNVFADLVGNWLDL

SEQ ID NO: 28190 - protein, 136 aa, Homo sapiens
  REGION 1..136: note = ENSP00000463642
MLACLPGPGDLSFQLLSHTQMNTGLQKWDTTQKMRTAHYPTPAELDAYAKKVANNPLTIKIFPNSVKVPQRKHVRRTVNGLDTSAQRYSPYPTQAATKAGLLAIVKVPAKSILKDFDGTRARLLPEAIMNPPVAPY

SEQ ID NO: 28191 - protein, 28 aa, Homo sapiens
  REGION 1..28: note = ENSP00000462540
MLACLPGPGDLSFQLLSHTQMNTGLQKL

SEQ ID NO: 28192 - protein, 28 aa, Homo sapiens
  REGION 1..28: note = ENSP00000463136
MLACLPGPGDLSFQLLSHTQMNTGLQKL

SEQ ID NO: 28193 - protein, 43 aa, Homo sapiens
  REGION 1..43: note = ENSP00000464019
MLACLPGPGDLSFQLLSHTQMNTGLQKWDTTQKMRTAHYPTPA

SEQ ID NO: 28194 - protein, 54 aa, Homo sapiens
  REGION 1..54: note = ENSP00000464291
MLACLPGPGDLSFQLLSHTQMNTGLQKSLFTISASVEAGQRKLINVDKCPLPYS

SEQ ID NO: 28195 - protein, 434 aa, Homo sapiens
  REGION 1..434: note = ENSP00000343115
MNPPVAPYATVAPSTLAHPQAQALARQQALQHAQTLAHAPPQTLQHPQGIPPPQALSHPQSLQQPQGLGHPQPMAQTQGLVHPQALAHQGLQHPHNPLLHGGRKMPDSDAPPNVTVSTSTIPLSMAATLQHSQPPDLSSIVHQINQFCQTRAGISTTSVCEGQIANPSPISRSLLINASTRVSTHSVPTPMPSCVVNPMEHTHAATAALPAAGPVNLPTGISRVPTGYPSDLKPVTWNQHQLAHLQQMCSEASGTPAPGLTGKHAAGRELAGPGFVGKAPAYPQELCLAQSFHLKPPLEKPTPSPPVNGMAAPLAYPNGHYFQPLWNNILPTPNSDSSGSQDLAMPFHGGQPTGAPLDCAAAPGAHYRAGTGGGPVASQNSLMQTVDYLSGDFQQACFREQSLAMLSKAHRAPGNRAPDPTESRSLHIQHPGYR

SEQ ID NO: 28196 - protein, 179 aa, Homo sapiens
  REGION 1..179: note = ENSP00000464355
MLACLPGPGDLSFQLLSHTQMNTGLQKWDTTQKMRTAHYPTPAELDAYAKKVANNPLTIKIFPNSVKVPQRKHVRRTVNGLDTSAQRYSPYPTQAATKAGLLAIVKVPAKSILKDFDGTRARLLPEAIMNPPVAPYATVAPSTLAHPQAQALARQQALQHAQTLAHAPPQTLQHPQGIP

SEQ ID NO: 28197 - protein, 28 aa, Homo sapiens
  REGION 1..28: note = ENSP00000463278
MLACLPGPGDLSFQLLSHTQMNTGLQKL

SEQ ID NO: 28198 - protein, 136 aa, Homo sapiens; identical to SEQ ID NO: 28190
  REGION 1..136: note = ENSP00000464299

SEQ ID NO: 28199 - protein, 562 aa, Homo sapiens
  REGION 1..562: note = ENSP00000413645
MLACLPGPGDLSFQLLSHTQMNTGLQKWDTTQKMRTAHYPTPAELDAYAKKVANNPLTIKIFPNSVKVPQRKHVRRTVNGLDTSAQRYSPYPTQAATKAGLLAIVKVPAKSILKDFDGTRARLLPEAIMNPPVAPYATVAPSTLAHPQAQALARQQALQHAQTLAHAPPQTLQHPQGIPPPQALSHPQSLQQPQGLGHPQPMAQTQGLVHPQALAHQGLQHPHNPLLHGGRKMPDSDAPPNVTVSTSTIPLSMAATLQHSQPPDLSSIVHQINQFCQTRAGISTTSVCEGQIANPSPISRSLLINASTRVSTHSVPTPMPSCVVNPMEHTHAATAALPAAGPVNLPTGISRVPTGYPSDLKPVTWNQHQLAHLQQMCSEASGTPAPGLTGKHAAGRELAGPGFVGKAPAYPQELCLAQSFHLKPPLEKPTPSPPVNGMAAPLAYPNGHYFQPLWNNILPTPNSDSSGSQDLAMPFHGGQPTGAPLDCAAAPGAHYRAGTGGGPVASQNSLMQTVDYLSGDFQQACFREQSLAMLSKAHRAPGNRAPDPTESRSLHIQHPGYR

SEQ ID NO: 28200 - protein, 239 aa, Homo sapiens
  REGION 1..239: note = ENSP00000463296
MLACLPGPGDLSFQLLSHTQMNTGLQKWDTTQKMRTAHYPTPAELDAYAKKVANNPLTIKIFPNSVKVPQRKHVRRTVNGLDTSAQRYSPYPTQAATKAGLLAIVKVPAKSILKDFDGTRARLLPEAIMNPPVAPYATVAPSTLAHPQAQALARQQALQHAQTLAHAPPQTLQHPQGIPPPQALSHPQSLQQPQGLGHPQPMAQTQGLVHPQALAHQGLQHPHNPLLHGGRKMPDSDAP

SEQ ID NO: 28201 - protein, 28 aa, Homo sapiens
  REGION 1..28: note = ENSP00000462251
MLACLPGPGDLSFQLLSHTQMNTGLQKL

SEQ ID NO: 28202 - protein, 28 aa, Homo sapiens
  REGION 1..28: note = ENSP00000463753
MLACLPGPGDLSFQLLSHTQMNTGLQKL

SEQ ID NO: 28203 - protein, 28 aa, Homo sapiens
  REGION 1..28: note = ENSP00000462534
MLACLPGPGDLSFQLLSHTQMNTGLQKL

SEQ ID NO: 28204 - protein, 562 aa, Homo sapiens; identical to SEQ ID NO: 28199
  REGION 1..562: note = ENSP00000462419

SEQ ID NO: 28205 - protein, 423 aa, Homo sapiens
  REGION 1..423: note = ENSP00000371397
MLPWKKHKFELLAEAPPRQASKPKGYAVSLHYSALSSLARACPEGALSRVGSMFRSKRKKLHITSEDPTYTVLYLGNATTIQARGDGCTDLAVGKIWSKSEAGRQGTKMKLTVSAQGIRMVHAEERALRRPGHLYLLHRVTYCVADARLPKVFAWVYRHELKHKAVMLRCHAVLVSKPEKAQAMALLLYQTSANALAEFKRLKRRDDARHQQQELVGAHTIPLVPLRKLLLHGPCCYKPPVERSRSAPKLGSITEDLLGEQLEQELQEEEEEEQPEGCPEEEENRAAEGDPAEEEAEAQRALVVAMHFECGDLLDTLENGRGEALGGGGGSLGPGAGPPPLLLGSASDMKAELSQLISDLGELSFGNDVRTLQADLRVTRLLSGDSTGSESSIEGGGPDATSATAGDSSRQADGASADEPHSG

SEQ ID NO: 28206 - protein, 88 aa, Homo sapiens
  REGION 1..88: note = ENSP00000401884
  VARIANT 1: note = Any amino acid
XKRIGVRDVRLNGSAASHVLHQDSGLGYKDLDLIFCADLRGEGEFQTVKDVVLDCLLDFLPEGVNKEKITPLTLKEESHTTTYFLNIS

SEQ ID NO: 28207 - protein, 461 aa, Homo sapiens
  REGION 1..461: note = ENSP00000358769
MHQRYFWTDQGQVALGGHYMAEGEGYFAMSEDELACSPYIPLGGDFGGGDFGGGDFGGGDFGGGGSFGGHCLDYCESPTAHCNVLNWEQVQRLDGILSETIPIHGRGNFPTLELQPSLIVKVVRRRLAEKRIGVRDVRLNGSAASHVLHQDSGLGYKDLDLIFCADLRGEGEFQTVKDVVLDCLLDFLPEGVNKEKITPLTLKEAYVQKMVKVCNDSDRWSLISLSNNSGKNVELKFVDSLRRQFEFSVDSFQIKLDSLLLFYECSENPMTETFHPTIIGESVYGDFQEAFDHLCNKIIATRNPEEIRGGGLLKYCNLLVRGFRPASDEIKTLQRYMCSRFFIDFSDIGEQQRKLESYLQNHFVGLEDRKYEYLMTLHGVVNESTVCLMGHERRQTLNLITMLAIRVLADQNVIPNVANVTCYYQPAPYVADANFSNYYIAQVQPVFTCQQQTYSTWLPCN

SEQ ID NO: 28208 - protein, 442 aa, Homo sapiens
  REGION 1..442: note = ENSP00000318298
MAEGEGYFAMSEDELACSPYIPLGGDFGGGDFGGGDFGGGDFGGGGSFGGHCLDYCESPTAHCNVLNWEQVQRLDGILSETIPIHGRGNFPTLELQPSLIVKVVRRRLAEKRIGVRDVRLNGSAASHVLHQDSGLGYKDLDLIFCADLRGEGEFQTVKDVVLDCLLDFLPEGVNKEKITPLTLKEAYVQKMVKVCNDSDRWSLISLSNNSGKNVELKFVDSLRRQFEFSVDSFQIKLDSLLLFYECSENPMTETFHPTIIGESVYGDFQEAFDHLCNKIIATRNPEEIRGGGLLKYCNLLVRGFRPASDEIKTLQRYMCSRFFIDFSDIGEQQRKLESYLQNHFVGLEDRKYEYLMTLHGVVNESTVCLMGHERRQTLNLITMLAIRVLADQNVIPNVANVTCYYQPAPYVADANFSNYYIAQVQPVFTCQQQTYSTWLPCN

SEQ ID NO: 28209 - protein, 523 aa, Homo sapiens
  REGION 1..523: note = ENSP00000358771
MQMRRVWRTCRSGPRKRREARYKKSTEDIFPAQLLKLQRHERVWQQEPPVRDHRSWGGSGAGGVAGREWTDQGQVALGGHYMAEGEGYFAMSEDELACSPYIPLGGDFGGGDFGGGDFGGGDFGGGGSFGGHCLDYCESPTAHCNVLNWEQVQRLDGILSETIPIHGRGNFPTLELQPSLIVKVVRRRLAEKRIGVRDVRLNGSAASHVLHQDSGLGYKDLDLIFCADLRGEGEFQTVKDVVLDCLLDFLPEGVNKEKITPLTLKEAYVQKMVKVCNDSDRWSLISLSNNSGKNVELKFVDSLRRQFEFSVDSFQIKLDSLLLFYECSENPMTETFHPTIIGESVYGDFQEAFDHLCNKIIATRNPEEIRGGGLLKYCNLLVRGFRPASDEIKTLQRYMCSRFFIDFSDIGEQQRKLESYLQNHFVGLEDRKYEYLMTLHGVVNESTVCLMGHERRQTLNLITMLAIRVLADQNVIPNVANVTCYYQPAPYVADANFSNYYIAQVQPVFTCQQQTYSTWLPCN

SEQ ID NO: 28210 - protein, 86 aa, Homo sapiens
  REGION 1..86: note = ENSP00000404872
  VARIANT 1: note = Any amino acid
XQDSGLGYKDLDLIFCADLRGEGEFQTVKDVVLDCLLDFLPEGVNKEKITPLTLKVFHRLLRHWRAAEKTGVLFAEPLCGIGRPQV

SEQ ID NO: 28211 - protein, 391 aa, Homo sapiens
  REGION 1..391: note = ENSP00000358458
MAEESSCTRDCMSFSVLNWDQVSRLHEVLTEVVPIHGRGNFPTLEITLKDIVQTVRSRLEEAGIKVHDVRLNGSAAGHVLVKDNGLGCKDLDLIFHVALPTEAEFQLVRDVVLCSLLNFLPEGVNKLKISPVTLKEAYVQKLVKVCTDTDRWSLISLSNKNGKNVELKFVDSIRRQFEFSVDSFQIILDSLLFFYDCSNNPISEHFHPTVIGESMYGDFEEAFDHLQNRLIATKNPEEIRGGGLLKYSNLLVRDFRPTDQEEIKTLERYMCSRFFIDFPDILEQQRKLETYLQNHFAEEERSKYDYLMILRRVVNESTVCLMGHERRQTLNLISLLALRVLAEQNIIPSATNVTCYYQPAPYVSDGNFSNYYVAHPPVTYSQPYPTWLPCN

SEQ ID NO: 28212 - protein, 324 aa, Homo sapiens
  REGION 1..324: note = ENSP00000429150
MGNLLKVLTCTDLEQGPNFFLDFENAQPTESEKEIYNQVNVVLKDAEGILEDLQSYRGAGHEIREAIQHPADEKLQEKAWGAVVPLVGKLKKFYEFSQRLEAALRGLLGALTSTPYSPTQHLEREQALAKQFAEILHFTLRFDELKMTNPAIQNDFSYYRRTLSRMRINNVPAEGENEVNNELANRMSLFYAEATPMLKTLSDATTKFVSENKNLPIENTTDCLSTMASVCRVMLETPEYRSRFTNEETVSFCLRVMVGVIILYDHVHPVGAFAKTSKIDMKGCIKVLKDQPPNSVEGLLNALRYTTKHLNDETTSKQIKSMLQ

SEQ ID NO: 28213 - protein, 324 aa, Homo sapiens; identical to SEQ ID NO: 28212
  REGION 1..324: note = ENSP00000428117

SEQ ID NO: 28214 - protein, 324 aa, Homo sapiens; identical to SEQ ID NO: 28212
  REGION 1..324: note = ENSP00000429802

SEQ ID NO: 28215 - protein, 324 aa, Homo sapiens; identical to SEQ ID NO: 28212
  REGION 1..324: note = ENSP00000384880

SEQ ID NO: 28216 - protein, 324 aa, Homo sapiens; identical to SEQ ID NO: 28212
  REGION 1..324: note = ENSP00000429078

SEQ ID NO: 28217 - protein, 178 aa, Homo sapiens
  REGION 1..178: note = ENSP00000429978
MTNPAIQNDFSYYRRTLSRMRINNVPAEGENEVNNELANRMSLFYAEATPMLKTLSDATTKFVSENKNLPIENTTDCLSTMASVCRVMLETPEYRSRFTNEETVSFCLRVMVGVIILYDHVHPVGAFAKTSKIDMKGCIKVLKDQPPNSVEGLLNALRYTTKHLNDETTSKQIKSMLQ

SEQ ID NO: 28218 - protein, 324 aa, Homo sapiens; identical to SEQ ID NO: 28212
  REGION 1..324: note = ENSP00000430674

SEQ ID NO: 28219 - protein, 324 aa, Homo sapiens; identical to SEQ ID NO: 28212
  REGION 1..324: note = ENSP00000429499

SEQ ID NO: 28220 - protein, 178 aa, Homo sapiens; identical to SEQ ID NO: 28217
  REGION 1..178: note = ENSP00000430433

SEQ ID NO: 28221 - protein, 155 aa, Homo sapiens
  REGION 1..155: note = ENSP00000430806
MGNLLKVLTCTDLEQGPNFFLDFENAQPTESEKEIYNQVNVVLKDAEGILEDLQSYRGAGHEIREAIQHPADEKLQEKAWGAVVPLVGKLKKFYEFSQRLEAALRGLLGALTSTPYSPTQHLEREQALAKQFAEILHFTLRFDELKVELSIGPDC

SEQ ID NO: 28222 - protein, 100 aa, Homo sapiens
  REGION 1..100: note = ENSP00000429051
MGNLLKVLTCTDLEQGPNFFLDFENAQPTESEKEIYNQVNVVLKDAEGILEDLQSYRGAGHEIREAIQHPADEKLQEKAWGAVVPLVGKLKKFYEFSQRL

SEQ ID NO: 28223 - protein, 98 aa, Homo sapiens
  REGION 1..98: note = ENSP00000430694
MGNLLKVLTCTDLEQGPNFFLDFENAQPTESEKEIYNQVNVVLKDAEGILEDLQSYRGAGHEIREAIQHPADEKLQEKAWGAVVPLVGKLKKFYEFSQ

SEQ ID NO: 28224 - protein, 93 aa, Homo sapiens
  REGION 1..93: note = ENSP00000429074
MGNLLKVLTCTDLEQGPNFFLDFENAQPTESEKEIYNQVNVVLKDAEGILEDLQSYRGAGHEIREAIQHPADEKLQEKAWGAVVPLVGKLKKF

SEQ ID NO: 28225 - protein, 78 aa, Homo sapiens
  REGION 1..78: note = ENSP00000430127
MGNLLKVLTCTDLEQGPNFFLDFENAQPTESEKEIYNQVNVVLKDAEGILEDLQSYRGAGHEIREAIQHPADEKLQEK

SEQ ID NO: 28226 - protein, 68 aa, Homo sapiens
  REGION 1..68: note = ENSP00000429659
MGNLLKVLTCTDLEQGPNFFLDFENAQPTESEKEIYNQVNVVLKDAEGILEDLQSYRGAGHEIREAIQ

SEQ ID NO: 28227 - protein, 65 aa, Homo sapiens
  REGION 1..65: note = ENSP00000427994
MGNLLKVLTCTDLEQGPNFFLDFENAQPTESEKEIYNQVNVVLKDAEGILEDLQSYRGAGHEIRE

SEQ ID NO: 28228 - protein, 63 aa, Homo sapiens
  REGION 1..63: note = ENSP00000430434
MGNLLKVLTCTDLEQGPNFFLDFENAQPTESEKEIYNQVNVVLKDAEGILEDLQSYRGAGHEI

SEQ ID NO: 28229 - protein, 47 aa, Homo sapiens
  REGION 1..47: note = ENSP00000429860
MGNLLKVLTCTDLEQGPNFFLDFENAQPTESEKEIYNQVNVVLKDAE

SEQ ID NO: 28230 - protein, 45 aa, Homo sapiens
  REGION 1..45: note = ENSP00000430412
MGNLLKVLTCTDLEQGPNFFLDFENAQPTESEKEIYNQVNVVLKD

SEQ ID NO: 28231 - protein, 217 aa, Homo sapiens [sequence omitted]

SEQ ID NO: 28232 - protein, 218 aa, Homo sapiens
  REGION 1..218: note = ENSP00000492779
MQKASWRTCSHTEELATKYERAIQHPADEKLQEKAWGAVVPLVGKKEILRIFSEVRSSIKRSSGSLNKYPIFSHPASRARQALAKQFAEILHFTLRFDELKMTNPAIQNDFSYYRRTLSRMRINNVPAEGENEVNNELANRMSLFYAEATPMLKTLSDATTKFVSENKNLPIENTTDCLSTMASVCRVMLETPEYRSRFTNEETVSFLEGNGGCHNTL

SEQ ID NO: 28233 - protein, 156 aa, Homo sapiens
  REGION 1..156: note = ENSP00000423987
  VARIANT 1: note = Any amino acid
XRCDSGGSATRQGSPGAVLPRSAVWSTGPTSPATPRPSSASGGFVDSSEGSAGSGPLWCSAESCLPSTRRRPSLSQERLAGAGTPLPWASSSPTSTPALGGRRGLLRCRSQPCVLSGKRSRRKRRREEDARWTRPSLDFLKMTQVASRTVSPSMLP

SEQ ID NO: 28234 - protein, 360 aa, Homo sapiens
  REGION 1..360: note = ENSP00000419044
MVTLITEKLQSQSLDDLTCKAEAGPLQYSAETLNKSGRLFPLELNDQSPWKVFSGGPPVRSQAATGPDFSFLPGLSAAAHTMGLQWQPQSPRPGAGLGAASTVDPSESTGSSTAPPTKRHCRSLSEPEELVRCRSPWRPGSSKVWTPVSKRRCDSGGSATRQGSPGAVLPRSAVWSTGPTSPATPRPSSASGGFVDSSEGSAGSGPLWCSAESCLPSTRRRPSLSQERLAGAGTPLPWASSSPTSTPALGGRRGLLRCRSQPCVLSGKRSRRKRRREEDARWTRPSLDFLKMTQPHSCARECESRVRGLGVSLQHLSGPSSQSRGSTLNENKTPWFEMEGNLAPEDFKKFKKPLLPQLRR

SEQ ID NO: 28235 - protein, 398 aa, Homo sapiens
  REGION 1..398: note = ENSP00000418243
MVTLITEKLQSQSLDDLTCKAEAGPLQYSAETLNKSGRLFPLELNDQSPWKVFSGGPPVRSQAATGPDFSFLPGLSAAAHTMGLQWQPQSPRPGAGLGAASTVDPSESTGSSTAPPTKRHCRSLSEPEELVRCRSPWRPGSSKVWTPVSKRRCDSGGSATRQGSPGAVLPRSAVWSTGPTSPATPRPSSASGGFVDSSEGSAGSGPLWCSAESCLPSTRRRPSLSQERLAGAGTPLPWASSSPTSTPALGGRRGLLRCRSQPCVLSGKRSRRKRRREEDARWTRPSLDFLKMTQTLKNSKSLCSLNYEDDDEDDTPVKTVLSSPCDSRGLPGITMPGCSQRGLRTSPVHPNLWASRESVTSDGSRRSSGDPRDGDSVGEEGVFPRARWELDLEQIENN

SEQ ID NO: 28236 - protein, 398 aa, Homo sapiens; identical to SEQ ID NO: 28235
  REGION 1..398: note = ENSP00000426260

SEQ ID NO: 28237 - protein, 108 aa, Homo sapiens
  REGION 1..108: note = ENSP00000417615
MVTLITEKLQSQSLDDLTCKAEAGPLQYSAETLNKSGRLFPLELNDQSPWKVFSGGPPVRSQAATGPDFSFLPGLSAAAHTMGLQWQPQSPRPGAGLGAASTVDPSES

SEQ ID NO: 28238 - protein, 398 aa, Homo sapiens; identical to SEQ ID NO: 28235
  REGION 1..398: note = ENSP00000310057

SEQ ID NO: 28239 - protein, 428 aa, Homo sapiens
  REGION 1..428: note = ENSP00000359333
MARSLCPGAWLRKPYYLQARFSYVRMKYLFFSWLVVFVGSWIIYVQYSTYTELCRGKDCKKIICDKYKTGVIDGPACNSLCVTETLYFGKCLSTKPNNQMYLGIWDNLPGVVKCQMEQALHLDFGTELEPRKEIVLFDKPTRGTTVQKFKEMVYSLFKAKLGDQGNLSELVNLILTVADGDKDGQVSLGEAKSAWALLQLNEFLLMVILQDKEHTPKLMGFCGDLYVMESVEYTSLYGISLPWVIELFIPSGFRRSMDQLFTPSWPRKAKIAIGLLEFVEDVFHGPYGNFLMCDTSAKNLGYNDKYDLKMVDMRKIVPETNLKELIKDRHCESDLDCVYGTDCRTSCDQSTMKCTSEVIQPNLAKACQLLKDYLLRGAPSEIREELEKQLYSCIALKVTANQMEMEHSLILNNLKTLLWKKISYTNDS

SEQ ID NO: 28240 - protein, 369 aa, Homo sapiens
  REGION 1..369: note = ENSP00000482718
MARSLCPGAWLRKPYYLQARFSYVRMKYLFFSWLVVFVGSWIIYVQYSTYTELCRGKDCKKIICDKYKTGVIDGPACNSLCVTETLYFGKCLSTKPNNQAKLGDQGNLSELVNLILTVADGDKDGQVSLGEAKSAWALLQLNEFLLMVILQDKEHTPKLMGFCGDLYVMESVEYTSLYGISLPWVIELFIPSGFRRSMDQLFTPSWPRKAKIAIGLLEFVEDVFHGPYGNFLMCDTSAKNLGYNDKYDLKMVDMRKIVPETNLKELIKDRHCESDLDCVYGTDCRTSCDQSTMKCTSEVIQPNLAKACQLLKDYLLRGAPSEIREELEKQLYSCIALKVTANQMEMEHSLILNNLKTLLWKKISYTNDS

SEQ ID NO: 28241 - protein, 383 aa, Homo sapiens
  REGION 1..383: note = ENSP00000484866
MARSLCPGAWLRKPYYLQCDKYKTGVIDGPACNSLCVTETLYFGKCLSTKPNNQMYLGIWDNLPGVVKCQMEQALHLDFGTELEPRKEIVLFDKPTRGTTVQKFKEMVYSLFKAKLGDQGNLSELVNLILTVADGDKDGQVSLGEAKSAWALLQLNEFLLMVILQDKEHTPKLMGFCGDLYVMESVEYTSLYGISLPWVIELFIPSGFRRSMDQLFTPSWPRKAKIAIGLLEFVEDVFHGPYGNFLMCDTSAKNLGYNDKYDLKMVDMRKIVPETNLKELIKDRHCESDLDCVYGTDCRTSCDQSTMKCTSEVIQPNLAKACQLLKDYLLRGAPSEIREELEKQLYSCIALKVTANQMEMEHSLILNNLKTLLWKKISYTNDS

SEQ ID NO: 28242 - protein, 162 aa, Homo sapiens
  REGION 1..162: note = ENSP00000483279
MARSLCPGAWLRKPYYLQARFSYVRMKYLFFSWLVVFVGSWIIYVQYSTYTELCRGKDCKKIICDKYKTGVIDGPACNSLCVTETLYFGKCLSTKPNNQMYLGIWDNLPGVVKCQMEQALHLDFGTELEPRKEIVLFDKPTRGTTVQKFKEMVYSLFKDQHR

SEQ ID NO: 28243 - protein, 403 aa, Homo sapiens
  REGION 1..403: note = ENSP00000482478
MKYLFFSWLVVFVGSWIIYVQYSTYTELCRGKDCKKIICDKYKTGVIDGPACNSLCVTETLYFGKCLSTKPNNQMYLGIWDNLPGVVKCQMEQALHLDFGTELEPRKEIVLFDKPTRGTTVQKFKEMVYSLFKAKLGDQGNLSELVNLILTVADGDKDGQVSLGEAKSAWALLQLNEFLLMVILQDKEHTPKLMGFCGDLYVMESVEYTSLYGISLPWVIELFIPSGFRRSMDQLFTPSWPRKAKIAIGLLEFVEDVFHGPYGNFLMCDTSAKNLGYNDKYDLKMVDMRKIVPETNLKELIKDRHCESDLDCVYGTDCRTSCDQSTMKCTSEVIQPNLAKACQLLKDYLLRGAPSEIREELEKQLYSCIALKVTANQMEMEHSLILNNLKTLLWKKISYTNDS

SEQ ID NO: 28244 - protein, 615 aa, Homo sapiens
  REGION 1..615: note = ENSP00000481110
MARACLIQRLPIKRDCTPVFVRGLSSPSAAMALLSEGLDEVPAACLSPCGPPNPTELFSESRRLALEELVAGGPEAFAAFLRRERLARFLNPDEVHAILRAAERPGEEGAAAAAAAEDSFGSSHDCSSGTYFPEQSDLEPPLLELGWPAFYQGAYRGATRVETHFQPRGAGEGGPYGCKDALRQQLRSAREVIAVVMDVFTDIDIFRDLQEICRKQGVAVYILLDQALLSQFLDMCMDLKVHPEQEKLMTVRTITGNIYYARSGTKIIGKVHEKFTLIDGIRVATGSYSFTWTDGKLNSSNLVILSGQVVEHFDLEFRILYAQSKPISPKLLSHFQSSNKFDHLTNRKPQSKELTLGNLLRMRLARLSSTPRKADLDPEMPAEGKAERKPHDCESSTVSEEDYFSSHRDELQSRKAIDAATQTEPGEEMPGLSVSEVGTQTSITTACAGTQTAVITRIASSQTTIWSRSTTTQTDMDENILFPRGTQSTEGSPVSKMSVSRSSSLKSSSSVSSQGSVASSTGSPASIRTTDFHNPGYPKYLGTPHLELYLSDSLRNLNKERQFHFAGIRSRLNHMLAMLSRRTLFTENHLGLHSGNFSRVNLLAVRDVALYPSYQ

SEQ ID NO: 28245 - protein, 585 aa, Homo sapiens
  REGION 1..585: note = ENSP00000481465
MALLSEGLDEVPAACLSPCGPPNPTELFSESRRLALEELVAGGPEAFAAFLRRERLARFLNPDEVHAILRAAERPGEEGAAAAAAAEDSFGSSHDCSSGTYFPEQSDLEPPLLELGWPAFYQGAYRGATRVETHFQPRGAGEGGPYGCKDALRQQLRSAREVIAVVMDVFTDIDIFRDLQEICRKQGVAVYILLDQALLSQFLDMCMDLKVHPEQEKLMTVRTITGNIYYARSGTKIIGKVHEKFTLIDGIRVATGSYSFTWTDGKLNSSNLVILSGQVVEHFDLEFRILYAQSKPISPKLLSHFQSSNKFDHLTNRKPQSKELTLGNLLRMRLARLSSTPRKADLDPEMPAEGKAERKPHDCESSTVSEEDYFSSHRDELQSRKAIDAATQTEPGEEMPGLSVSEVGTQTSITTACAGTQTAVITRIASSQTTIWSRSTTTQTDMDENILFPRGTQSTEGSPVSKMSVSRSSSLKSSSSVSSQGSVASSTGSPASIRTTDFHNPGYPKYLGTPHLELYLSDSLRNLNKERQFHFAGIRSRLNHMLAMLSRRTLFTENHLGLHSGNFSRVNLLAVRDVALYPSYQ

SEQ ID NO: 28246 - protein, 292 aa, Homo sapiens
  REGION 1..292: note = ENSP00000295092
MGNQLDRITHLNYSELPTGDPSGIEKDELRVGVAYFFSDDEEDLDERGQPDKFGVKAPPGCTPCPESPSRHHHHLLHQLVLNETQFSAFRGQECIFSKVSGGPQGADLSVYAVTALPALCEPGDLLELLWLQPAPEPPAPAPHWAVYVGGGQIIHLHQGEIRQDSLYEAGAANVGRVVNSWYRYRPLVAELVVQNACGHLGLKSEEICWTNSESFAAWCRFGKREFKAGGEVPAGTQPPQQQYYLKVHLGENKVHTARFHSLEDLIREKRRIDASGRLRVLQELADLVDDKE

SEQ ID NO: 28247 - protein, 292 aa, Homo sapiens; identical to SEQ ID NO: 28246
  REGION 1..292: note = ENSP00000330681

SEQ ID NO: 28248 - protein, 184 aa, Homo sapiens
  REGION 1..184: note = ENSP00000355614
MSGARAAPGAAGNGAVRGLRVDGLPPLPKSLSGLLHSASGGGASGGWRHLERLYAQKSRIQDELSRGGPGGGGARAAALPAKPPNLDAALALLRKEMVGLRQLDMSLLCQLYSLYESIQEYKGACQAASSPDCTYALENGFFDEEEEYFQEQNSLHDRRDRGPPRDLSLPVSSLSSSDWILESI

SEQ ID NO: 28249 - protein, 304 aa, Homo sapiens
  REGION 1..304: note = ENSP00000443411
MNIVFSRDSQVRVMENTVANTEKYFGQFCSLLAAYTRKTARLRDKADQLVKQLIDFANSENPELRATMRGFAEDLAKVQDYRQAQVERLETKVVNPLKLYGAQIKQTRAEIKKFKHVQNHEIKQLEKLEKLRQKSPSDQQMISQAETRVQRAAVDSSRTTLQLEETVDGFQRQKLKDLQKFFCDFVTIEMVFHAKAVEVYSSAFQTLEKYDLERDLLDFRAKMQGVYGHYDTRLLANTSPPPSVLQSLASQGTLQVQLSRANEDPEHPHANHGRFSLCEWVVKGQPAHCVCGQGGHLMLPGHSL

SEQ ID NO: 28250 - protein, 205 aa, Homo sapiens
  REGION 1..205: note = ENSP00000478373
  VARIANT 1: note = Any amino acid
XPLKLYGAQIKQTRAEIKKFKHVQNHEIKQLEKLEKLRQKSPSDQQMISQAETRVQRAAVDSSRTTLQLEETVDGFQRQKLKDLQKFFCDFVTIEMVFHAKAVEVYSSAFQTLEKYDLERDLLDFRAKMQGVYGHYDTRLLANTSPPPSVLQSLASQSAQSTIWSPGKEGEESEDNSMEEAPVEDLRALGQGPHKRELPTTVRRT

SEQ ID NO: 28251 - protein, 304 aa, Homo sapiens
  REGION 1..304: note = ENSP00000487117
MNIVFSRDSQVRVMENTVANTEKYFGQFCSLLAAYTRKTARLRDKADQLVKQLIDFANSENPELRATMRGFAEDLAKVQDYRQAQVERLETKVVNPLKLYGAQIKQTRAEIKKFKHVQNHEIKQLEKLEKLRQKSPSDQQMIGQAETRVQRAAVDSSRTTLQLEETVDGFQRQKLKDLQKFFCDFVTIEMVFHAKAVEVYSSAFQTLEKYDLERDLLDFRAKMQGVYGHYDTRLLANTSPPPSVLQSLASQGTLQVQLSRANEDPEHPHANHGRFSLCEWVVKGQPAHCVCGQGGHLMLPGHSL

SEQ ID NO: 28252 - protein, 44 aa, Homo sapiens
  REGION 1..44: note = ENSP00000450117
MQELLSCTNIIFHCAATVRFDDTLRHAVQLNVTATRQLLLMASQ

SEQ ID NO: 28253 - protein, 515 aa, Homo sapiens
  REGION 1..515: note = ENSP00000443291
MSTIAAFYGGKSILITGATGFLGKVLMEKLFRTSPDLKVIYILVRPKAGQTLQQRVFQILDSKLFEKVKEVCPNVHEKIRAIYADLNQNDFAISKEDMQELLSCTNIIFHCAATVRFDDTLRHAVQLNVTATRQLLLMASQMPKLEAFIHISTAYSNCNLKHIDEVIYPCPVEPKKIIDSLEWLDDAIIDEITPKLIRDWPNIYTYTKALGEMVVQQESRNLNIAIIRPSIVGATWQEPFPGWVDNINGPNGIIIATGKGFLRAIKATPMAVADVIPVDTVVNLMLAVGWYTAVHRPKSTLVYHITSGNMNPCNWHKMGVQVLATFEKIPFERPFRRPNANFTSNSFTSQYWNAVSHRAPAIIYDCYLRLTGRKPRMTKLMNRLLRTVSMLEYFINRSWEWSTYNTEMLMSELSPEDQRVFNFDVRQLNWLEYIENYVLGVKKYLLKEDMAGIPKAKQRLKRLRNIHYLFNTALFLIAWRLLIARSQMARNVWFFIVSFCYKFLSYFRASSTLKV

SEQ ID NO: 28254 - protein, 515 aa, Homo sapiens; identical to SEQ ID NO: 28253
  REGION 1..515: note = ENSP00000182377

SEQ ID NO: 28255 - protein, 418 aa, Homo sapiens
  REGION 1..418: note = ENSP00000449349
MQELLSCTNIIFHCAATVRFDDTLRHAVQLNVTATRQLLLMASQMPKLEAFIHISTAYSNCNLKHIDEVIYPCPVEPKKIIDSLEWLDDAIIDEITPKLIRDWPNIYTYTKALGEMVVQQESRNLNIAIIRPSIVGATWQEPFPGWVDNINGPNGIIIATGKGFLRAIKATPMAVADVIPVDTVVNLMLAVGWYTAVHRPKSTLVYHITSGNMNPCNWHKMGVQVLATFEKIPFERPFRRPNANFTSNSFTSQYWNAVSHRAPAIIYDCYLRLTGRKPRMTKLMNRLLRTVSMLEYFINRSWEWSTYNTEMLMSELSPEDQRVFNFDVRQLNWLEYIENYVLGVKKYLLKEDMAGIPKAKQRLKRLRNIHYLFNTALFLIAWRLLIARSQMARNVWFFIVSFCYKFLSYFRASSTLKV

SEQ ID NO: 28256 - protein, 67 aa, Homo sapiens
  REGION 1..67: note = ENSP00000449436
MSTIAAFYGGKSILITGATGFLGKVLMEKLFRTSPDLKVIYILVRPKAGQTLQQRVFQILDSKFESY

SEQ ID NO: 28257 - protein, 85 aa, Homo sapiens
  REGION 1..85: note = ENSP00000449187
LSPEDQRVFNFDVRQLNWLEYIENYVLGVKKYLLKEDMAGIPKAKQRLKRLRNIHYLFNTALFLIAWRLLIARSQMARNVWFFIM

SEQ ID NO: 28258 - protein, 22 aa, Homo sapiens
  REGION 1..22: note = ENSP00000447467
  VARIANT 1: note = Any amino acid
XMAGIPKAKQRLKRSCTPYSTL

SEQ ID NO: 28259 - protein, 1076 aa, Homo sapiens
  REGION 1..1076: note = ENSP00000471242
MGEIEQRPTPGSRLGAPENSGISTLERGQKPPPTPSGKLVSIKIQMLDDTQEAFEVPQRAPGKVLLDAVCNHLNLVEGDYFGLEFPDHKKITVWLDLLKPIVKQIRRPKHVVVKFVVKFFPPDHTQLQEELTRYLFALQVKQDLAQGRLTCNDTSAALLISHIVQSEIGDFDEALDREHLAKNKYIPQQDALEDKIVEFHHNHIGQTPAESDFQLLEIARRLEMYGIRLHPAKDREGTKINLAVANTGILVFQGFTKINAFNWAKVRKLSFKRKRFLIKLRPDANSAYQDTLEFLMASRDFCKSFWKICVEHHAFFRLFEEPKPKPKPVLFSRGSSFRFSGRTQKQVLDYVKEGGHKKVQFERKHSKIHSIRSLASQPTELNSEVLEQSQQSTSLTFGEGAESPGGQSCRRGKEPKVSAGEPGSHPSPAPRRSPAGNKQADGAASAPTEEEEEVVKDRTQQSKPQPPQPSTGSLTGSPHLSELSVNSQGGVAPANVTLSPNLSPDTKQASPLISPLLNDQACPRTDDEDEGRRKRFPTDKAYFIAKEVSTTERTYLKDLEVITSWFQSTVSKEDAMPEALKSLIFPNFEPLHKFHTNFLKEIEQRLALWEGRSNAQIRDYQRIGDVMLKNIQGMKHLAAHLWKHSEALEALENGIKSSRRLENFCRDFELQKVCYLPLNTFLLRPLHRLMHYKQVLERLCKHHPPSHADFRDCRAALAEITEMVAQLHGTMIKMENFQKLHELKKDLIGIDNLVVPGRPGSFSLIRTPHLGQARRIPCAPERRPLLLVKEFIRLGSLSKLSGKGLQQRMFFLFNDVLLYTSRGLTASNQFKVHGQLPLYGMTIEESEDEWGVPHCLTLRGQRQSIIVAASSRSEMEKWVEDIQMAIDLAEKSSSPAPEFLASSPPDNKSPDEATAADQESEDDLSASRTSLERQAPHRGNTMVHVCWHRNTSVSMVDFSIAVENQLSGNLLRKFKNSNGWQKLWVVFTNFCLFFYKSHQDNHPLASLPLLGYSLTIPSESENIQKDYVFKLHFKSHVYYFRAESEYTFERWMEVIRSATSSASRPHVLSHKESLVY

SEQ ID NO: 28260 - protein, 1045 aa, Homo sapiens
  REGION 1..1045: note = ENSP00000322926
MGEIEQRPTPGSRLGAPENSGISTLERGQKPPPTPSGKLVSIKIQMLDDTQEAFEVPQRAPGKVLLDAVCNHLNLVEGDYFGLEFPDHKKITVWLDLLKPIVKQIRRPKHVVVKFVVKFFPPDHTQLQEELTRYLFALQVKQDLAQGRLTCNDTSAALLISHIVQSEIGDFDEALDREHLAKNKYIPQQDALEDKIVEFHHNHIGQTPAESDFQLLEIARRLEMYGIRLHPAKDREGTKINLAVANTGILVFQGFTKINAFNWAKVRKLSFKRKRFLIKLRPDANSAYQDTLEFLMASRDFCKSFWKICVEHHAFFRLFEEPKPKPKPVLFSRGSSFRFSGRTQKQVLDYVKEGGHKKVQFERKHSKIHSIRSLASQPTELNSEVLEQSQQSTSLTFGEGAESPGGQSCRRGKEPKVSAGEPGSHPSPAPRRSPAGNKQADGAASAPTEEEEEVVKDRTQQSKPQPPQPSTGSLTGSPHLSELSVNSQGGVAPANVTLSPNLSPDTKQASPLISPLLNDQACPRTDDEDEGRRKRFPTDKAYFIAKEVSTTERTYLKDLEVITSWFQSTVSKEDAMPEALKSLIFPNFEPLHKFHTNFLKEIEQRLALWEGRSNAQIRDYQRIGDVMLKNIQGMKHLAAHLWKHSEALEALENGIKSSRRLENFCRDFELQKVCYLPLNTFLLRPLHRLMHYKQVLERLCKHHPPSHADFRDCRAALAEITEMVAQLHGTMIKMENFQKLHELKKDLIGIDNLVVPGREFIRLGSLSKLSGKGLQQRMFFLFNDVLLYTSRGLTASNQFKVHGQLPLYGMTIEESEDEWGVPHCLTLRGQRQSIIVAASSRSEMEKWVEDIQMAIDLAEKSSSPAPEFLASSPPDNKSPDEATAADQESEDDLSASRTSLERQAPHRGNTMVHVCWHRNTSVSMVDFSIAVENQLSGNLLRKFKNSNGWQKLWVVFTNFCLFFYKSHQDNHPLASLPLLGYSLTIPSESENIQKDYVFKLHFKSHVYYFRAESEYTFERWMEVIRSATSSASRPHVLSHKESLVY

SEQ ID NO: 28261 - protein, 801 aa, Homo sapiens
  REGION 1..801: note = ENSP00000490391
MGEIEQRPTPGSRLGAPENSGISTLERGQKPPPTPSGKLVSIKIQMLDDTQEAFEVPQRAPGKVLLDAVCNHLNLVEGDYFGLEFPDHKKITVWLDLLKPIVKQIRRPKHVVVKFVVKFFPPDHTQLQEELTRYLFALQVKQDLAQGRLTCNDTSAALLISHIVQSEIGDFDEALDREHLAKNKYIPQQDALEDKIVEFHHNHIGQTPAESDFQLLEIARRLEMYGIRLHPAKDREGTKINLAVANTGILVFQGFTKINAFNWAKVRKLSFKRKRFLIKLRPDANSAYQDTLEFLMASRDFCKSFWKICVEHHAFFRLFEEPKPKPKPVLFSRGSSFRFSGRTQKQVLDYVKEGGHKKVQFERKHSKIHSIRSLASQPTELNSEVLEQSQQSTSLTFGEGAESPGGQSCRRGKEPKVSAGEPGSHPSPAPRRSPAGNKQADGAASAPTEEEEEVVKDRTQQSKPQPPQPSTGPASRAARGSSTSIPFIDCSDVDSEYDLLREQASRSRSRSRSRSQTNDNYEGDLTSGVYLLSREEGRREAGRRASPHSAKSSRPPSGEFLDDDSADITFDMSGSPRLPRHSSLIDEMFKGSAGHSPLATPLSPSSSSSSPNMSWDRTGSQGYVSENGHDHREGSMGEDTLPDQGPPYERWSPTSPRPYMRNLPGRCNKSETDPLILSQVAFTPEAMDGLGGRGKWGQASAAAPEGRSLANGTPPMGAASKVPAVQSVCARGMAGQLAPLQVTEGSTSSGTESSESDSEMLIPGSQPLIFGNPAVLRSPSLLRSRGSLGGLRLSEEQEEDE

SEQ ID NO: 28262 - protein, 129 aa, Homo sapiens
  REGION 1..129: note = ENSP00000365765
MGEIEQRPTPGSRLGAPENSGISTLERGQKPPPTPSGKLVSIKIQMLDDTQEAFEVPMVSSSSFLKATGSSWTGWVLRCSMKPKHHSHLIEKFGEDRILTHLTGSISYTNWAGSRSLAVTVTEELLNLF

SEQ ID NO: 28263 - protein, 203 aa, Homo sapiens
  REGION 1..203: note = ENSP00000469712
MGEIEQRPTPGSRLGAPENSGISTLERGQKPPPTPSGKLVSIKIQMLDDTQEAFEVPQRAPGKVLLDAVCNHLNLVEGDYFGLEFPDHKKITVWLDLLKPIVKQIRRPKHVVVKFVVKFFPPDHTQLQEELTRYLFALQVKQDLAQGRLTCNDTSAALLISHIVQSEIGDFDEALDREHLAKNKYIPQQDALEDKIVEFHHNH

SEQ ID NO: 28264 - protein, 171 aa, Homo sapiens
  REGION 1..171: note = ENSP00000472346
  VARIANT 1: note = Any amino acid
XYLFALQVKQDLAQGRLTCNDTSAALLISHIVQSEIGDFDEALDREHLAKNKYIPQQDALEDKIVEFHHNHIGQTPAESDFQLLEIARRLEMYGIRLHPAKDREGTKINLAVANTGILVFQGFTKINAFNWAKVRKLSFKRKRFLIKLRPDANFLGWPGARSRGRLHRETT

SEQ ID NO: 28265 - protein, 215 aa, Homo sapiens
  REGION 1..215: note = ENSP00000410930
HLAAHLWKHSEALEALENGIKSSRRLENFCRDFELQKVCYLPLNTFLLRPLHRLMHYKQVLERLCKHHPPSHADFRDCRAALAEITEMVAQLHGTMIKMENFQKLHELKKDLIGIDNLVVPGRVSSSGLTMHCAGSRKEASEGLTFEPFEERPLQSKMSSFHPPGRQLEKHNSVVSSESLCSEEIKQSSDLIFCFFSLRGDSLLYLFPYHIPQKI

SEQ ID NO: 28266 - protein, 248 aa, Homo sapiens
  REGION 1..248: note = ENSP00000469365
  VARIANT 1: note = Any amino acid
XEALENGIKSSRRLENFCRDFELQKVCYLPLNTFLLRPLHRLMHYKQVLERLCKHHPPSHADFRDCRAALAEITEMVAQLHGTMIKMENFQKLHELKKDLIGIDNLVVPGRFNDVLLYTSRGLTASNQFKVHGQLPLYGMTIEESEDEWGVPHCLTLRGQRQSIIVAASSRSEMEKWVEDIQMAIDLAEKSSSPAPEFLASSPPDNKSPDEATAADQESEDDLSASRTSLERQAPHRGNTMVHVCWHR

SEQ ID NO: 28267 - protein, 1076 aa, Homo sapiens; identical to SEQ ID NO: 28259
  REGION 1..1076: note = ENSP00000486285

SEQ ID NO: 28268 - protein, 4588 aa, Homo sapiens
  REGION 1..4588: note = ENSP00000406229
MGRHLALLLLLLLLFQHFGDSDGSQRLEQTPLQFTHLEYNVTVQENSAAKTYVGHPVKMGVYITHPAWEVRYKIVSGDSENLFKAEEYILGDFCFLRIRTKGGNTAILNREVKDHYTLIVKALEKNTNVEARTKVRVQVLDTNDLRPLFSPTSYSVSLPENTAIRTSIARVSATDADIGTNGEFYYSFKDRTDMFAIHPTSGVIVLTGRLDYLETKLYEMEILAADRGMKLYGSSGISSMAKLTVHIEQANECAPVITAVTLSPSELDRDPAYAIVTVDDCDQGANGDIASLSIVAGDLLQQFRTVRSFPGSKEYKVKAIGGIDWDSHPFGYNLTLQAKDKGTPPQFSSVKVIHVTSPQFKAGPVKFEKDVYRAEISEFAPPNTPVVMVKAIPAYSHLRYVFKSTPGKAKFSLNYNTGLISILEPVKRQQAAHFELEVTTSDRKASTKVLVKVLGANSNPPEFTQTAYKAAFDENVPIGTTVMSLSAVDPDEGENGYVTYSIANLNHVPFAIDHFTGAVSTSENLDYELMPRVYTLRIRASDWGLPYRREVEVLATITLNNLNDNTPLFEKINCEGTIPRDLGVGEQITTVSAIDADELQLVQYQIEAGNELDFFSLNPNSGVLSLKRSLMDGLGAKVSFHSLRITATDGENFATPLYINITVAASHKLVNLQCEETGVAKMLAEKLLQANKLHNQGEVEDIFFDSHSVNAHIPQFRSTLPTGIQVKENQPVGSSVIFMNSTDLDTGFNGKLVYAVSGGNEDSCFMIDMETGMLKILSPLDRETTDKYTLNITVYDLGIPQKAAWRLLHVVVVDANDNPPEFLQESYFVEVSEDKEVHSEIIQVEATDKDLGPNGHVTYSIVTDTDTFSIDSVTGVVNIARPLDRELQHEHSLKIEARDQAREEPQLFSTVVVKVSLEDVNDNPPTFIPPNYRVKVREDLPEGTVIMWLEAHDPDLGQSGQVRYSLLDHGEGNFDVDKLSGAVRIVQQLDFEKKQVYNLTVRAKDKGKPVSLSSTCYVEVEVVDVNENLHPPVFSSFVEKGTVKEDAPVGSLVMTVSAHDEDARRDGEIRYSIRDGSGVGVFKIGEETGVIETSDRLDRESTSHYWLTVFATDQGVVPLSSFIEIYIEVEDVNDNAPQTSEPVYYPEIMENSPKDVSVVQIEAFDPDSSSNDKLMYKITSGNPQGFFSIHPKTGLITTTSRKLDREQQDEHILEVTVTDNGSPPKSTIARVIVKILDENDNKPQFLQKFYKIRLPEREKPDRERNARREPLYHVIATDKDEGPNAEISYSIEDGNEHGKFFIEPKTGVVSSKRFSAAGEYDILSIKAVDNGRPQKSSTTRLHIEWISKPKPSLEPISFEESFFTFTVMESDPVAHMIGVISVEPPGIPLWFDITGGNYDSHFDVDKGTGTIIVAKPLDAEQKSNYNLTVEATDGTTTILTQVFIKVIDTNDHRPQFSTSKYEVVIPEDTAPETEILQISAVDQDEKNKLIYTLQSSRDPLSLKKFRLDPATGSLYTSEKLDHEAVHQHTLTVMVRDQDVPVKRNFARIVVNVSDTNDHAPWFTASSYKGRVYESAAVGSVVLQVTALDKDKGKNAEVLYSIESGNIGNSFMIDPVLGSIKTAKELDRSNQAEYDLMVKATDKGSPPMSEITSVRIFVTIADNASPKFTSKEYSVELSETVSIGSFVGMVTAHSQSSVVYEIKDGNTGDAFDINPHSGTIITQKALDFETLPIYTLIIQGTNMAGLSTNTTVLVHLQDENDNAPVFMQAEYTGLISESASINSVVLTDRNVPLVIRAADADKDSNALLVYHIVEPSVHTYFAIDSSTGAIHTVLSLDYEETSIFHFTVQVHDMGTPRLFAEYAANVTVHVIDINDCPPVFAKPLYEASLLLPTYKGVKVITVNATDADSSAFSQLIYSITEGNIGEKFSMDYKTGALTVQNTTQLRSRYELTVRASDGRFAGLTSVKINVKESKESHLKFTQDVYSAVVKENSTEAETLAVITAIGNPINEPLFYHILNPDRRFKISRTSGVLSTTGTPFDREQQEAFDVVVEVTEEHKPSAVAHVVVKVIVEDQNDNAPVFVNLPYYAVVKVDTEVGHVIRYVTAVDRDSGRNGEVHYYLKEHHEHFQIGPLGEISLKKQFELDTLNKEYLVTVVAKDGGNPAFSAEVIVPITVMNKAMPVFEKPFYSAEIAESIQVHSPVVHVQANSPEGLKVFYSITDGDPFSQFTINFNTGVINVIAPLDFEAHPAYKLSIRATDSLTGAHAEVFVDIIVDDINDNPPVFAQQSYAVTLSEASVIGTSVVQVRATDSDSEPNRGISYQMFGNHSKSHDHFHVDSSTGLISLLRTLDYEQSRQHTIFVRAVDGGMPTLSSDVIVTVDVTDLNDNPPLFEQQIYEARISEHAPHGHFVTCVKAYDADSSDIDKLQYSILSGNDHKHFVIDSATGIITLSNLHRHALKPFYSLNLSVSDGVFRSSTQVHVTVIGGNLHSPAFLQNEYEVELAENAPLHTLVMEVKTTDGDSGIYGHVTYHIVNDFAKDRFYINERGQIFTLEKLDRETPAEKVISVRLMAKDAGGKVAFCTVNVILTDDNDNAPQFRATKYEVNIGSSAAKGTSVVKVLASDADEGSNADITYAIEADSESVKENLEINKLSGVITTKESLIGLENEFFTFFVRAVDNGSPSKESVVLVYVKILPPEMQLPKFSEPFYTFTVSEDVPIGTEIDLIRAEHSGTVLYSLVKGNTPESNRDESFVIDRQSGRLKLEKSLDHETTKWYQFSILARCTQDDHEMVASVDVSIQVKDANDNSPVFESSPYEAFIVENLPGGSRVIQIRASDADSGTNGQVMYSLDQSQSVEVIESFAINMETGWITTLKELDHEKRDNYQIKVVASDHGEKIQLSSTAIVDVTVTDVNDSPPRFTAEIYKGTVSEDDPQGGVIAILSTTDADSEEINRQVTYFITGGDPLGQFAVETIQNEWKVYVKKPLDREKRDNYLLTITATDGTFSSKAIVEVKVLDANDNSPVCEKTLYSDTIPEDVLPGKLIMQISATDADIRSNAEITYTLLGSGAEKFKLNPDTGELKTSTPLDREEQAVYHLLVRATDGGGRFCQASIVLTLEDVNDNAPEFSADPYAITVFENTEPGTLLTRVQATDADAGLNRKILYSLIDSADGQFSINELSGIIQLEKPLDRELQAVYTLSLKAVDQGLPRRLTATGTVIVSVLDINDNPPVFEYREYGATVSEDILVGTEVLQVYAASRDIEANAEITYSIISGNEHGKFSIDSKTGAVFIIENLDYESSHEYYLTVEATDGGTPSLSDVATVNVNVTDINDNTPVFSQDTYTTVISEDAVLEQSVITVMADDADGPSNSHIHYSIIDGNQGSSFTIDPVRGEVKVTKLLDRETISGYTLTVQASDNGSPPRVNTTTVNIDVSDVNDNAPVFSRGNYSVIIQENKPVGFSVLQLVVTDEDSSHNGPPFFFTIVTGNDEKAFEVNPQGVLLTSSAIKRKEKDHYLLQVKVADNGKPQLSSLTYIDIRVIEESIYPPAILPLEIFITSSGEEYSGGVIGKIHATDQDVYDTLTYSLDPQMDNLFSVSSTGGKLIAHKKLDIGQYLLNVSVTDGKFTTVADITVHIRQVTQEMLNHTIAIRFANLTPEEFVGDYWRNFQRALRNILGVRRNDIQIVSLQSSEPHPHLDVLLFVEKPGSAQISTKQLLHKINSSVTDIEEIIGVRILNVFQKLCAGLDCPWKFCDEKVSVDESVMSTHSTARLSFVTPRHHRAAVCLCKEGRCPPVHHGCEDDPCPEGSECVSDPWEEKHTCVCPSGRFGQCPGSSSMTLTGNSYVKYRLTENENKLEMKLTMRLRTYSTHAVVMYARGTDYSILEIHHGRLQYKFDCGSGPGIVSVQSIQVNDGQWHAVALEVNGNYARLVLDQVHTASGTAPGTLKTLNLDNYVFFGGHIRQQGTRHGRSPQVGNGFRGCMDSIYLNGQELPLNSKPRSYAHIEESVDVSPGCFLTATEDCASNPCQNGGVCNPSPAGGYYCKCSALYIGTHCEISVNPCSSKPCLYGGTCVVDNGGFVCQCRGLYTGQRCQLSPYCKDEPCKNGGTCFDSLDGAVCQCDSGFRGERCQSDIDECSGNPCLHGALCENTHGSYHCNCSHEYRGRHCEDAAPNQYVSTPWNIGLAEGIGIVVFVAGIFLLVVVFVLCRKMISRKKKHQAEPKDKHLGPATAFLQRPYFDSKLNKNIYSDIPPQVPVRPISYTPSIPSDSRNNLDRNSFEGSAIPEHPEFSTFNPESVHGHRKAVAVCSVAPNLPPPPPSNSPSDSDSIQKPSWDFDYDTKVVDLDPCLSKKPLEEKPSQPYSARESLSEVQSLSSFQSESCDDNGYHWDTSDWMPSVPLPDIQEFPNYEVIDEQTPLYSADPNAIDTDYYPGGYDIESDFPPPPEDFPAADELPPLPPEFSNQFESIHPPRDMPAAGSLGSSSRNRQRFNLNQYLPNFYPLDMSEPQTKGTGENSTCREPHAPYPPGYQRHFEAPAVESMPMSVYASTASCSDVSACCEVESEVMMSDYESGDDGHFEEVTIPPLDSQQHTEV

SEQ ID NO: 28269 - protein, 368 aa, Homo sapiens
  REGION 1..368: note = ENSP00000424157
  VARIANT 1: note = Any amino acid
XDSKLNKNIYSDIPPQVPVRPISYTPSIPSDSRNNLDRNSFEGSAIPEHPEFSTFNPESVHGHRKAVAVCSVAPNLPPPPPSNSPSDSDSIQKPSWDFDYDTKVVDLDPCLSKKPLEEKPSQPYSARESLSEVQSLSSFQSESCDDNESLAAPDLSKPRGYHWDTSDWMPSVPLPDIQEFPNYEVIDEQTPLYSADPNAIDTDYYPGGYDIESDFPPPPEDFPAADELPPLPPEFSNQFESIHPPRDMPAAGSLGSSSRNRQRFNLNQYLPNFYPLDMSEPQTKGTGENSTCREPHAPYPPGYQRHFEAPAVESMPMSVYASTASCSDVSACCEVESEVMMSDYESGDDGHFEEVTIPPLDSQQHTEV

SEQ ID NO: 28270 - protein, 285 aa, Homo sapiens
  REGION 1..285: note = ENSP00000423801
  VARIANT 1: note = Any amino acid
XSTTEALFASVEDYILVRGVSLVHTAKMNPVRMAEHALTVWMAPFVSVIRVLGEKGVRVISTSALETLACTGPSVRTRTAPITATAATSTGDVTARMLRPTTKVVDLDPCLSKKPLEEKPSQPYSARESLSEVQSLSSFQSESCDDNGYHWDTSDWMPSVPLPDIQEFPNYEVIDEQTPLYSADPNAIDTDYYPGGYDIESDFPPPPEDFPAADELPPLPPEFSNQFESIHPPRDMPAAGSLGSSSRNRQRFNLNQYLPNFYPLDMSEPQTKGTGENSTCREPHA

SEQ ID NO: 28271 - protein, 52 aa, Homo sapiens
  REGION 1..52: note = ENSP00000421003
MTMAVIVRNKEKKVIFEFSGQISGSSFRSHFPPLPYSILFVVHTFLSHLELS

SEQ ID NO: 28272 - protein, 119 aa, Homo sapiens
  REGION 1..119: note = ENSP00000420869
LSKKPLEEKPSQPYSARESLSEVQSLSSFQSESCDDNASIVTVMHLVNAVVDTVSTEESLAAPDLSKPRGYHWDTSDWMPSVPLPDIQEFPNYEVIDEQTPLYSADPNAIDTDYYPGGY

SEQ ID NO: 28273 - protein, 488 aa, Homo sapiens
  REGION 1..488: note = ENSP00000423736
MGRHLALLLLLLLLFQHFGDSDGSQRLEQTPLQFTHLEYNVTVQENSAAKTYVGHPVKMGVYITHPAWEVRYKIVSGDSENLFKAEEYILGDFCFLRIRTKGGNTAILNREVKDHYTLIVKALEKNTNVEARTKVRVQVLDTNDLRPLFSPTSYSVSLPENTAIRTSIARVSATDADIGTNGEFYYSFKDRTDMFAIHPTSGVIVLTGRLDYLETKLYEMEILAADRGMKLYGSSGISSMAKLTVHIEQANECAPVITAVTLSPSELDRDPAYAIVTVDDCDQGANGDIASLSIVAGDLLQQFRTVRSFPGSKEYKVKAIGGIDWDSHPFGYNLTLQAKDKGTPPQFSSVKVIHVTSPQFKAGPVKFEKDVYRAEISEFAPPNTPVVMVKAIPAYSHLRYVFKSTPGKAKFSLNYNTGLISILEPVKRQQAAHFELEVTTSDRKASTKVLVKVLGANSNPPEFTQTAYKAAFDENVPIGTTVMSLSAV

SEQ ID NO: 28274 - protein, 4590 aa, Homo sapiens
  REGION 1..4590: note = ENSP00000479573
MGRHLALLLLLLLLFQHFGDSDGSQRLEQTPLQFTHLEYNVTVQENSAAKTYVGHPVKMGVYITHPAWEVRYKIVSGDSENLFKAEEYILGDFCFLRIRTKGGNTAILNREVKDHYTLIVKALEKNTNVEARTKVRVQVLDTNDLRPLFSPTSYSVSLPENTAIRTSIARVSATDADIGTNGEFYYSFKDRTDMFAIHPTSGVIVLTGRLDYLETKLYEMEILAADRGMKLYGSSGISSMAKLTVHIEQANECAPVITAVTLSPSELDRDPAYAIVTVDDCDQGANGDIASLSIVAGDLLQQFRTVRSFPGSKEYKVKAIGGIDWDSHPFGYNLTLQAKDKGTPPQFSSVKVIHVTSPQFKAGPVKFEKDVYRAEISEFAPPNTPVVMVKAIPAYSHLRYVFKSTPGKAKFSLNYNTGLISILEPVKRQQAAHFELEVTTSDRKASTKVLVKVLGANSNPPEFTQTAYKAAFDENVPIGTTVMSLSAVDPDEGENGYVTYSIANLNHVPFAIDHFTGAVSTSENLDYELMPRVYTLRIRASDWGLPYRREVEVLATITLNNLNDNTPLFEKINCEGTIPRDLGVGEQITTVSAIDADELQLVQYQIEAGNELDFFSLNPNSGVLSLKRSLMDGLGAKVSFHSLRITATDGENFATPLYINITVAASHKLVNLQCEETGVAKMLAEKLLQANKLHNQGEVEDIFFDSHSVNAHIPQFRSTLPTGIQVKENQPVGSSVIFMNSTDLDTGFNGKLVYAVSGGNEDSCFMIDMETGMLKILSPLDRETTDKYTLNITVYDLGIPQKAAWRLLHVVVVDANDNPPEFLQESYFVEVSEDKEVHSEIIQVEATDKDLGPNGHVTYSIVTDTDTFSIDSVTGVVNIARPLDRELQHEHSLKIEARDQAREEPQLFSTVVVKVSLEDVNDNPPTFIPPNYRVKVREDLPEGTVIMWLEAHDPDLGQSGQVRYSLLDHGEGNFDVDKLSGAVRIVQQLDFEKKQVYNLTVRAKDKGKPVSLSSTCYVEVEVVDVNENLHPPVFSSFVEKGTVKEDAPVGSLVMTVSAHDEDARRDGEIRYSIRDGSGVGVFKIGEETGVIETSDRLDRESTSHYWLTVFATDQGVVPLSSFIEIYIEVEDVNDNAPQTSEPVYYPEIMENSPKDVSVVQIEAFDPDSSSNDKLMYKITSGNPQGFFSIHPKTGLITTTSRKLDREQQDEHILEVTVTDNGSPPKSTIARVIVKILDENDNKPQFLQKFYKIRLPEREKPDRERNARREPLYHVIATDKDEGPNAEISYSIEDGNEHGKFFIEPKTGVVSSKRFSAAGEYDILSIKAVDNGRPQKSSTTRLHIEWISKPKPSLEPISFEESFFTFTVMESDPVAHMIGVISVEPPGIPLWFDITGGNYDSHFDVDKGTGTIIVAKPLDAEQKSNYNLTVEATDGTTTILTQVFIKVIDTNDHRPQFSTSKYEVVIPEDTAPETEILQISAVDQDEKNKLIYTLQSSRDPLSLKKFRLDPATGSLYTSEKLDHEAVPAHLTVMVRDQDVPVKRNFARIVVNVSDTNDHAPWFTASSYKGRVYESAAVGSVVLQVTALDKDKGKNAEVLYSIESGTFGNIGNSFMIDPVLGSIKTAKELDRSNQAEYDLMVKATDKGSPPMSEITSVRIFVTIADNASPKFTSKEYSVELSETVSIGSFVGMVTAHSQSSVVYEIKDGNTGDAFDINPHSGTIITQKALDFETLPIYTLIIQGTNMAGLSTNTTVLVHLQDENDNAPVFMQAEYTGLISESASINSVVLTDRNVPLVIRAADADKDSNALLVYHIVEPSVHTYFAIDSSTGAIHTVLSLDYEETSIFHFTVQVHDMGTPRLFAEYAANVTVHVIDINDCPPVFAKPLYEASLLLPTYKGVKVITVNATDADSSAFSQLIYSITEGNIGEKFSMDYKTGALTVQNTTQLRSRYELTVRASDGRFAGLTSVKINVKESKESHLKFTQDVYSAVVKENSTEAETLAVITAIGNPINEPLFYHILNPDRRFKISRTSGVLSTTGTPFDREQQEAFDVVVEVTEEHKPSAVAHVVVKVIVEDQNDNAPVFVNLPYYAVVKVDTEVGHVIRYVTAVDRDSGRNGEVHYYLKEHHEHFQIGPLGEISLKKQFELDTLNKEYLVTVVAKDGGNPAFSAEVIVPITVMNKAMPVFEKPFYSAEIAESIQVHSPVVHVQANSPEGLKVFYSITDGDPFSQFTINFNTGVINVIAPLDFEAHPAYKLSIRATDSLTGAHAEVFVDIIVDDINDNPPVFAQQSYAVTLSEASVIGTSVVQVRATDSDSEPNRGISYQMFGNHSKSHDHFHVDSSTGLISLLRTLDYEQSRQHTIFVRAVDGGMPTLSSDVIVTVDVTDLNDNPPLFEQQIYEARISEHAPHGHFVTCVKAYDADSSDIDKLQYSILSGNDHKHFVIDSATGIITLSNLHRHALKPFYSLNLSVSDGVFRSSTQVHVTVIGGNLHSPAFLQNEYEVELAENAPLHTLVMEVKTTDGDSGIYGHVTYHIVNDFAKDRFYINERGQIFTLEKLDRETPAEKVISVRLMAKDAGGKVAFCTVNVILTDDNDNAPQFRATKYEVNIGSSAAKGTSVVKVLASDADEGSNADITYAIEADSESVKENLEINKLSGVITTKESLIGLENEFFTFFVRAVDNGSPSKESVVLVYVKILPPEMQLPKFSEPFYTFTVSEDVPIGTEIDLIRAEHSGTVLYSLVKGNTPESNRDESFVIDRQSGRLKLEKSLDHETTKWYQFSILARCTQDDHEMVASVDVSIQVKDANDNSPVFESSPYEAFIVENLPGGSRVIQIRASDADSGTNGQVMYSLDQSQSVEVIESFAINMETGWITTLKELDHEKRDNYQIKVVASDHGEKIQLSSTAIVDVTVTDVNDSPPRFTAEIYKGTVSEDDPQGGVIAILSTTDADSEEINRQVTYFITGGDPLGQFAVETIQNEWKVYVKKPLDREKRDNYLLTITATDGTFSSKAIVEVKVLDANDNSPVCEKTLYSDTIPEDVLPGKLIMQISATDADIRSNAEITYTLLGSGAEKFKLNPDTGELKTSTPLDREEQAVYHLLVRATDGGGRFCQASIVLTLEDVNDNAPEFSADPYAITVFENTEPGTLLTRVQATDADAGLNRKILYSLIDSADGQFSINELSGIIQLEKPLDRELQAVYTLSLKAVDQGLPRRLTATGTVIVSVLDINDNPPVFEYREYGATVSEDILVGTEVLQVYAASRDIEANAEITYSIISGNEHGKFSIDSKTGAVFIIENLDYESSHEYYLTVEATDGGTPSLSDVATVNVNVTDINDNTPVFSQDTYTTVISEDAVLEQSVITVMADDADGPSNSHIHYSIIDGNQGSSFTIDPVRGEVKVTKLLDRETISGYTLTVQASDNGSPPRVNTTTVNIDVSDVNDNAPVFSRGNYSVIIQENKPVGFSVLQLVVTDEDSSHNGPPFFFTIVTGNDEKAFEVNPQGVLLTSSAIKRKEKDHYLLQVKVADNGKPQLSSLTYIDIRVIEESIYPPAILPLEIFITSSGEEYSGGVIGKIHATDQDVYDTLTYSLDPQMDNLFSVSSTGGKLIAHKKLDIGQYLLNVSVTDGKFTTVADITVHIRQVTQEMLNHTIAIRFANLTPEEFVGDYWRNFQRALRNILGVRRNDIQIVSLQSSEPHPHLDVLLFVEKPGSAQISTKQLLHKINSSVTDIEEIIGVRILNVFQKLCAGLDCPWKFCDEKVSVDESVMSTHSTARLSFVTPRHHRAAVCLCKEGRCPPVHHGCEDDPCPEGSECVSDPWEEKHTCVCPSGRFGQCPGSSSMTLTGNSYVKYRLTENENKLEMKLTMRLRTYSTHAVVMYARGTDYSILEIHHGRLQYKFDCGSGPGIVSVQSIQVNDGQWHAVALEVNGNYARLVLDQVHTASGTAPGTLKTLNLDNYVFFGGHIRQQGTRHGRSPQVGNGFRGCMDSIYLNGQELPLNSKPRSYAHIEESVDVSPGCFLTATEDCASNPCQNGGVCNPSPAGGYYCKCSALYIGTHCEISVNPCSSKPCLYGGTCVVDNGGFVCQCRGLYTGQRCQLSPYCKDEPCKNGGTCFDSLDGAVCQCDSGFRGERCQSDIDECSGNPCLHGALCENTHGSYHCNCSHEYRGRHCEDAAPNQYVSTPWNIGLAEGIGIVVFVAGIFLLVVVFVLCRKMISRKKKHQAEPKDKHLGPATAFLQRPYFDSKLNKNIYSDIPPQVPVRPISYTPSIPSDSRNNLDRNSFEGSAIPEHPEFSTFNPESVHGHRKAVAVCSVAPNLPPPPPSNSPSDSDSIQKPSWDFDYDTKVVDLDPCLSKKPLEEKPSQPYSARESLSEVQSLSSFQSESCDDNGYHWDTSDWMPSVPLPDIQEFPNYEVIDEQTPLYSADPNAIDTDYYPGGYDIESDFPPPPEDFPAADELPPLPPEFSNQFESIHPPRDMPAAGSLGSSSRNRQRFNLNQYLPNFYPLDMSEPQTKGTGENSTCREPHAPYPPGYQRHFEAPAVESMPMSVYASTASCSDVSACCEVESEVMMSDYESGDDGHFEEVTIPPLDSQQHTEV

SEQ ID NO: 28275 - protein, 1122 aa, Homo sapiens
  REGION 1..1122: note = ENSP00000429678
  VARIANT 1: note = Any amino acid
XGANAQVVYSLPDSAEGHFSIDATTGVIRLEKPLQVRPQAPLELTVRASDLGTPIPLSTLGTVTVSVVGLEDYLPVFLNTEHSVQVPEDAPPGTEVLQLATLTRPGAEKTGYRVVSGNEQGRFRLDARTGILYVNASLDFETSPKYFLSIECSRKSSSSLSDVTTVMVNITDVNEHRPQFPQDPYSTRVLENALVGDVILTVSATDEDGPLNSDITYSLIGGNQLGHFTIHPKKGELQVAKALDREQASSYSLKLRATDSGQPPLHEDTDIAIQVADVNDNPPRFFQLNYSTTVQENSPIGSKVLQLILSDPDSPENGPPYSFRITKGNNGSAFRVTPDGWLVTAEGLSRRAQEWYQLQIQASDSGIPPLSSLTSVRVHVTEQSHYAPSALPLEIFITVGEDEFQGGMVGKIHATDRDPQDTLTYSLAEEETLGRHFSVGAPDGKIIAAQGLPRGHYSFNVTVSDGTFTTTAGVHVYVWHVGQEALQQAMWMGFYQLTPEELVSDHWRNLQRFLSHKLDIKRANIHLASLQPAEAVAGVDVLLVFEGHSGTFYEFQELASIITHSAKEMEHSVGVQMRSAMPMVPCQGPTCQGQICHNTVHLDPKVGPTYSTARLSILTPRHHLQRSCSCNGTATRFSGQSYVRYRAPAARNWHIHFYLKTLQPQAILLFTNETASVSLKGFEGCLDAVVVNEEALDLLAPGKTVAGLLETQALTQCCLHSDYCSQNTCLNGGKCSWTHGAGYVCKCPPQFSGKHCEQGRENCTFAPCLEGGTCILSPKGASCNCPHPYTGDRCEMEARGCSEGHCLVTPEIQRGDWGQQELLIITVAVAFIIISTVGLLFYCRRCKSHKPVAMEDPDLLARSVGVDTQAMPAIELNPLSASSCNNLNQPEPSKASVPNELVTFGPNSKQRPVVCSVPPRLPPAAVPSHSDNEPVIKRTWSSEEMVYPGGAMVWPPTYSRNERWEYPHSEVTQGPLPPSAHRHSTPVVMPEPNGLYGGFPFPLEMENKRAPLPPRYSNQNLEDLMPSRPPSPRERLVAPCLNEYTAISYYHSQFRQGGGGPCLADGGYKGVGMRLSRAGPSYAVCEVEGAPLAGQGQPRVPPNYEGSDMVESDYGSCEEVMF

SEQ ID NO: 28276 - protein, 4349 aa, Homo sapiens
  REGION 1..4349: note = ENSP00000261800
MTIALLGFAIFLLHCATCEKPLEGILSSSAWHFTHSHYNATIYENSSPKTYVESFEKMGIYLAEPQWAVRYRIISGDVANVFKTEEYVVGNFCFLRIRTKSSNTALLNREVRDSYTLIIQATEKTLELEALTRVVVHILDQNDLKPLFSPPSYRVTISEDMPLKSPICKVTATDADLGQNAEFYYAFNTRSEMFAIHPTSGVVTVAGKLNVTWRGKHELQVLAVDRMRKISEGNGFGSLAALVVHVEPALRKPPAIASVVVTPPDSNDGTTYATVLVDANSSGAEVESVEVVGGDPGKHFKAIKSYARSNEFSLVSVKDINWMEYLHGFNLSLQARSGSGPYFYSQIRGFHLPPSKLSSLKFEKAVYRVQLSEFSPPGSRVVMVRVTPAFPNLQYVLKPSSENVGFKLNARTGLITTTKLMDFHDRAHYQLHIRTSPGQASTVVVIDIVDCNNHAPLFNRSSYDGTLDENIPPGTSVLAVTATDRDHGENGYVTYSIAGPKALPFSIDPYLGIISTSKPMDYELMKRIYTFRVRASDWGSPFRREKEVSIFLQLRNLNDNQPMFEEVNCTGSIRQDWPVGKSIMTMSAIDVDELQNLKYEIVSGNELEYFDLNHFSGVISLKRPFINLTAGQPTSYSLKITASDGKNYASPTTLNITVVKDPHFEVPVTCDKTGVLTQFTKTILHFIGLQNQESSDEEFTSLSTYQINHYTPQFEDHFPQSIDVLESVPINTPLARLAATDPDAGFNGKLVYVIADGNEEGCFDIELETGLLTVAAPLDYEATNFYILNVTVYDLGTPQKSSWKLLTVNVKDWNDNAPRFPPGGYQLTISEDTEVGTTIAELTTKDADSEDNGRVRYTLLSPTEKFSLHPLTGELVVTGHLDRESEPRYILKVEARDQPSKGHQLFSVTDLIITLEDVNDNSPQCITEHNRLKVPEDLPPGTVLTFLDASDPDLGPAGEVRYVLMDGAHGTFRVDLMTGALILERELDFERRAGYNLSLWASDGGRPLARRTLCHVEVIVLDVNENLHPPHFASFVHQGQVQENSPSGTQVIVVAAQDDDSGLDGELQYFLRAGTGLAAFSINQDTGMIQTLAPLDREFASYYWLTVLAVDRGSVPLSSVTEVYIEVTDANDNPPQMSQAVFYPSIQEDAPVGTSVLQLDAWDPDSSSKGKLTFNITSGNYMGFFMIHPVTGLLSTAQQLDRENKDEHILEVTVLDNGEPSLKSTSRVVVGILDVNDNPPIFSHKLFNVRLPERLSPVSPGPVYRLVASDLDEGLNGRVTYSIEDSDEEAFSIDLVTGVVSSSSTFTAGEYNILTIKATDSGQPPLSASVRLHIEWIPWPRPSSIPLAFDETYYSFTVMETDPVNHMVGVISVEGRPGLFWFNISGGDKDMDFDIEKTTGSIVIARPLDTRRRSNYNLTVEVTDGSRTIATQVHIFMIANINHHRPQFLETRYEVRVPQDTVPGVELLRVQAIDQDKGKSLIYTIHGSQDPGSASLFQLDPSSGVLVTVGKLDLGSGPSQHTLTVMVRDQEIPIKRNFVWVTIHVEDGNLHPPRFTQLHYEASVPDTIAPGTELLQVRAMDADRGVNAEVHYSLLKGNSEGFFNINALLGIITLAQKLDQANHAPHTLTVKAEDQGSPQWHDLATVIIHVYPSDRSAPIFSKSEYFVEIPESIPVGSPILLVSAMSPSEVTYELREGNKDGVFSMNSYSGLISTQKKLDHEKISSYQLKIRGSNMAGAFTDVMVVVDIIDENDNAPMFLKSTFVGQISEAAPLYSMIMDKNNNPFVIHASDSDKEANSLLVYKILEPEALKFFKIDPSMGTLTIVSEMDYESMPSFQFCVYVHDQGSPVLFAPRPAQVIIHVRDVNDSPPRFSEQIYEVAIVGPIHPGMELLMVRASDEDSEVNYSIKTGNADEAVTIHPVTGSISVLNPAFLGLSRKLTIRASDGLYQDTALVKISLTQVLDKSLQFDQDVYWAAVKENLQDRKALVILGAQGNHLNDTLSYFLLNGTDMFHMVQSAGVLQTRGVAFDREQQDTHELAVEVRDNRTPQRVAQGLVRVSIEDVNDNPPKFKHLPYYTIIQDGTEPGDVLFQVSATDEDLGTNGAVTYEFAEDYTYFRIDPYLGDISLKKPFDYQALNKYHLKVIARDGGTPSLQSEEEVLVTVRNKSNPLFQSPYYKVRVPENITLYTPILHTQARSPEGLRLIYNIVEEEPLMLFTTDFKTGVLTVTGPLDYESKTKHVFTVRATDTALGSFSEATVEVLVEDVNDNPPTFSQLVYTTSISEGLPAQTPVIQLLASDQDSGRNRDVSYQIVEDGSDVSKFFQINGSTGEMSTVQELDYEAQQHFHVKVRAMDKGDPPLTGETLVVVNVSDINDNPPEFRQPQYEANVSELATCGHLVLKVQAIDPDSRDTSRLEYLILSGNQDRHFFINSSSGIISMFNLCKKHLDSSYNLRVGASDGVFRATVPVYINTTNANKYSPEFQQHLYEAELAENAMVGTKVIDLLAIDKDSGPYGTIDYTIINKLASEKFSINPNGQIATLQKLDRENSTERVIAIKVMARDGGGRVAFCTVKIILTDENDNPPQFKASEYTVSIQSNVSKDSPVIQVLAYDADEGQNADVTYSVNPEDLVKDVIEINPVTGVVKVKDSLVGLENQTLDFFIKAQDGGPPHWNSLVPVRLQVVPKKVSLPKFSEPLYTFSAPEDLPEGSEIGIVKAVAAQDPVIYSLVRGTTPESNKDGVFSLDPDTGVIKVRKPMDHESTKLYQIDVMAHCLQNTDVVSLVSVNIQVGDVNDNRPVFEADPYKAVLTENMPVGTSVIQVTAIDKDTGRDGQVSYRLSADPGSNVHELFAIDSESGWITTLQELDCETCQTYHFHVVAYDHGQTIQLSSQALVQVSITDENDNAPRFASEEYRGSVVENSEPGELVATLKTLDADISEQNRQVTCYITEGDPLGQFGISQVGDEWRISSRKTLDREHTAKYLLRVTASDGKFQASVTVEIFVLDVNDNSPQCSQLLYTGKVHEDVFPGHFILKVSATDLDTDTNAQITYSLHGPGAHEFKLDPHTGELTTLTALDRERKDVFNLVAKATDGGGRSCQADITLHVEDVNDNAPRFFPSHCAVAVFDNTTVKTPVAVVFARDPDQGANAQVVYSLPDSAEGHFSIDATTGVIRLEKPLQVRPQAPLELTVRASDLGTPIPLSTLGTVTVSVVGLEDYLPVFLNTEHSVQVPEDAPPGTEVLQLATLTRPGAEKTGYRVVSGNEQGRFRLDARTGILYVNASLDFETSPKYFLSIECSRKSSSSLSDVTTVMVNITDVNEHRPQFPQDPYSTRVLENALVGDVILTVSATDEDGPLNSDITYSLIGGNQLGHFTIHPKKGELQVAKALDREQASSYSLKLRATDSGQPPLHEDTDIAIQVADVNDNPPRFFQLNYSTTVQENSPIGSKVLQLILSDPDSPENGPPYSFRITKGNNGSAFRVTPDGWLVTAEGLSRRAQEWYQLQIQASDSGIPPLSSLTSVRVHVTEQSHYAPSALPLEIFITVGEDEFQGGMVGKIHATDRDPQDTLTYSLAEEETLGRHFSVGAPDGKIIAAQGLPRGHYSFNVTVSDGTFTTTAGVHVYVWHVGQEALQQAMWMGFYQLTPEELVSDHWRNLQRFLSHKLDIKRANIHLASLQPAEAVAGVDVLLVFEGHSGTFYEFQELASIITHSAKEMEHSVGVQMRSAMPMVPCQGPTCQGQICHNTVHLDPKVGPTYSTARLSILTPRHHLQRSCSCNGTATRFSGQSYVRYRAPAARNWHIHFYLKTLQPQAILLFTNETASVSLKLASGVPQLEYHCLGGFYGNLSSQRHVNDHEWHSILVEEMDASIRLMVDSMGNTSLVVPENCRGLRPERHLLLGGLILLHSSSNVSQGFEGCLDAVVVNEEALDLLAPGKTVAGLLETQALTQCCLHSDYCSQNTCLNGGKCSWTHGAGYVCKCPPQFSGKHCEQGRENCTFAPCLEGGTCILSPKGASCNCPHPYTGDRCEMEARGCSEGHCLVTPEIQRGDWGQQELLIITVAVAFIIISTVGLLFYCRRCKSHKPVAMEDPDLLARSVGVDTQAMPAIELNPLSASSCNNLNQPEPSKASVPNELVTFGPNSKQRPVVCSVPPRLPPAAVPSHSDNEPVIKRTWSSEEMVYPGGAMVWPPTYSRNERWEYPHSEVTQGPLPPSAHRHSTPVVMPEPNGLYGGFPFPLEMENKRAPLPPRYSNQNLEDLMPSRPPSPRERLVAPCLNEYTAISYYHSQFRQGGGGPCLADGGYKGVGMRLSRAGPSYAVCEVEGAPLAGQGQPRVPPNYEGSDMVESDYGSCEEVMF

SEQ ID NO: 28277 - protein, 4439 aa, Homo sapiens
  REGION 1..4439: note = ENSP00000432586
MNDLRPLFSPTTYSVTIAESTPLRTSVAQVTATDADIGSNGEFYYYFKNKVDLFSVHPTSGVISLSGRLNYDEKNRYDLEILAVDRGMKLYGNNGVSSTAKLYVHIERINEHAPTIHVVTHVPFSLEKEPTYAVVTVDDLDDGANGEIESVSIVAGDPLDQFFLAKEGKWLNEYKIKERKQIDWESFPYGYNLTLQAKDKGSPQKCSALKAVYIGNPTRDTVPIRFEKEVYDVSISEFSPPGVVVAIVKLSPEPIDVEYKLSPGEDAVYFKINPRSGLIVTARPLNTVKKEVYKLEVTNKEGDLKAQVTISIEDANDHTPEFQQPLYDAYVNESVPVGTSVLTVSASDKDKGENGYITYSIASLNLLPFVINQFTGVISTTEELDFESSPEIYRFIVRASDWGSPYRHESEVNVTIRIGNVNDNSPLFEKVACQGVISYDFPVGGHITAVSAIDIDELELVKYKIISGNELGFFYLNPDSGVLQLKKSLTNSGIKNGNFALRITATDGENLADPMSINISVLHGKVSSKSFSCRETRVAQKLAEKLLIKAKANGKLNLEDGFLDFYSINRQGPYFDKSFPSDVAVKEDLPVGANILKIKAYDADSGFNGKVLFTISDGNTDSCFNIDMETGQLKVLMPMDREHTDLYLLNITIYDLGNPQKSSWRLLTINVEDANDNSPVFIQDSYSVNILESSGIGTEIIQVEARDKDLGSNGEVTYSVLTDTQQFAINSSTGIVYVADQLDRESKANYSLKIEARDKAESGQQLFSVVTLKVFLDDVNDCSPAFIPSSYSVKVLEDLPVGTVIAWLETHDPDLGLGGQVRYSLVNDYNGRFEIDKASGAIRLSKELDYEKQQFYNLTVRAKDKGRPVSLSSVSFVEVEVVDVNENLHTPYFPDFAVVGSVKENSRIGTSVLQVTARDEDSGRDGEIQYSIRDGSGLGRFSIDDESGVITAADILDRETMGSYWLTVYATDRGVVPLYSTIEVYIEVEDVNDNAPLTSEPIYYPVVMENSPKDVSVIQIQAEDPDSSSNEKLTYRITSGNPQNFFAINIKTGLITTTSRKLDREQQAEHFLEVTVTDGGPSPKQSTIWVVVQVLDENDNKPQFPEKVYQIKLPERDRKKRGEPIYRAFAFDRDEGPNAEISYSIVDGNDDGKFFIDPKTGMVSSRKQFTAGSYDILTIKAVDNGRPQKSSTARLHIEWIKKPPPSPIPLTFDEPFYNFTVMESDRVTEIVGVVSVQPANTPLWFDIVGGNFDSAFDAEKGVGTIVIAKPLDAEQRSIYNMSVEVTDGTNVAVTQVFIKVLDNNDNGPEFSQPNYDVTISEDVLPDTEILQIEATDRDEKHKLSYTVHSSIDSISMRKFRIDPSTGVLYTAERLDHEAQDKHILNIMVRDQEFPYRRNLARVIVNVEDANDHSPYFTNPLYEASVFESAALGSAVLQVTALDKDKGENAELIYTIEAGNTGNMFKIEPVLGIITICKEPDMTTMGQFVLSIKVTDQGSPPMSATAIVRISVTMSDNSHPKFIHKDYQAEVNENVDIGTSVILISAISQSTLIYEVKDGDINGIFTINPYSGVITTQKALDYERTSSYQLIIQATNMAGMASNATVNIQIVDENDNAPVFLFSQYSGSLSEAAPINSIVRSLDNSPLVIRATDADSNRNALLVYQIVESTAKKFFTVDSSTGAIRTIANLDHETIAHFHFHVHVRDSGSPQLTAESPVEVNIEVTDVNDNPPVFTQAVFETILLLPTYVGVEVLKVSATDPDSEVPPELTYSLMEGSLDHFLIDSNSGVLTIKNNNLSKDHYMLIVKVSDGKFYSTSMVTIMVKEAMDSGLHFTQSFYSTSISENNTNITKVAIVNAVGNRLNEPLKYSILNPGNKFKIKSTSGVIQTTGVPFDREEQELYELVVEASRELDHLRVARVVVRVNIEDINDNSPVFVGLPYYAAVQVDAEPGTLIYQVTAIDKDKGPNGEVTYVLQDDYGHFEINPNSGNVILKEAFNSDLSNIEYGVTILAKDGGKPSLSTSVELPITIVNKAMPVFDKPFYTASVNEDIRMNTPILSINATSPEGQGIIYIIIDGDPFKQFNIDFDTGVLKVVSPLDYEVTSAYKLTIRASDALTGARAEVTVDLLVNDVNDNPPIFDQPTYNTTLSEASLIGTPVLQVVSIDADSENNKMVHYQIVQDTYNSTDYFHIDSSSGLILTARMLDHELVQHCTLKVRSIDSGFPSLSSEVLVHIYISDVNDNPPVFNQLIYESYVSELAPRGHFVTCVQASDADSSDFDRLEYSILSGNDRTSFLMDSKSGVITLSNHRKQRMEPLYSLNVSVSDGLFTSTAQVHIRVLGANLYSPAFSQSTYVAEVRENVAAGTKVIHVRATDGDPGTYGQISYAIINDFAKDRFLIDSNGQVITTERLDRENPLEGDVSIFVRALDGGGRTTFCTVRVIVVDENDNAPQFMTVEYRASVRADVGRGHLVTQVQAIDPDDGANSRITYSLYSEASVSVADLLEIDPDNGWMVTKGNFNQLKNTVLSFFVKAVDGGIPVKHSLIPVYIHVLPPETFLPSFTQSQYSFTIAEDTAIGSTVDTLRILPSQNVWFSTVNGERPENNKGGIFVIEQETGTIKLDKRLDRETSPAFHFKVAATIPLDKVDIVFTVDVDIKVLDLNDNKPVFETSSYDTIIMEGMPVGTKLTQVRAIDMDWGANGQVTYSLHSDSQPEKVMEAFNIDSNTGWISTLKDLDHETDPTFTFSVVASDLGEAFSLSSTALVSVRVTDINDNAPVFAQEVYRGNVKESDPPGEVVAVLSTWDRDTSDVNRQVSYHITGGNPRGRFALGLVQSEWKVYVKRPLDREEQDIYFLNITATDGLFVTQAMVEVSVSDVNDNSPVCDQVAYTALLPEDIPSNKIILKVSAKDADIGSNGYIRYSLYGSGNSEFFLDPESGELKTLALLDRERIPVYSLMAKATDGGGRFCQSNIHLILEDVNDNPPVFSSDHYNTCVYENTATKALLTRVQAVDPDIGINRKVVYSLADSAGGVFSIDSSSGIIILEQPLDREQQSSYNISVRATDQSPGQSLSSLTTVTITVLDINDNPPVFERRDYLVTVPEDTSPGTQVLAVFATSKDIGTNAEITYLIRSGNEQGKFKINPKTGGISVSEVLDYELCKRFYLVVEAKDGGTPALSAVATVNINLTDVNDNPPKFSQDVYSAVISEDALVGDSVILLIAEDVDSQPNGQIHFSIVNGDRDNEFTVDPVLGLVKVKKKLDRERVSGYSLLVQAVDSGIPAMSSTATVNIDISDVNDNSPVFTPANYTAVIQENKPVGTSILQLVVTDRDSFHNGPPFSFSILSGNEEEEFVLDPHGILRSAVVFQHTESLEYVLCVQAKDSGKPQQVSHTYIRVRVIEESTHKPTAIPLEIFIVTMEDDFPGGVIGKIHATDQDMYDVLTFALKSEQKSLFKVNSHDGKIIALGGLDSGKYVLNVSVSDGRFQVPIDVVVHVEQLVHEMLQNTVTIRFENVSPEDFVGLHMHGFRRTLRNAVLTQKQDSLRIISIQPVAGTNQLDMLFAVEMHSSEFYKPAYLIQKLSNARRHLENIMRISAILEKNCSGLDCQEQHCEQGLSLDSHALMTYSTARISFVCPRFYRNVRCTCNGGLCPGSNDPCVEKPCPGDMQCVSYEASRRPFLCQCPPGKLGECSGHTSLSFAGNSYIKYRLSENSKEEDFKLALRLRTLQSNGIIMYTRANPCIILKIVDGKLWFQLDCGSGPGILGISGRAVNDGSWHSVFLELNRNFTSLSLDDSYVERRRAPLYFQTLSTESSIYFGALVQADNIRSLTDTRVTQVLSGFQGCLDSVILNNNELPLQNKRSSFAEVVGLTELKLGCVLYPDACKRSPCQHGGSCTGLPSGGYQCTCLSQFTGRNCESEITACFPNPCRNGGSCDPIGNTFICNCKAGLTGVTCEEDINECEREECENGGSCVNVFGSFLCNCTPGYVGQYCGLRPVVVPNIQAGHSYVGKEELIGIAVVLFVIFILVVLFIVFRKKVFRKNYSRNNITLVQDPATAALLNKSNGIPFRNLRGSGDGRNVYQEVGPPQVPVRPMAYTPCFQSDSRSNLDKIVDGLGGEHQEMTTFHPESPRILTARRGVVVCSVAPNLPAVSPCRSDCDSIRKNGWDAGTENKGVDDPGEVTCFAGSNKGSNSEVQSLSSFQSDSGDDNASIVTVIQLVNNVVDTIENEVSVMDQGQNYNRAYHWDTSDWMPGARLSDIEEVPNYENQDGGSAHQGSTRELESDYYLGGYDIDSEYPPPHEEEFLSQDQLPPPLPEDFPDQYEALPPSQPVSLASTLSPDCRRRPQFHPSQYLPPHPFPNETDLVGPPASCEFSTFAVSMNQGTEPTGPADSVSLSLHNSRGTSSSDVSANCGFDDSEVAMSDYESVGELSLASLHIPFVETQHQTQV

SEQ ID NO: 28278 - protein, 892 aa, Homo sapiens
  REGION 1..892: note = ENSP00000436399
MHGFRRTLRNAVLTQKQDSLRIISIQPVAGTNQLDMLFAVEMHSSEFYKPAYLIQKLSNARRHLENIMRISAILEKNCSGLDCQEQHCEQGLSLDSHALMTYSTARISFVCPRFYRNVRCTCNGGLCPGSNDPCVEKPCPGDMQCVSYEASRRPFLCQCPPGKLGECSGHTSLSFAGNSYIKYRLSENSKEEDFKLALRLRTLQSNGIIMYTRANPCIILKIVDGKLWFQLDCGSGPGILGISGRAVNDGSWHSVFLELNRNFTSLSLDDSYVERRRAPLYFQTLSTESSIYFGALVQADNIRSLTDTRVTQVLSGFQGCLDSVILNNNELPLQNKRSSFAEVVGLTELKLGCVLYPDACKRSPCQHGGSCTGLPSGGYQCTCLSQFTGRNCESEITACFPNPCRNGGSCDPIGNTFICNCKAGLTGVTCEEDINECEREECENGGSCVNVFGSFLCNCTPGYVGQYCGLRPVVVPNIQAGHSYVGKEELIGIAVVLFVIFILVVLFIVFRKKVFRKNYSRNNITLVQDPATAALLNKSNGIPFRNLRGSGDGRNVYQEVGPPQVPVRPMAYTPCFQSDSRSNLDKIVDGLGGEHQEMTTFHPESPRILTARRGVVVCSVAPNLPAVSPCRSDCDSIRKNGWDAGTENKGVDDPGEVTCFAGSNKGSNSEVQSLSSFQSDSGDDNAYHWDTSDWMPGARLSDIEEVPNYENQDGGSAHQGSTRELESDYYLGGYDIDSEYPPPHEEEFLSQDQLPPPLPEDFPDQYEALPPSQPVSLASTLSPDCRRRPQFHPSQYLPPHPFPNETDLVGPPASCEFSTFAVSMNQGTEPTGPADSVSLSLHNSRGTSSSDVSANCGFDDSEVAMSDYESVGELSLASLHIPFVETQHQTQV

SEQ ID NO: 28279 - protein, 4557 aa, Homo sapiens
  REGION 1..4557: note = ENSP00000387040
MDIIMGHCVGTRPPACCLILLLFKLLATVSQGLPGTGPLGFHFTHSIYNATVYENSAARTYVNSQSRMGITLIDLSWDIKYRIVSGDEEGFFKAEEVIIADFCFLRIRTKGGNSAILNREIQDNYLLIVKGSVRGEDLEAWTKVNIQVLDMNDLRPLFSPTTYSVTIAESTPLRTSVAQVTATDADIGSNGEFYYYFKNKVDLFSVHPTSGVISLSGRLNYDEKNRYDLEILAVDRGMKLYGNNGVSSTAKLYVHIERINEHAPTIHVVTHVPFSLEKEPTYAVVTVDDLDDGANGEIESVSIVAGDPLDQFFLAKEGKWLNEYKIKERKQIDWESFPYGYNLTLQAKDKGSPQKCSALKAVYIGNPTRDTVPIRFEKEVYDVSISEFSPPGVVVAIVKLSPEPIDVEYKLSPGEDAVYFKINPRSGLIVTARPLNTVKKEVYKLEVTNKEGDLKAQVTISIEDANDHTPEFQQPLYDAYVNESVPVGTSVLTVSASDKDKGENGYITYSIASLNLLPFVINQFTGVISTTEELDFESSPEIYRFIVRASDWGSPYRHESEVNVTIRIGNVNDNSPLFEKVACQGVISYDFPVGGHITAVSAIDIDELELVKYKIISGNELGFFYLNPDSGVLQLKKSLTNSGIKNGNFALRITATDGENLADPMSINISVLHGKVSSKSFSCRETRVAQKLAEKLLIKAKANGKLNLEDGFLDFYSINRQGPYFDKSFPSDVAVKEDLPVGANILKIKAYDADSGFNGKVLFTISDGNTDSCFNIDMETGQLKVLMPMDREHTDLYLLNITIYDLGNPQKSSWRLLTINVEDANDNSPVFIQDSYSVNILESSGIGTEIIQVEARDKDLGSNGEVTYSVLTDTQQFAINSSTGIVYVADQLDRESKANYSLKIEARDKAESGQQLFSVVTLKVFLDDVNDCSPAFIPSSYSVKVLEDLPVGTVIAWLETHDPDLGLGGQVRYSLVNDYNGRFEIDKASGAIRLSKELDYEKQQFYNLTVRAKDKGRPVSLSSVSFVEVEVVDVNENLHTPYFPDFAVVGSVKENSRIGTSVLQVTARDEDSGRDGEIQYSIRDGSGLGRFSIDDESGVITAADILDRETMGSYWLTVYATDRGVVPLYSTIEVYIEVEDVNDNAPLTSEPIYYPVVMENSPKDVSVIQIQAEDPDSSSNEKLTYRITSGNPQNFFAINIKTGLITTTSRKLDREQQAEHFLEVTVTDGGPSPKQSTIWVVVQVLDENDNKPQFPEKVYQIKLPERDRKKRGEPIYRAFAFDRDEGPNAEISYSIVDGNDDGKFFIDPKTGMVSSRKQFTAGSYDILTIKAVDNGRPQKSSTARLHIEWIKKPPPSPIPLTFDEPFYNFTVMESDRVTEIVGVVSVQPANTPLWFDIVGGNFDSAFDAEKGVGTIVIAKPLDAEQRSIYNMSVEVTDGTNVAVTQVFIKVLDNNDNGPEFSQPNYDVTISEDVLPDTEILQIEATDRDEKHKLSYTVHSSIDSISMRKFRIDPSTGVLYTAERLDHEAQDKHILNIMVRDQEFPYRRNLARVIVNVEDANDHSPYFTNPLYEASVFESAALGSAVLQVTALDKDKGENAELIYTIEAGNTGNMFKIEPVLGIITICKEPDMTTMGQFVLSIKVTDQGSPPMSATAIVRISVTMSDNSHPKFIHKDYQAEVNENVDIGTSVILISAISQSTLIYEVKDGDINGIFTINPYSGVITTQKALDYERTSSYQLIIQATNMAGMASNATVNIQIVDENDNAPVFLFSQYSGSLSEAAPINSIVRSLDNSPLVIRATDADSNRNALLVYQIVESTAKKFFTVDSSTGAIRTIANLDHETIAHFHFHVHVRDSGSPQLTAESPVEVNIEVTDVNDNPPVFTQAVFETILLLPTYVGVEVLKVSATDPDSEVPPELTYSLMEGSLDHFLIDSNSGVLTIKNNNLSKDHYMLIVKVSDGKFYSTSMVTIMVKEAMDSGLHFTQSFYSTSISENNTNITKVAIVNAVGNRLNEPLKYSILNPGNKFKIKSTSGVIQTTGVPFDREEQELYELVVEASRELDHLRVARVVVRVNIEDINDNSPVFVGLPYYAAVQVDAEPGTLIYQVTAIDKDKGPNGEVTYVLQDDYGHFEINPNSGNVILKEAFNSDLSNIEYGVTILAKDGGKPSLSTSVELPITIVNKAMPVFDKPFYTASVNEDIRMNTPILSINATSPEGQGIIYIIIDGDPFKQFNIDFDTGVLKVVSPLDYEVTSAYKLTIRASDALTGARAEVTVDLLVNDVNDNPPIFDQPTYNTTLSEASLIGTPVLQVVSIDADSENNKMVHYQIVQDTYNSTDYFHIDSSSGLILTARMLDHELVQHCTLKVRSIDSGFPSLSSEVLVHIYISDVNDNPPVFNQLIYESYVSELAPRGHFVTCVQASDADSSDFDRLEYSILSGNDRTSFLMDSKSGVITLSNHRKQRMEPLYSLNVSVSDGLFTSTAQVHIRVLGANLYSPAFSQSTYVAEVRENVAAGTKVIHVRATDGDPGTYGQISYAIINDFAKDRFLIDSNGQVITTERLDRENPLEGDVSIFVRALDGGGRTTFCTVRVIVVDENDNAPQFMTVEYRASVRADVGRGHLVTQVQAIDPDDGANSRITYSLYSEASVSVADLLEIDPDNGWMVTKGNFNQLKNTVLSFFVKAVDGGIPVKHSLIPVYIHVLPPETFLPSFTQSQYSFTIAEDTAIGSTVDTLRILPSQNVWFSTVNGERPENNKGGIFVIEQETGTIKLDKRLDRETSPAFHFKVAATIPLDKVDIVFTVDVDIKVLDLNDNKPVFETSSYDTIIMEGMPVGTKLTQVRAIDMDWGANGQVTYSLHSDSQPEKVMEAFNIDSNTGWISTLKDLDHETDPTFTFSVVASDLGEAFSLSSTALVSVRVTDINDNAPVFAQEVYRGNVKESDPPGEVVAVLSTWDRDTSDVNRQVSYHITGGNPRGRFALGLVQSEWKVYVKRPLDREEQDIYFLNITATDGLFVTQAMVEVSVSDVNDNSPVCDQVAYTALLPEDIPSNKIILKVSAKDADIGSNGYIRYSLYGSGNSEFFLDPESGELKTLALLDRERIPVYSLMAKATDGGGRFCQSNIHLILEDVNDNPPVFSSDHYNTCVYENTATKALLTRVQAVDPDIGINRKVVYSLADSAGGVFSIDSSSGIIILEQPLDREQQSSYNISVRATDQSPGQSLSSLTTVTITVLDINDNPPVFERRDYLVTVPEDTSPGTQVLAVFATSKDIGTNAEITYLIRSGNEQGKFKINPKTGGISVSEVLDYELCKRFYLVVEAKDGGTPALSAVATVNINLTDVNDNPPKFSQDVYSAVISEDALVGDSVILLIAEDVDSQPNGQIHFSIVNGDRDNEFTVDPVLGLVKVKKKLDRERVSGYSLLVQAVDSGIPAMSSTATVNIDISDVNDNSPVFTPANYTAVIQENKPVGTSILQLVVTDRDSFHNGPPFSFSILSGNEEEEFVLDPHGILRSAVVFQHTESLEYVLCVQAKDSGKPQQVSHTYIRVRVIEESTHKPTAIPLEIFIVTMEDDFPGGVIGKIHATDQDMYDVLTFALKSEQKSLFKVNSHDGKIIALGGLDSGKYVLNVSVSDGRFQVPIDVVVHVEQLVHEMLQNTVTIRFENVSPEDFVGLHMHGFRRTLRNAVLTQKQDSLRIISIQPVAGTNQLDMLFAVEMHSSEFYKPAYLIQKLSNARRHLENIMRISAILEKNCSGLDCQEQHCEQGLSLDSHALMTYSTARISFVCPRFYRNVRCTCNGGLCPGSNDPCVEKPCPGDMQCVSYEASRRPFLCQCPPGKLGECSGHTSLSFAGNSYIKYRLSENSKEEDFKLALRLRTLQSNGIIMYTRANPCIILKIVDGKLWFQLDCGSGPGILGISGRAVNDGSWHSVFLELNRNFTSLSLDDSYVERRRAPLYFQTLSTESSIYFGALVQADNIRSLTDTRVTQVLSGFQGCLDSVILNNNELPLQNKRSSFAEVVGLTELKLGCVLYPDACKRSPCQHGGSCTGLPSGGYQCTCLSQFTGRNCESEITACFPNPCRNGGSCDPIGNTFICNCKAGLTGVTCEEDINECEREECENGGSCVNVFGSFLCNCTPGYVGQYCGLRPVVVPNIQAGHSYVGKEELIGIAVVLFVIFILVVLFIVFRKKVFRKNYSRNNITLVQDPATAALLNKSNGIPFRNLRGSGDGRNVYQEVGPPQVPVRPMAYTPCFQSDSRSNLDKIVDGLGGEHQEMTTFHPESPRILTARRGVVVCSVAPNLPAVSPCRSDCDSIRKNGWDAGTENKGVDDPGEVTCFAGSNKGSNSEVQSLSSFQSDSGDDNAYHWDTSDWMPGARLSDIEEVPNYENQDGGSAHQGSTRELESDYYLGGYDIDSEYPPPHEEEFLSQDQLPPPLPEDFPDQYEALPPSQPVSLASTLSPDCRRRPQFHPSQYLPPHPFPNETDLVGPPASCEFSTFAVSMNQGTEPTGPADSVSLSLHNSRGTSSSDVSANCGFDDSEVAMSDYESVGELSLASLHIPFVETQHQTQV

SEQ ID NO: 28280 - protein, 4557 aa, Homo sapiens; identical to SEQ ID NO: 28279
  REGION 1..4557: note = ENSP00000489369

SEQ ID NO: 28281 - protein, 4439 aa, Homo sapiens; identical to SEQ ID NO: 28277
  REGION 1..4439: note = ENSP00000489343

SEQ ID NO: 28282 - protein, 892 aa, Homo sapiens; identical to SEQ ID NO: 28278
  REGION 1..892: note = ENSP00000488913

SEQ ID NO: 28283 - protein, 1231 aa, Homo sapiens
  REGION 1..1231: note = ENSP00000384169
MVLLWEPAGAWLALGLALALGPSVAAAAPRQDCTGVECPPLENCIEEALEPGACCATCVQQGCACEGYQYYDCLQGGFVRGRVPAGQSYFVDFGSTECSCPPGGGKISCQFMLCPELPPNCIEAVVVADSCPQCGQVGCVHAGHKYAAGHTVHLPPCRACHCPDAGGELICYQLPGCHGNFSDAEEGDPERHYEDPYSYDQEVAEVEAATALGGEVQAGAVQAGAGGPPAALGGGSQPLSTIQAPPWPAVLPRPTAAAALGPPAPVQAKARRVTEDSEEEEEEEEEREEMAVTEQLAAGGHRGLDGLPTTAPAGPSLPIQEERAEAGARAEAGARPEENLILDAQATSRSTGPEGVTHAPSLGKAALVPTQAVPGSPRDPVKPSPHNILSTSLPDAAWIPPTREVPRKPQVLPHSHVEEDTDPNSVHSIPRSSPEGSTKDLIETCCAAGQQWAIDNDECLEIPESGTEDNVCRTAQRHCCVSYLQEKSCMAGVLGAKEGETCGAEDNDSCGISLYKQCCDCCGLGLRVRAEGQSCESNPNLGYPCNHVMLSCCEGEEPLIVPEVRRPPEPAAAPRRVSEAEMAGREALSLGTEAELPNSLPGDDQDECLLLPGELCQHLCINTVGSYHCACFPGFSLQDDGRTCRPEGHPPQPEAPQEPALKSEFSQVASNTIPLPLPQPNTCKDNGPCKQVCSTVGGSAICSCFPGYAIMADGVSCEDQDECLMGAHDCSRRQFCVNTLGSFYCVNHTVLCADGYILNAHRKCVDINECVTDLHTCSRGEHCVNTLGSFHCYKALTCEPGYALKDGECEDVDECAMGTHTCQPGFLCQNTKGSFYCQARQRCMDGFLQDPEGNCVDINECTSLSEPCRPGFSCINTVGSYTCQRNPLICARGYHASDDGTKCVDVNECETGVHRCGEGQVCHNLPGSYRCDCKAGFQRDAFGRGCIDVNECWASPGRLCQHTCENTLGSYRCSCASGFLLAADGKRCEDVNECEAQRCSQECANIYGSYQCYCRQGYQLAEDGHTCTDIDECAQGAGILCTFRCLNVPGSYQCACPEQGYTMTANGRSCKDVDECALGTHNCSEAETCHNIQGSFRCLRFECPPNYVQVSKTKCERTTCHDFLECQNSPARITHYQLNFQTGLLVPAHIFRIGPAPAFTGDTIALNIIKGNEEGYFGTRRLNAYTGVVYLQRAVLEPRDFALDVEMKLWRQGSVTTFLAKMHIFFTTFAL

SEQ ID NO: 28284 - protein, 1184 aa, Homo sapiens
  REGION 1..1184: note = ENSP00000295760
MVLLWEPAGAWLALGLALALGPSVAAAAPRQDCTGVECPPLENCIEEALEPGACCATCVQQGCACEGYQYYDCLQGGFVRGRVPAGQSYFVDFGSTECSCPPGGGKISCQFMLCPELPPNCIEAVVVADSCPQCGQVGCVHAGHKYAAGHTVHLPPCRACHCPDAGGELICYQLPGCHGNFSDAEEGDPERHYEDPYSYDQEVAEVEAATALGGEVQAGAVQAGAGGPPAALGGGSQPLSTIQAPPWPAVLPRPTAAAALGPPAPVQAKARRVTEDSEEEEEEEEEREEMAVTEQLAAGGHRGLDGLPTTAPAGPSLPIQEERAEAGARAEAGARPEENLILDAQATSRSTGPEGVTHAPSLGKAALVPTQAVPGSPRDPVKPSPHNILSTSLPDAAWIPPTREVPRKPQVLPHSHVEEDTDPNSVHSIPRSSPEGSTKDLIETCCAAGQQWAIDNDECLEIPESGTEDNVCRTAQRHCCVSYLQEKSCMAGVLGAKEGETCGAEDNDSCGISLYKQCCDCCGLGLRVRAEGQSCESNPNLGYPCNHVMLSCCEGEEPLIVPEVRRPPEPAAAPRRVSEAEMAGREALSLGTEAELPNSLPGDDQDECLLLPGELCQHLCINTVGSYHCACFPGFSLQDDGRTCRPEGHPPQPEAPQEPALKSEFSQVASNTIPLPLPQPNTCKDNGPCKQVCSTVGGSAICSCFPGYAIMADGVSCEDINECVTDLHTCSRGEHCVNTLGSFHCYKALTCEPGYALKDGECEDVDECAMGTHTCQPGFLCQNTKGSFYCQARQRCMDGFLQDPEGNCVDINECTSLSEPCRPGFSCINTVGSYTCQRNPLICARGYHASDDGTKCVDVNECETGVHRCGEGQVCHNLPGSYRCDCKAGFQRDAFGRGCIDVNECWASPGRLCQHTCENTLGSYRCSCASGFLLAADGKRCEDVNECEAQRCSQECANIYGSYQCYCRQGYQLAEDGHTCTDIDECAQGAGILCTFRCLNVPGSYQCACPEQGYTMTANGRSCKDVDECALGTHNCSEAETCHNIQGSFRCLRFECPPNYVQVSKTKCERTTCHDFLECQNSPARITHYQLNFQTGLLVPAHIFRIGPAPAFTGDTIALNIIKGNEEGYFGTRRLNAYTGVVYLQRAVLEPRDFALDVEMKLWRQGSVTTFLAKMHIFFTTFAL

SEQ ID NO: 28285 - protein, 158 aa, Homo sapiens
  REGION 1..158: note = ENSP00000420164
MVLLWEPAGAWLALGLALALGPSVAAAAPRQDCTGVECPPLENCIEEALEPGACCATCVQQGCACEGYQYYDCLQGGFVRGRVPAGQSYFVDFGSTECSCPPGGGKISCQFMLCPELPPNCIEAVVVADSCPQCGQVGCVHAGHKYAAGHTVHLPPCR

SEQ ID NO: 28286 - protein, 1231 aa, Homo sapiens; identical to SEQ ID NO: 28283
  REGION 1..1231: note = ENSP00000420042

SEQ ID NO: 28287 - protein, 109 aa, Homo sapiens
  REGION 1..109: note = ENSP00000295761
  VARIANT 1: note = Any amino acid
XIDECAQGAGILCTFRCLNVPGSYQCACPEQGYTMTANGRSCKDVDECALGTHNCSEAETCHNIQGSFRCLRFECPPNYVQVSKTWCVPTQAPSGSLHGGPRPWRVPCG

SEQ ID NO: 28288 - protein, 101 aa, Homo sapiens
  REGION 1..101: note = ENSP00000399224
  VARIANT 1: note = Any amino acid
XVDECALGTHNCSEAETCHNIQGSFRCLRFECPPNYVQVSKTKCERTKWKLARWATAVAGALWVRLGDDLRTRDTRPCWGSWTPLDDPSPKLTFHFMFHCD

SEQ ID NO: 28289 - protein, 2871 aa, Homo sapiens
  REGION 1..2871: note = ENSP00000325527
MRRGRLLEIALGFTVLLASYTSHGADANLEAGNVKETRASRAKRRGGGGHDALKGPNVCGSRYNAYCCPGWKTLPGGNQCIVPICRHSCGDGFCSRPNMCTCPSGQIAPSCGSRSIQHCNIRCMNGGSCSDDHCLCQKGYIGTHCGQPVCESGCLNGGRCVAPNRCACTYGFTGPQCERDYRTGPCFTVISNQMCQGQLSGIVCTKTLCCATVGRAWGHPCEMCPAQPHPCRRGFIPNIRTGACQDVDECQAIPGLCQGGNCINTVGSFECKCPAGHKLNEVSQKCEDIDECSTIPGICEGGECTNTVSSYFCKCPPGFYTSPDGTRCIDVRPGYCYTALTNGRCSNQLPQSITKMQCCCDAGRCWSPGVTVAPEMCPIRATEDFNKLCSVPMVIPGRPEYPPPPLGPIPPVLPVPPGFPPGPQIPVPRPPVEYLYPSREPPRVLPVNVTDYCQLVRYLCQNGRCIPTPGSYRCECNKGFQLDLRGECIDVDECEKNPCAGGECINNQGSYTCQCRAGYQSTLTRTECRDIDECLQNGRICNNGRCINTDGSFHCVCNAGFHVTRDGKNCEDMDECSIRNMCLNGMCINEDGSFKCICKPGFQLASDGRYCKDINECETPGICMNGRCVNTDGSYRCECFPGLAVGLDGRVCVDTHMRSTCYGGYKRGQCIKPLFGAVTKSECCCASTEYAFGEPCQPCPAQNSAEYQALCSSGPGMTSAGSDINECALDPDICPNGICENLRGTYKCICNSGYEVDSTGKNCVDINECVLNSLLCDNGQCRNTPGSFVCTCPKGFIYKPDLKTCEDIDECESSPCINGVCKNSPGSFICECSSESTLDPTKTICIETIKGTCWQTVIDGRCEININGATLKSQCCSSLGAAWGSPCTLCQVDPICGKGYSRIKGTQCEDIDECEVFPGVCKNGLCVNTRGSFKCQCPSGMTLDATGRICLDIRLETCFLRYEDEECTLPIAGRHRMDACCCSVGAAWGTEECEECPMRNTPEYEELCPRGPGFATKEITNGKPFFKDINECKMIPSLCTHGKCRNTIGSFKCRCDSGFALDSEERNCTDIDECRISPDLCGRGQCVNTPGDFECKCDEGYESGFMMMKNCMDIDECQRDPLLCRGGVCHNTEGSYRCECPPGHQLSPNISACIDINECELSAHLCPNGRCVNLIGKYQCACNPGYHSTPDRLFCVDIDECSIMNGGCETFCTNSEGSYECSCQPGFALMPDQRSCTDIDECEDNPNICDGGQCTNIPGEYRCLCYDGFMASEDMKTCVDVNECDLNPNICLSGTCENTKGSFICHCDMGYSGKKGKTGCTDINECEIGAHNCGKHAVCTNTAGSFKCSCSPGWIGDGIKCTDLDECSNGTHMCSQHADCKNTMGSYRCLCKEGYTGDGFTCTDLDECSENLNLCGNGQCLNAPGGYRCECDMGFVPSADGKACEDIDECSLPNICVFGTCHNLPGLFRCECEIGYELDRSGGNCTDVNECLDPTTCISGNCVNTPGSYICDCPPDFELNPTRVGCVDTRSGNCYLDIRPRGDNGDTACSNEIGVGVSKASCCCSLGKAWGTPCEMCPAVNTSEYKILCPGGEGFRPNPITVILEDIDECQELPGLCQGGKCINTFGSFQCRCPTGYYLNEDTRVCDDVNECETPGICGPGTCYNTVGNYTCICPPDYMQVNGGNNCMDMRRSLCYRNYYADNQTCDGELLFNMTKKMCCCSYNIGRAWNKPCEQCPIPSTDEFATLCGSQRPGFVIDIYTGLPVDIDECREIPGVCENGVCINMVGSFRCECPVGFFYNDKLLVCEDIDECQNGPVCQRNAECINTAGSYRCDCKPGYRFTSTGQCNDRNECQEIPNICSHGQCIDTVGSFYCLCHTGFKTNDDQTMCLDINECERDACGNGTCRNTIGSFNCRCNHGFILSHNNDCIDVDECASGNGNLCRNGQCINTVGSFQCQCNEGYEVAPDGRTCVDINECLLEPRKCAPGTCQNLDGSYRCICPPGYSLQNEKCEDIDECVEEPEICALGTCSNTEGSFKCLCPEGFSLSSSGRRCQDLRMSYCYAKFEGGKCSSPKSRNHSKQECCCALKGEGWGDPCELCPTEPDEAFRQICPYGSGIIVGPDDSAVDMDECKEPDVCKHGQCINTDGSYRCECPFGYILAGNECVDTDECSVGNPCGNGTCKNVIGGFECTCEEGFEPGPMMTCEDINECAQNPLLCAFRCVNTYGSYECKCPVGYVLREDRRMCKDEDECEEGKHDCTEKQMECKNLIGTYMCICGPGYQRRPDGEGCVDENECQTKPGICENGRCLNTRGSYTCECNDGFTASPNQDECLDNREGYCFTEVLQNMCQIGSSNRNPVTKSECCCDGGRGWGPHCEICPFQGTVAFKKLCPHGRGFMTNGADIDECKVIHDVCRNGECVNDRGSYHCICKTGYTPDITGTSCVDLNECNQAPKPCNFICKNTEGSYQCSCPKGYILQEDGRSCKDLDECATKQHNCQFLCVNTIGGFTCKCPPGFTQHHTSCIDNNECTSDINLCGSKGICQNTPGSFTCECQRGFSLDQTGSSCEDVDECEGNHRCQHGCQNIIGGYRCSCPQGYLQHYQWNQCVDENECLSAHICGGASCHNTLGSYKCMCPAGFQYEQFSGGCQDINECGSAQAPCSYGCSNTEGGYLCGCPPGYFRIGQGHCVSGMGMGRGNPEPPVSGEMDDNSLSPEACYECKINGYPKRGRKRRSTNETDASNIEDQSETEANVSLASWDVEKTAIFAFNISHVSNKVRILELLPALTTLTNHNRYLIESGNEDGFFKINQKEGISYLHFTKKKPVAGTYSLQISSTPLYKKKELNQLEDKYDKDYLSGELGDNLKMKIQVLLH

SEQ ID NO: 28290 - protein, 853 aa, Homo sapiens
  REGION 1..853: note = ENSP00000453958
  VARIANT 1: note = Any amino acid
XLGKAWGTPCEMCPAVNTSEYKILCPGGEGFRPNPITVILEDIDECQELPGLCQGGKCINTFGSFQCRCPTGYYLNEDTRVCDDVNECETPGICGPGTCYNTVGNYTCICPPDYMQVNGGNNCMDMRRSLCYRNYYADNQTCDGELLFNMTKKMCCCSYNIGRAWNKPCEQCPIPSTDEFATLCGSQRPGFVIDIYTGLPVDIDECREIPGVCENGVCINMVGSFRCECPVGFFYNDKLLVCEDIDECQNGPVCQRNAECINTAGSYRCDCKPGYRFTSTGQCNDRNECQEIPNICSHGQCIDTVGSFYCLCHTGFKTNDDQTMCLDINECERDACGNGTCRNTIGSFNCRCNHGFILSHNNDCIDVDECASGNGNLCRNGQCINTVGSFQCQCNEGYEVAPDGRTCVDINECLLEPRKCAPGTCQNLDGSYRCICPPGYSLQNEKCEDIDECVEEPEICALGTCSNTEGSFKCLCPEGFSLSSSGRRCQDLRMSYCYAKFEGGKCSSPKSRNHSKQECCCALKGEGWGDPCELCPTEPDEAFRQICPYGSGIIVGPDDSAVDMDECKEPDVCKHGQCINTDGSYRCECPFGYILAGNECVDTDECSVGNPCGNGTCKNVIGGFECTCEEGFEPGPMMTCEDINECAQNPLLCAFRCVNTYGSYECKCPVGYVLREDRRMCKDEDECEEGKHDCTEKQMECKNLIGTYMCICGPGYQRRPDGEGCVDENECQTKPGICENGRCLNTRGSYTCECNDGFTASPNQDECLDVILSLLLLSPAFPSCFFSPRTIGKGTASQRCYKTCVRSAPATGTPSPNRNAAVTEGEAGVPTVRSALSRGLWLSRNSVPMAEDS

SEQ ID NO: 28291 - protein, 302 aa, Homo sapiens
  REGION 1..302: note = ENSP00000440294
MRRGRLLEIALGFTVLLASYTSHGADANLEAGNVKETRASRAKRRGGGGHDALKGPNVCGSRYNAYCCPGWKTLPGGNQCIVPICRHSCGDGFCSRPNMCTCPSGQIAPSCGSRSIQHCNIRCMNGGSCSDDHCLCQKGYIGTHCGQPVCESGCLNGGRCVAPNRCACTYGFTGPQCERDYRTGPCFTVISNQMCQGQLSGIVCTKTLCCATTSMNVKLEHTTVANMLYVPIQQEASNVAAVPGGLEMALSALIWTNVPMEPICAASMQTARIPWDLTAVCARKDTQVMASLVQTLMSALRT

SEQ ID NO: 28292 - protein, 55 aa, Homo sapiens
  REGION 1..55: note = ENSP00000453901
MRRGRLLEIALGFTVLLASYTSHGADANLEAGNVKETRASRAKRRGGGGHDALKG

SEQ ID NO: 28293 - protein, 2912 aa, Homo sapiens
  REGION 1..2912: note = ENSP00000424571
MGRRRRLCLQLYFLWLGCVVLWAQGTAGQPQPPPPKPPRPQPPPQQVRSATAGSEGGFLAPEYREEGAAVASRVRRRGQQDVLRGPNVCGSRFHSYCCPGWKTLPGGNQCIVPICRNSCGDGFCSRPNMCTCSSGQISSTCGSKSIQQCSVRCMNGGTCADDHCQCQKGYIGTYCGQPVCENGCQNGGRCIGPNRCACVYGFTGPQCERDYRTGPCFTQVNNQMCQGQLTGIVCTKTLCCATIGRAWGHPCEMCPAQPQPCRRGFIPNIRTGACQDVDECQAIPGICQGGNCINTVGSFECRCPAGHKQSETTQKCEDIDECSIIPGICETGECSNTVGSYFCVCPRGYVTSTDGSRCIDQRTGMCFSGLVNGRCAQELPGRMTKMQCCCEPGRCWGIGTIPEACPVRGSEEYRRLCMDGLPMGGIPGSAGSRPGGTGGNGFAPSGNGNGYGPGGTGFIPIPGGNGFSPGVGGAGVGAGGQGPIITGLTILNQTIDICKHHANLCLNGRCIPTVSSYRCECNMGYKQDANGDCIDVDECTSNPCTNGDCVNTPGSYYCKCHAGFQRTPTKQACIDIDECIQNGVLCKNGRCVNTDGSFQCICNAGFELTTDGKNCVDHDECTTTNMCLNGMCINEDGSFKCICKPGFVLAPNGRYCTDVDECQTPGICMNGHCINSEGSFRCDCPPGLAVGMDGRVCVDTHMRSTCYGGIKKGVCVRPFPGAVTKSECCCANPDYGFGEPCQPCPAKNSAEFHGLCSSGVGITVDGRDINECALDPDICANGICENLRGSYRCNCNSGYEPDASGRNCIDIDECLVNRLLCDNGLCRNTPGSYSCTCPPGYVFRTETETCEDINECESNPCVNGACRNNLGSFNCECSPGSKLSSTGLICIDSLKGTCWLNIQDSRCEVNINGATLKSECCATLGAAWGSPCERCELDTACPRGLARIKGVTCEDVNECEVFPGVCPNGRCVNSKGSFHCECPEGLTLDGTGRVCLDIRMEQCYLKWDEDECIHPVPGKFRMDACCCAVGAAWGTECEECPKPGTKEYETLCPRGAGFANRGDVLTGRPFYKDINECKAFPGMCTYGKCRNTIGSFKCRCNSGFALDMEERNCTDIDECRISPDLCGSGICVNTPGSFECECFEGYESGFMMMKNCMDIDECERNPLLCRGGTCVNTEGSFQCDCPLGHELSPSREDCVDINECSLSDNLCRNGKCVNMIGTYQCSCNPGYQATPDRQGCTDIDECMIMNGGCDTQCTNSEGSYECSCSEGYALMPDGRSCADIDECENNPDICDGGQCTNIPGEYRCLCYDGFMASMDMKTCIDVNECDLNSNICMFGECENTKGSFICHCQLGYSVKKGTTGCTDVDECEIGAHNCDMHASCLNIPGSFKCSCREGWIGNGIKCIDLDECSNGTHQCSINAQCVNTPGSYRCACSEGFTGDGFTCSDVDECAENINLCENGQCLNVPGAYRCECEMGFTPASDSRSCQDIDECSFQNICVFGTCNNLPGMFHCICDDGYELDRTGGNCTDIDECADPINCVNGLCVNTPGRYECNCPPDFQLNPTGVGCVDNRVGNCYLKFGPRGDGSLSCNTEIGVGVSRSSCCCSLGKAWGNPCETCPPVNSTEYYTLCPGGEGFRPNPITIILEDIDECQELPGLCQGGNCINTFGSFQCECPQGYYLSEDTRICEDIDECFAHPGVCGPGTCYNTLGNYTCICPPEYMQVNGGHNCMDMRKSFCYRSYNGTTCENELPFNVTKRMCCCTYNVGKAWNKPCEPCPTPGTADFKTICGNIPGFTFDIHTGKAVDIDECKEIPGICANGVCINQIGSFRCECPTGFSYNDLLLVCEDIDECSNGDNLCQRNADCINSPGSYRCECAAGFKLSPNGACVDRNECLEIPNVCSHGLCVDLQGSYQCICHNGFKASQDQTMCMDVDECERHPCGNGTCKNTVGSYNCLCYPGFELTHNNDCLDIDECSSFFGQVCRNGRCFNEIGSFKCLCNEGYELTPDGKNCIDTNECVALPGSCSPGTCQNLEGSFRCICPPGYEVKSENCIDINECDEDPNICLFGSCTNTPGGFQCLCPPGFVLSDNGRRCFDTRQSFCFTNFENGKCSVPKAFNTTKAKCCCSKMPGEGWGDPCELCPKDDEVAFQDLCPYGHGTVPSLHDTREDVNECLESPGICSNGQCINTDGSFRCECPMGYNLDYTGVRCVDTDECSIGNPCGNGTCTNVIGSFECNCNEGFEPGPMMNCEDINECAQNPLLCAFRCMNTFGSYECTCPIGYALREDQKMCKDLDECAEGLHDCESRGMMCKNLIGTFMCICPPGMARRPDGEGCVDENECRTKPGICENGRCVNIIGSYRCECNEGFQSSSSGTECLDNRQGLCFAEVLQTICQMASSSRNLVTKSECCCDGGRGWGHQCELCPLPGTAQYKKICPHGPGYTTDGRDIDECKVMPNLCTNGQCINTMGSFRCFCKVGYTTDISGTSCIDLDECSQSPKPCNYICKNTEGSYQCSCPRGYVLQEDGKTCKDLDECQTKQHNCQFLCVNTLGGFTCKCPPGFTQHHTACIDNNECGSQPSLCGAKGICQNTPGSFSCECQRGFSLDATGLNCEDVDECDGNHRCQHGCQNILGGYRCGCPQGYIQHYQWNQCVDENECSNPNACGSASCYNTLGSYKCACPSGFSFDQFSSACHDVNECSSSKNPCNYGCSNTEGGYLCGCPPGYYRVGQGHCVSGMGFNKGQYLSLDTEVDEENALSPEACYECKINGYSKKDSRQKRSIHEPDPTAVEQISLESVDMDSPVNMKFNLSHLGSKEHILELRPAIQPLNNHIRYVISQGNDDSVFRIHQRNGLSYLHTAKKKLMPGTYTLEITSIPLYKKKELKKLEESNEDDYLLGELGEALRMRLQIQLY

SEQ ID NO: 28294 - protein, 356 aa, Homo sapiens
  REGION 1..356: note = ENSP00000426839
MMMKNCMDIDECERNPLLCRGGTCVNTEGSFQCDCPLGHELSPSREDCVDINECSLSDNLCRNGKCVNMIGTYQCSCNPGYQATPDRQGCTDIDECMIMNGGCDTQCTNSEGSYECSCSEGYALMPDGRSCADIDECENNPDICDGGQCTNIPGEYRCLCYDGFMASMDMKTCIDVNECDLNSNICMFGECENTKGSFICHCQLGYSVKKGTTGCTDVDECEIGAHNCDMHASCLNIPGSFKCSCREGWIGNGIKCIDLDECSNGTHQCSINAQCVNTPGSYRCACSEGFTGDGFTCSDVDECAENINLCENGQCLNVPGAYRCECEMGFTPASDSRSCQGGSPGFQLIFKLDQPQ

SEQ ID NO: 28295 - protein, 1473 aa, Homo sapiens
  REGION 1..1473: note = ENSP00000425596
MGRRRRLCLQLYFLWLGCVVLWAQGTAGQPQPPPPKPPRPQPPPQQVRSATAGSEGGFLAPEYREEGAAVASRVRRRGQQDVLRGPNVCGSRFHSYCCPGWKTLPGGNQCIVLQQCSVRCMNGGTCADDHCQCQKGYIGTYCGQPVCENGCQNGGRCIGPNRCACVYGFTGPQCERDYRTGPCFTQVNNQMCQGQLTGIVCTKTLCCATIGRAWGHPCEMCPAQPQPCRRGFIPNIRTGACQDVDECQAIPGICQGGNCINTVGSFECRCPAGHKQSETTQKCEDIDECSIIPGICETGECSNTVGSYFCVCPRGYVTSTDGSRCIDQRTGMCFSGLVNGRCAQELPGRMTKMQCCCEPGRCWGIGTIPEACPVRGSEEYRRLCMDGLPMGGIPGSAGSRPGGTGGNGFAPSGNGNGYGPGGTGFIPIPGGNGFSPGVGGAGVGAGGQGPIITGLTILNQTIDICKHHANLCLNGRCIPTVSSYRCECNMGYKQDANGDCIDVDECTSNPCTNGDCVNTPGSYYCKCHAGFQRTPTKQACIDIDECIQNGVLCKNGRCVNTDGSFQCICNAGFELTTDGKNCVDHDECTTTNMCLNGMCINEDGSFKCICKPGFVLAPNGRYCTDVDECQTPGICMNGHCINSEGSFRCDCPPGLAVGMDGRVCVDTHMRSTCYGGIKKGVCVRPFPGAVTKSECCCANPDYGFGEPCQPCPAKNSAEFHGLCSSGVGITVDGRDINECALDPDICANGICENLRGSYRCNCNSGYEPDASGRNCIDIDECLVNRLLCDNGLCRNTPGSYSCTCPPGYVFRTETETCEDINECESNPCVNGACRNNLGSFNCECSPGSKLSSTGLICIDSLKGTCWLNIQDSRCEVNINGATLKSECCATLGAAWGSPCERCELDTACPRGLARIKGVTCEDVNECEVFPGVCPNGRCVNSKGSFHCECPEGLTLDGTGRVCLDIRMEQCYLKWDEDECIHPVPGKFRMDACCCAVGAAWGTECEECPKPGTKEYETLCPRGAGFANRGDVLTGRPFYKDINECKAFPGMCTYGKCRNTIGSFKCRCNSGFALDMEERNCTDIDECRISPDLCGSGICVNTPGSFECECFEGYESGFMMMKNCMDIDECERNPLLCRGGTCVNTEGSFQCDCPLGHELSPSREDCVDINECSLSDNLCRNGKCVNMIGTYQCSCNPGYQATPDRQGCTDIDECMIMNGGCDTQCTNSEGSYECSCSEGYALMPDGRSCADIDECENNPDICDGGQCTNIPGEYRCLCYDGFMASMDMKTCIDVNECDLNSNICMFGECENTKGSFICHCQLGYSVKKGTTGCTDVDECEIGAHNCDMHASCLNIPGSFKCSCREGWIGNGIKCIDLDECSNGTHQCSINAQCVNTPGSYRCACSEGFTGDGFTCSDVDECAENINLCENGQCLNVPGAYRCECEMGFTPASDSRSCQGGSPGFQLIFKLDQPQ

SEQ ID NO: 28296 - protein, 341 aa, Homo sapiens
  REGION 1..341: note = ENSP00000424753
MGRRRRLCLQLYFLWLGCVVLWAQGTAGQPQPPPPKPPRPQPPPQQVRSATAGSEGGFLAPEYREEGAAVASRVRRRGQQDVLRGPNVCGSRFHSYCCPGWKTLPGGNQCIVPICRNSCGDGFCSRPNMCTCSSGQISSTCGSKSIQQCSVRCMNGGTCADDHCQCQKGYIGTYCGQPVCENGCQNGGRCIGPNRCACVYGFTGPQCERDYRTGPCFTQVNNQMCQGQLTGIVCTKTLCCATIGRAWGHPCEMCPAQPQPCRRGFIPNIRTGACQDVDECQAIPGICQGGNCINTVGSFECRCPAGHKQSETTQKCEVHVDKAQAGARCPCVILPSRLYLR

SEQ ID NO: 28297 - protein, 2912 aa, Homo sapiens; identical to SEQ ID NO: 28293
  REGION 1..2912: note = ENSP00000262464

SEQ ID NO: 28298 - protein, 2911 aa, Homo sapiens
  REGION 1..2911: note = ENSP00000482132
MGRRRRLCLQLYFLWLGCVVLWAQGTAGQPQPPPPKPPRPQPPPQQVRSATAGSEGGFLAPEYREEGAAVASRVRRRGQQDVLRGPNVCGSRFHSYCCPGWKTLPGGNQCIVPICRNSCGDGFCSRPNMCTCSSGQISSTCGSKSIQQCSVRCMNGGTCADDHCQCQKGYIGTYCGQPVCENGCQNGGRCITQPCACVYGFTGPQCERDYRTGPCFTQVNNQMCQGQLTGIVCTKTLCCATIGRAWGHPCEMCPAQPQPCRRGFIPNIRTGACQDVDECQAIPGICQGGNCINTVGSFECRCPAGHKQSETTQKCEDIDECSIIPGICETGECSNTVGSYFCVCPRGYVTSTDGSRCIDQRTGMCFSGLVNGRCAQELPGRMTKMQCCCEPGRCWGIGTIPEACPVRGSEEYRRLCMDGLPMGGIPGSAGSRPGGTGGNGFAPSGNGNGYGPGGTGFIPIPGGNGFSPGVGGAGVGAGGQGPIITGLTILNQTIDICKHHANLCLNGRCIPTVSSYRCECNMGYKQDANGDCIDVDECTSNPCTNGDCVNTPGSYYCKCHAGFQRTPTKQACIDIDECIQNGVLCKNGRCVNTDGSFQCICNAGFELTTDGKNCVDHDECTTTNMCLNGMCINEDGSFKCICKPGFVLAPNGRYCTDVDECQTPGICMNGHCINSEGSFRCDCPPGLAVGMDGRVCVDTHMRSTCYGGIKKGVCVRPFPGAVTKSECCCANPDYGFGEPCQPCPAKNSAEFHGLCSSGVGITVDGRDINECALDPDICANGICENLRGSYRCNCNSGYEPDASGRNCIDIDECLVNRLLCDNGLCRNTPGSYSCTCPPGYVFRTETETCEDINECESNPCVNGACRNNLGSFNCECSPGSKLSSTGLICIDSLKGTCWLNIQDSRCEVNINGATLKSECCATLGAAWGSPCERCELDTACPRGLARIKGVTCEDVNECEVFPGVCPNGRCVNSKGSFHCECPEGLTLDGTGRVCLDIRMEQCYLKWDEDECIHPVPGKFRMDACCCAVGAAWGTECEECPKPGTKEYETLCPRGAGFANRGDVLTGRPFYKDINECKAFPGMCTYGKCRNTIGSFKCRCNSGFALDMEERNCTDIDECRISPDLCGSGICVNTPGSFECECFEGYESGFMMMKNCMDIDECERNPLLCRGGTCVNTEGSFQCDCPLGHELSPSREDCVDINECSLSDNLCRNGKCVNMIGTYQCSCNPGYQATPDRQGCTDIDECMIMNGGCDTQCTNSEGSYECSCSEGYALMPDGRSCADIDECENNPDICDGGQCTNIPGEYRCLCYDGFMASMDMKTCIDVNECDLNSNICMFGECENTKGSFICHCQLGYSVKKGTTGCTDVDECEIGAHNCDMHASCLNIPGSFKCSCREGWIGNGIKCIDLDECSNGTHQCSINAQCVNTPGSYRCACSEGFTGDGFTCSDVDECAENINLCENGQCLNVPGAYRCECEMGFTPASDSRSCQDIDECSFQNICVFGTCNNLPGMFHCICDDGYELDRTGGNCTDIDECADPINCVNGLCVNTPGRYECNCPPDFQLNPTGVGCVDNRVGNCYLKFGPRGDGSLSCNTEIGVGVSRSSCCCSLGKAWGNPCETCPPVNSTEYYTLCPGGEGFRPNPITIILEDIDECQELPGLCQGGNCINTFGSFQCECPQGYYLSEDTRICEDIDECFAHPGVCGPGTCYNTLGNYTCICPPEYMQVNGGHNCMDMRKSFCYRSYNGTTCENELPFNVTKRMCCCTYNVGKAWNKPCEPCPTPGTADFKTICGNIPGFTFDIHTGKAVDIDECKEIPGICANGVCINQIGSFRCECPTGFSYNDLLLVCEDIDECSNGDNLCQRNADCINSPGSYRCECAAGFKLSPNGACVDRNECLEIPNVCSHGLCVDLQGSYQCICHNGFKASQDQTMCMDVDECERHPCGNGTCKNTVGSYNCLCYPGFELTHNNDCLDIDECSSFFGQVCRNGRCFNEIGSFKCLCNEGYELTPDGKNCIDTNECVALPGSCSPGTCQNLEGSFRCICPPGYEVKSENCIDINECDEDPNICLFGSCTNTPGGFQCLCPPGFVLSDNGRRCFDTRQSFCFTNFENGKCSVPKAFNTTKAKCCCSKMPGEGWGDPCELCPKDDEVAFQDLCPYGHGTVPSLHDTREDVNECLESPGICSNGQCINTDGSFRCECPMGYNLDYTGVRCVDTDECSIGNPCGNGTCTNVIGSFECNCNEGFEPGPMMNCEDINECAQNPLLCAFRCMNTFGSYECTCPIGYALREDQKMCKDLDECAEGLHDCESRGMMCKNLIGTFMCICPPGMARRPDGEGCVDENECRTKPGICENGRCVNIIGSYRCECNEGFQSSSSGTECLDNRQGLCFAEVLQTICQMASSSRNLVTKSECCCDGGRGWGHQCELCPLPGTAQYKKICPHGPGYTTDGRDIDECKVMPNLCTNGQCINTMGSFRCFCKVGYTTDISGTSCIDLDECSQSPKPCNYICKNTEGSYQCSCPRGYVLQEDGKTCKDLDECQTKQHNCQFLCVNTLGGFTCKCPPGFTQHHTACIDNNECGSQPSLCGAKGICQNTPGSFSCECQRGFSLDATGLNCEDVDECDGNHRCQHGCQNILGGYRCGCPQGYIQHYQWNQCVDENECSNPNACGSASCYNTLGSYKCACPSGFSFDQFSSACHDVNECSSSKNPCNYGCSNTEGGYLCGCPPGYYRVGQGHCVSGMGFNKGQYLSLDTEVDEENALSPEACYECKINGYSKKDSRQKRSIHEPDPTAVEQISLESVDMDSPVNMKFNLSHLGSKEHILELRPAIQPLNNHIRYVISQGNDDSVFRIHQRNGLSYLHTAKKKLMPGTYTLEITSIPLYKKKELKKLEESNEDDYLLGELGEALRMRLQIQLY

SEQ ID NO: 28299 - protein, 130 aa, Homo sapiens
  REGION 1..130: note = ENSP00000419587
MEGRCCRAGEISGEVSTGSPQKREEDVCQCRPECSQVKRSCPSCGSELGVEEKRGKGNPISIQLFPPELVEHIISFLPVRDLVALGQTCRYFHEVCDGEGVWRRICRRLSPRLQDQGSGVRPWKRAAILN

SEQ ID NO: 28300 - protein, 580 aa, Homo sapiens
  REGION 1..580: note = ENSP00000241071
MGEKAVPLLRRRRVKRSCPSCGSELGVEEKRGKGNPISIQLFPPELVEHIISFLPVRDLVALGQTCRYFHEVCDGEGVWRRICRRLSPRLQDQGSGVRPWKRAAILNYTKGLYFQAFGGRRRCLSKSVAPLLAHGYRRFLPTKDHVFILDYVGTLFFLKNALVSTLGQMQWKRACRYVVLCRGAKDFASDPRCDTVYRKYLYVLATREPQEVVGTTSSRACDCVEVYLQSSGQRVFKMTFHHSMTFKQIVLVGQETQRALLLLTEEGKIYSLVVNETQLDQPRSYTVQLALRKVSHYLPHLRVACMTSNQSSTLYVTDQGGVYFEVHTPGVYRDLFGTLQAFDPLDQQMPLALSLPAKILFCALGYNHLGLVDEFGRIFMQGNNRYGQLGTGDKMDRGEPTQVCYLQRPITLWCGLNHSLVLSQSSEFSKELLGCGCGAGGRLPGWPKGSASFVKLQVKVPLCACALCATRECLYILSSHDIEQHAPYRHLPASRVVGTPEPSLGARAPQDPGGMAQACEEYLSQIHSCQTLQDRTEKMKEIVGWMPLMAAQKDFFWEALDMLQRAEGGGGGVGPPAPET

SEQ ID NO: 28301 - protein, 37 aa, Homo sapiens
  REGION 1..37: note = ENSP00000418814
MGEKAVPLLRRRRTRRACISRHLEAAADVSARAWPPC

SEQ ID NO: 28302 - protein, 318 aa, Homo sapiens
  REGION 1..318: note = ENSP00000419602
MGEKAVPLLRRRRVKRSCPSCGSELGVEEKRGKGNPISIQLFPPELVEHIISFLPVRDLVALGQTCRYFHEVCDGEGVWRRICRRLSPRLQDQDTKGLYFQAFGGRRRCLSKSVAPLLAHGYRRFLPTKDHVFILDYVGTLFFLKNALVSTLGQMQWKRACRYVVLCRGAKDFASDPRCDTVYRKYLYVLATREPQEVVGTTSSRACDCVEVYLQSSGQRVFKMTFHHSMTFKQIVLVGQETQRALLLLTEEGKIYSLVVNETQLDQPRSYTVQLALRKVSHYLPHLRVACMTSNQSSTLYVTDPILCSWLQPPWPGG

SEQ ID NO: 28303 - protein, 187 aa, Homo sapiens
  REGION 1..187: note = ENSP00000417179
MNAEPLAGRERSSPLQWRVKRSCPSCGSELGVEEKRGKGNPISIQLFPPELVEHIISFLPVRDLVALGQTCRYFHEVCDGEGVWRRICRRLSPRLQDQGSGVRPWKRAAILNYTKGLYFQAFGGRRRCLSKSVAPLLAHGYRRFLPTKDHVFILDYVGTLFFLKNALVSTLGQMQWKRACRYVVLCR

SEQ ID NO: 28304 - protein, 568 aa, Homo sapiens
  REGION 1..568: note = ENSP00000420239
MVKRSCPSCGSELGVEEKRGKGNPISIQLFPPELVEHIISFLPVRDLVALGQTCRYFHEVCDGEGVWRRICRRLSPRLQDQGSGVRPWKRAAILNYTKGLYFQAFGGRRRCLSKSVAPLLAHGYRRFLPTKDHVFILDYVGTLFFLKNALVSTLGQMQWKRACRYVVLCRGAKDFASDPRCDTVYRKYLYVLATREPQEVVGTTSSRACDCVEVYLQSSGQRVFKMTFHHSMTFKQIVLVGQETQRALLLLTEEGKIYSLVVNETQLDQPRSYTVQLALRKVSHYLPHLRVACMTSNQSSTLYVTDQGGVYFEVHTPGVYRDLFGTLQAFDPLDQQMPLALSLPAKILFCALGYNHLGLVDEFGRIFMQGNNRYGQLGTGDKMDRGEPTQVCYLQRPITLWCGLNHSLVLSQSSEFSKELLGCGCGAGGRLPGWPKGSASFVKLQVKVPLCACALCATRECLYILSSHDIEQHAPYRHLPASRVVGTPEPSLGARAPQDPGGMAQACEEYLSQIHSCQTLQDRTEKMKEIVGWMPLMAAQKDFFWEALDMLQRAEGGGGGVGPPAPET

SEQ ID NO: 28305 - protein, 618 aa, Homo sapiens
  REGION 1..618: note = ENSP00000416558
MVWESQQERGGQGPRRQEGRSREGAIRMVRGSQRRKLQKFTRLCGREEGLRVKRSCPSCGSELGVEEKRGKGNPISIQLFPPELVEHIISFLPVRDLVALGQTCRYFHEVCDGEGVWRRICRRLSPRLQDQGSGVRPWKRAAILNYTKGLYFQAFGGRRRCLSKSVAPLLAHGYRRFLPTKDHVFILDYVGTLFFLKNALVSTLGQMQWKRACRYVVLCRGAKDFASDPRCDTVYRKYLYVLATREPQEVVGTTSSRACDCVEVYLQSSGQRVFKMTFHHSMTFKQIVLVGQETQRALLLLTEEGKIYSLVVNETQLDQPRSYTVQLALRKVSHYLPHLRVACMTSNQSSTLYVTDQGGVYFEVHTPGVYRDLFGTLQAFDPLDQQMPLALSLPAKILFCALGYNHLGLVDEFGRIFMQGNNRYGQLGTGDKMDRGEPTQVCYLQRPITLWCGLNHSLVLSQSSEFSKELLGCGCGAGGRLPGWPKGSASFVKLQVKVPLCACALCATRECLYILSSHDIEQHAPYRHLPASRVVGTPEPSLGARAPQDPGGMAQACEEYLSQIHSCQTLQDRTEKMKEIVGWMPLMAAQKDFFWEALDMLQRAEGGGGGVGPPAPET

SEQ ID NO: 28306 - protein, 355 aa, Homo sapiens
  REGION 1..355: note = ENSP00000428205
MPFLGQDWRSPGQNWVKTADGWKRFLDEKSGSFVSDLSSYCNKEVYNKENLFNSLNYDVAAKKRKKDMLNSKTKTQYFHQEKWIYVHKGSTKERHGYCTLGEAFNRLDFSTAILDSRRFNYVVRLLELIAKSQLTSLSGIAQKNFMNILEKVVLKVLEDQQNIRLIRELLQTLYTSLCTLVQRVGKSVLVGNINMWVYRMETILHWQQQLNNIQITRPAFKGLTFTDLPLCLQLNIMQRLSDGRDLVSLGQAAPDLHVLSEDRLLWKKLCQYHFSERQIRKRLILSDKGQLDWKKMYFKLVRCYPRKEQYGDTLQLCKHCHILSWKGTDHPCTANNPESCSVSLSPQDFINLFKF

SEQ ID NO: 28307 - protein, 262 aa, Homo sapiens
  REGION 1..262: note = ENSP00000390790
MPFLGQDWRSPGQNWVKTADGWKRFLDEKSGSFVSDLSSYCNKEVYNKENLFNSLNYDVAAKKRKKDMLNSKTKTQYFHQEKWIYVHKGSTKERHGYCTLGEAFNRLDFSTAILDSRRFNYVVRPAFKGLTFTDLPLCLQLNIMQRLSDGRDLVSLGQAAPDLHVLSEDRLLWKKLCQYHFSERQIRKRLILSDKGQLDWKKMYFKLVRCYPRKEQYGDTLQLCKHCHILSWKGTDHPCTANNPESCSVSLSPQDFINLFKF

SEQ ID NO: 28308 - protein, 193 aa, Homo sapiens
  REGION 1..193: note = ENSP00000485109
  VARIANT 1: note = Any amino acid
XNKPYDVFGCWLTETSLISGNLHRIGDITSCSVLWLNNAFQDVESENVNVVKRLFKIQNLNASTVRTVMVADCSRFDSPDLLLEAGDPATSPCRIFDLGSDNEEVVAGPAPAHAKEGLRHFLDRVLEGRAQPQLSERMLETKVAELLAQGHTKPPERSATGAKSKYLIFTTGCLTYSPHQIGTPLPPCCPPRS

SEQ ID NO: 28309 - protein, 566 aa, Homo sapiens
  REGION 1..566: note = ENSP00000313034
MDEGGTPLLPDSLVYQIFLSLGPADVLAAGLVCRQWQAVSRDEFLWREQFYRYYQVARDVPRHPAAMSWYEEFQRLYDTVPCVEVQTLREHTDQVLHLSFSHSGYQFASCSKDCTVKIWSNDLTISLLHSADMRPYNWSYTQFSQFNKDDSLLLASGVFLGPHNSSSGEIAVISLDSFALLSRVRNKPYDVFGCWLTETSLISGNLHRIGDITSCSVLWLNNAFQDVESENVNVVKRLFKIQNLNASTVRTVMVADCSRFDSPDLLLEAGDPATSPCRIFDLGSDNEEVVAGPAPAHAKEGLRHFLDRVLEGRAQPQLSERMLETKVAELLAQGHTKPPERSATGAKSKYLIFTTGCLTYSPHQIGIKQILPHQMTTAGPVLGEGRGSDAFFDALDHVIDIHGHIIGMGLSPDNRYLYVNSRAWPNGAVVADPMQPPPIAEEIDLLVFDLKTMREVRRALRAHRAYTPNDECFFIFLDVSRDFVASGAEDRHGYIWDRHYNICLARLRHEDVVNSVVFSPQEQELLLTASDDATIKAWRSPRTMRVLQAPRPRPRTFFSWLASQRR

SEQ ID NO: 28310 - protein, 117 aa, Homo sapiens
  REGION 1..117: note = ENSP00000485322
MDEGGTPLLPDSLVYQIFLSLGPADVLAAGLVCRQWQAVSRDEFLWREQFYRYYQVARDVPRHPAAMSWYEEFQRLYDTVPCVEVQTLREHTDQVLHLSFSHSGYQFASCSKDCTVK

SEQ ID NO: 28311 - protein, 200 aa, Homo sapiens
  REGION 1..200: note = ENSP00000404829
MDEGGTPLLPDSLVYQIFLSLGPADVLAAGLVCRQWQAVSRDEFLWREQFYRYYQVARDVPRHPAAMSWYEEFQRLYDTVPCVEVQTLREHTDQVLHLSFSHSGYQFASCSKDCTVKAITTAAPAEQIWSNDLTISLLHSADMRPYNWSYTQFSQFNKDDSLLLASGVFLGPHNSSSGEIAVISLDSFALLSRVRNKPYD

SEQ ID NO: 28312 - protein, 129 aa, Homo sapiens
  REGION 1..129: note = ENSP00000394011
MDEGGTPLLPDSLVYQIFLSLGPADVLAAGLVCRQWQAVSRDEFLWREQFYRYYQVARDVPRHPAAMSWYEEFQRLYDTVPCVEVQTLREHTDQVLHLSFSHSGYQFASCSKDCTVKIWSNDLTISLLH

SEQ ID NO: 28313 - protein, 172 aa, Homo sapiens
  REGION 1..172: note = ENSP00000465854
MELPLGRCDDSRTWDDDSDPESETDPDAQAKAYVARVLSPPKSGLAFSRPSQLSTPAASPSASEPRAASRVSAVSEPGLLSLPPELLLEICSYLDARLVLHVLSRVCHALRDLVSDHVTWRLRALRRVRAPYPVVEGWVTLSVGLPRSQRQLVGPAAAGDGVQPGSDQDLRH

SEQ ID NO: 28314 - protein, 458 aa, Homo sapiens
  REGION 1..458: note = ENSP00000376945
MELPLGRCDDSRTWDDDSDPESETDPDAQAKAYVARVLSPPKSGLAFSRPSQLSTPAASPSASEPRAASRVSAVSEPGLLSLPPELLLEICSYLDARLVLHVLSRVCHALRDLVSDHVTWRLRALRRVRAPYPVVEEKNFDWPAACIALEQHLSRWAEDGRWVEYFCLAEGHVASVDSVLLLQGGSLCLSGSRDRNVNLWDLRQLGTESNQVLIKTLGTKRNSTHEGWVWSLAAQDHRVCSGSWDSTVKLWDMAADGQQFGEIKASSAVLCLSYLPDILVTGTYDKKVTIYDPRAGPALLKHQQLHSRPVLTLLADDRHIISGSEDHTLVVVDRRANSVLQRLQLDSYLLCMSYQEPQLWAGDNQGLLHVFANRNGCFQLIRSFDVGHSFPITGIQYSVGALYTTSTDKTIRVHVPTDPPRTICTRRHDNGLNRVCAEGNLVVAGSGDLSLEVWRLQA

SEQ ID NO: 28315 - protein, 478 aa, Homo sapiens
  REGION 1..478: note = ENSP00000465387
MELPLGRCDDSRTWDDDSDPESETDPDAQAKAYVARVLSPPKSGLAFSRPSQLSTPAASPSASEPRAASRVSAVSEPGLLSLPPELLLEICSYLDARLVLHVLSRVCHALRDLVSDHVTWRLRALRRKNFDWPAACIALEQHLSRWAEDGRWVEYFCLAEGHVASVDSVLLLQGGSLCLSGSRDRNVNLWDLRQLGTESNQVLIKTLGTKRNSTHEGWVWSLAAQDHRVCSGSWDSTVKLWDMAADGQQFGEIKASSAVLCLSYLPDILVTGTYDKKVTIYDPRDRMETRDALMGWGGPSRGSDIPPHRPITHEAGPALLKHQQLHSRPVLTLLADDRHIISGSEDHTLVVVDRRANSVLQRLQLDSYLLCMSYQEPQLWAGDNQGLLHVFANRNGCFQLIRSFDVGHSFPITGIQYSVGALYTTSTDKTIRVHVPTDPPRTICTRRHDNGLNRVCAEGNLVVAGSGDLSLEVWRLQA

SEQ ID NO: 28316 - protein, 321 aa, Homo sapiens
  REGION 1..321: note = ENSP00000264072
MEEGQYSEIEELPRRRCCRRGTQIVLLGLVTAALWAGLLTLLLLWHWDTTQSLKQLEERAARNVSQVSKNLESHHGDQMAQKSQSTQISQELEELRAEQQRLKSQDLELSWNLNGLQADLSSFKSQELNERNEASDLLERLREEVTKLRMELQVSSGFVCNTCPEKWINFQRKCYYFGKGTKQWVHARYACDDMEGQLVSIHSPEEQDFLTKHASHTGSWIGLRNLDLKGEFIWVDGSHVDYSNWAPGEPTSRSQGEDCVMMRGSGRWNDAFCDRKLGAWVCDRLATCTPPASEGSAESMGPDSRPDPDGRLPTPSAPLHS

SEQ ID NO: 28317 - protein, 321 aa, Homo sapiens; identical to SEQ ID NO: 28316
  REGION 1..321: note = ENSP00000471974

SEQ ID NO: 28318 - protein, 159 aa, Homo sapiens
  REGION 1..159: note = ENSP00000472067
MEEGQYSEIEELPRRRCCRRGTQIVLLGLVTAALWAGLLTLLLLWHWDTTQSLKQLEERAARNVSQVSKNLESHHGDQMAQKSQSTQISQELEELRAEQQRLKSQELNERNEASDLLERLREEVTKLRMELQVSSGFVCNTCPEKWINFQRKCYYFGKG

SEQ ID NO: 28319 - protein, 320 aa, Homo sapiens
  REGION 1..320: note = ENSP00000353178
MNPPSQEIEELPRRRCCRRGTQIVLLGLVTAALWAGLLTLLLLWHWDTTQSLKQLEERAARNVSQVSKNLESHHGDQMAQKSQSTQISQELEELRAEQQRLKSQDLELSWNLNGLQADLSSFKSQELNERNEASDLLERLREEVTKLRMELQVSSGFVCNTCPEKWINFQRKCYYFGKGTKQWVHARYACDDMEGQLVSIHSPEEQDFLTKHASHTGSWIGLRNLDLKGEFIWVDGSHVDYSNWAPGEPTSRSQGEDCVMMRGSGRWNDAFCDRKLGAWVCDRLATCTPPASEGSAESMGPDSRPDPDGRLPTPSAPLHS

SEQ ID NO: 28320 - protein, 684 aa, Homo sapiens
  REGION 1..684: note = ENSP00000308978
MQKLASQYLKRDWPGVKADDRNDYRSMYPVWKSFLEGTMQVAQSRMNICENYKNFISEPARTVRSLKEQQLKRCVDQLTKIQTELQETVKDLAKGKKKYFETEQMAHAVREKADIEAKSKLSLFQSRISLQKASVKLKARRSECNSKATHARNDYLLTLAAANAHQDRYYQTDLVNIMKALDGNVYDHLKDYLIAFSRTELETCQAVQNTFQFLLENSSKVVRDYNLQLFLQENAVFHKPQPFQFQPCDSDTSRQLESETGTTEEHSLNKEARKWATRVAREHKNIVHQQRVLNDLECHGAAVSEQSRAELEQKIDEARENIRKAEIIKLKAEARLDLLKQIGVSVDTWLKSAMNQVMEELENERWARPPAVTSNGTLHSLNADTEREEGEEFEDNMDVFDDSSSSPSGTLRNYPLTCKVVYSYKASQPDELTIEEHEVLEVIEDGDMEDWVKARNKVGQVGYVPEKYLQFPTSNSLLSMLQSLAALDSRSHTSSNSTEAELVSGSLNGDASVCFVKALYDYEGQTDDELSFPEGAIIRILNKENQDDDGFWEGEFNGRIGVFPSVLVEELSASENGDTPWMREIQISPSPKPHASLPPLPLYDQPPSSPYPSPDKRSSLYFPRSPSANEKSLHAESPGFSQASRHTPETSYGKLRPVRAAPPPPTQNHRRPAEKIEDVEITLV

SEQ ID NO: 28321 - protein, 764 aa, Homo sapiens
  REGION 1..764: note = ENSP00000386987
MQPPPRKVKVTQELKNIQVEQMTKLQAKHQAECDLLEDMRTFSQKKAAIEREYAQGMQKLASQYLKRDWPGVKADDRNDYRSMYPVWKSFLEGTMQVAQSRMNICENYKNFISEPARTVRSLKEQQLKRCVDQLTKIQTELQETVKDLAKGKKKYFETEQMAHAVREKADIEAKSKLSLFQSRISLQKASVKLKARRSECNSKATHARNDYLLTLAAANAHQDRYYQTDLVNIMKALDGNVYDHLKDYLIAFSRTELETCQAVQNTFQFLLENSSKVVRDYNLQLFLQENAVFHKPQPFQFQPCDSDTSLKAAQLVDIELSPVSALRMTIAESRQLESETGTTEEHSLNKEARKWATRVAREHKNIVHQQRVLNDLECHGAAVSEQSRAELEQKIDEARENIRKAEIIKLKAEARLDLLKQIGVSVDTWLKSAMNQVMEELENERWARPPAVTSNGTLHSLNADTEREEGEEFEDNMDVFDDSSSSPSGTLRNYPLTCKVVYSYKASQPDELTIEEHEVLEVIEDGDMEDWVKARNKVGQVGYVPEKYLQFPTSNSLLSMLQSLAALDSRSHTSSNSTEAELVSGSLNGDASVCFVKALYDYEGQTDDELSFPEGAIIRILNKENQDDDGFWEGEFNGRIGVFPSVLVEELSASENGDTPWMREIQISPSPKPHASLPPLPLYDQPPSSPYPSPDKRSSLYFPRSPSANEKSLHAESPGFSQASRHTPETSYGKLRPVRAAPPPPTQNHRRPAEKIEDVEITLV

SEQ ID NO: 28322 - protein, 740 aa, Homo sapiens
  REGION 1..740: note = ENSP00000386722
MQPPPRKVKVTQELKNIQVEQMTKLQAKHQAECDLLEDMRTFSQKKAAIEREYAQGMQKLASQYLKRDWPGVKADDRNDYRSMYPVWKSFLEGTMQVAQSRMNICENYKNFISEPARTVRSLKEQQLKRCVDQLTKIQTELQETVKDLAKGKKKYFETEQMAHAVREKADIEAKSKLSLFQSRISLQKASVKLKARRSECNSKATHARNDYLLTLAAANAHQDRYYQTDLVNIMKALDGNVYDHLKDYLIAFSRTELETCQAVQNTFQFLLENSSKVVRDYNLQLFLQENAVFHKPQPFQFQPCDSDTSRQLESETGTTEEHSLNKEARKWATRVAREHKNIVHQQRVLNDLECHGAAVSEQSRAELEQKIDEARENIRKAEIIKLKAEARLDLLKQIGVSVDTWLKSAMNQVMEELENERWARPPAVTSNGTLHSLNADTEREEGEEFEDNMDVFDDSSSSPSGTLRNYPLTCKVVYSYKASQPDELTIEEHEVLEVIEDGDMEDWVKARNKVGQVGYVPEKYLQFPTSNSLLSMLQSLAALDSRSHTSSNSTEAELVSGSLNGDASVCFVKALYDYEGQTDDELSFPEGAIIRILNKENQDDDGFWEGEFNGRIGVFPSVLVEELSASENGDTPWMREIQISPSPKPHASLPPLPLYDQPPSSPYPSPDKRSSLYFPRSPSANEKSLHAESPGFSQASRHTPETSYGKLRPVRAAPPPPTQNHRRPAEKIEDVEITLV

SEQ ID NO: 28323 - protein, 101 aa, Homo sapiens
  REGION 1..101: note = ENSP00000386903
MPVISPSPKPHASLPPLPLYDQPPSSPYPSPDKRSSLYFPRSPSANEKSLHAESPGFSQASRHTPETSYGKLRPVRAAPPPPTQNHRRPAEKIEDVEITLV

SEQ ID NO: 28324 - protein, 604 aa, Homo sapiens
  REGION 1..604: note = ENSP00000402972
MAHAVREKADIEAKSKLSLFQSRISLQKASVKLKARRSECNSKATHARNDYLLTLAAANAHQDRYYQTDLVNIMKALDGNVYDHLKDYLIAFSRTELETCQAVQNTFQFLLENSSKVVRDYNLQLFLQENAVFHKPQPFQFQPCDSDTSLKAAQLVDIELSPVSALRMTIAESRQLESETGTTEEHSLNKEARKWATRVAREHKNIVHQQRVLNDLECHGAAVSEQSRAELEQKIDEARENIRKAEIIKLKAEARLDLLKQIGVSVDTWLKSAMNQVMEELENERWARPPAVTSNGTLHSLNADTEREEGEEFEDNMDVFDDSSSSPSGTLRNYPLTCKVVYSYKASQPDELTIEEHEVLEVIEDGDMEDWVKARNKVGQVGYVPEKYLQFPTSNSLLSMLQSLAALDSRSHTSSNSTEAELVSGSLNGDASVCFVKALYDYEGQTDDELSFPEGAIIRILNKENQDDDGFWEGEFNGRIGVFPSVLVEELSASENGDTPWMREIQISPSPKPHASLPPLPLYDQPPSSPYPSPDKRSSLYFPRSPSANEKSLHAESPGFSQASRHTPETSYGKLRPVRAAPPPPTQNHRRPAEKIEDVEITLV

SEQ ID NO: 28325 - protein, 515 aa, Homo sapiens
  REGION 1..515: note = ENSP00000386314
MQKLASQYLKRDWPGVKADDRNDYRSMYPVWKSFLEGTMQVAQSRMNICENYKNFISEPARTVRSLKEQQLKRCVDQLTKIQTELQETVKDLAKGKKKYFETEQMAHAVREKADIEAKSKLSLFQSRISLQKASVKLKARRSECNSKATHARNDYLLTLAAANAHQDRYYQTDLVNIMKALDGNVYDHLKDYLIAFSRTELETCQAVQNTFQFLLENSSKVVRDYNLQLFLQENAVFHKPQPFQFQPCDSDTSRQLESETGTTEEHSLNKEARKWATRVAREHKNIVHQQRVLNDLECHGAAVSEQSRAELEQKIDEARENIRKAEIIKLKAEARLDLLKQIGVSVDTWLKSAMNQVMEELENERWARPPAVTSNGTLHSLNADTEREEGEEFEDNMDVFDDSSSSPSGTLRNYPLTCKVVYSYKASQPDELTIEEHEVLEVIEDGDMEDWVKARNKVGQVGYVPEKYLQFPTSNSLLSMLQSLAALDSRSHTSSNSTEAELVSGSLNGDASGKD

SEQ ID NO: 28326 - protein, 117 aa, Homo sapiens
  REGION 1..117: note = ENSP00000406420
  VARIANT 1: note = Any amino acid
XVLNDLECHGAAVSEQSRAELEQKIDEARENIRKAEIIKLKAEARLDLLKQIGVSVDTWLKSAMNQVMEELENERWARPPAVTSNGTLHSIPKEKKAKSLKITWMFSMTAVPALLAP

SEQ ID NO: 28327 - protein, 85 aa, Homo sapiens
  REGION 1..85: note = ENSP00000441616
  VARIANT 1: note = Any amino acid
XEQMAHAVREKADIEAKSKLSLFQSRISLQKASVKLKARRSECNSKATHARNDYLLTLAAANAHQDRYYQTDLVNIMKVRQTFVI

SEQ ID NO: 28328 - protein, 140 aa, Homo sapiens
  REGION 1..140: note = ENSP00000408706
MTKLQAKHQAECDLLEDMRTFSQKKAAIEREYAQGMQKLASQYLKRDWPGVKADDRNDYRSMYPVWKSFLEGTMQVAQSRMNICENYKNFISEPARTVRSLKEQQLKRCVDQLTKIQTELQETVKDLAKGKKKYFETEQM

SEQ ID NO: 28329 - protein, 150 aa, Homo sapiens
  REGION 1..150: note = ENSP00000431852
MEFVKCLGHPEEFYNLVRFRIGGKRKVMPKMDQDSLSSSLKTCYKYLNQTSRSFAAVIQALDGEMRNAVCIFYLVLRALDTLEDDMTISVEKKVPLLHNFHSFLYQPDWRFMESKEKDRQVLEDFPTISLEFRNLAEKYQTVIADICRRM

SEQ ID NO: 28330 - protein, 417 aa, Homo sapiens
  REGION 1..417: note = ENSP00000220584
MEFVKCLGHPEEFYNLVRFRIGGKRKVMPKMDQDSLSSSLKTCYKYLNQTSRSFAAVIQALDGEMRNAVCIFYLVLRALDTLEDDMTISVEKKVPLLHNFHSFLYQPDWRFMESKEKDRQVLEDFPTISLEFRNLAEKYQTVIADICRRMGIGMAEFLDKHVTSEQEWDKYCHYVAGLVGIGLSRLFSASEFEDPLVGEDTERANSMGLFLQKTNIIRDYLEDQQGGREFWPQEVWSRYVKKLGDFAKPENIDLAVQCLNELITNALHHIPDVITYLSRLRNQSVFNFCAIPQVMAIATLAACYNNQQVFKGAVKIRKGQAVTLMMDATNMPAVKAIIYQYMEEIYHRIPDSDPSSSKTRQIISTIRTQNLPNCQLISRSHYSPIYLSFVMLLAALSWQYLTTLSQVTEDYVQTGEH

SEQ ID NO: 28331 - protein, 374 aa, Homo sapiens
  REGION 1..374: note = ENSP00000390367
MEFVKCLGHPEEFYNLVRFRIGGKRKVMPKMDQDSLSSSLKTCYKYLNQTSRSFAAVIQALDGEMRNAVCIFYLVLRALDTLEDDMTISVEKKVPLLHNFHSFLYQPDWRFMESKEKDRQVLEDFPTYCHYVAGLVGIGLSRLFSASEFEDPLVGEDTERANSMGLFLQKTNIIRDYLEDQQGGREFWPQEVWSRYVKKLGDFAKPENIDLAVQCLNELITNALHHIPDVITYLSRLRNQSVFNFCAIPQVMAIATLAACYNNQQVFKGAVKIRKGQAVTLMMDATNMPAVKAIIYQYMEEIYHRIPDSDPSSSKTRQIISTIRTQNLPNCQLISRSHYSPIYLSFVMLLAALSWQYLTTLSQVTEDYVQTGEH

SEQ ID NO: 28332 - protein, 67 aa, Homo sapiens
  REGION 1..67: note = ENSP00000433985
MEFVKCLGHPEEFYNLVRFRIGGKRKVMPKMDQTGGSWRARRRIARCWRTSQRSPLSLEIWLRNTKQ

SEQ ID NO: 28333 - protein, 45 aa, Homo sapiens
  REGION 1..45: note = ENSP00000432551
MEFVKCLGHPEEFYNLVRFRIGGKRKVMPKMDQITSHEGRFWNEV

SEQ ID NO: 28334 - protein, 51 aa, Homo sapiens
  REGION 1..51: note = ENSP00000434770
MEFVKCLGHPEEFYNLVRFRIGGKRKVMPKMDQQRSVHILSGSPSSGHTGR

SEQ ID NO: 28335 - protein, 410 aa, Homo sapiens
  REGION 1..410: note = ENSP00000434714
MEFVKCLGHPEEFYNLVRFRIGGKRKDSLSSSLKTCYKYLNQTSRSFAAVIQALDGEMRNAVCIFYLVLRALDTLEDDMTISVEKKVPLLHNFHSFLYQPDWRFMESKEKDRQVLEDFPTISLEFRNLAEKYQTVIADICRRMGIGMAEFLDKHVTSEQEWDKYCHYVAGLVGIGLSRLFSASEFEDPLVGEDTERANSMGLFLQKTNIIRDYLEDQQGGREFWPQEVWSRYVKKLGDFAKPENIDLAVQCLNELITNALHHIPDVITYLSRLRNQSVFNFCAIPQVMAIATLAACYNNQQVFKGAVKIRKGQAVTLMMDATNMPAVKAIIYQYMEEIYHRIPDSDPSSSKTRQIISTIRTQNLPNCQLISRSHYSPIYLSFVMLLAALSWQYLTTLSQVTEDYVQTGEH

SEQ ID NO: 28336 - protein, 353 aa, Homo sapiens
  REGION 1..353: note = ENSP00000431749
MRNAVCIFYLVLRALDTLEDDMTISVEKKVPLLHNFHSFLYQPDWRFMESKEKDRQVLEDFPTISLEFRNLAEKYQTVIADICRRMGIGMAEFLDKHVTSEQEWDKYCHYVAGLVGIGLSRLFSASEFEDPLVGEDTERANSMGLFLQKTNIIRDYLEDQQGGREFWPQEVWSRYVKKLGDFAKPENIDLAVQCLNELITNALHHIPDVITYLSRLRNQSVFNFCAIPQVMAIATLAACYNNQQVFKGAVKIRKGQAVTLMMDATNMPAVKAIIYQYMEEIYHRIPDSDPSSSKTRQIISTIRTQNLPNCQLISRSHYSPIYLSFVMLLAALSWQYLTTLSQVTEDYVQTGEH

SEQ ID NO: 28337 - protein, 353 aa, Homo sapiens; identical to SEQ ID NO: 28336
  REGION 1..353: note = ENSP00000432331

SEQ ID NO: 28338 - protein, 476 aa, Homo sapiens
  REGION 1..476: note = ENSP00000491537
MAAAACGTKAMALFKRTLVLSPAAAPRGPGAGTAPRGCCLPPAAWPCKDWPRGEGGRLWSRLPQSHSHSHSHSHSHSCSSTSPTAVCVVCPQDSLSSSLKTCYKYLNQTSRSFAAVIQALDGEMRNAVCIFYLVLRALDTLEDDMTISVEKKVPLLHNFHSFLYQPDWRFMESKEKDRQVLEDFPTISLEFRNLAEKYQTVIADICRRMGIGMAEFLDKHVTSEQEWDKYCHYVAGLVGIGLSRLFSASEFEDPLVGEDTERANSMGLFLQKTNIIRDYLEDQQGGREFWPQEVWSRYVKKLGDFAKPENIDLAVQCLNELITNALHHIPDVITYLSRLRNQSVFNFCAIPQVMAIATLAACYNNQQVFKGAVKIRKGQAVTLMMDATNMPAVKAIIYQYMEEIYHRIPDSDPSSSKTRQIISTIRTQNLPNCQLISRSHYSPIYLSFVMLLAALSWQYLTTLSQVTEDYVQTGEH

SEQ ID NO: 28339 - protein, 113 aa, Homo sapiens
  REGION 1..113: note = ENSP00000435900
MRNAVCIFYLVLRALDTLEDDMTISVEKKVPLLHNFHSFLYQPDWRFMESKEKDRQVLEDFPTISLEFRNLAEKYQTVIADICRRMGIGMAEFLDKHVTSEQEWDKPQSLKTP

SEQ ID NO: 28340 - protein, 332 aa, Homo sapiens
  REGION 1..332: note = ENSP00000431649
MTISVEKKVPLLHNFHSFLYQPDWRFMESKEKDRQVLEDFPTISLEFRNLAEKYQTVIADICRRMGIGMAEFLDKHVTSEQEWDKYCHYVAGLVGIGLSRLFSASEFEDPLVGEDTERANSMGLFLQKTNIIRDYLEDQQGGREFWPQEVWSRYVKKLGDFAKPENIDLAVQCLNELITNALHHIPDVITYLSRLRNQSVFNFCAIPQVMAIATLAACYNNQQVFKGAVKIRKGQAVTLMMDATNMPAVKAIIYQYMEEIYHRIPDSDPSSSKTRQIISTIRTQNLPNCQLISRSHYSPIYLSFVMLLAALSWQYLTTLSQVTEDYVQTGEH

SEQ ID NO: 28341 - protein, 332 aa, Homo sapiens; identical to SEQ ID NO: 28340
  REGION 1..332: note = ENSP00000436069

SEQ ID NO: 28342 - protein, 353 aa, Homo sapiens; identical to SEQ ID NO: 28336
  REGION 1..353: note = ENSP00000485229

SEQ ID NO: 28343 - protein, 353 aa, Homo sapiens; identical to SEQ ID NO: 28336
  REGION 1..353: note = ENSP00000444248

SEQ ID NO: 28344 - protein, 417 aa, Homo sapiens; identical to SEQ ID NO: 28330
  REGION 1..417: note = ENSP00000480828

SEQ ID NO: 28345 - protein, 417 aa, Homo sapiens; identical to SEQ ID NO: 28330
  REGION 1..417: note = ENSP00000481481

SEQ ID NO: 28346 - protein, 353 aa, Homo sapiens; identical to SEQ ID NO: 28336
  REGION 1..353: note = ENSP00000484122

SEQ ID NO: 28347 - protein, 617 aa, Homo sapiens
  REGION 1..617: note = ENSP00000274457
MDLKTAVFNAARDGKLRLLTKLLASKSKEEVSSLISEKTNGATPLLMAARYGHLDMVEFLLEQCSASIEVGGSVNFDGETIEGAPPLWAASAAGHLKVVQSLLNHGASVNNTTLTNSTPLRAACFDGHLEIVKYLVEHKADLEVSNRHGHTCLMISCYKGHKEIAQYLLEKGADVNRKSVKGNTALHDCAESGSLDIMKMLLMYCAKMEKDGYGMTPLLSASVTGHTNIVDFLTHHAQTSKTERINALELLGATFVDKKRDLLGALKYWKKAMNMRYSDRTNIISKPVPQTLIMAYDYAKEVNSAEELEGLIADPDEMRMQALLIRERILGPSHPDTSYYIRYRGAVYADSGNFKRCINLWKYALDMQQSNLDPLSPMTASSLLSFAELFSFMLQDRAKGLLGTTVTFDDLMGILCKSVLEIERAIKQTQCPADPLQLNKALSIILHLICLLEKVPCTLEQDHFKKQTIYRFLKLHPRGKNNFSPLHLAVDKNTTCVGRYPVCKFPSLQVTAILIECGADVNVRDSDDNSPLHIAALNNHPDIMNLLIKSGAHFDATNLHKQTASDLLDEKEIAKNLIQPINHTTLQCLAARVIVNHRIYYKGHIPEKLETFVSLHR

SEQ ID NO: 28348 - protein, 677 aa, Homo sapiens
  REGION 1..677: note = ENSP00000217289
MLSSTDFTFASWELVVRVDHPNEEQQKDVTLRVSGDLHVGGVMLKLVEQINISQDWSDFALWWEQKHCWLLKTHWTLDKYGVQADAKLLFTPQHKMLRLRLPNLKMVRLRVSFSAVVFKAVSDICKILNIRRSEELSLLKPSGDYFKKKKKKDKNNKEPIIEDILNLESSPTASGSSVSPGLYSKTMTPIYDPINGTPASSTMTWFSDSPLTEQNCSILAFSQPPQSPEALADMYQPRSLVDKAKLNAGWLDSSRSLMEQGIQEDEQLLLRFKYYSFFDLNPKYDAVRINQLYEQARWAILLEEIDCTEEEMLIFAALQYHISKLSLSAETQDFAGESEVDEIEAALSNLEVTLEGGKADSLLEDITDIPKLADNLKLFRPKKLLPKAFKQYWFIFKDTSIAYFKNKELEQGEPLEKLNLRGCEVVPDVNVAGRKFGIKLLIPVADGMNEMYLRCDHENQYAQWMAACMLASKGKTMADSSYQPEVLNILSFLRMKNRNSASQVASSLENMDMNPECFVSPRCAKRHKSKQLAARILEAHQNVAQMPLVEAKLRFIQAWQSLPEFGLTYYLVRFKGSKKDDILGVSYNRLIKIDAATGIPVTTWRFTNIKQWNVNWETRQVVIEFDQNVFTAFTCLSADCKIVHEYIGGYIFLSTRSKDQNETLDEDLFHKLTGGQD

SEQ ID NO: 28349 - protein, 146 aa, Homo sapiens
  REGION 1..146: note = ENSP00000368121
MLSSTDFTFASWELVVRVDHPNEEQQKDVTLRVSGDLHVGGVMLKLVEQINISQDWSDFALWWEQKHCWLLKTHWTLDKYGVQADAKLLFTPQHKMLRLRLPNLKMVRLRVSFSAVVFKAVSDICKILNIRRSEELSLLKPSGDYF

SEQ ID NO: 28350 - protein, 420 aa, Homo sapiens
  REGION 1..420: note = ENSP00000441063
MEQGIQEDEQLLLRFKYYSFFDLNPKYDAVRINQLYEQARWAILLEEIDCTEEEMLIFAALQYHISKLSLSAETQDFAGESEVDEIEAALSNLEVTLEGGKADSLLEDITDIPKLADNLKLFRPKKLLPKAFKQYWFIFKDTSIAYFKNKELEQGEPLEKLNLRGCEVVPDVNVAGRKFGIKLLIPVADGMNEMYLRCDHENQYAQWMAACMLASKGKTMADSSYQPEVLNILSFLRMKNRNSASQVASSLENMDMNPECFVSPRCAKRHKSKQLAARILEAHQNVAQMPLVEAKLRFIQAWQSLPEFGLTYYLVRFKGSKKDDILGVSYNRLIKIDAATGIPVTTWRFTNIKQWNVNWETRQVVIEFDQNVFTAFTCLSADCKIVHEYIGGYIFLSTRSKDQNETLDEDLFHKLTGGQD

SEQ ID NO: 28351 - protein, 459 aa, Homo sapiens
  REGION 1..459: note = ENSP00000418589
MASSASLETMVPPACPRAGASPATSKTLAFSIERIMAKTSEPRAPFEPRPGALEADGSQGKKLLNLCSPLPCMIPLQPLGYEVPSKTLLSYSELWKSSLRAGGGGGGGGGGGGGGGGAPVCGASGLCKTNCGVCCKAELGLAPSALPAGRVIKPQVINQAVGLPASGSLYYFNYLDSTAYPPSELLSGHLFPSGLLNAQAPAALAAHPKLFLLENAKLAGLAADKFPHPAPYPHKERLPAPLEQVLKENSALTAERGGVKGHSKLPGGSADGKPKNFTCEVCGKVFNAHYNLTRHMPVHTGARPFVCKVCGKGFRQASTLCRHKIIHTQEKPHKCNQCGKAFNRSSTLNTHIRIHAGYKPFVCEFCGKGFHQKGNYKNHKLTHSGEKQYKCTICNKAFHQVYNLTFHMHTHNDKKPFTCATCGKGFCRNFDLKKHVRKLHDSVGPAAPSAKDLTRTVQS

SEQ ID NO: 28352 - protein, 459 aa, Homo sapiens; identical to SEQ ID NO: 28351
  REGION 1..459: note = ENSP00000283268

SEQ ID NO: 28353 - protein, 459 aa, Homo sapiens; identical to SEQ ID NO: 28351
  REGION 1..459: note = ENSP00000418804

SEQ ID NO: 28354 - protein, 725 aa, Homo sapiens
  REGION 1..725: note = ENSP00000364631
MESGRGSSTPPGPIAALGMPDTGPGSSSLGKLQALPVGPRAHCGDPVSLAAAGDGSPDIGPTGELSGSLKIPNRDSGIDSPSSSVAGENFPCEEGLEAGPSPTVLGAHAEMALDSQVPKVTPQEEADSDVGEEPDSENTPQKADKDAGLAQHSGPQKLLHIAQELLHTEETYVKRLHLLDQVFCTRLTDAGIPPEVIMGIFSNISSIHRFHGQFLLPELKTRITEEWDTNPRLGDILQKLAPFLKMYGEYVKNFDRAVGLVSTWTQRSPLFKDVVHSIQKQEVCGNLTLQHHMLEPVQRVPRYELLLKDYLKRLPQDAPDRKDAERSLELISTAANHSNAAIRKVEKMHKLLEVYEQLGGEEDIVNPANELIKEGQIQKLSAKNGTPQDRHLFLFNSMILYCVPKLRLMGQKFSVREKMDISGLQVQDIVKPNTAHTFIITGRKRSLELQTRTEEEKKEWIQIIQATIEKHKQNSETFKAFGGAFSQDEDPSLSPDMPITSTSPVEPVVTTEGSSGAAGLEPRKLSSKTRRDKEKQSCKSCGETFNSITKRRHHCKLCGAVICGKCSEFKAENSRQSRVCRDCFLTQPVAPESTEKTPTADPQPSLLCGPLRLSESGETWSEVWAAIPMSDPQVLHLQGGSQDGRLPRTIPLPSCKLSVPDPEERLDSGHVWKLQWAKQSWYLSASSAELQQQWLETLSTAAHGDTAQDSPGALQLQVPMGAAAP

SEQ ID NO: 28355 - protein, 634 aa, Homo sapiens
  REGION 1..634: note = ENSP00000432310
MESGRGSSTPPGPIAALGMPDTGPGSSSLGKLQALPVGPRAHCGDPVSLAAAGDGSPDIGPTGELSGSLKIPNRDSGIDSPSSSVAGENFPCEEGLEAGPSPTVLGAHAEMALDSQVPKVTPQEEADSDVGEEPDSENTPQKADKDAGLAQHSGPQKLLHIAQELLHTEETYVKRLHLLDQVFCTRLTDAGIPPEVIMGIFSNISSIHRFHGQFLLPELKTRITEEWDTNPRLGDILQKLAPFLKMYGEYVKNFDRAVGLVSTWTQRSPLFKDVVHSIQKQEVCGNLTLQHHMLEPVQRVPRYELLLKDYLKRLPQDAPDRKDAERSLELISTAANHSNAAIRKVEKMHKLLEVYEQLGGEEDIVNPANELIKEGQIQKLSAKNGTPQDRHLFLFNSMILYCVPKLRLMGQKFSVREKMDISGLQVQDIVKPNTAHTFIITGRKRSLELQTRTEEEKKEWIQIIQATIEKHKQNSETFKAFGGAFSQDEDPSLSPDMPITSTSPVEPVVTTEGSSGAAGLEPRKLSSKTRRDKEKQSCKSCGETFNSITKRRHHCKLCGAVICGKCSEFKAENSRQSRVCRDCFLTQPVAPESTEVGAPSSCSPPGGAAEPPDTCSCAPAAPAASAFGVSLGPG

SEQ ID NO: 28356 - protein, 724 aa, Homo sapiens
  REGION 1..724: note = ENSP00000413833
MESGRGSSTPPGPIAALGMPDTGPGSSSLGKLQALPVGPRAHCGDPVSLAAAGDGSPDIGPTGELSGSLKIPNRDSGIDSPSSSVAGENFPCEEGLEAGPSPTVLGAHAEMALDSQVPKVTPQEEADSDVGEEPDSENTPQKADKDAGLAQHSGPQKLLHIAQELLHTEETYVKRLHLLDQVFCTRLTDAGIPPEVIMGIFSNISSIHRFHGQFLLPELKTRITEEWDTNPRLGDILQKLAPFLKMYGEYVKNFDRAVGLVSTWTQRSPLFKDVVHSIQKQEVCGNLTLQHHMLEPVQRVPRYELLLKDYLKRLPQDAPDRKDAERSLELISTAANHSNAAIRKVEKMHKLLEVYEQLGGEEDIVNPANELIKEGQIQKLSAKNGTPQDRHLFLFNSMILYCVPKLRLMGQKFSVREKMDISGLQVQDIVKPNTAHTFIITGRKRSLELQTRTEEEKKEWIQIIQATIEKHKQNSETFKAFGGAFSQDEDPSLSPDMPITSTSPVEPVVTTEGSSGAAGLEPRKLSSKTRRDKEKQSCKSCGETFNSITKRRHHCKLCGAVICGKCSEFKAENSRQSRVCRDCFLTQPVAPESTETPTADPQPSLLCGPLRLSESGETWSEVWAAIPMSDPQVLHLQGGSQDGRLPRTIPLPSCKLSVPDPEERLDSGHVWKLQWAKQSWYLSASSAELQQQWLETLSTAAHGDTAQDSPGALQLQVPMGAAAP

SEQ ID NO: 28357 - protein, 725 aa, Homo sapiens; identical to SEQ ID NO: 28354
  REGION 1..725: note = ENSP00000336914

SEQ ID NO: 28358 - protein, 903 aa, Homo sapiens
  REGION 1..903: note = ENSP00000449273
MSDEGGSNFRRVAIRRKSNPSYLPPGVPRPWSRPASHLGRVGTAAFKGQVPSGATGSSTCPKIALVPPCSTSSTTTLVGENVSEEEAQGINGNRPAKHSAASPKPQVPPKPLHLQNSPSSNIHQTPRHKALPSAKPRMEEIKPASASCVSKEKPSKVSDLISRFEGGSSLSNYSDLKKESAVNLNAPRTPGRHGLTTTPQQKLLSQHLPQRQGNDTDKTQGAQTCVANGVMAAQNQMECEEEKAATLSSDTSIQASEPLLDTHIVNGERDETATAPASPTTDSCDGNASDSSYRTPGIGPVLPLEERGAETETKVQERENGESPLELEQLDQHHEMKETNEQKLHKIANELLLTERAYVNRLDLLDQVFYCKLLEEANRGSFPAEMVNKIFSNISSINAFHSKFLLPELEKRMQEWETTPRIGDILQKLAPFLKMYGEYVKGFDNAMELVKNMTERIPQFKSVVEEIQKQKICGSLTLQHHMLEPVQRIPRYEMLLKDYLRKLPPDSLDWNDAKKSLEIISTAASHSNSAIRKMENLKKLLEIYEMLGEEEDIVNPSNELIKEGQILKLAARNTSAQERYLFLFNNMLLYCVPKFSLVGSKFTVRTRVGIDGMKIVETQNEEYPHTFQVSGKERTLELQASSAQDKEEWIKALQETIDAFHQRHETFRNAIAKDNDIHSEVSTAELGKRAPRWIRDNEVTMCMKCKEPFNALTRRRHHCRACGYVVCWKCSDYKAQLEYDGGKLSKVCKDCYQIISGFTDSEEKKRKGILEIESAEVSGNSVVCSFLQYMEKSKPWQKAWCVIPKQDPLVLYMYGAPQDVRAQATIPLLGYVVDEMPRSADLPHSFKLTQSKSVHSFAADSEELKQKWLKVILLAVTGETPGGPNEHPATLDDHPEPKKKSEC

SEQ ID NO: 28359 - protein, 851 aa, Homo sapiens
  REGION 1..851: note = ENSP00000431323
MGGCSSTCPKIALVPPCSTSSTTTLVGENVSEEEAQGINGNRPAKHSAASPKPQVPPKPLHLQNSPSSNIHQTPRHKALPSAKPRMEEIKPASASCVSKEKPSKVSDLISRFEGGSSLSNYSDLKKESAVNLNAPRTPGRHGLTTTPQQKLLSQHLPQRQGNDTDKTQGAQTCVANGVMAAQNQMECEEEKAATLSSDTSIQASEPLLDTHIVNGERDETATAPASPTTDSCDGNASDSSYRTPGIGPVLPLEERGAETETKVQERENGESPLELEQLDQHHEMKETNEQKLHKIANELLLTERAYVNRLDLLDQVFYCKLLEEANRGSFPAEMVNKIFSNISSINAFHSKFLLPELEKRMQEWETTPRIGDILQKLAPFLKMYGEYVKGFDNAMELVKNMTERIPQFKSVVEEIQKQKICGSLTLQHHMLEPVQRIPRYEMLLKDYLRKLPPDSLDWNDAKKSLEIISTAASHSNSAIRKMENLKKLLEIYEMLGEEEDIVNPSNELIKEGQILKLAARNTSAQERYLFLFNNMLLYCVPKFSLVGSKFTVRTRVGIDGMKIVETQNEEYPHTFQVSGKERTLELQASSAQDKEEWIKALQETIDAFHQRHETFRNAIAKDNDIHSEVSTAELGKRAPRWIRDNEVTMCMKCKEPFNALTRRRHHCRACGYVVCWKCSDYKAQLEYDGGKLSKVCKDCYQIISGFTDSEEKKRKGILEIESAEVSGNSVVCSFLQYMEKSKPWQKAWCVIPKQDPLVLYMYGAPQDVRAQATIPLLGYVVDEMPRSADLPHSFKLTQSKSVHSFAADSEELKQKWLKVILLAVTGETPGGPNEHPATLDDHPEPKKKSEC

SEQ ID NO: 28360 - protein, 207 aa, Homo sapiens
  REGION 1..207: note = ENSP00000434356
MEEIKPASASCVSKEKPSKVSDLISRFEGGSSLSNYSDLKKESAVNLNAPRTPGRHGLTTTPQQKLLSQHLPQRQGNDTDKTQGAQTCVANGVMAAQNQMECEEEKAATLSSDTSIQASEPLLDTHIVNGERDETATAPASPTTDSCDGNASDSSYRTPGIGPVLPLEERGAETETKVQERENGESPLELEQLDQHHEMKVEHETSS

SEQ ID NO: 28361 - protein, 235 aa, Homo sapiens
  REGION 1..235: note = ENSP00000437109
MEEIKPASASCVSKEKPSKVSDLISRFEGGSSLSNYSDLKKESAVNLNAPRTPGRHGLTTTPQQKLLSQHLPQRQGNDTDKTQGAQTCVANGVMAAQNQMECEEEKAATLSSDTSIQASEPLLDTHIVNGERDETATAPASPTTDSCDGNASDSSYRTPGIGPVLPLEERGAETETKVQERENGESPLELEQLDQHHEMKETNEQKLHKIANELLLTERAYVNRLDLLDQKIEWR

SEQ ID NO: 28362 - protein, 40 aa, Homo sapiens
  REGION 1..40: note = ENSP00000449614
MEEIKPASASCVSKEKPSKVSDLISRFEGGRRLMSKNFTK

SEQ ID NO: 28363 - protein, 766 aa, Homo sapiens
  REGION 1..766: note = ENSP00000394487
MEEIKPASASCVSKEKPSKVSDLISRFEGGSSLSNYSDLKKESAVNLNAPRTPGRHGLTTTPQQKLLSQHLPQRQGNDTDKTQGAQTCVANGVMAAQNQMECEEEKAATLSSDTSIQASEPLLDTHIVNGERDETATAPASPTTDSCDGNASDSSYRTPGIGPVLPLEERGAETETKVQERENGESPLELEQLDQHHEMKETNEQKLHKIANELLLTERAYVNRLDLLDQVFYCKLLEEANRGSFPAEMVNKIFSNISSINAFHSKFLLPELEKRMQEWETTPRIGDILQKLAPFLKMYGEYVKGFDNAMELVKNMTERIPQFKSVVEEIQKQKICGSLTLQHHMLEPVQRIPRYEMLLKDYLRKLPPDSLDWNDAKKSLEIISTAASHSNSAIRKMENLKKLLEIYEMLGEEEDIVNPSNELIKEGQILKLAARNTSAQERYLFLFNNMLLYCVPKFSLVGSKFTVRTRVGIDGMKIVETQNEEYPHTFQVSGKERTLELQASSAQDKEEWIKALQETIDAFHQRHETFRNAIAKDNDIHSEVSTAELGKRAPRWIRDNEVTMCMKCKEPFNALTRRRHHCRACGYVVCWKCSDYKAQLEYDGGKLSKVCKDCYQIISGFTDSEEKKRKGILEIESAEVSGNSVVCSFLQYMEKSKPWQKAWCVIPKQDPLVLYMYGAPQDVRAQATIPLLGYVVDEMPRSADLPHSFKLTQSKSVHSFAADSEELKQKWLKVILLAVTGETPGGPNEHPATLDDHPEPKKKSEC

SEQ ID NO: 28364 - protein, 235 aa, Homo sapiens; identical to SEQ ID NO: 28361
  REGION 1..235: note = ENSP00000379089

SEQ ID NO: 28365 - protein, 673 aa, Homo sapiens
  REGION 1..673: note = ENSP00000446695
MAAQNQMECEEEKAATLSSDTSIQASEPLLDTHIVNGERDETATAPASPTTDSCDGNASDSSYRTPGIGPVLPLEERGAETETKVQERENGESPLELEQLDQHHEMKETNEQKLHKIANELLLTERAYVNRLDLLDQVFYCKLLEEANRGSFPAEMVNKIFSNISSINAFHSKFLLPELEKRMQEWETTPRIGDILQKLAPFLKMYGEYVKGFDNAMELVKNMTERIPQFKSVVEEIQKQKICGSLTLQHHMLEPVQRIPRYEMLLKDYLRKLPPDSLDWNDAKKSLEIISTAASHSNSAIRKMENLKKLLEIYEMLGEEEDIVNPSNELIKEGQILKLAARNTSAQERYLFLFNNMLLYCVPKFSLVGSKFTVRTRVGIDGMKIVETQNEEYPHTFQVSGKERTLELQASSAQDKEEWIKALQETIDAFHQRHETFRNAIAKDNDIHSEVSTAELGKRAPRWIRDNEVTMCMKCKEPFNALTRRRHHCRACGYVVCWKCSDYKAQLEYDGGKLSKVCKDCYQIISGFTDSEEKKRKGILEIESAEVSGNSVVCSFLQYMEKSKPWQKAWCVIPKQDPLVLYMYGAPQDVRAQATIPLLGYVVDEMPRSADLPHSFKLTQSKSVHSFAADSEELKQKWLKVILLAVTGETPGGPNEHPATLDDHPEPKKKSEC

SEQ ID NO: 28366 - protein, 30 aa, Homo sapiens
  REGION 1..30: note = ENSP00000462623
MEEIKPASASCVSKEKPSKVSDLISRFEGG

SEQ ID NO: 28367 - protein, 878 aa, Homo sapiens
  REGION 1..878: note = ENSP00000433666
MNFKRVKPNIFLLNQSRLIISICEIMSTDQGSSTCPKIALVPPCSTSSTTTLVGENVSEEEAQGINGNRPAKHSAASPKPQVPPKPLHLQNSPSSNIHQTPRHKALPSAKPRMEEIKPASASCVSKEKPSKVSDLISRFEGGSSLSNYSDLKKESAVNLNAPRTPGRHGLTTTPQQKLLSQHLPQRQGNDTDKTQGAQTCVANGVMAAQNQMECEEEKAATLSSDTSIQASEPLLDTHIVNGERDETATAPASPTTDSCDGNASDSSYRTPGIGPVLPLEERGAETETKVQERENGESPLELEQLDQHHEMKETNEQKLHKIANELLLTERAYVNRLDLLDQVFYCKLLEEANRGSFPAEMVNKIFSNISSINAFHSKFLLPELEKRMQEWETTPRIGDILQKLAPFLKMYGEYVKGFDNAMELVKNMTERIPQFKSVVEEIQKQKICGSLTLQHHMLEPVQRIPRYEMLLKDYLRKLPPDSLDWNDAKKSLEIISTAASHSNSAIRKMENLKKLLEIYEMLGEEEDIVNPSNELIKEGQILKLAARNTSAQERYLFLFNNMLLYCVPKFSLVGSKFTVRTRVGIDGMKIVETQNEEYPHTFQVSGKERTLELQASSAQDKEEWIKALQETIDAFHQRHETFRNAIAKDNDIHSEVSTAELGKRAPRWIRDNEVTMCMKCKEPFNALTRRRHHCRACGYVVCWKCSDYKAQLEYDGGKLSKVCKDCYQIISGFTDSEEKKRKGILEIESAEVSGNSVVCSFLQYMEKSKPWQKAWCVIPKQDPLVLYMYGAPQDVRAQATIPLLGYVVDEMPRSADLPHSFKLTQSKSVHSFAADSEELKQKWLKVILLAVTGETPGGPNEHPATLDDHPEPKKKSEC

SEQ ID NO: 28368 - protein, 65 aa, Homo sapiens
  REGION 1..65: note = ENSP00000434062
  VARIANT 1: note = Any amino acid
XAETETKVQERENGESPLELEQLDQHHEMKETNEQKLHKIANELLLTERAYVNRLDLLDQKIEWR

SEQ ID NO: 28369 - protein, 1430 aa, Homo sapiens
  REGION 1..1430: note = ENSP00000344446
MTSAAEIKKPPVAPKPKFVVANNKPAPPPIAPKPDIVISSVPQSTKKMKPAIAPKPKVLKTSPVREIGQSPSRKIMLNLEGHKQELAESTDNFNCKYEGNQSNDYISPMCSCSSECIHKLGHRENLCVKQLVLEPLEMNENLENSKIDETLTIKTRSKCDLYGEKAKNQGGVVLKASVLEEELKDALIHQMPPFISAQKHRPTDSPEMNGGCNSNGQFRIEFADLSPSPSSFEKVPDHHSCHLQLPSDECEHFETCQDDSEKSNNCFQSSELEALENGKRSTLISSDGVSKKSEVKDLGPLEIHLVPYTPKFPTPKPRKTRTARLLRQKCVDTPSESTEEPGNSDSSSSCLTENSLKINKISVLHQNVLCKQEQVDKMKLGNKSELNMESNSDAQDLVNSQKAMCNETTSFEKMAPSFDKDSNLSSDSTTVDGSSMSLAVDEGTGFIRCTVSMSLPKQLKLTCNEHLQSGRNLGVSAPQMQKESVIKEENSLRIVPKKPQRHSLPATGVLKKAASEELLEKSSYPSSEEKSSEKSLERNHLQHLCAQNRGVSSSFDMPKRASEKPVWKLPHPILPFSGNPEFLKSVTVSSNSEPSTALTKPRAKSLSAMDVEKCTKPCKDSTKKNSFKKLLSMKLSICFMKSDFQKFWSKSSQLGDTTTGHLSSGEQKGIESDWQGLLVGEEKRSKPIKAYSTENYSLESQKKRKKSRGQTSAANGLRAESLDDQMLSRESSSQAPYKSVTSLCAPEYENIRHYEEIPEYENLPFIMAIRKTQELEWQNSSSMEDADANVYEVEEPYEAPDGQLQLGPRHQHSSSGASQEEQNDLGLGDLPSDEEEIINSSDEDDVSSESSKGEPDPLEDKQDEDNGMKSKVHHIAKEIMSSEKVFVDVLKLLHIDFRDAVAHASRQLGKPVIEDRILNQILYYLPQLYELNRDLLKELEERMLHWTEQQRIADIFVKKGPYLKMYSTYIKEFDKNIALLDEQCKKNPGFAAVVREFEMSPRCANLALKHYLLKPVQRIPQYRLLLTDYLKNLIEDAGDYRDTQDALAVVIEVANHANDTMKQGDNFQKLMQIQYSLNGHHEIVQPGRVFLKEGILMKLSRKVMQPRMFFLFNDALLYTTPVQSGMYKLNNMLSLAGMKVRKPTQEAYQNELKIESVERSFILSASSATERDEWLEAISRAIEEYAKKRITFCPSRSLDEADSENKEEVSPLGSKAPIWIPDTRATMCMICTSEFTLTWRRHHCRACGKIVCQACSSNKYGLDYLKNQPARVCEHCFQELQKLDHQHSPRIGSPGNHKSPSSALSSVLHSIPSGRKQKKIPAALKEVSANTEDSSMSGYLYRSKGNKKPWKHFWFVIKNKVLYTYAASEDVAALESQPLLGFTVIQVKDENSESKVFQLLHKNMLFYVFKAEDAHSAQKWIEAFQEGTIL

SEQ ID NO: 28370 - protein, 133 aa, Homo sapiens
  REGION 1..133: note = ENSP00000448350
  VARIANT 1: note = Any amino acid
XNKYGLDYLKNQPARVCEHCFQELQKLDHQHSPRIGSPGNHKSPSSALSSVLHSIPSGRKQKKIPAALKEVSANTEDSSMSGYLYRSKGNKKPWKHFWFVIKNKVLYTYAASEVDRSISGRHNIVAVLVSSLL

SEQ ID NO: 28371 - protein, 59 aa, Homo sapiens
  REGION 1..59: note = ENSP00000408291
MTSAAVQEHPRRNRMILVLVTFPLMRRKSSTVLMKMMSALSQVKESLTHWKINRMKIME

SEQ ID NO: 28372 - protein, 1374 aa, Homo sapiens
  REGION 1..1374: note = ENSP00000450342
MTSAAEIKKPPVAPKPKFVVANNKPAPPPIAPKPDIVISSVPQSTKKMKPAIAPKPKVLKTSPVREIGQSPSRKIMLNLEGHKQELAESTDNFNCKYEGNQSNDYISPMCSCSSECIHKLGHRENLCVKQLVLEPLEMNENLENSKIDETLTIKTRSKCDLYGEKAKNQGGVVLKASVLEEELKDALIHQMPPFISAQKHRPTDSPEMNGGCNSNGQFRIEFADLSPSPSSFEKVPDHHSCHLQLPSDECEHFETCQDDSEKSNNCFQSSELEALENGKRSTLISSDGVSKKSEVKDLGPLEIHLVPYTPKFPTPKPRKTRTARLLRQKCVDTPSESTEEPGNSDSSSSCLTENSLKINKISVLHQNVLCKQEQVDKMKLGNKSELNMESNSDAQDLVNSQKAMCNETTSFEKMAPSFDKDSNLSSDSTTVDGSSMSLAVDEGTGFIRCTVSMSLPKQLKLTCNEHLQSGRNLGVSAPQMQKESVIKEENSLRIVPKKPQRHSLPATGVLKKAASEELLEKSSYPSSEEKSSEKSLERNHLQHLCAQNRGVSSSFDMPKRASEKPVWKLPHPILPFSGNPEFLKSVTVSSNSEPSTALTKPRAKSLSAMDVEKCTKPCKDSTKKNSFKKLLSMKLSICFMKSDFQKFWSKSSQLGDTTTGHLSSGEQKGIESDWQGLLVGEEKRSKPIKAYSTENYSLESQKKRKKSRGQTSAANGLRAESLDDQMLSRESSSQAPYKSVTSLCAPEYENIRHYEEIPEYENLPFIMAIRKTQELEWQNSSSMEDADANVYEVEEPYEAPDGQLQLGPRHQHSSSGASQEEQNDLGLGDLPSDEEEIINSSDEDDVSSESSKGEPDPLEDKQDEDNGMKSKVHHIAKEIMSSEKVFVDVLKLLHIDFRDAVAHASRQLGKPVIEDRILNQILYYLPQLYELNRDLLKELEERMLHWTEQQRIADIFVKKGPYLKMYSTYIKEFDKNIALLDEQCKKNPGFAAVVREFEMSPRCANLALKHYLLKPVQRIPQYRLLLTDYLKNLIEDAGDYRDTQDALAVVIEVANHANDTMKQGDNFQKLMQIQYSLNGHHEIVQPGRVFLKEGILMKLSRKVMQPRMFFLFNDALLYTTPVQSGMYKLNNMLSLAGMKVRKPTQEAYQNELKIESVERSFILSASSATERDEWLEAISRAIEEYAKKRITFCPSRSLDEADSENKEEVSPLGSKAPIWIPDTRATMCMICTSEFTLTWRRHHCRACGKIVCQACSSNKYGLDYLKNQPARVCEHCFQELQKLDHQHSPRIGSPGNHKSPSSALSSVLHSIPSGRKQKKIPAALKEVSANTEDSSMSGYLYRSKGNKKPWKHFWFVIKNKVLYTYAASEVRSEI

SEQ ID NO: 28373 - protein, 279 aa, Homo sapiens
  REGION 1..279: note = ENSP00000450240
MLQLRPQVILNCLRRSRPCSLCQDYLKNLIEDAGDYRDTQDALAVVIEVANHANDTMKQGDNFQKLMQIQYSLNGHHEIVQPGRVFLKEGILMKLSRKVMQPRMFFLFNDALLYTTPVQSGMYKLNNMLSLAGMKVRKPTQEAYQNELKIESVERSFILSASSATERDEWLEAISRAIEEYAKKRITFCPSRSLDEADSENKEEVSPLGSKAPIWIPDTRATMCMICTSEFTLTWRRHHCRACGKIVCQACSSNKYGLDYLKNQPARVCEHCFQELQKL

SEQ ID NO: 28374 - protein, 1206 aa, Homo sapiens
  REGION 1..1206: note = ENSP00000449005
MTSAAEIKKPPVAPKPKFVVANNKPAPPPIAPKPDIVISSVPQSTKKMKPAIAPKPKVLKTSPVREIGQSPSRKIMLNLEGHKQELAESTDNFNCKYEGNQSNDYISPMCSCSSECIHKLGHRENLCVKQLVLEPLEMNENLENSKIDETLTIKTRSKCDLYGEKAKNQGGVVLKASVLEEELKDALIHQMPPFISAQKHRPTDSPEMNGGCNSNGQFRIEFADLSPSPSSFEKVPDHHSCHLQLPSDECEHFETCQDDSEKSNNCFQSSELEALENGKRSTLISSDGVSKKSEVKDLGPLEIHLVPYTPKFPTPKPRKTRTARLLRQKCVDTPSESTEEPGNSDSSSSCLTENSLKINKISVLHQNVLCKQEQVDKMKLGNKSELNMESNSDAQDLVNSQKAMCNETTSFEKMAPSFDKDSNLSSDSTTVDGSSMSLAVDEGTGFIRCTVSMSLPKQLKLTCNEHLQSGRNLGVSAPQMQKESVIKEENSLRIVPKKPQRHSLPATGVLKKAASEELLEKSSYPSSEEKSSEKSLERNHLQHLCAQNRGVSSSFDMPKRASEKPVWKLPHPILPFSGNPEFLKSVTVSSNSEPSTALTKPRAKSLSAMDVEKCTKPCKDSTKKNSFKKLLSMKLSICFMKSDFQKFWSKSSQLGDTTTGHLSSGEQKGIESDWQGLLVGEEKRSKPIKAYSTENYSLESQKKRKKSRGQTSAANGLRAESLDDQMLSRESSSQAPYKSVTSLCAPEYENIRHYEEIPEYENLPFIMAIRKTQELEWQNSSSMEDADANVYEVEEPYEAPDGQLQLGPRHQHSSSGASQEEQNDLGLGDLPSDEEEIINSSDEDDVSSESSKGEPDPLEDKQDEDNGMKSKVHHIAKEIMSSEKVFVDVLKLLHIDFRDAVAHASRQLGKPVIEDRILNQILYYLPQLYELNRDLLKELEERMLHWTEQQRIADIFVKKGPYLKMYSTYIKEFDKNIALLDEQCKKNPGFAAVVREFEMSPRCANLALKHYLLKPVQRIPQYRLLLTDYLKNLIEDAGDYRDTQDALAVVIEVANHANDTMKQGDNFQKLMQIQYSLNGHHEIVQPGRVFLKEGILMKLSRKVMQPRMFFLFNDALLYTTPVQSGMYKLNNMLSLAGMKVRKPTQEAYQNELKIESVERSFILSASSATERDEWLEAISRAIEEYAKKRITFCPSRSLDEADSENK

SEQ ID NO: 28375 - protein, 245 aa, Homo sapiens
  REGION 1..245: note = ENSP00000322390
MAAAIASSLIRQKRQAREREKSNACKCVSSPSKGKTSCDKNKLNVFSRVKLFGSKKRRRRRPEPQLKGIVTKLYSRQGYHLQLQADGTIDGTKDEDSTYTLFNLIPVGLRVVAIQGVQTKLYLAMNSEGYLYTSELFTPECKFKESVFENYYVTYSSMIYRQQQSGRGWYLGLNKEGEIMKGNHVKKNKPAAHFLPKPLKVAMYKEPSLHDLTEFSRSGSGTPTKSRSVSGVLNGGKSMSHNEST

SEQ ID NO: 28376 - protein, 192 aa, Homo sapiens
  REGION 1..192: note = ENSP00000303391
MALLRKSYSEPQLKGIVTKLYSRQGYHLQLQADGTIDGTKDEDSTYTLFNLIPVGLRVVAIQGVQTKLYLAMNSEGYLYTSELFTPECKFKESVFENYYVTYSSMIYRQQQSGRGWYLGLNKEGEIMKGNHVKKNKPAAHFLPKPLKVAMYKEPSLHDLTEFSRSGSGTPTKSRSVSGVLNGGKSMSHNEST

SEQ ID NO: 28377 - protein, 226 aa, Homo sapiens
  REGION 1..226: note = ENSP00000409276
MLRQDSIQSAELKKKESPFRAKCHEIFCCPLKQVHHKENTEPEEPQLKGIVTKLYSRQGYHLQLQADGTIDGTKDEDSTYTLFNLIPVGLRVVAIQGVQTKLYLAMNSEGYLYTSELFTPECKFKESVFENYYVTYSSMIYRQQQSGRGWYLGLNKEGEIMKGNHVKKNKPAAHFLPKPLKVAMYKEPSLHDLTEFSRSGSGTPTKSRSVSGVLNGGKSMSHNEST

SEQ ID NO: 28378 - protein, 199 aa, Homo sapiens
  REGION 1..199: note = ENSP00000487411
MSGKVTKPKEEKDASKEPQLKGIVTKLYSRQGYHLQLQADGTIDGTKDEDSTYTLFNLIPVGLRVVAIQGVQTKLYLAMNSEGYLYTSELFTPECKFKESVFENYYVTYSSMIYRQQQSGRGWYLGLNKEGEIMKGNHVKKNKPAAHFLPKPLKVAMYKEPSLHDLTEFSRSGSGTPTKSRSVSGVLNGGKSMSHNEST

SEQ ID NO: 28379 - protein, 255 aa, Homo sapiens
  REGION 1..255: note = ENSP00000396198
MSGKVTKPKEEKDASKVLDDAPPGTQEYIMLRQDSIQSAELKKKESPFRAKCHEIFCCPLKQVHHKENTEPEEPQLKGIVTKLYSRQGYHLQLQADGTIDGTKDEDSTYTLFNLIPVGLRVVAIQGVQTKLYLAMNSEGYLYTSELFTPECKFKESVFENYYVTYSSMIYRQQQSGRGWYLGLNKEGEIMKGNHVKKNKPAAHFLPKPLKVAMYKEPSLHDLTEFSRSGSGTPTKSRSVSGVLNGGKSMSHNEST

SEQ ID NO: 28380 - protein, 206 aa, Homo sapiens
  REGION 1..206: note = ENSP00000406916
MRTSMKKVGMHHLSSSGGSYYLILDDAPPGTQEYIMLRQDSIQSAELKKKESPFRAKCHEIFCCPLKQVHHKENTEPEEPQLKGIVTKLYSRQGYHLQLQADGTIDGTKDEDSTYTLFNLIPVGLRVVAIQGVQTKLYLAMNSEGYLYTSELFTPECKFKESVFENYYVTYSSMIYRQQQSGRGWYLGLNKEGEIMKGNHVKKNKP

SEQ ID NO: 28381 - protein, 98 aa, Homo sapiens
  REGION 1..98: note = ENSP00000411999
MSGKVTKPKEEKDASKVLDDAPPGTQEYIMLRQDSIQSAELKKKESPFRAKCHEIFCCPLKQVHHKENTEPEEPQLKGIVTKLYSRQGYHLQLQADGT

SEQ ID NO: 28382 - protein, 43 aa, Homo sapiens
  REGION 1..43: note = ENSP00000388688
MLRQDSIQSAELKKKESPFRAKCHEIFCCPLKQVHHKENTEPE

SEQ ID NO: 28383 - protein, 239 aa, Homo sapiens
  REGION 1..239: note = ENSP00000334122
MGLIWLLLLSLLEPGWPAAGPGARLRRDAGGRGGVYEHLGGAPRRRKLYCATKYHLQLHPSGRVNGSLENSAYSILEITAVEVGIVAIRGLFSGRYLAMNKRGRLYASEHYSAECEFVERIHELGYNTYASRLYRTVSSTPGARRQPSAERLWYVSVNGKGRPRRGFKTRRTQKSSLFLPRVLDHRDHEMVRQLQSGLPRPPGKGVQPRRRRQKQSPDNLEPSHVQASRLGSQLEASAH

SEQ ID NO: 28384 - protein, 268 aa, Homo sapiens
  REGION 1..268: note = ENSP00000311697
MSLSFLLLLFFSHLILSAWAHGEKRLAPKGQPGPAATDRNPRGSSSRQSSSSAMSSSSASSSPAASLGSQGSGLEQSSFQWSPSGRRTGSLYCRVGIGFHLQIYPDGKVNGSHEANMLSVLEIFAVSQGIVGIRGVFSNKFLAMSKKGKLHASAKFTDDCKFRERFQENSYNTYASAIHRTEKTGREWYVALNKRGKAKRGCSPRVKPQHISTHFLPRFKQSEQPELSFTVTVPEKKKPPSPIKPKIPLSAPRKNTNSVKYRLKFRFG

SEQ ID NO: 28385 - protein, 123 aa, Homo sapiens
  REGION 1..123: note = ENSP00000398353
MSLSFLLLLFFSHLILSAWAHGEKRLAPKGQPGPAATDRNPRGSSSRQSSSSAMSSSSASSSPAASLGSQGSGLEQSSFQWSPSGRRTGSLYCRVGIGFHLQIYPDGKVNGSHEANMLSQVHR

SEQ ID NO: 28386 - protein, 119 aa, Homo sapiens
  REGION 1..119: note = ENSP00000423903
NPRGSSSRQSSSSAMSSSSASSSPAASLGSQGSGLEQSSFQWSPSGRRTGSLYCRVGIGFHLQIYPDGKVNGSHEANMLSVLEIFAVSQGIVGIRGVFSNKFLAMSKKGKLHASNTLET

SEQ ID NO: 28387 - protein, 258 aa, Homo sapiens
  REGION 1..258: note = ENSP00000339067
MTPPKLRASLSPSLLLLLSGCLLAAARREKGAASNVAEPVPGPTGGSSGRFLSPEQHACSWQLLLPAPEAAAGSELALRCQSPDGARHQCAYRGHPERCAAYAARRAHFWKQVLGGLRKKRRPCHDPAPLQARLCAGKKGHGAELRLVPRASPPARPTVAGFAGESKPRARNRGRTRERASGPAAGTPPPQSAPPKENPSERKTNEGKRKAALVPNEERPMGTGPDPDGLDGNAELTETYCAEKWHSLCNFFVNFWNG

SEQ ID NO: 28388 - protein, 820 aa, Homo sapiens
  REGION 1..820: note = ENSP00000380280
MWSWKCLLFWAVLVTATLCTARPSPTLPEQAQPWGAPVEVESFLVHPGDLLQLRCRLRDDVQSINWLRDGVQLAESNRTRITGEEVEVQDSVPADSGLYACVTSSPSGSDTTYFSVNVSDALPSSEDDDDDDDSSSEEKETDNTKPNPVAPYWTSPEKMEKKLHAVPAAKTVKFKCPSSGTPNPTLRWLKNGKEFKPDHRIGGYKVRYATWSIIMDSVVPSDKGNYTCIVENEYGSINHTYQLDVVERSPHRPILQAGLPANKTVALGSNVEFMCKVYSDPQPHIQWLKHIEVNGSKIGPDNLPYVQILKTAGVNTTDKEMEVLHLRNVSFEDAGEYTCLAGNSIGLSHHSAWLTVLEALEERPAVMTSPLYLEIIIYCTGAFLISCMVGSVIVYKMKSGTKKSDFHSQMAVHKLAKSIPLRRQVTVSADSSASMNSGVLLVRPSRLSSSGTPMLAGVSEYELPEDPRWELPRDRLVLGKPLGEGCFGQVVLAEAIGLDKDKPNRVTKVAVKMLKSDATEKDLSDLISEMEMMKMIGKHKNIINLLGACTQDGPLYVIVEYASKGNLREYLQARRPPGLEYCYNPSHNPEEQLSSKDLVSCAYQVARGMEYLASKKCIHRDLAARNVLVTEDNVMKIADFGLARDIHHIDYYKKTTNGRLPVKWMAPEALFDRIYTHQSDVWSFGVLLWEIFTLGGSPYPGVPVEELFKLLKEGHRMDKPSNCTNELYMMMRDCWHAVPSQRPTFKQLVEDLDRIVALTSNQEYLDLSMPLDQYSPSFPDTRSSTCSSGEDSVFSHEPLPEEPCLPRHPAQLANGGLKRR

SEQ ID NO: 28389 - protein, 820 aa, Homo sapiens
  REGION 1..820: note = ENSP00000432972
MWSWKCLLFWAVLVTATLCTARPSPTLPEQAQPWGAPVEVESFLVHPGDLLQLRCRLRDDVQSINWLRDGVQLAESNRTRITGEEVEVQDSVPADSGLYACVTSSPSGSDTTYFSVNVSDALPSSEDDDDDDDSSSEEKETDNTKPNRMPVAPYWTSPEKMEKKLHAVPAAKTVKFKCPSSGTPNPTLRWLKNGKEFKPDHRIGGYKVRYATWSIIMDSVVPSDKGNYTCIVENEYGSINHTYQLDVVERSPHRPILQAGLPANKTVALGSNVEFMCKVYSDPQPHIQWLKHIEVNGSKIGPDNLPYVQILKTAGVNTTDKEMEVLHLRNVSFEDAGEYTCLAGNSIGLSHHSAWLTVLEALEERPAVMTSPLYLEIIIYCTGAFLISCMVGSVIVYKMKSGTKKSDFHSQMAVHKLAKSIPLRRQVSADSSASMNSGVLLVRPSRLSSSGTPMLAGVSEYELPEDPRWELPRDRLVLGKPLGEGCFGQVVLAEAIGLDKDKPNRVTKVAVKMLKSDATEKDLSDLISEMEMMKMIGKHKNIINLLGACTQDGPLYVIVEYASKGNLREYLQARRPPGLEYCYNPSHNPEEQLSSKDLVSCAYQVARGMEYLASKKCIHRDLAARNVLVTEDNVMKIADFGLARDIHHIDYYKKTTNGRLPVKWMAPEALFDRIYTHQSDVWSFGVLLWEIFTLGGSPYPGVPVEELFKLLKEGHRMDKPSNCTNELYMMMRDCWHAVPSQRPTFKQLVEDLDRIVALTSNQEYLDLSMPLDQYSPSFPDTRSSTCSSGEDSVFSHEPLPEEPCLPRHPAQLANGGLKRR

SEQ ID NO: 28390 - protein, 820 aa, Homo sapiens; identical to SEQ ID NO: 28388
  REGION 1..820: note = ENSP00000380302

SEQ ID NO: 28391 - protein, 733 aa, Homo sapiens
  REGION 1..733: note = ENSP00000348537
MWSWKCLLFWAVLVTATLCTARPSPTLPEQDALPSSEDDDDDDDSSSEEKETDNTKPNRMPVAPYWTSPEKMEKKLHAVPAAKTVKFKCPSSGTPNPTLRWLKNGKEFKPDHRIGGYKVRYATWSIIMDSVVPSDKGNYTCIVENEYGSINHTYQLDVVERSPHRPILQAGLPANKTVALGSNVEFMCKVYSDPQPHIQWLKHIEVNGSKIGPDNLPYVQILKTAGVNTTDKEMEVLHLRNVSFEDAGEYTCLAGNSIGLSHHSAWLTVLEALEERPAVMTSPLYLEIIIYCTGAFLISCMVGSVIVYKMKSGTKKSDFHSQMAVHKLAKSIPLRRQVTVSADSSASMNSGVLLVRPSRLSSSGTPMLAGVSEYELPEDPRWELPRDRLVLGKPLGEGCFGQVVLAEAIGLDKDKPNRVTKVAVKMLKSDATEKDLSDLISEMEMMKMIGKHKNIINLLGACTQDGPLYVIVEYASKGNLREYLQARRPPGLEYCYNPSHNPEEQLSSKDLVSCAYQVARGMEYLASKKCIHRDLAARNVLVTEDNVMKIADFGLARDIHHIDYYKKTTNGRLPVKWMAPEALFDRIYTHQSDVWSFGVLLWEIFTLGGSPYPGVPVEELFKLLKEGHRMDKPSNCTNELYMMMRDCWHAVPSQRPTFKQLVEDLDRIVALTSNQEYLDLSMPLDQYSPSFPDTRSSTCSSGEDSVFSHEPLPEEPCLPRHPAQLANGGLKRR

SEQ ID NO: 28392 - protein, 812 aa, Homo sapiens
  REGION 1..812: note = ENSP00000337247
MAAVTRDFGEMLLHSGRVLPAEAQPWGAPVEVESFLVHPGDLLQLRCRLRDDVQSINWLRDGVQLAESNRTRITGEEVEVQDSVPADSGLYACVTSSPSGSDTTYFSVNVSDALPSSEDDDDDDDSSSEEKETDNTKPNRMPVAPYWTSPEKMEKKLHAVPAAKTVKFKCPSSGTPNPTLRWLKNGKEFKPDHRIGGYKVRYATWSIIMDSVVPSDKGNYTCIVENEYGSINHTYQLDVVERSPHRPILQAGLPANKTVALGSNVEFMCKVYSDPQPHIQWLKHIEVNGSKIGPDNLPYVQILKTAGVNTTDKEMEVLHLRNVSFEDAGEYTCLAGNSIGLSHHSAWLTVLEALEERPAVMTSPLYLEIIIYCTGAFLISCMVGSVIVYKMKSGTKKSDFHSQMAVHKLAKSIPLRRQVSADSSASMNSGVLLVRPSRLSSSGTPMLAGVSEYELPEDPRWELPRDRLVLGKPLGEGCFGQVVLAEAIGLDKDKPNRVTKVAVKMLKSDATEKDLSDLISEMEMMKMIGKHKNIINLLGACTQDGPLYVIVEYASKGNLREYLQARRPPGLEYCYNPSHNPEEQLSSKDLVSCAYQVARGMEYLASKKCIHRDLAARNVLVTEDNVMKIADFGLARDIHHIDYYKKTTNGRLPVKWMAPEALFDRIYTHQSDVWSFGVLLWEIFTLGGSPYPGVPVEELFKLLKEGHRMDKPSNCTNELYMMMRDCWHAVPSQRPTFKQLVEDLDRIVALTSNQEYLDLSMPLDQYSPSFPDTRSSTCSSGEDSVFSHEPLPEEPCLPRHPAQLANGGLKRR

SEQ ID NO: 28393 - protein, 731 aa, Homo sapiens
  REGION 1..731: note = ENSP00000327229
MWSWKCLLFWAVLVTATLCTARPSPTLPEQDALPSSEDDDDDDDSSSEEKETDNTKPNPVAPYWTSPEKMEKKLHAVPAAKTVKFKCPSSGTPNPTLRWLKNGKEFKPDHRIGGYKVRYATWSIIMDSVVPSDKGNYTCIVENEYGSINHTYQLDVVERSPHRPILQAGLPANKTVALGSNVEFMCKVYSDPQPHIQWLKHIEVNGSKIGPDNLPYVQILKTAGVNTTDKEMEVLHLRNVSFEDAGEYTCLAGNSIGLSHHSAWLTVLEALEERPAVMTSPLYLEIIIYCTGAFLISCMVGSVIVYKMKSGTKKSDFHSQMAVHKLAKSIPLRRQVTVSADSSASMNSGVLLVRPSRLSSSGTPMLAGVSEYELPEDPRWELPRDRLVLGKPLGEGCFGQVVLAEAIGLDKDKPNRVTKVAVKMLKSDATEKDLSDLISEMEMMKMIGKHKNIINLLGACTQDGPLYVIVEYASKGNLREYLQARRPPGLEYCYNPSHNPEEQLSSKDLVSCAYQVARGMEYLASKKCIHRDLAARNVLVTEDNVMKIADFGLARDIHHIDYYKKTTNGRLPVKWMAPEALFDRIYTHQSDVWSFGVLLWEIFTLGGSPYPGVPVEELFKLLKEGHRMDKPSNCTNELYMMMRDCWHAVPSQRPTFKQLVEDLDRIVALTSNQEYLDLSMPLDQYSPSFPDTRSSTCSSGEDSVFSHEPLPEEPCLPRHPAQLANGGLKRR

SEQ ID NO: 28394 - protein, 733 aa, Homo sapiens
  REGION 1..733: note = ENSP00000380292
MWSWKCLLFWAVLVTATLCTARPSPTLPEQDALPSSEDDDDDDDSSSEEKETDNTKPNPVAPYWTSPEKMEKKLHAVPAAKTVKFKCPSSGTPNPTLRWLKNGKEFKPDHRIGGYKVRYATWSIIMDSVVPSDKGNYTCIVENEYGSINHTYQLDVVERSPHRPILQAGLPANKTVALGSNVEFMCKVYSDPQPHIQWLKHIEVNGSKIGPDNLPYVQILKHSGINSSDAEVLTLFNVTEAQSGEYVCKVSNYIGEANQSAWLTVTRPVAKALEERPAVMTSPLYLEIIIYCTGAFLISCMVGSVIVYKMKSGTKKSDFHSQMAVHKLAKSIPLRRQVTVSADSSASMNSGVLLVRPSRLSSSGTPMLAGVSEYELPEDPRWELPRDRLVLGKPLGEGCFGQVVLAEAIGLDKDKPNRVTKVAVKMLKSDATEKDLSDLISEMEMMKMIGKHKNIINLLGACTQDGPLYVIVEYASKGNLREYLQARRPPGLEYCYNPSHNPEEQLSSKDLVSCAYQVARGMEYLASKKCIHRDLAARNVLVTEDNVMKIADFGLARDIHHIDYYKKTTNGRLPVKWMAPEALFDRIYTHQSDVWSFGVLLWEIFTLGGSPYPGVPVEELFKLLKEGHRMDKPSNCTNELYMMMRDCWHAVPSQRPTFKQLVEDLDRIVALTSNQEYLDLSMPLDQYSPSFPDTRSSTCSSGEDSVFSHEPLPEEPCLPRHPAQLANGGLKRR

SEQ ID NO: 28395 - protein, 134 aa, Homo sapiens
  REGION 1..134: note = ENSP00000434800
VSCAYQVARGMEYLASKKCIHRDLAARNVLVTEDNVMKIADFGLARDIHHIDYYKKTTNGRLPVKWMAPEALFDRIYTHQSDVWSFGVLLWEIFTLGGSPYPGVPVEELFKLLKEGHRMDKPSNCTNELPAAGT

SEQ ID NO: 28396 - protein, 820 aa, Homo sapiens; identical to SEQ ID NO: 28388
  REGION 1..820: note = ENSP00000380297

SEQ ID NO: 28397 - protein, 61 aa, Homo sapiens
  REGION 1..61: note = ENSP00000435254
MWSWKCLLFWAVLVTATLCTARPSPTLPEQACPDLQEAKWCSASFHSITPLPFGLGTRLSD

SEQ ID NO: 28398 - protein, 139 aa, Homo sapiens
  REGION 1..139: note = ENSP00000434869
MEKKLHAVPAAKTVKFKCPSSGTPNPTLRWLKNGKEFKPDHRIGGYKVRYATWSIIMDSVVPSDKGNYTCIVENEYGSINHTYQLDVVERSPHRPILQAGLPANKTVALGSNVEFMCKVYSDPQPHIQWLKHIEVNGSK

SEQ ID NO: 28399 - protein, 298 aa, Homo sapiens
  REGION 1..298: note = ENSP00000434712
MWSWKCLLFWAVLVTATLCTARPSPTLPEQAQPWGAPVEVESFLVHPGDLLQLRCRLRDDVQSINWLRDGVQLAESNRTRITGEEVEVQDSVPADSGLYACVTSSPSGSDTTYFSVNVSDALPSSEDDDDDDDSSSEEKETDNTKPNRMPVAPYWTSPEKMEKKLHAVPAAKTVKFKCPSSGTPNPTLRWLKNGKEFKPDHRIGGYKVRYATWSIIMDSVVPSDKGNYTCIVENEYGSINHTYQLDVVERSPHRPILQAGLPANKTVALGSNVEFMCKVYSDPQPHIQWLKHIEVNGS

SEQ ID NO: 28400 - protein, 145 aa, Homo sapiens
  REGION 1..145: note = ENSP00000433569
MWSWKCLLFWAVLVTATLCTARPSPTLPEQDALPSSEDDDDDDDSSSEEKETDNTKPNPVAPYWTSPEKMEKKLHAVPAAKTVKFKCPSSGTPNPTLRWLKNGKEFKPDHRIGGYKVRYATWSIIMDSVVPSDKGNYTCIVENEY

SEQ ID NO: 28401 - protein, 142 aa, Homo sapiens
  REGION 1..142: note = ENSP00000435283
MWSWKCLLFWAVLVTATLCTARPSPTLPEQDALPSSEDDDDDDDSSSEEKETDNTKPNRMPVAPYWTSPEKMEKKLHAVPAAKTVKFKCPSSGTPNPTLRWLKNGKEFKPDHRIGGYKVRYATWSIIMDSVVPSDKGNYTCI

SEQ ID NO: 28402 - protein, 150 aa, Homo sapiens
  REGION 1..150: note = ENSP00000433163
MWSWKCLLFWAVLVTATLCTARPSPTLPEQAQPWGAPVEVESFLVHPGDLLQLRCRLRDDVQSINWLRDGVQLAESNRTRITGEEVEVQDSVPADSGLYACVTSSPSGSDTTYFSVNVSACPDLQEAKWCSASFHSITPLPFGLGTRLSD

SEQ ID NO: 28403 - protein, 85 aa, Homo sapiens
  REGION 1..85: note = ENSP00000434473
MWSWKCLLFWAVLVTATLCTARPSPTLPEQDALPSSEDDDDDDDSSSEEKETDNTKPNPVAPYWTSPEKMEKKLHAVPAAKTVKF

SEQ ID NO: 28404 - protein, 54 aa, Homo sapiens
  REGION 1..54: note = ENSP00000392645
MWSWKCLLFWAVLVTATLCTARPSPTLPEQDALPSSEDDDDDDDSSSEEKETDN

SEQ ID NO: 28405 - protein, 106 aa, Homo sapiens
  REGION 1..106: note = ENSP00000400708
MWSWKCLLFWAVLVTATLCTARPSPTLPEQAQPWGAPVEVESFLVHPGDLLQLRCRLRDDVQSINWLRDGVQLAESNRTRITGEEVEVQDSVPADSGLYACVTSSP

SEQ ID NO: 28406 - skipped

SEQ ID NO: 28407 - protein, 853 aa, Homo sapiens
  REGION 1..853: note = ENSP00000393312
MEARVSLKRRIELTVEYPWRCGALSPTSNCRTGMWSWKCLLFWAVLVTATLCTARPSPTLPEQAQPWGAPVEVESFLVHPGDLLQLRCRLRDDVQSINWLRDGVQLAESNRTRITGEEVEVQDSVPADSGLYACVTSSPSGSDTTYFSVNVSDALPSSEDDDDDDDSSSEEKETDNTKPNPVAPYWTSPEKMEKKLHAVPAAKTVKFKCPSSGTPNPTLRWLKNGKEFKPDHRIGGYKVRYATWSIIMDSVVPSDKGNYTCIVENEYGSINHTYQLDVVERSPHRPILQAGLPANKTVALGSNVEFMCKVYSDPQPHIQWLKHIEVNGSKIGPDNLPYVQILKTAGVNTTDKEMEVLHLRNVSFEDAGEYTCLAGNSIGLSHHSAWLTVLEALEERPAVMTSPLYLEIIIYCTGAFLISCMVGSVIVYKMKSGTKKSDFHSQMAVHKLAKSIPLRRQVTVSADSSASMNSGVLLVRPSRLSSSGTPMLAGVSEYELPEDPRWELPRDRLVLGKPLGEGCFGQVVLAEAIGLDKDKPNRVTKVAVKMLKSDATEKDLSDLISEMEMMKMIGKHKNIINLLGACTQDGPLYVIVEYASKGNLREYLQARRPPGLEYCYNPSHNPEEQLSSKDLVSCAYQVARGMEYLASKKCIHRDLAARNVLVTEDNVMKIADFGLARDIHHIDYYKKTTNGRLPVKWMAPEALFDRIYTHQSDVWSFGVLLWEIFTLGGSPYPGVPVEELFKLLKEGHRMDKPSNCTNELYMMMRDCWHAVPSQRPTFKQLVEDLDRIVALTSNQEYLDLSMPLDQYSPSFPDTRSSTCSSGEDSVFSHEPLPEEPCLPRHPAQLANGGLKRR

SEQ ID NO: 28408 - protein, 822 aa, Homo sapiens [sequence omitted]

SEQ ID NO: 28409 - protein, 228 aa, Homo sapiens
  REGION 1..228: note = ENSP00000484553
MWSWKCLLFWAVLVTATLCTARPSPTLPEQDALPSSEDDDDDDDSSSEEKETDNTKPNPVAPYWTSPEKMEKKLHAVPAAKTVKFKCPSSGTPNPTLRWLKNGKEFKPDHRIGGYKVRYATWSIIMDSVVPSDKGNYTCIVENEYGSINHTYQLDVVERSPHRPILQAGLPANKTVALGSNVEFMCKVYSDPQPHIQWLKHIEVNGSKIGPDNLPYVQILKPWKRGRQ

SEQ ID NO: 28410 - protein, 367 aa, Homo sapiens
  REGION 1..367: note = ENSP00000340636
MWSWKCLLFWAVLVTATLCTARPSPTLPEQAQPWGAPVEVESFLVHPGDLLQLRCRLRDDVQSINWLRDGVQLAESNRTRITGEEVEVQDSVPADSGLYACVTSSPSGSDTTYFSVNVSVPIDALPSSEDDDDDDDSSSEEKETDNTKPNPVAPYWTSPEKMEKKLHAVPAAKTVKFKCPSSGTPNPTLRWLKNGKEFKPDHRIGGYKVRYATWSIIMDSVVPSDKGNYTCIVENEYGSINHTYQLDVVERSPHRPILQAGLPANKTVALGSNVEFMCKVYSDPQPHIQWLKHIEVNGSKIGPDNLPYVQILKHSGINSSDAEVLTLFNVTEAQSGEYVCKVSNYIGEANQSAWLTVTRPVAKDCWS

SEQ ID NO: 28411 - protein, 821 aa, Homo sapiens
  REGION 1..821: note = ENSP00000351276
MVSWGRFICLVVVTMATLSLARPSFSLVEDTTLEPEEPPTKYQISQPEVYVAAPGESLEVRCLLKDAAVISWTKDGVHLGPNNRTVLIGEYLQIKGATPRDSGLYACTASRTVDSETWYFMVNVTDAISSGDDEDDTDGAEDFVSENSNNKRAPYWTNTEKMEKRLHAVPAANTVKFRCPAGGNPMPTMRWLKNGKEFKQEHRIGGYKVRNQHWSLIMESVVPSDKGNYTCVVENEYGSINHTYHLDVVERSPHRPILQAGLPANASTVVGGDVEFVCKVYSDAQPHIQWIKHVEKNGSKYGPDGLPYLKVLKAAGVNTTDKEIEVLYIRNVTFEDAGEYTCLAGNSIGISFHSAWLTVLPAPGREKEITASPDYLEIAIYCIGVFLIACMVVTVILCRMKNTTKKPDFSSQPAVHKLTKRIPLRRQVTVSAESSSSMNSNTPLVRITTRLSSTADTPMLAGVSEYELPEDPKWEFPRDKLTLGKPLGEGCFGQVVMAEAVGIDKDKPKEAVTVAVKMLKDDATEKDLSDLVSEMEMMKMIGKHKNIINLLGACTQDGPLYVIVEYASKGNLREYLRARRPPGMEYSYDINRVPEEQMTFKDLVSCTYQLARGMEYLASQKCIHRDLAARNVLVTENNVMKIADFGLARDINNIDYYKKTTNGRLPVKWMAPEALFDRVYTHQSDVWSFGVLMWEIFTLGGSPYPGIPVEELFKLLKEGHRMDKPANCTNELYMMMRDCWHAVPSQRPTFKQLVEDLDRILTLTTNEEYLDLSQPLEQYSPSYPDTRSSCSSGDDSVFSPDPMPYEPCLPQYPHINGSVKT

SEQ ID NO: 28412 - protein, 593 aa, Homo sapiens
  REGION 1..593: note = ENSP00000474011
MCLNKTKQLFGVAKRLPFWRKERSPHRPILQAGLPANASTVVGGDVEFVCKVYSDAQPHIQWIKHVEKNGSKYGPDGLPYLKVLKAAGVNTTDKEIEVLYIRNVTFEDAGEYTCLAGNSIGISFHSAWLTVLPAPGREKEITASPDYLEIAIYCIGVFLIACMVVTVILCRMKNTTKKPDFSSQPAVHKLTKRIPLRRQVTVSAESSSSMNSNTPLVRITTRLSSTADTPMLAGVSEYELPEDPKWEFPRDKLTLGKPLGEGCFGQVVMAEAVGIDKDKPKEAVTVAVKMLKDDATEKDLSDLVSEMEMMKMIGKHKNIINLLGACTQDGPLYVIVEYASKGNLREYLRARRPPGMEYSYDINRVPEEQMTFKDLVSCTYQLARGMEYLASQKCIHRDLAARNVLVTENNVMKIADFGLARDINNIDYYKKTTNGRLPVKWMAPEALFDRVYTHQSDVWSFGVLMWEIFTLGGSPYPGIPVEELFKLLKEGHRMDKPANCTNELYMMMRDCWHAVPSQRPTFKQLVEDLDRILTLTTNEEYLDLSQPLEQYSPSYPDTRSSCSSGDDSVFSPDPMPYEPCLPQYPHINGSVKT

SEQ ID NO: 28413 - protein, 86 aa, Homo sapiens
  REGION 1..86: note = ENSP00000491912
  VARIANT 1: note = Any amino acid
XPYPGIPVEELFKLLKEGHRMDKPANCTNELYMMMRDCWHAVPSQRPTFKQLVEDLDRILTLTTNEEYLDLSQPLEPYSPCYPDPR

SEQ ID NO: 28414 - protein, 704 aa, Homo sapiens
  REGION 1..704: note = ENSP00000348559
MVSWGRFICLVVVTMATLSLARPSFSLVEDTTLEPEGAPYWTNTEKMEKRLHAVPAANTVKFRCPAGGNPMPTMRWLKNGKEFKQEHRIGGYKVRNQHWSLIMESVVPSDKGNYTCVVENEYGSINHTYHLDVVERSPHRPILQAGLPANASTVVGGDVEFVCKVYSDAQPHIQWIKHVEKNGSKYGPDGLPYLKVLKAAGVNTTDKEIEVLYIRNVTFEDAGEYTCLAGNSIGISFHSAWLTVLPAPGREKEITASPDYLEIAIYCIGVFLIACMVVTVILCRMKNTTKKPDFSSQPAVHKLTKRIPLRRQVSAESSSSMNSNTPLVRITTRLSSTADTPMLAGVSEYELPEDPKWEFPRDKLTLGKPLGEGCFGQVVMAEAVGIDKDKPKEAVTVAVKMLKDDATEKDLSDLVSEMEMMKMIGKHKNIINLLGACTQDGPLYVIVEYASKGNLREYLRARRPPGMEYSYDINRVPEEQMTFKDLVSCTYQLARGMEYLASQKCIHRDLAARNVLVTENNVMKIADFGLARDINNIDYYKKTTNGRLPVKWMAPEALFDRVYTHQSDVWSFGVLMWEIFTLGGSPYPGIPVEELFKLLKEGHRMDKPANCTNELYMMMRDCWHAVPSQRPTFKQLVEDLDRILTLTTNEEYLDLSQPLEQYSPSYPDTRSSCSSGDDSVFSPDPMPYEPCLPQYPHINGSVKT

SEQ ID NO: 28415 - protein, 705 aa, Homo sapiens
  REGION 1..705: note = ENSP00000358056
MVSWGRFICLVVVTMATLSLARPSFSLVEDTTLEPEEPPTKYQISQPEVYVAAPGESLEVRCLLKDAAVISWTKDGVHLGPNNRTVLIGEYLQIKGATPRDSGLYACTASRTVDSETWYFMVNVTDAISSGDDEDDTDGAEDFVSENSNNKRAPYWTNTEKMEKRLHAVPAANTVKFRCPAGGNPMPTMRWLKNGKEFKQEHRIGGYKVRNQHWSLIMESVVPSDKGNYTCVVENEYGSINHTYHLDVVERSPHRPILQAGLPANASTVVGGDVEFVCKVYSDAQPHIQWIKHVEKNGSKYGPDGLPYLKVLKVSAESSSSMNSNTPLVRITTRLSSTADTPMLAGVSEYELPEDPKWEFPRDKLTLGKPLGEGCFGQVVMAEAVGIDKDKPKEAVTVAVKMLKDDATEKDLSDLVSEMEMMKMIGKHKNIINLLGACTQDGPLYVIVEYASKGNLREYLRARRPPGMEYSYDINRVPEEQMTFKDLVSCTYQLARGMEYLASQKCIHRDLAARNVLVTENNVMKIADFGLARDINNIDYYKKTTNGRLPVKWMAPEALFDRVYTHQSDVWSFGVLMWEIFTLGGSPYPGIPVEELFKLLKEGHRMDKPANCTNELYMMMRDCWHAVPSQRPTFKQLVEDLDRILTLTTNEEYLDLSQPLEQYSPSYPDTRSSCSSGDDSVFSPDPMPYEPCLPQYPHINGSVKT

SEQ ID NO: 28416 - protein, 251 aa, Homo sapiens
  REGION 1..251: note = ENSP00000474109
MVSWGRFICLVVVTMATLSLARPSFSLVEDTTLEPEGAPYWTNTEKMEKRLHAVPAANTVKFRCPAGGNPMPTMRWLKNGKEFKQEHRIGGYKVRNQHWSLIMESVVPSDKGNYTCVVENEYGSINHTYHLDVVERSPHRPILQAGLPANASTVVGGDVEFVCKVYSDAQPHIQWIKHVEKNGSKYGPDGLPYLKVLKHSGINSSNAEVLALFNVTEADAGEYICKVSNYIGQANQSAWLTVLPKQQGRRC

SEQ ID NO: 28417 - protein, 707 aa, Homo sapiens
  REGION 1..707: note = ENSP00000358055
MVSWGRFICLVVVTMATLSLARPSFSLVEDTTLEPEGAPYWTNTEKMEKRLHAVPAANTVKFRCPAGGNPMPTMRWLKNGKEFKQEHRIGGYKVRNQHWSLIMESVVPSDKGNYTCVVENEYGSINHTYHLDVVERSPHRPILQAGLPANASTVVGGDVEFVCKVYSDAQPHIQWIKHVEKNGSKYGPDGLPYLKVLKHSGINSSNAEVLALFNVTEADAGEYICKVSNYIGQANQSAWLTVLPKQQAPGREKEITASPDYLEIAIYCIGVFLIACMVVTVILCRMKNTTKKPDFSSQPAVHKLTKRIPLRRQVTVSAESSSSMNSNTPLVRITTRLSSTADTPMLAGVSEYELPEDPKWEFPRDKLTLGKPLGEGCFGQVVMAEAVGIDKDKPKEAVTVAVKMLKDDATEKDLSDLVSEMEMMKMIGKHKNIINLLGACTQDGPLYVIVEYASKGNLREYLRARRPPGMEYSYDINRVPEEQMTFKDLVSCTYQLARGMEYLASQKCIHRDLAARNVLVTENNVMKIADFGLARDINNIDYYKKTTNGRLPVKWMAPEALFDRVYTHQSDVWSFGVLMWEIFTLGGSPYPGIPVEELFKLLKEGHRMDKPANCTNELYMMMRDCWHAVPSQRPTFKQLVEDLDRILTLTTNEEYLDLSQPLEQYSPSYPDTRSSCSSGDDSVFSPDPMPYEPCLPQYPHINGSVKT

SEQ ID NO: 28418 - protein, 371 aa, Homo sapiens
  REGION 1..371: note = ENSP00000404219
FSSQPAVHKLTKRIPLRRQVTVSAESSSSMNSNTPLVRITTRLSSTADTPMLAGVSEYELPEDPKWEFPRDKLTLGKPLGEGCFGQVVMAEAVGIDKDKPKEAVTVAVKMLKDDATEKDLSDLVSEMEMMKMIGKHKNIINLLGACTQDGPLYVIVEYASKGNLREYLRARRPPGMEYSYDINRVPEEQMTFKDLVSCTYQLARGMEYLASQKCIHRDLAARNVLVTENNVMKIADFGLARDINNIDYYKKTTNGRLPVKWMAPEALFDRVYTHQSDVWSFGVLMWEIFTLGGSPYPGIPVEELFKLLKEGHRMDKPANCTNELNTWTSANLSNSIHLVTLTQEVLVLQEMILFFLQTPCLTNHAFLSIHT

SEQ ID NO: 28419 - protein, 819 aa, Homo sapiens
  REGION 1..819: note = ENSP00000263451
MVSWGRFICLVVVTMATLSLARPSFSLVEDTTLEPEEPPTKYQISQPEVYVAAPGESLEVRCLLKDAAVISWTKDGVHLGPNNRTVLIGEYLQIKGATPRDSGLYACTASRTVDSETWYFMVNVTDAISSGDDEDDTDGAEDFVSENSNNKRAPYWTNTEKMEKRLHAVPAANTVKFRCPAGGNPMPTMRWLKNGKEFKQEHRIGGYKVRNQHWSLIMESVVPSDKGNYTCVVENEYGSINHTYHLDVVERSPHRPILQAGLPANASTVVGGDVEFVCKVYSDAQPHIQWIKHVEKNGSKYGPDGLPYLKVLKAAGVNTTDKEIEVLYIRNVTFEDAGEYTCLAGNSIGISFHSAWLTVLPAPGREKEITASPDYLEIAIYCIGVFLIACMVVTVILCRMKNTTKKPDFSSQPAVHKLTKRIPLRRQVSAESSSSMNSNTPLVRITTRLSSTADTPMLAGVSEYELPEDPKWEFPRDKLTLGKPLGEGCFGQVVMAEAVGIDKDKPKEAVTVAVKMLKDDATEKDLSDLVSEMEMMKMIGKHKNIINLLGACTQDGPLYVIVEYASKGNLREYLRARRPPGMEYSYDINRVPEEQMTFKDLVSCTYQLARGMEYLASQKCIHRDLAARNVLVTENNVMKIADFGLARDINNIDYYKKTTNGRLPVKWMAPEALFDRVYTHQSDVWSFGVLMWEIFTLGGSPYPGIPVEELFKLLKEGHRMDKPANCTNELYMMMRDCWHAVPSQRPTFKQLVEDLDRILTLTTNEEYLDLSQPLEQYSPSYPDTRSSCSSGDDSVFSPDPMPYEPCLPQYPHINGSVKT

SEQ ID NO: 28420 - protein, 822 aa, Homo sapiens
  REGION 1..822: note = ENSP00000410294
MVSWGRFICLVVVTMATLSLARPSFSLVEDTTLEPEEPPTKYQISQPEVYVAAPGESLEVRCLLKDAAVISWTKDGVHLGPNNRTVLIGEYLQIKGATPRDSGLYACTASRTVDSETWYFMVNVTDAISSGDDEDDTDGAEDFVSENSNNKRAPYWTNTEKMEKRLHAVPAANTVKFRCPAGGNPMPTMRWLKNGKEFKQEHRIGGYKVRNQHWSLIMESVVPSDKGNYTCVVENEYGSINHTYHLDVVERSPHRPILQAGLPANASTVVGGDVEFVCKVYSDAQPHIQWIKHVEKNGSKYGPDGLPYLKVLKHSGINSSNAEVLALFNVTEADAGEYICKVSNYIGQANQSAWLTVLPKQQAPGREKEITASPDYLEIAIYCIGVFLIACMVVTVILCRMKNTTKKPDFSSQPAVHKLTKRIPLRRQVTVSAESSSSMNSNTPLVRITTRLSSTADTPMLAGVSEYELPEDPKWEFPRDKLTLGKPLGEGCFGQVVMAEAVGIDKDKPKEAVTVAVKMLKDDATEKDLSDLVSEMEMMKMIGKHKNIINLLGACTQDGPLYVIVEYASKGNLREYLRARRPPGMEYSYDINRVPEEQMTFKDLVSCTYQLARGMEYLASQKCIHRDLAARNVLVTENNVMKIADFGLARDINNIDYYKKTTNGRLPVKWMAPEALFDRVYTHQSDVWSFGVLMWEIFTLGGSPYPGIPVEELFKLLKEGHRMDKPANCTNELYMMMRDCWHAVPSQRPTFKQLVEDLDRILTLTTNEEYLDLSQPLEQYSPSYPDTRSSCSSGDDSVFSPDPMPYEPCLPQYPHINGSVKT

SEQ ID NO: 28421 - protein, 680 aa, Homo sapiens
  REGION 1..680: note = ENSP00000353262
MVSWGRFICLVVVTMATLSLARPSFSLVEDTTLEPEDAISSGDDEDDTDGAEDFVSENSNNKRAPYWTNTEKMEKRLHAVPAANTVKFRCPAGGNPMPTMRWLKNGKEFKQEHRIGGYKVRNQHWSLIMESVVPSDKGNYTCVVENEYGSINHTYHLDVVERSPHRPILQAGLPANASTVVGGDVEFVCKVYSDAQPHIQWIKHVEKNGSKYGPDGLPYLKVLKHSGINSSNAEVLALFNVTEADAGEYICKVSNYIGQANQSAWLTVLPKQQAPGREKEITASPDYLEIAIYCIGVFLIACMVVTVILCRMKNTTKKPDFSSQPAVHKLTKRIPLRRQVTVSAESSSSMNSNTPLVRITTRLSSTADTPMLAGVSEYELPEDPKWEFPRDKLTLGKPLGEGCFGQVVMAEAVGIDKDKPKEAVTVAVKMLKDDATEKDLSDLVSEMEMMKMIGKHKNIINLLGACTQDGPLYVIVEYASKGNLREYLRARRPPGMEYSYDINRVPEEQMTFKDLVSCTYQLARGMEYLASQKCIHRDLAARNVLVTENNVMKIADFGLARDINNIDYYKKTTNGRLPVKWMAPEALFDRVYTHQSDVWSFGVLMWEIFTLGGSPYPGIPVEELFKLLKEGHRMDKPANCTNELYMMMRDCWHAVPSQRPTFKQLVEDLDRILTLTTNEI

SEQ ID NO: 28422 - protein, 769 aa, Homo sapiens
  REGION 1..769: note = ENSP00000358052
MVSWGRFICLVVVTMATLSLARPSFSLVEDTTLEPEEPPTKYQISQPEVYVAAPGESLEVRCLLKDAAVISWTKDGVHLGPNNRTVLIGEYLQIKGATPRDSGLYACTASRTVDSETWYFMVNVTDAISSGDDEDDTDGAEDFVSENSNNKRAPYWTNTEKMEKRLHAVPAANTVKFRCPAGGNPMPTMRWLKNGKEFKQEHRIGGYKVRNQHWSLIMESVVPSDKGNYTCVVENEYGSINHTYHLDVVERSPHRPILQAGLPANASTVVGGDVEFVCKVYSDAQPHIQWIKHVEKNGSKYGPDGLPYLKVLKHSGINSSNAEVLALFNVTEADAGEYICKVSNYIGQANQSAWLTVLPKQQAPGREKEITASPDYLEIAIYCIGVFLIACMVVTVILCRMKNTTKKPDFSSQPAVHKLTKRIPLRRQVTVSAESSSSMNSNTPLVRITTRLSSTADTPMLAGVSEYELPEDPKWEFPRDKLTLGKPLGEGCFGQVVMAEAVGIDKDKPKEAVTVAVKMLKDDATEKDLSDLVSEMEMMKMIGKHKNIINLLGACTQDGPLYVIVEYASKGNLREYLRARRPPGMEYSYDINRVPEEQMTFKDLVSCTYQLARGMEYLASQKCIHRDLAARNVLVTENNVMKIADFGLARDINNIDYYKKTTNGRLPVKWMAPEALFDRVYTHQSDVWSFGVLMWEIFTLGGSPYPGIPVEELFKLLKEGHRMDKPANCTNELYMMMRDCWHAVPSQRPTFKQLVEDLDRILTLTTNEI

SEQ ID NO: 28423 - protein, 768 aa, Homo sapiens
  REGION 1..768: note = ENSP00000358054
MVSWGRFICLVVVTMATLSLARPSFSLVEDTTLEPEEPPTKYQISQPEVYVAAPGESLEVRCLLKDAAVISWTKDGVHLGPNNRTVLIGEYLQIKGATPRDSGLYACTASRTVDSETWYFMVNVTDAISSGDDEDDTDGAEDFVSENSNNKRAPYWTNTEKMEKRLHAVPAANTVKFRCPAGGNPMPTMRWLKNGKEFKQEHRIGGYKVRNQHWSLIMESVVPSDKGNYTCVVENEYGSINHTYHLDVVERSPHRPILQAGLPANASTVVGGDVEFVCKVYSDAQPHIQWIKHVEKNGSKYGPDGLPYLKVLKHSGINSSNAEVLALFNVTEADAGEYICKVSNYIGQANQSAWLTVLPKQQAPGREKEITASPDYLEIAIYCIGVFLIACMVVTVILCRMKNTTKKPDFSSQPAVHKLTKRIPLRRQVTVSAESSSSMNSNTPLVRITTRLSSTADTPMLAGVSEYELPEDPKWEFPRDKLTLGKPLGEGCFGQVVMAEAVGIDKDKPKEAVTVAVKMLKDDATEKDLSDLVSEMEMMKMIGKHKNIINLLGACTQDGPLYVIVEYASKGNLREYLRARRPPGMEYSYDINRVPEEQMTFKDLVSCTYQLARGMEYLASQKCIHRDLAARNVLVTENNVMKIADFGLARDINNIDYYKKTTNGRLPVKWMAPEALFDRVYTHQSDVWSFGVLMWEIFTLGGSPYPGIPVEELFKLLKEGHRMDKPANCTNELYMMMRDCWHAVPSQRPTFKQLVEDLDRILTLTTNE

SEQ ID NO: 28424 - protein, 669 aa, Homo sapiens
  REGION 1..669: note = ENSP00000337665
MVSWGRFICLVVVTMATLSLARPSFSLVEDTTLEPEDAISSGDDEDDTDGAEDFVSENSNNKRAPYWTNTEKMEKRLHAVPAANTVKFRCPAGGNPMPTMRWLKNGKEFKQEHRIGGYKVRNQHWSLIMESVVPSDKGNYTCVVENEYGSINHTYHLDVVERSPHRPILQAGLPANASTVVGGDVEFVCKVYSDAQPHIQWIKHVEKNGSKYGPDGLPYLKVLKAAGVNTTDKEIEVLYIRNVTFEDAGEYTCLAGNSIGISFHSAWLTVLPAPGREKEITASPDYLEIAIYCIGVFLIACMVVTVILCRMKNTTKKPDFSSQPAVHKLTKRIPLRRQVSAESSSSMNSNTPLVRITTRLSSTADTPMLAGVSEYELPEDPKWEFPRDKLTLGKPLGEGCFGQVVMAEAVGIDKDKPKEAVTVAVKMLKDDATEKDLSDLVSEMEMMKMIGKHKNIINLLGACTQDGPLYVIVEYASKGNLREYLRARRPPGMEYSYDINRVPEEQMTFKDLVSCTYQLARGMEYLASQKCIHRDLAARNVLVTENNVMKIADFGLARDINNIDYYKKTTNGRLPVKWMAPEALFDRVYTHQSDVWSFGVLMWEIFTLGGSPYPGIPVEELFKLLKEGHRMDKPANCTNELYMMMRDCWHAVPSQRPTFKQLVEDLDRI

SEQ ID NO: 28425 - protein, 254 aa, Homo sapiens
  REGION 1..254: note = ENSP00000352309
MVSWGRFICLVVVTMATLSLARPSFSLVEDTTLEPEEPPTKYQISQPEVYVAAPGESLEVRCLLKDAAVISWTKDGVHLGPNNRTVLIGEYLQIKGATPRDSGLYACTASRTVDSETWYFMVNVTDAISSGDDEDDTDGAEDFVSENSNNKRAPYWTNTEKMEKRLHAVPAANTVKFRCPAGGNPMPTMRWLKNGKEFKQEHRIGGYKVRNQHWSLIMESVVPSDKGNYTCVVENEYGSINHTYHLDVVGSQGL

SEQ ID NO: 28426 - protein, 136 aa, Homo sapiens
  REGION 1..136: note = ENSP00000481464
  VARIANT 1: note = Any amino acid
XSLARPSFSLVEDTTLEPEEPPTKYQISQPEVYVAAPGESLEVRCLLKDAAVISWTKDGVHLGPNNRTVLIGEYLQIKGATPRDSGLYACTASRTVDSETWYFMVNVTDAISSGDDEDDTDGAEDFVSENSNNKSK

SEQ ID NO: 28427 - protein, 64 aa, Homo sapiens
  REGION 1..64: note = ENSP00000484892
MVSWGRFICLVVVTMATLSLARPSFSLVEDTTLEPEDAISSGDDEDDTDGAEDFVSENSNNKSK

SEQ ID NO: 28428 - protein, 144 aa, Homo sapiens
  REGION 1..144: note = ENSP00000490905
MVSWGRFICLVVVTMATLSLARPSFSLVEDTTLEPEEPPTKYQISQPEVYVAAPGESLEMPSHPEMMRMTPMVRKILSVRTVTTRVSNCPAPMVPERGAWREVLPVTCLLVDSSAPCCVPRPLPFPAVSTFLTFKPENKPVLLH

SEQ ID NO: 28429 - protein, 707 aa, Homo sapiens
  REGION 1..707: note = ENSP00000350166
MVSWGRFICLVVVTMATLSLARPSFSLVEDTTLEPEDAISSGDDEDDTDGAEDFVSENSNNKRAPYWTNTEKMEKRLHAVPAANTVKFRCPAGGNPMPTMRWLKNGKEFKQEHRIGGYKVRNQHWSLIMESVVPSDKGNYTCVVENEYGSINHTYHLDVVERSPHRPILQAGLPANASTVVGGDVEFVCKVYSDAQPHIQWIKHVEKNGSKYGPDGLPYLKVLKAAGVNTTDKEIEVLYIRNVTFEDAGEYTCLAGNSIGISFHSAWLTVLPAPGREKEITASPDYLEIAIYCIGVFLIACMVVTVILCRMKNTTKKPDFSSQPAVHKLTKRIPLRRQVTVSAESSSSMNSNTPLVRITTRLSSTADTPMLAGVSEYELPEDPKWEFPRDKLTLGKPLGEGCFGQVVMAEAVGIDKDKPKEAVTVAVKMLKDDATEKDLSDLVSEMEMMKMIGKHKNIINLLGACTQDGPLYVIVEYASKGNLREYLRARRPPGMEYSYDINRVPEEQMTFKDLVSCTYQLARGMEYLASQKCIHRDLAARNVLVTENNVMKIADFGLARDINNIDYYKKTTNGRLPVKWMAPEALFDRVYTHQSDVWSFGVLMWEIFTLGGSPYPGIPVEELFKLLKEGHRMDKPANCTNELYMMMRDCWHAVPSQRPTFKQLVEDLDRILTLTTNEEEKKVSGAVDCHKPPCNPSHLPCVLAVDQ

SEQ ID NO: 28430 - protein, 732 aa, Homo sapiens
  REGION 1..732: note = ENSP00000484154
MVSWGRFICLVVVTMATLSLARPSFSLVEDTTLEPEDAISSGDDEDDTDGAEDFVSENSNNKRAPYWTNTEKMEKRLHAVPAANTVKFRCPAGGNPMPTMRWLKNGKEFKQEHRIGGYKVRNQHWSLIMESVVPSDKGNYTCVVENEYGSINHTYHLDVVERSPHRPILQAGLPANASTVVGGDVEFVCKVYSDAQPHIQWIKHVEKNGSKYGPDGLPYLKVLKAAGVNTTDKEIEVLYIRNVTFEDAGEYTCLAGNSIGISFHSAWLTVLPAPGREKEITASPDYLEIAIYCIGVFLIACMVVTVILCRMKNTTKKPDFSSQPAVHKLTKRIPLRRQVTVSAESSSSMNSNTPLVRITTRLSSTADTPMLAGVSEYELPEDPKWEFPRDKLTLGKPLGEGCFGQVVMAEAVGIDKDKPKEAVTVAVKMLKDDATEKDLSDLVSEMEMMKMIGKHKNIINLLGACTQDGPLYVIVEYASKGNLREYLRARRPPGMEYSYDINRVPEEQMTFKDLVSCTYQLARGMEYLASQKCIHRDLAARNVLVTENNVMKIADFGLARDINNIDYYKKTTNGRLPVKWMAPEALFDRVYTHQSDVWSFGVLMWEIFTLGGSPYPGIPVEELFKLLKEGHRMDKPANCTNELYMMMRDCWHAVPSQRPTFKQLVEDLDRILTLTTNEEYLDLSQPLEQYSPSYPDTRSSCSSGDDSVFSPDPMPYEPCLPQYPHINGSVKT

SEQ ID NO: 28431 - protein, 709 aa, Homo sapiens
  REGION 1..709: note = ENSP00000358057
MVSWGRFICLVVVTMATLSLARPSFSLVEDTTLEPEEPPTKYQISQPEVYVAAPGESLEVRCLLKDAAVISWTKDGVHLGPNNRTVLIGEYLQIKGATPRDSGLYACTASRTVDSETWYFMVNVTDAISSGDDEDDTDGAEDFVSENSNNKRAPYWTNTEKMEKRLHAVPAANTVKFRCPAGGNPMPTMRWLKNGKEFKQEHRIGGYKVRNQHWSLIMESVVPSDKGNYTCVVENEYGSINHTYHLDVVAPGREKEITASPDYLEIAIYCIGVFLIACMVVTVILCRMKNTTKKPDFSSQPAVHKLTKRIPLRRQVTVSAESSSSMNSNTPLVRITTRLSSTADTPMLAGVSEYELPEDPKWEFPRDKLTLGKPLGEGCFGQVVMAEAVGIDKDKPKEAVTVAVKMLKDDATEKDLSDLVSEMEMMKMIGKHKNIINLLGACTQDGPLYVIVEYASKGNLREYLRARRPPGMEYSYDINRVPEEQMTFKDLVSCTYQLARGMEYLASQKCIHRDLAARNVLVTENNVMKIADFGLARDINNIDYYKKTTNGRLPVKWMAPEALFDRVYTHQSDVWSFGVLMWEIFTLGGSPYPGIPVEELFKLLKEGHRMDKPANCTNELYMMMRDCWHAVPSQRPTFKQLVEDLDRILTLTTNEEYLDLSQPLEQYSPSYPDTRSSCSSGDDSVFSPDPMPYEPCLPQYPHINGSVKT

SEQ ID NO: 28432 - protein, 821 aa, Homo sapiens
  REGION 1..821: note = ENSP00000309878
MVSWGRFICLVVVTMATLSLARPSFSLVEDTTLEPEEPPTKYQISQPEVYVAAPGESLEVRCLLKDAAVISWTKDGVHLGPNNRTVLIGEYLQIKGATPRDSGLYACTASRTVDSETWYFMVNVTDAISSGDDEDDTDGAEDFVSENSNNKRAPYWTNTEKMEKRLHAVPAANTVKFRCPAGGNPMPTMRWLKNGKEFKQEHRIGGYKVRNQHWSLIMESVVPSDKGNYTCVVENEYGSINHTYHLDVVERSPHRPILQAGLPANASTVVGGDVEFVCKVYSDAQPHIQWIKHVEKNGSKYGPDGLPYLKVLKVFAAGVNTTDKEIEVLYIRNVTFEDAGEYTCLAGNSIGISFHSAWLTVLPAPGREKEITASPDYLEIAIYCIGVFLIACMVVTVILCRMKNTTKKPDFSSQPAVHKLTKRIPLRRQVSAESSSSMNSNTPLVRITTRLSSTADTPMLAGVSEYELPEDPKWEFPRDKLTLGKPLGEGCFGQVVMAEAVGIDKDKPKEAVTVAVKMLKDDATEKDLSDLVSEMEMMKMIGKHKNIINLLGACTQDGPLYVIVEYASKGNLREYLRARRPPGMEYSYDINRVPEEQMTFKDLVSCTYQLARGMEYLASQKCIHRDLAARNVLVTENNVMKIADFGLARDINNIDYYKKTTNGRLPVKWMAPEALFDRVYTHQSDVWSFGVLMWEIFTLGGSPYPGIPVEELFKLLKEGHRMDKPANCTNELYMMMRDCWHAVPSQRPTFKQLVEDLDRILTLTTNEEYLDLSQPLEQYSPSYPDTRSSCSSGDDSVFSPDPMPYEPCLPQYPHINGSVKT

SEQ ID NO: 28433 - protein, 792 aa, Homo sapiens
  REGION 1..792: note = ENSP00000420533
MGAPACALALCVAVAIVAGASSESLGTEQRVVGRAAEVPGPEPGQQEQLVFGSGDAVELSCPPPGGGPMGPTVWVKDGTGLVPSERVLVGPQRLQVLNASHEDSGAYSCRQRLTQRVLCHFSVRVTDAPSSGDDEDGEDEAEDTGVDTGAPYWTRPERMDKKLLAVPAANTVRFRCPAAGNPTPSISWLKNGREFRGEHRIGGIKLRHQQWSLVMESVVPSDRGNYTCVVENKFGSIRQTYTLDVLERSPHRPILQAGLPANQTAVLGSDVEFHCKVYSDAQPHIQWLKHVEVNGSKVGPDGTPYVTVLKTAGANTTDKELEVLSLHNVTFEDAGEYTCLAGNSIGFSHHSAWLVVLPAEEELVEADEAGSVYAGILSYGVGFFLFILVVAAVTLCRLRSPPKKGLGSPTVHKISRFPLKRQQVSLESNASMSSNTPLVRIARLSSGEGPTLANVSELELPADPKWELSRARLTLGKPLGEGCFGQVVMAEAIGIDKDRAAKPVTVAVKMLKDDATDKDLSDLVSEMEMMKMIGKHKNIINLLGACTQGGPLYVLVEYAAKGNLREFLRARRPPGLDYSFDTCKPPEEQLTFKDLVSCAYQVARGMEYLASQKCIHRDLAARNVLVTEDNVMKIADFGLARDVHNLDYYKKTTNLVLWGPALGDLHAGGLPVPRHPCGGALQAAEGGPPHGQARQLHTRPVHDHAGVLACRALPEAHLQAAGGGPGPCPYRDVHRRVPGPVGAFRAVLPGWPGHPQLQLLRGRLRVCPRPAAPGPTQQWGLADVKGHWSPTM

SEQ ID NO: 28434 - protein, 806 aa, Homo sapiens
  REGION 1..806: note = ENSP00000260795
MGAPACALALCVAVAIVAGASSESLGTEQRVVGRAAEVPGPEPGQQEQLVFGSGDAVELSCPPPGGGPMGPTVWVKDGTGLVPSERVLVGPQRLQVLNASHEDSGAYSCRQRLTQRVLCHFSVRVTDAPSSGDDEDGEDEAEDTGVDTGAPYWTRPERMDKKLLAVPAANTVRFRCPAAGNPTPSISWLKNGREFRGEHRIGGIKLRHQQWSLVMESVVPSDRGNYTCVVENKFGSIRQTYTLDVLERSPHRPILQAGLPANQTAVLGSDVEFHCKVYSDAQPHIQWLKHVEVNGSKVGPDGTPYVTVLKTAGANTTDKELEVLSLHNVTFEDAGEYTCLAGNSIGFSHHSAWLVVLPAEEELVEADEAGSVYAGILSYGVGFFLFILVVAAVTLCRLRSPPKKGLGSPTVHKISRFPLKRQVSLESNASMSSNTPLVRIARLSSGEGPTLANVSELELPADPKWELSRARLTLGKPLGEGCFGQVVMAEAIGIDKDRAAKPVTVAVKMLKDDATDKDLSDLVSEMEMMKMIGKHKNIINLLGACTQGGPLYVLVEYAAKGNLREFLRARRPPGLDYSFDTCKPPEEQLTFKDLVSCAYQVARGMEYLASQKCIHRDLAARNVLVTEDNVMKIADFGLARDVHNLDYYKKTTNGRLPVKWMAPEALFDRVYTHQSDVWSFGVLLWEIFTLGGSPYPGIPVEELFKLLKEGHRMDKPANCTHDLYMIMRECWHAAPSQRPTFKQLVEDLDRVLTVTSTDEYLDLSAPFEQYSPGGQDTPSSSSSGDDSVFAHDLLPPAPPSSGGSRT

SEQ ID NO: 28435 - protein, 694 aa, Homo sapiens
  REGION 1..694: note = ENSP00000231803
MGAPACALALCVAVAIVAGASSESLGTEQRVVGRAAEVPGPEPGQQEQLVFGSGDAVELSCPPPGGGPMGPTVWVKDGTGLVPSERVLVGPQRLQVLNASHEDSGAYSCRQRLTQRVLCHFSVRVTDAPSSGDDEDGEDEAEDTGVDTGAPYWTRPERMDKKLLAVPAANTVRFRCPAAGNPTPSISWLKNGREFRGEHRIGGIKLRHQQWSLVMESVVPSDRGNYTCVVENKFGSIRQTYTLDVLERSPHRPILQAGLPANQTAVLGSDVEFHCKVYSDAQPHIQWLKHVEVNGSKVGPDGTPYVTVLKVSLESNASMSSNTPLVRIARLSSGEGPTLANVSELELPADPKWELSRARLTLGKPLGEGCFGQVVMAEAIGIDKDRAAKPVTVAVKMLKDDATDKDLSDLVSEMEMMKMIGKHKNIINLLGACTQGGPLYVLVEYAAKGNLREFLRARRPPGLDYSFDTCKPPEEQLTFKDLVSCAYQVARGMEYLASQKCIHRDLAARNVLVTEDNVMKIADFGLARDVHNLDYYKKTTNGRLPVKWMAPEALFDRVYTHQSDVWSFGVLLWEIFTLGGSPYPGIPVEELFKLLKEGHRMDKPANCTHDLYMIMRECWHAAPSQRPTFKQLVEDLDRVLTVTSTDEYLDLSAPFEQYSPGGQDTPSSSSSGDDSVFAHDLLPPAPPSSGGSRT

SEQ ID NO: 28436 - protein, 112 aa, Homo sapiens
  REGION 1..112: note = ENSP00000427289
NPTPSISWLKNGREFRGEHRIGGIKLRHQQWSLVMESVVPSDRGNYTCVVENKFGSIRQTYTLDVLERSPHRPILQAGLPANQTAVLGSDVEFHCKTAGANTTDKELEVLSL

SEQ ID NO: 28437 - protein, 808 aa, Homo sapiens
  REGION 1..808: note = ENSP00000339824
MGAPACALALCVAVAIVAGASSESLGTEQRVVGRAAEVPGPEPGQQEQLVFGSGDAVELSCPPPGGGPMGPTVWVKDGTGLVPSERVLVGPQRLQVLNASHEDSGAYSCRQRLTQRVLCHFSVRVTDAPSSGDDEDGEDEAEDTGVDTGAPYWTRPERMDKKLLAVPAANTVRFRCPAAGNPTPSISWLKNGREFRGEHRIGGIKLRHQQWSLVMESVVPSDRGNYTCVVENKFGSIRQTYTLDVLERSPHRPILQAGLPANQTAVLGSDVEFHCKVYSDAQPHIQWLKHVEVNGSKVGPDGTPYVTVLKSWISESVEADVRLRLANVSERDGGEYLCRATNFIGVAEKAFWLSVHGPRAAEEELVEADEAGSVYAGILSYGVGFFLFILVVAAVTLCRLRSPPKKGLGSPTVHKISRFPLKRQVSLESNASMSSNTPLVRIARLSSGEGPTLANVSELELPADPKWELSRARLTLGKPLGEGCFGQVVMAEAIGIDKDRAAKPVTVAVKMLKDDATDKDLSDLVSEMEMMKMIGKHKNIINLLGACTQGGPLYVLVEYAAKGNLREFLRARRPPGLDYSFDTCKPPEEQLTFKDLVSCAYQVARGMEYLASQKCIHRDLAARNVLVTEDNVMKIADFGLARDVHNLDYYKKTTNGRLPVKWMAPEALFDRVYTHQSDVWSFGVLLWEIFTLGGSPYPGIPVEELFKLLKEGHRMDKPANCTHDLYMIMRECWHAAPSQRPTFKQLVEDLDRVLTVTSTDEYLDLSAPFEQYSPGGQDTPSSSSSGDDSVFAHDLLPPAPPSSGGSRT

SEQ ID NO: 28438 - protein, 694 aa, Homo sapiens; identical to SEQ ID NO: 28435
  REGION 1..694: note = ENSP00000412903

SEQ ID NO: 28439 - protein, 806 aa, Homo sapiens; identical to SEQ ID NO: 28434
  REGION 1..806: note = ENSP00000414914

SEQ ID NO: 28440 - protein, 364 aa, Homo sapiens
  REGION 1..364: note = ENSP00000479472
MGAPACALALCVAVAIVAGASSESLGTEQRVVGRAAEVPGPEPGQQEQLVFGSGDAVELSCPPPGGGPMGPTVWVKDGTGLVPSERVLVGPQRLQVLNASHEDSGAYSCRQRLTQRVLCHFSVRVTDAPSSGDDEDGEDEAEDTGVDTGAPYWTRPERMDKKLLAVPAANTVRFRCPAAGNPTPSISWLKNGREFRGEHRIGGIKLRHQQWSLVMESVVPSDRGNYTCVVENKFGSIRQTYTLDVLERSPHRPILQAGLPANQTAVLGSDVEFHCKVYSDAQPHIQWLKHVEVNGSKVGPDGTPYVTVLKSWISESVEADVRLRLANVSERDGGEYLCRATNFIGVAEKAFWLSVHGPRADGGR

SEQ ID NO: 28441 - protein, 54 aa, Homo sapiens
  REGION 1..54: note = ENSP00000463260
MSGGEQKPERYYVGVDVGTGSVRAALVDQSGVLLAFADQPIKNWEPQFNHHEQS

SEQ ID NO: 28442 - protein, 184 aa, Homo sapiens
  REGION 1..184: note = ENSP00000406607
MSGGEQKPERYYVGVDVGTGSVRAALVDQSGVLLAFADQPIKNWEPQFNHHEQSSEDIWAACCVVTKKVVQGIDLNQIRGLGFDATCSLVVLDKQFHPLPVNQEGDSHRNVIMWLDHRAVSQVNRINETKHSVLQYVGGVMSVEMQAPKLLWLKENLREICWDKAGHFFDLPDFLSWKATGVTA

SEQ ID NO: 28443 - protein, 249 aa, Homo sapiens
  REGION 1..249: note = ENSP00000489030
MWLDHRAVSQVNRINETKHSVLQYVGGVMSVEMQAPKLLWLKENLREICWDKAGHFFDLPDFLSWKATGVTARSLCSLVCKWTYSAEKGWDDSFWKMIGLEDFVADNYSKIGNQVLPPGASLGNGLTPEAARDLGLLPGIAVAASLIDAHAGGLGVIGADVRGHGLICEGQPVTSRLAVICGTSSCHMGISKDPIFVPGVWGPYFSAMVPGFWLNEGGQSVTGKLIDHMVQGHAAFPELQVKATARSPD

SEQ ID NO: 28444 - protein, 575 aa, Homo sapiens
  REGION 1..575: note = ENSP00000360262
MSGGEQKPERYYVGVDVGTGSVRAALVDQSGVLLAFADQPIKNWEPQFNHHEQSSEDIWAACCVVTKKVVQGIDLNQIRGLGFDATCSLVVLDKQFHPLPVNQEGDSHRNVIMWLDHRAVSQVNRINETKHSVLQYVGGVMSVEMQAPKLLWLKENLREICWDKAGHFFDLPDFLSWKATGVTARSLCSLVCKWTYSAEKGWDDSFWKMIGLEDFVADNYSKIGNQVLPPGASLGNGLTPEAARDLGLLPGIAVAASLIDAHAGGLGVIGADVRGHGLICEGQPVTSRLAVICGTSSCHMGISKDPIFVPGVWGPYFSAMVPGFWLNEGGQSVTGKLIDHMVQGHAAFPELQVKATARCQSIYAYLNSHLDLIKKAQPVGFLTVDLHVWPDFHGNRSPLADLTLKGMRTTGYLYIPALAALHSPSSLLSPQVTGLKLSQDLDDLAILYLATVQAIALGTRFIIEAMEAAGHSISTLFLCGGLSKNPLFVQMHADITGMPVVLSQEVESVLVGAAVLGACASGDFASVQEAMAKMSKVGKVVFPRLQDKKYYDKKYQVFLKLVEHQKEYLAIMNDD

SEQ ID NO: 28445 - protein, 551 aa, Homo sapiens
  REGION 1..551: note = ENSP00000305922
MSGGEQKPERYYVGVDVGTGSVRAALVDQSGVLLAFADQPIKNWEPQFNHHEQSSEDIWAACCVVTKKVVQGIDLNQIRGLGFDATCSLVVLDKQFHPLPVNQEGDSHRNVIMWLDHRAVSQVNRINETKHSVLQYVGGVMSVEMQAPKLLWLKENLREICWDKAGHFFDLPDFLSWKATGVTARSLCSLVCKWTYSAEKGWDDSFWKMIGLEDFVADNYSKIGNQVLPPGASLGNGLTPEAARDLGLLPGIAVAASLIDAHAGGLGVIGADVRGHGLICEGQPVTSRLAVICGTSSCHMGISKDPIFVPGVWGPYFSAMVPGFWLNEGGQSVTGKLIDHMVQGHAAFPELQVKATARCQSIYAYLNSHLDLIKKAQPVGFLTVDLHVWPDFHGNRSPLADLTLKGMVTGLKLSQDLDDLAILYLATVQAIALGTRFIIEAMEAAGHSISTLFLCGGLSKNPLFVQMHADITGMPVVLSQEVESVLVGAAVLGACASGDFASVQEAMAKMSKVGKVVFPRLQDKKYYDKKYQVFLKLVEHQKEYLAIMNDD

SEQ ID NO: 28446 - protein, 507 aa, Homo sapiens
  REGION 1..507: note = ENSP00000403425
MSGGEQKPERYYVGVDVGTGSVRAALVDQSGVLLAFADQPIKNWEPQFNHHEQSSEDIWAACCVVTKKVVQGIDLNQIRGLGFDATCSLVVLDKQFHPLPVNQEGDSHRNVIMWLDHRAVSQVNRINETKHSVLQYVGGVMSVEMQAPKLLWLKENLREICWDKAGHFFDLPDFLSWKATGVTARSLCSLVCKWTYSAEKGWDDSFWKMIGLEDFVADNYSKIGNQVLPPGASLGNGLTPEAARDLGLLPGIAVAASLIDAHAGGLGVIGADVRGHGLICEGQPVTSRLAVICGTSSCHMGISKDPIFVPGVWGPYFSAMVPGFWLNEGGQSVTGKLIDHMVQGHAAFPELQVKATARCQSIYAYLNSHLDLIKKAQPVGFLTVDLHVWPDFHGNRSPLADLTLKGMVTGLKLSQDLDDLAILYLATVQAIALGTRFIIEAMEAAGHSISTLFLCGGLSKNPLFVQMHADITGMPVVLSQEVESVLVGAAVLGACASGDFASVQWGK

SEQ ID NO: 28447 - protein, 514 aa, Homo sapiens
  REGION 1..514: note = ENSP00000489446
MSGGEQKPERYYVGVDVGTGSVRAALVDQSGVLLAFADQPIKNWEPQFNHHEQSSEDIWAACCVVTKKVVQGIDLNQIRGLGFDATCSLVVLDKQFHPLPVNQEGDSHRNVIMWLDHRAVSQVNRINETKHSVLQYVGGVMSVEMQAPKLLWLKENLREICWDKAGHFFDLPDFLSWKATGVTARSLCSLVCKWTYSAEKGWDDSFWKMIGLEDFVADNYSKIGNQVLPPGASLGNGLTPEAARDLGLLPGIAVAASLIDAHAGGLGVIGADVRGHGLICEGQPVTSRLAVICGTSSCHMGISKDPIFVPGVWGPYFSAMVPGFWLNEGGQSVTGKLIDHMVQGHAAFPELQVKATARCQSIYAYLNSHLDLIKKAQPVGFLTVDLHVWPDFHGNRSPLADLTLKGMVTGLKLSQDLDDLAILYLATVQAIALGTRFIIEAMEAAGHSISTLFLCGGLSKNPLFVQMHADITGMPVVLSQEVESVLVGAAVLGACASGDFASVQIRKTKHRAIK

SEQ ID NO: 28448 - protein, 153 aa, Homo sapiens
  REGION 1..153: note = ENSP00000489549
MIGLEDFVADNYSKIGNQVLPPGASLGNGLTPEAARDLGLLPGIAVAASLIDAHAGGLGVIGADVRGHGLICEGQPVTSRLAVICGTSSCHMGISKDPIFVPGVWGPYFSAMVPGFWLNEGGQSVTGKLIDHMVQGHAAFPELQVKATARSPD

SEQ ID NO: 28449 - protein, 112 aa, Homo sapiens
  REGION 1..112: note = ENSP00000489146
MSGGEQKPERYYVGVDVGTGSVRAALVDQSGVLLAFADQPIKNWEPQFNHHEQSSEDIWAACCVVTKKVVQGIDLNQIRGLGFDATCSLVVLDKQFHPLPVNQEELERDLLG

SEQ ID NO: 28450 - protein, 463 aa, Homo sapiens
  REGION 1..463: note = ENSP00000489417
MSGGEQKPERYYVGVDVGTGSVRAALVDQSGVLLAFADQPIKNWEPQFNHHEQSSEDIWAACCVVTKNLREICWDKAGHFFDLPDFLSWKATGVTARSLCSLVCKWTYSAEKGWDDSFWKMIGLEDFVADNYSKIGNQVLPPGASLGNGLTPEAARDLGLLPGIAVAASLIDAHAGGLGVIGADVRGHGLICEGQPVTSRLAVICGTSSCHMGISKDPIFVPGVWGPYFSAMVPGFWLNEGGQSVTGKLIDHMVQGHAAFPELQVKATARCQSIYAYLNSHLDLIKKAQPVGFLTVDLHVWPDFHGNRSPLADLTLKGMVTGLKLSQDLDDLAILYLATVQAIALGTRFIIEAMEAAGHSISTLFLCGGLSKNPLFVQMHADITGMPVVLSQEVESVLVGAAVLGACASGDFASVQEAMAKMSKVGKVVFPRLQDKKYYDKKYQVFLKLVEHQKEYLAIMNDD

SEQ ID NO: 28451 - protein, 128 aa, Homo sapiens
  REGION 1..128: note = ENSP00000489345
MSGGEQKPERYYVGVDVGTGSVRAALVDQSGVLLAFADQPIKNWEPQFNHHEQSSEDIWAACCVVTKKVVQGIDLNQIRGLGFDATCSLVVLDKQFHPLPVNQEGLSAPWCVSGHIQQRKAGTTVSGK

SEQ ID NO: 28452 - protein, 463 aa, Homo sapiens; identical to SEQ ID NO: 28450
  REGION 1..463: note = ENSP00000360256

SEQ ID NO: 28453 - protein, 252 aa, Homo sapiens
  REGION 1..252: note = ENSP00000360254
MGISKDPIFVPGVWGPYFSAMVPGFWLNEGGQSVTGKLIDHMVQGHAAFPELQVKATARCQSIYAYLNSHLDLIKKAQPVGFLTVDLHVWPDFHGNRSPLADLTLKGMVTGLKLSQDLDDLAILYLATVQAIALGTRFIIEAMEAAGHSISTLFLCGGLSKNPLFVQMHADITGMPVVLSQEVESVLVGAAVLGACASGDFASVQEAMAKMSKVGKVVFPRLQDKKYYDKKYQVFLKLVEHQKEYLAIMNDD

SEQ ID NO: 28454 - protein, 1143 aa, Homo sapiens
  REGION 1..1143: note = ENSP00000427567
MHVMNCVSLVSDKENGNIATAPGFMIGQTPPPAPPPPPPPPPPSPPCSCSREECPSSPPPPPPPPLPGEPPIPPPPPGLPPTTHMNGYSHLGKKKRMRSFFWKTIPEEQVRGKTNIWTLAARQEHHYQIDTKTIEELFGQQEDTTKSSLPRRGRTLNSSFREAREEITILDAKRSMNIGIFLKQFKKSPRSIVEDIHQGKSEHYGSETLREFLKFLPESEEVKKLKAFSGDVSKLSLADSFLYGLIQVPNYSLRIEAMVLKKEFLPSCSSLYTDITVLRTAIKELMSCEELHSILHLVLQAGNIMNAGGYAGNAVGFKLSSLLKLADTKANKPGMNLLHFVAQEAQKKDTILLNFSEKLHHVQKTARLSLENTEAELHLLFVRTKSLKENIQRDGELCQQMEDFLQFAIEKLRELECWKQELQDEAYTLIDFFCEDKKTMKLDECFQIFRDFCTKFNKAVKDNHDREAQELRQLQRLKEQEQKQRSWATGELGAFGRSSSENDVELLTKKGAEGLLPFLHPRPISPSSPSYRPPNTRRSRLSLGPSADRELLTFLESSTGSPEEPNKFHSLPRSSPRQARPTIACLEPAEVRHQDSSFAHKPQASGGQEEAPNPPSAQAHQLAAAQPENHASAFPRARRQGVSVLRKRYSEPVSLGSAQSPPLSPLALGIKEHELVTGLAQFNLQGSQGMEETSQLTLSDFSPMELESVGHRGPQSLSASSSSLTPMGRDALGSLSPALEDGKAAPDEPGSAALGSVGSSDPENKDPRPLFCISDTTDCSLTLDCSEGTDSRPRGGDPEEGGEGDGSMSSGVGEMGDSQVSSNPTSSPPGEAPAPVSVDSEPSCKGGLPRDKPTKRKDVVAPKRGSLKEASPGASKPGSARRSQGAVAKSVRTLTASENESMRKVMPITKSSRGAGWRRPELSSRGPSQNPPSSTDTVWSRQNSVRRASTGAEEQRLPRGSSGSSSTRPGRDVPLQPRGSFKKPSAKPLRNLPRQKPEENKTCRAHSEGPESPKEEPKTPSVPSVPHELPRVPSFARNTVASSSRSMRTDLPPVAKAPGITRTVSQRQLRVKGDPEDAAPKDSSTLRRASSARAPKKRPESAEGPSANTEAPLKARGAGERASLRRKDSSRTTLGRILNPLRK

SEQ ID NO: 28455 - protein, 1143 aa, Homo sapiens; identical to SEQ ID NO: 28454
  REGION 1..1143: note = ENSP00000260008

SEQ ID NO: 28456 - protein, 280 aa, Homo sapiens
  REGION 1..280: note = ENSP00000362107
MSESFDCAKCNESLYGRKYIQTDSGPYCVPCYDNTFANTCAECQQLIGHDSRELFYEDRHFHEGCFRCCRCQRSLADEPFTCQDSELLCNDCYCSAFSSQCSACGETVMPGSRKLEYGGQTWHEHCFLCSGCEQPLGSRSFVPDKGAHYCVPCYENKFAPRCARCSKTLTQGGVTYRDQPWHRECLVCTGCQTPLAGQQFTSRDEDPYCVACFGELFAPKCSSCKRPIVGLGGGKYVSFEDRHWHHNCFSCARCSTSLVGQGFVPDGDQVLCQGCSQAGP

SEQ ID NO: 28457 - protein, 210 aa, Homo sapiens
  REGION 1..210: note = ENSP00000396390
MTTAHFYCQYCTASLLGKKYVLKDDSPYCVTCYDRVFSNYCEECKKPIESDSKDLCYKDRHWHEGCFKCTKCNHSLVEKPFAAKDERLLCTECYSNECSSKCFHCKRTIMPGSRKMEFKGNYWHETCFVCENCRQPIGTKPLISKESGNYCVPCFEKEFAHYCNFCKKVITSGGITFCDQLWHKECFLCSGCRKDLCEEQFMSRDDYPFC

SEQ ID NO: 28458 - protein, 284 aa, Homo sapiens
  REGION 1..284: note = ENSP00000326022
MTTAHFYCQYCTASLLGKKYVLKDDSPYCVTCYDRVFSNYCEECKKPIESDSKDLCYKDRHWHEGCFKCTKCNHSLVEKPFAAKDERLLCTECYSNECSSKCFHCKRTIMPGSRKMEFKGNYWHETCFVCENCRQPIGTKPLISKESGNYCVPCFEKEFAHYCNFCKKVITSGGITFCDQLWHKECFLCSGCRKDLCEEQFMSRDDYPFCVDCYNHLYANKCVACSKPISGLTGAKFICFQDSQWHSECFNCGKCSVSLVGKGFLTQNKEIFCQKCGSGMDTDI

SEQ ID NO: 28459 - protein, 284 aa, Homo sapiens; identical to SEQ ID NO: 28458
  REGION 1..284: note = ENSP00000442357

SEQ ID NO: 28460 - protein, 1439 aa, Homo sapiens
  REGION 1..1439: note = ENSP00000257209
MATLACRVQFLDDTDPFNSTNFPEPSRPPLFTFREDLALGTQLAGVHRLLQAPHKLDDCTLQLSHNGAYLDLEATLAEQRDELEGFQDDAGRGKKHSIILRTQLSVRVHACIEKLYNSSGRDLRRALFSLKQIFQDDKDLVHEFVVAEGLTCLIKVGAEADQNYQNYILRALGQIMLYVDGMNGVINRNETIQWLYTLIGSKFRLVVKTALKLLLVFVEYSESNAPLLIQAVTAVDTKRGVKPWSNIMEILEEKDGVDTELLVYAMTLVNKTLSGLPDQDTFYDVVDCLEELGIAAVSQRHLNKKGTDLDLVEQLNIYEVALRHEDGDETTEPPPSGCRDRRRASVCSSGGGEHRGLDRRRSRRHSVQSIKSTLSAPTSPCSQSAPSFKPNQVRDLREKYSNFGNNSYHSSRPSSGSSVPTTPTSSVSPPQEARLERSSPSGLLTSSFRQHQESLAAERERRRQEREERLQRIEREERNKFSRDYLDKREEQRQAREERYKYLEQLAAEEHEKELRSRSVSRGRADLSLDLTSPAAPACLAPLSHSPSSSDSQEALTVSASSPGTPHHPQASAGDPEPESEAEPEAEAGAGQVADEAGQDIASAHEGAETEVEQALEQEPEERASLSEKERQNEGVNERDNCSASSVSSSSSTLEREEKEDKLSRDRTTGLWPAGVQDAGVNGQCGDILTNKRFMLDMLYAHNRKSPDDEEKGDGEAGRTQQEAEAVASLATRISTLQANSQTQDESVRRVDVGCLDNRGSVKAFAEKFNSGDLGRGSISPDAEPNDKVPETAPVQPKTESDYIWDQLMANPRELRIQDMDFTDLGEEDDIDVLDVDLGHREAPGPPPPPPPTFLGLPPPPPPPLLDSIPPPPVPGNLLVPPPPVFNAPQGLGWSQVPRGQPTFTKKKKTIRLFWNEVRPFDWPCKNNRRCREFLWSKLEPIKVDTSRLEHLFESKSKELSVSKKTAADGKRQEIIVLDSKRSNAINIGLTVLPPPRTIKIAILNFDEYALNKEGIEKILTMIPTDEEKQKIQEAQLANPEIPLGSAEQFLLTLSSISELSARLHLWAFKMDYETTEKEVAEPLLDLKEGIDQLENNKTLGFILSTLLAIGNFLNGTNAKAFELSYLEKVPEVKDTVHKQSLLHHVCTMVVENFPDSSDLYSEIGAITRSAKVDFDQLQDNLCQMERRCKASWDHLKAIAKHEMKPVLKQRMSEFLKDCAERIIILKIVHRRIINRFHSFLLFMGHPPYAIREVNINKFCRIISEFALEYRTTRERVLQQKQKRANHRERNKTRGKMITDSGKFSGSSPAPPSQPQGLSYAEDAAEHENMKAVLKTSSPSVEDATPALGVRTRSRASRGSTSSWTMGTDDSPNVTDDAADEIMDRIVKSATQVPSQRVVPRERKRSRANRKSLRRTLKSGLTPEEARALGLVGTSELQL

SEQ ID NO: 28461 - protein, 1622 aa, Homo sapiens
  REGION 1..1622: note = ENSP00000466937
MATLACRVQFLDDTDPFNSTNFPEPSRPPLFTFREDLALGTQLAGVHRLLQAPHKLDDCTLQLSHNGAYLDLEATLAEQRDELEGFQDDAGRGKKHSIILRTQLSVRVHACIEKLYNSSGRDLRRALFSLKQIFQDDKDLVHEFVVAEGLTCLIKVGAEADQNYQNYILRALGQIMLYVDGMNGVINRNETIQWLYTLIGSKFRLVVKTALKLLLVFVEYSESNAPLLIQAVTAVDTKRGVKPWSNIMEILEEKDGVDTELLVYAMTLVNKTLSGLPDQDTFYDVVDCLEELGIAAVSQRHLNKKGTDLDLVEQLNIYEVALRHEDGDETTEPPPSGCRDRRRASVCSSGGGEHRGLDRRRSRRHSVQSIKSTLSAPTSPCSQSAPSFKPNQVRDLREKEEEEEEEQPITEPSSEEEREDDASCQGKDSKVGAASGQSPTGRDAAPKSSALPAVSNASSQGKPLLVGTAGGTTWHSGSSGSEATPSALLSPPASAARPSSATPGSLKVSPTIDKLPYVPHSPFHLFSYDFEDSSLSTKEKEAESQKENSSSDSFSLSTYSASEPYHFRSFSSNRYSNFGNNSYHSSRPSSGSSVPTTPTSSVSPPQEARLERSSPSGLLTSSFRQHQESLAAERERRRQEREERLQRIEREERNKFSRDYLDKREEQRQAREERYKYLEQLAAEEHEKELRSRSVSRGRADLSLDLTSPAAPACLAPLSHSPSSSDSQEALTVSASSPGTPHHPQASAGDPEPESEAEPEAEAGAGQVADEAGQDIASAHEGAETEVEQALEQEPEERASLSEKERQNEGVNERDNCSASSVSSSSSTLEREEKEDKLSRDRTTGLWPAGVQDAGVNGQCGDILTNKRFMLDMLYAHNRKSPDDEEKGDGEAGRTQQEAEAVASLATRISTLQANSQTQDESVRRVDVGCLDNRGSVKAFAEKFNSGDLGRGSISPDAEPNDKVPETAPVQPKTESDYIWDQLMANPRELRIQDMDFTDLGEEDDIDVLDVDLGHREAPGPPPPPPPTFLGLPPPPPPPLLDSIPPPPVPGNLLVPPPPVFNAPQGLGWSQVPRGQPTFTKKKKTIRLFWNEVRPFDWPCKNNRRCREFLWSKLEPIKVDTSRLEHLFESKSKELSVSKKTAADGKRQEIIVLDSKRSNAINIGLTVLPPPRTIKIAILNFDEYALNKEGIEKILTMIPTDEEKQKIQEAQLANPEIPLGSAEQFLLTLSSISELSARLHLWAFKMDYETTEKEVAEPLLDLKEGIDQLENNKTLGFILSTLLAIGNFLNGTNAKAFELSYLEKVPEVKDTVHKQSLLHHVCTMVVENFPDSSDLYSEIGAITRSAKVDFDQLQDNLCQMERRCKASWDHLKAIAKHEMKPVLKQRMSEFLKDCAERIIILKIVHRRIINRFHSFLLFMGHPPYAIREVNINKFCRIISEFALEYRTTRERVLQQKQKRANHRERNKTRGKMITDTDEEEEVESGKFSGSSPAPPSQPQGLSYAEDAAEHENMKAVLKTSSPSVEDATPALGVRTRSRASRGSTSSWTMGTDDSPNVTDDAADEIMDRIVKSATQVPSQRVVPRERKRSRANRKSLRRTLKSGLTPEEARALGLVGTSELQL

SEQ ID NO: 28462 - protein, 1422 aa, Homo sapiens
  REGION 1..1422: note = ENSP00000352186
MATLACRVQFLDDTDPFNSTNFPEPSRPPLFTFREDLALGTQLAGVHRLLQAPHKLDDCTLQLSHNGAYLDLEATLAEQRDELEGFQDDAGRGKKHSIILRTQLSVRVHACIEKLYNSSGRDLRRALFSLKQIFQDDKDLVHEFVVAEGLTCLIKVGAEADQNYQNYILRALGQIMLYVDGMNGVINRNETIQWLYTLIGSKFRLVVKTALKLLLVFVEYSESNAPLLIQAVTAVDTKRGVKPWSNIMEILEEKDGVDTELLVYAMTLVNKTLSGLPDQDTFYDVVDCLEELGIAAVSQRHLNKKGTDLDLVEQLNIYEVALRHEDGDETTEPPPSGCRDRRRASVCSSGGGEHRGLDRRRSRRHSVQSIKSTLSAPTSPCSQSAPSFKPNQVRDLREKYSNFGNNSYHSSRPSSGSSVPTTPTSSVSPPQEARLERSSPSGLLTSSFRQHQESLAAERERRRQEREERLQRIEREERNKFRYKYLEQLAAEEHEKELRSRSVSRGRADLSLDLTSPAAPACLAPLSHSPSSSDSQEALTVSASSPGTPHHPQASAGDPEPESEAEPEAEAGAGQVADEAGQDIASAHEGAETEVEQALEQEPEERASLSEKERQNEGVNERDNCSASSVSSSSSTLEREEKEDKLSRDRTTGLWPAGVQDAGVNGQCGDILTNKRFMLDMLYAHNRKSPDDEEKGDGEAGRTQQEAEAVASLATRISTLQANSQTQDESVRRVDVGCLDNRGSVKAFAEKFNSGDLGRGSISPDAEPNDKVPETAPVQPKTESDYIWDQLMANPRELRIQDMDFTDLGEEDDIDVLDVDLGHREAPGPPPPPPPTFLGLPPPPPPPLLDSIPPPPVPGNLLVPPPPVFNAPQGLGWSQVPRGQPTFTKKKKTIRLFWNEVRPFDWPCKNNRRCREFLWSKLEPIKVDTSRLEHLFESKSKELSVSKKTAADGKRQEIIVLDSKRSNAINIGLTVLPPPRTIKIAILNFDEYALNKEGIEKILTMIPTDEEKQKIQEAQLANPEIPLGSAEQFLLTLSSISELSARLHLWAFKMDYETTEKEVAEPLLDLKEGIDQLENNKTLGFILSTLLAIGNFLNGTNAKAFELSYLEKVPEVKDTVHKQSLLHHVCTMVVENFPDSSDLYSEIGAITRSAKVDFDQLQDNLCQMERRCKASWDHLKAIAKHEMKPVLKQRMSEFLKDCAERIIILKIVHRRIINRFHSFLLFMGHPPYAIREVNINKFCRIISEFALEYRTTRERVLQQKQKRANHRERNKTRGKMITDSGKFSGSSPAPPSQPQGLSYAEDAAEHENMKAVLKTSSPSVEDATPALGVRTRSRASRGSTSSWTMGTDDSPNVTDDAADEIMDRIVKSATQVPSQRVVPRERKRSRANRKSLRRTLKSGLTPEEARALGLVGTSELQL

SEQ ID NO: 28463 - protein, 635 aa, Homo sapiens
  REGION 1..635: note = ENSP00000467195
MAMRPRSHPPVGAGTGGGPACVPVAEASTGAWTAEGAAGTRCRASRAPCRPPPVPAPSQLPASSPTKCEICVKNTAILAITLITPQDPHLDPVPRGQPTFTKKKKTIRLFWNEVRPFDWPCKNNRRCREFLWSKLEPIKVDTSRLEHLFESKSKELSVSKKTAADGKRQEIIVLDSKRSNAINIGLTVLPPPRTIKIAILNFDEYALNKEGIEKILTMIPTDEEKQKIQEAQLANPEIPLGSAEQFLLTLSSISELSARLHLWAFKMDYETTEKEVAEPLLDLKEGIDQLENNKTLGFILSTLLAIGNFLNGTNAKAFELSYLEKVPEVKDTVHKQSLLHHVCTMVVENFPDSSDLYSEIGAITRSAKVDFDQLQDNLCQMERRCKASWDHLKAIAKHEMKPVLKQRMSEFLKDCAERIIILKIVHRRIINRFHSFLLFMGHPPYAIREVNINKFCRIISEFALEYRTTRERVLQQKQKRANHRERNKTRGKMITDSGKFSGSSPAPPSQPQGLSYAEDAAEHENMKAVLKTSSPSVEDATPALGVRTRSRASRGSTSSWTMGTDDSPNVTDDAADEIMDRIVKSATQVPSQRVVPRERKRSRANRKSLRRTLKSGLTPEEARALGLVGTSELQL

SEQ ID NO: 28464 - protein, 1200 aa, Homo sapiens
  REGION 1..1200: note = ENSP00000468163
  VARIANT 1: note = Any amino acid
XFRLVVKTALKLLLVFVEYSESNAPLLIQAVTAVDTKRGVKPWSNIMEILEEKDGVDTELLVYAMTLVNKTLSGLPDQDTFYDVVDCLEELGIAAVSQRHLNKKGTDLDLVEQLNIYEVALRHEDGDETTEPPPSGCRDRRRASVCSSGGGEHRGLDRRRSRRHSVQSIKSTLSAPTSPCSQSAPSFKPNQVRDLREKSSPSGLLTSSFRQHQESLAAERERRRQEREERLQRIEREERNKFSRDYLDKREEQRQAREERYKYLEQLAAEEHEKELRSRSVSRGRADLSLDLTSPAAPACLAPLSHSPSSSDSQEALTVSASSPGTPHHPQASAGDPEPESEAEPEAEAGAGQVADEAGQDIASAHEGAETEVEQALEQEPEERASLSEKERQNEGVNERDNCSASSVSSSSSTLEREEKEDKLSRDRTTGLWPAGVQDAGVNGQCGDILTNKRFMLDMLYAHNRKSPDDEEKGDGEAGRTQQEAEAVASLATRISTLQANSQTQDESVRRVDVGCLDNRGSVKAFAEKFNSGDLGRGSISPDAEPNDKVPETAPVQPKTESDYIWDQLMANPRELRIQDMDFTDLGEEDDIDVLDVDLGHREAPGPPPPPPPTFLGLPPPPPPPLLDSIPPPPVPGNLLVPPPPVFNAPQGLGWSQVPRGQPTFTKKKKTIRLFWNEVRPFDWPCKNNRRCREFLWSKLEPIKVDTSRLEHLFESKSKELSVSKKTAADGKRQEIIVLDSKRSNAINIGLTVLPPPRTIKIAILNFDEYALNKEGIEKILTMIPTDEEKQKIQEAQLANPEIPLGSAEQFLLTLSSISELSARLHLWAFKMDYETTEKEVAEPLLDLKEGIDQLENNKTLGFILSTLLAIGNFLNGTNAKAFELSYLEKVPEVKDTVHKQSLLHHVCTMVVENFPDSSDLYSEIGAITRSAKVDFDQLQDNLCQMERRCKASWDHLKAIAKHEMKPVLKQRMSEFLKDCAERIIILKIVHRRIINRFHSFLLFMGHPPYAIREVNINKFCRIISEFALEYRTTRERVLQQKQKRANHRERNKTRGKMITDSGKFSGSSPAPPSQPQGLSYAEDAAEHENMKAVLKTSSPSVEDATPALGVRTRSRASRGSTSSWTMGTDDSPNVTDDAADEIMDRIVKSATQVPSQRVVPRERKRSRANRKSLRRTLKSGLTPEEARALGLVGTSELQL

SEQ ID NO: 28465 - protein, 528 aa, Homo sapiens
  REGION 1..528: note = ENSP00000467462
RLFWNEVRPFDWPCKNNRRCREFLWSKLEPIKVDTSRLEHLFESKSKELSVSKKTAADGKRQEIIVLDSKRSNAINIGLTVLPPPRTIKIAILNFDEYALNKEGIEKILTMIPTDEEKQKIQEAQLANPEIPLGSAEQFLLTLSSISELSARLHLWAFKMDYETTEKEVAEPLLDLKEGIDQLENNKTLGFILSTLLAIGNFLNGTNAKAFELSYLEKVPEVKDTVHKQSLLHHVCTMVVENFPDSSDLYSEIGAITRSAKVDFDQLQDNLCQMERRCKASWDHLKAIAKHEMKPVLKQRMSEFLKDCAERIIILKIVHRRIINRFHSFLLFMGHPPYAIREVNINKFCRIISEFALEYRTTRERVLQQKQKRANHRERNKTRGKMITDSGKFSGSSPAPPSQPQGLSYAEDAAEHENMKAVLKTSSPSVEDATPALGVRTRSRASRGSTSSWTMGTDDSPNVTDDAADEIMDRIVKSATQVPSQRVVPRERKRSRANRKSLRRTLKSGLTPEEARALGLVGTSELQL

SEQ ID NO: 28466 - protein, 375 aa, Homo sapiens
  REGION 1..375: note = ENSP00000465843
  VARIANT 1: note = Any amino acid
XAINIGLTVLPPPRTIKIAILNFDEYALNKEGIEKILTMIPTDEEKQKIQEAQLANPEIPLGSAEQFLLTLSSISELSARLHLWAFKMDYETTEKEVAEPLLDLKEGIDQLENNKTLGFILSTLLAIGNFLNGTNAKAFELSYLEKVPEVKDTVHKQSLLHHVCTMVVENFPDSSDLYSEIGAITRSAKVDFDQLQDNLCQMERRCKASWDHLKAIAKHEMKPVLKQRMSEFLKDCAERIIILKIVHRRIINRFHSFLLFMGHPPYAIREVNINKFCRIISEFALEYRTTRERVLQQKQKRANHRERNKTRGKMITDDPLVPGLWELMTRPMSQMMQLMRSWTASSSQPPKCPVSEWCRGRGNDPGPTGNLCEEP

SEQ ID NO: 28467 - protein, 211 aa, Homo sapiens
  REGION 1..211: note = ENSP00000321962
MVFLKFFCMSFFCHLCQGYFDGPLYPEMSNGTLHHYFVPDGDYEENDDPEKCQLLFRVSDHRRCSQGEGSQVGSLLSLTLREEFTVLGRQVEDAGRVLEGISKSISYDLDGEESYGKYLRRESHQIGDAYSNSDKSLTELESKFKQGQEQDSRQESRLNEDFLGMLVHTRSLLKETLDISVGLRDKYELLALTIRSHGTRLGRLKNDYLKV

SEQ ID NO: 28468 - protein, 29 aa, Homo sapiens
  REGION 1..29: note = ENSP00000386768
MISSTSVYATWRQCFPAFFIPEADGGKAL

SEQ ID NO: 28469 - protein, 759 aa, Homo sapiens
  REGION 1..759: note = ENSP00000333836
MISSTSVYGLKMQWTPEHAQWPEQHFDITSTTRSPAHKVEAYRGHLQRTYQYAWANDDISALTASNLLKKYAEKYSGILEGPVDRPVLSNYSDTPSGLVNGRKNESEPWQPSLNSEAVYPMNCVPDVITASKAGVSSALPPADVSASIGSSPGVASNLTEPSYSSSTCGSHTVPSLHAGLPSQEYAPGYNGSYLHSTYSSQPAPALPSPHPSPLHSSGLLQPPPPPPPPPALVPGYNGTSNLSSYSYPSASYPPQTAVGSGYSPGGAPPPPSAYLPSGIPAPTPLPPTTVPGYTYQGHGLTPIAPSALTNSSASSLKRKAFYMAGQGDMDSSYGNYSYGQQRSTQSPMYRMPDNSISNTNRGNGFDRSAETSSLAFKPTKQLMSSEQQRKFSSQSSRALTPPSYSTAKNSLGSRSSESFGKYTSPVMSEHGDEHRQLLSHPMQGPGLRAATSSNHSVDEQLKNTDTHLIDLVTNEIITQGPPVDWNDIAGLDLVKAVIKEEVLWPVLRSDAFSGLTALPRSILLFGPRGTGKTLLGRCIASQLGATFFKIAGSGLVAKWLGEAEKIIHASFLVARCRQPSVIFVSDIDMLLSSQVNEEHSPVSRMRTEFLMQLDTVLTSAEDQIVVICATSKPEEIDESLRRYFMKRLLIPLPDSTARHQIIVQLLSQHNYCLNDKEFALLVQRTEGFSGLDVAHLCQEAVVGPLHAMPATDLSAIMPSQLRPVTYQDFENAFCKIQPSISQKELDMYVEWNKMFGCSQ

SEQ ID NO: 28470 - protein, 148 aa, Homo sapiens
  REGION 1..148: note = ENSP00000417617
PTEISAKHAIFRVSPDRQSSWQFQRSNSNSSSVITTEDNKIHIHLGSPYMQAVASPVRPASPSAPLQDNRTQGLINGALNKTTNKVTSSITITPTATPLPRQSQITIKEVCKQRIPARIPKPKSTGITKISTKAPTVPMDKPIYQNGC

SEQ ID NO: 28471 - protein, 1135 aa, Homo sapiens
  REGION 1..1135: note = ENSP00000346560
MRSRGSDTEGSAQKKFPRHTKGHSFQGPKNMKHRQQDKDSPSESDVILPCPKAEKPHSGNGHQAEDLSRDDLLFLLSILEGELQARDEVIGILKAEKMDLALLEAQYGFVTPKKVLEALQRDAFQAKSTPWQEDIYEKPMNELDKVVEKHKESYRRILGQLLVAEKSRRQTILELEEEKRKHKEYMEKSDEFICLLEQECERLKKLIDQEIKSQEEKEQEKEKRVTTLKEELTKLKSFALMVVDEQQRLTAQLTLQRQKIQELTTNAKETHTKLALAEARVQEEEQKATRLEKELQTQTTKFHQDQDTIMAKLTNEDSQNRQLQQKLAALSRQIDELEETNRSLRKAEEELQDIKEKISKGEYGNAGIMAEVEELRKRVLDMEGKDEELIKMEEQCRDLNKRLERETLQSKDFKLEVEKLSKRIMALEKLEDAFNKSKQECYSLKCNLEKERMTTKQLSQELESLKVRIKELEAIESRLEKTEFTLKEDLTKLKTLTVMFVDERKTMSEKLKKTEDKLQAASSQLQVEQNKVTTVTEKLIEETKRALKSKTDVEEKMYSVTKERDDLKNKLKAEEEKGNDLLSRVNMLKNRLQSLEAIEKDFLKNKLNQDSGKSTTALHQENNKIKELSQEVERLKLKLKDMKAIEDDLMKTEDEYETLERRYANERDKAQFLSKELEHVKMELAKYKLAEKTETSHEQWLFKRLQEEEAKSGHLSREVDALKEKIHEYMATEDLICHLQGDHSVLQKKLNQQENRNRDLGREIENLTKELERYRHFSKSLRPSLNGRRISDPQVFSKEVQTEAVDNEPPDYKSLIPLERAVINGQLYEESENQDEDPNDEGSVLSFKCSQSTPCPVNRKLWIPWMKSKEGHLQNGKMQTKPNANFVQPGDLVLSHTPGQPLHIKVTPDHVQNTATLEITSPTTESPHSYTSTAVIPNCGTPKQRITILQNASITPVKSKTSTEDLMNLEQGMSPITMATFARAQTPESCGSLTPERTMSPIQVLAVTGSASSPEQGRSPEPTEISAKHAIFRVSPDRQSSWQFQRSNSNSSSVITTEDNKIHIHLGSPYMQAVASPVRPASPSAPLQDNRTQGLINGALNKTTNKVTSSITITPTATPLPRQSQITVEPLLLPH

SEQ ID NO: 28472 - protein, 711 aa, Homo sapiens
  REGION 1..711: note = ENSP00000417774
MALEKLEDAFNKSKQECYSLKCNLEKERMTTKQLSQELESLKVRIKELEAIESRLEKTEFTLKEDLTKLKTLTVMFVDERKTMSEKLKKTEDKLQAASSQLQVEQNKVTTVTEKLIEETKRALKSKTDVEEKMYSVTKERDDLKNKLKAEEEKGNDLLSRVNMLKNRLQSLEAIEKDFLKNKLNQDSGKSTTALHQENNKIKELSQEVERLKLKLKDMKAIEDDLMKTEDEYETLERRYANERDKAQFLSKELEHVKMELAKYKLAEKTETSHEQWLFKRLQEEEAKSGHLSREVDALKEKIHEYMATEDLICHLQGDHSVLQKKLNQQENRNRDLGREIENLTKELERYRHFSKSLRPSLNGRRISDPQVFSKEVQTEAVDNEPPDYKSLIPLERAVINGQLYEESENQDEDPNDEGSVLSFKCSQSTPCPVNRKLWIPWMKSKEGHLQNGKMQTKPNANFVQPGDLVLSHTPGQPLHIKVTPDHVQNTATLEITSPTTESPHSYTSTAVIPNCGTPKQRITILQNASITPVKSKTSTEDLMNLEQGMSPITMATFARAQTPESCGSLTPERTMSPIQVLAVTGSASSPEQGRSPEPTEISAKHAIFRVSPDRQSSWQFQRSNSNSSSVITTEDNKIHIHLGSPYMQAVASPVRPASPSAPLQDNRTQGLINGALNKTTNKVTSSITITPTATPLPRQSQITVEPLLLPH

SEQ ID NO: 28473 - protein, 895 aa, Homo sapiens
  REGION 1..895: note = ENSP00000419642
MVVDEQQRLTAQLTLQRQKIQELTTNAKETHTKLALAEARVQEEEQKATRLEKELQTQTTKFHQDQDTIMAKLTNEDSQNRQLQQKLAALSRQIDELEETNRSLRKAEEELQDIKEKISKGEYGNAGIMAEVEELRKRVLDMEGKDEELIKMEEQCRDLNKRLERETLQSKDFKLEVEKLSKRIMALEKLEDAFNKSKQECYSLKCNLEKERMTTKQLSQELESLKVRIKELEAIESRLEKTEFTLKEDLTKLKTLTVMFVDERKTMSEKLKKTEDKLQAASSQLQVEQNKVTTVTEKLIEETKRALKSKTDVEEKMYSVTKERDDLKNKLKAEEEKGNDLLSRVNMLKNRLQSLEAIEKDFLKNKLNQDSGKSTTALHQENNKIKELSQEVERLKLKLKDMKAIEDDLMKTEDEYETLERRYANERDKAQFLSKELEHVKMELAKYKLAEKTETSHEQWLFKRLQEEEAKSGHLSREVDALKEKIHEYMATEDLICHLQGDHSVLQKKLNQQENRNRDLGREIENLTKELERYRHFSKSLRPSLNGRRISDPQVFSKEVQTEAVDNEPPDYKSLIPLERAVINGQLYEESENQDEDPNDEGSVLSFKCSQSTPCPVNRKLWIPWMKSKEGHLQNGKMQTKPNANFVQPGDLVLSHTPGQPLHIKVTPDHVQNTATLEITSPTTESPHSYTSTAVIPNCGTPKQRITILQNASITPVKSKTSTEDLMNLEQGMSPITMATFARAQTPESCGSLTPERTMSPIQVLAVTGSASSPEQGRSPEPTEISAKHAIFRVSPDRQSSWQFQRSNSNSSSVITTEDNKIHIHLGSPYMQAVASPVRPASPSAPLQDNRTQGLINGALNKTTNKVTSSITITPTATPLPRQSQITVEPLLLPH

SEQ ID NO: 28474 - protein, 1133 aa, Homo sapiens
  REGION 1..1133: note = ENSP00000327880
MRSRGSDTEGSAQKKFPRHTKGHSFQGPKNMKHRQQDKDSPSESDVILPCPKAEKPHSGNGHQAEDLSRDDLLFLLSILEGELQARDEVIGILKAEKMDLALLEAQYGFVTPKKVLEALQRDAFQAKSTPWQEDIYEKPMNELDKVVEKHKESYRRILGQLLVAEKSRRQTILELEEEKRKHKEYMEKSDEFICLLEQECERLKKLIDQEIKSQEEKEQEKEKRVTTLKEELTKLKSFALMVVDEQQRLTAQLTLQRQKIQELTTNAKETHTKLALAEARVQEEEQKATRLEKELQTQTTKFHQDQDTIMAKLTNEDSQNRQLQQKLAALSRQIDELEETNRSLRKAEEELQDIKEKISKGEYGNAGIMAEVEELRKRVLDMEGKDEELIKMEEQCRDLNKRLERETLQSKDFKLEVEKLSKRIMALEKLEDAFNKSKQECYSLKCNLEKERMTTKQLSQELESLKVRIKELEAIESRLEKTEFTLKEDLTKLKTLTVMFVDERKTMSEKLKKTEDKLQAASSQLQVEQNKVTTVTEKLIEETKRALKSKTDVEEKMYSVTKERDDLKNKLKAEEEKGNDLLSRVNMLKNRLQSLEAIEKDFLKNKLNQDSGKSTTALHQENNKIKELSQEVERLKLKLKDMKAIEDDLMKTEDEYETLERRYANERDKAQFLSKELEHVKMELAKYKLAEKTETSHEQWLFKRLQEEEAKSGHLSREVDALKEKIHEYMATEDLICHLQGDHSVLQKKLNQQENRNRDLGREIENLTKELERYRHFSKSLRPSLNGRRISDPQVFSKEVQTEAVDNEPPDYKSLIPLERAVINGQLYEESENQDEDPNDEGSVLSFKCSQSTPCPVNRKLWIPWMKSKEGHLQNGKMQTKPNANFVQPGDLVLSHTPGQPLHIKVTPDHVQNTATLEITSPTTESPHSYTSTAVIPNCGTPKQRITILQNASITPVKSKTSTEDLMNLEQGMSPITMATFARAQTPESCGSLTPERTMSPIQVLAVTGSASSPEQGRSPEPTEISAKHAIFRVSPDRQSSWQFQRSNSNSSSVITTEDNKIHIHLGSPYMQAVASPVRPASPSAPLQDNRTQGLINGALNKTTNKVTSSITITPTATPLPRQSQITVSNIYN

SEQ ID NO: 28475 - protein, 837 aa, Homo sapiens
  REGION 1..837: note = ENSP00000419874
MVVDEQQRLTAQLTLQRQKIQELTTNAKETHTKLALAEARVQEEEQKATRLEKELQTQTTKFHQDQDTIMAKLTNEDSQNRQLQQKLAALSRQIDELEETNRSLRKAEEELQDIKEKISKGEYGNAGIMAEVEELRKRVLDMEGKDEELIKMEEQCRDLNKRLERETLQSKDFKLEVEKLSKRIMALEKLEDAFNKSKQECYSLKCNLEKERMTTKQLSQELESLKVRIKELEAIESRLEKTEFTLKEDLTKLKTLTVMFVDERKTMSEKLKKTEDKLQAASSQLQVEQNKVTTVTEKLIEETKRALKSKTDVEEKMYSVTKERDDLKNKLKAEEEKGNDLLSRVNMLKNRLQSLEAIEKDFLKNKLNQDSGKSTTALHQENNKIKELSQEVERLKLKLKDMKAIEDDLMKTEDEYETLERRYANERDKAQFLSKELEHVKMELAKYKLAEKTETSHEQWLFKRLQEEEAKSGHLSREVDALKEKIHEYMATEDLICHLQGDHSVLQKKLNQQENRNRDLGREIENLTKELERYRHFSKSLRPSLNGRRISDPQVFSKEVQTEAVDNEPPDYKSLIPLERAVINGQLYEESENQDEDPNDEGSVLSFKCSQSTPCPVNRKLWIPWMKSKEGHLQNGKMQTKPNANFVQPGDLVLSHTPGQPLHIKVTPDHVQNTATLEITSPTTESPHSYTSTAVIPNCGTPKQRITILQNASITPVKSKTSTEDLMNLEQGMSPITMATFARAQTPESCGSLTPERTMSPIQVLAVTGSASSPEQGRSPEPTEISAKHAIFRVSPDRQSSWQFQRSNSNSSSVITTEDNKIHIHLGSPYMQAVASP

SEQ ID NO: 28476 - protein, 255 aa, Homo sapiens
  REGION 1..255: note = ENSP00000381371
MRSRGSDTEGSAQKKFPRHTKGHSFQGPKNMKHRQQDKDSPSESDVILPCPKAEKPHSGNGHQAEDLSRDDLLFLLSILEGELQARDEVIGILKAEKMDLALLEAQYGFVTPKKVLEALQRDAFQAKSTPWQEDIYEKPMNELDKVVEKHKESYRRILGQLLVAEKSRRQTILELEEEKRKHKEYMEKSDEFICLLEQECERWSLALLPRLECNGMILAHCNLCLLGSSDSPASAFQVAGITGTRHHAQLVFVFL

SEQ ID NO: 28477 - protein, 893 aa, Homo sapiens
  REGION 1..893: note = ENSP00000373192
MVVDEQQRLTAQLTLQRQKIQELTTNAKETHTKLALAEARVQEEEQKATRLEKELQTQTTKFHQDQDTIMAKLTNEDSQNRQLQQKLAALSRQIDELEETNRSLRKAEEELQDIKEKISKGEYGNAGIMAEVEELRKRVLDMEGKDEELIKMEEQCRDLNKRLERETLQSKDFKLEVEKLSKRIMALEKLEDAFNKSKQECYSLKCNLEKERMTTKQLSQELESLKVRIKELEAIESRLEKTEFTLKEDLTKLKTLTVMFVDERKTMSEKLKKTEDKLQAASSQLQVEQNKVTTVTEKLIEETKRALKSKTDVEEKMYSVTKERDDLKNKLKAEEEKGNDLLSRVNMLKNRLQSLEAIEKDFLKNKLNQDSGKSTTALHQENNKIKELSQEVERLKLKLKDMKAIEDDLMKTEDEYETLERRYANERDKAQFLSKELEHVKMELAKYKLAEKTETSHEQWLFKRLQEEEAKSGHLSREVDALKEKIHEYMATEDLICHLQGDHSVLQKKLNQQENRNRDLGREIENLTKELERYRHFSKSLRPSLNGRRISDPQVFSKEVQTEAVDNEPPDYKSLIPLERAVINGQLYEESENQDEDPNDEGSVLSFKCSQSTPCPVNRKLWIPWMKSKEGHLQNGKMQTKPNANFVQPGDLVLSHTPGQPLHIKVTPDHVQNTATLEITSPTTESPHSYTSTAVIPNCGTPKQRITILQNASITPVKSKTSTEDLMNLEQGMSPITMATFARAQTPESCGSLTPERTMSPIQVLAVTGSASSPEQGRSPEPTEISAKHAIFRVSPDRQSSWQFQRSNSNSSSVITTEDNKIHIHLGSPYMQAVASPVRPASPSAPLQDNRTQGLINGALNKTTNKVTSSITITPTATPLPRQSQITVSNIYN

SEQ ID NO: 28478 - protein, 437 aa, Homo sapiens
  REGION 1..437: note = ENSP00000400223
MGRRMRGAAATAGLWLLALGSLLALWGGLLPPRTELPASRPPEDRLPRRPARSGGPAPAPRFPLPPPLAWDARGGSLKTFRALLTLAAGADGPPRQSRSEPRWHVSARQPRPEESAAVHGGVFWSRGLEEQVPPGFSEAQAAAWLEAARGARMVALERGGCGRSSNRLARFADGTRACVRYGINPEQIQGEALSYYLARLLGLQRHVPPLALARVEARGAQWAQVQEELRAAHWTEGSVVSLTRWLPNLTDVVVPAPWRSEDGRLRPLRDAGGELANLSQAELVDLVQWTDLILFDYLTANFDRLVSNLFSLQWDPRVMQRATSNLHRGPGGALVFLDNEAGLVHGYRVAGMWDKYNEPLLQSVCVFRERTARRVLELHRGQDAAARLLRLYRRHEPRFPELAALADPHAQLLQRRLDFLAKHILHCKAKYGRRSGT

SEQ ID NO: 28479 - protein, 459 aa, Homo sapiens
  REGION 1..459: note = ENSP00000001008
MTAEEMKATESGAQSAPLPMEGVDISPKQDEGVLKVIKREGTGTEMPMIGDRVFVHYTGWLLDGTKFDSSLDRKDKFSFDLGKGEVIKAWDIAIATMKVGEVCHITCKPEYAYGSAGSPPKIPPNATLVFEVELFEFKGEDLTEEEDGGIIRRIQTRGEGYAKPNEGAIVEVALEGYYKDKLFDQRELRFEIGEGENLDLPYGLERAIQRMEKGEHSIVYLKPSYAFGSVGKEKFQIPPNAELKYELHLKSFEKAKESWEMNSEEKLEQSTIVKERGTVYFKEGKYKQALLQYKKIVSWLEYESSFSNEEAQKAQALRLASHLNLAMCHLKLQAFSAAIESCNKALELDSNNEKGLFRRGEAHLAVNDFELARADFQKVLQLYPNNKAAKTQLAVCQQRIRRQLAREKKLYANMFERLAEEENKAKAEASSGDHPTDTEMKEEQKSNTAGSQSQVETEA

SEQ ID NO: 28480 - protein, 51 aa, Homo sapiens
  REGION 1..51: note = ENSP00000439703
MTAEEMKATESGAQSAPLPMEGVDISPKQDEGVLKIIGDLKRLLQRLSCGM

SEQ ID NO: 28481 - protein, 86 aa, Homo sapiens
  REGION 1..86: note = ENSP00000446368
MPMIGDRVFVHYTGWLLDGTKFDSSLDRKDKFSFDLGKGEVIKAWDIAIATMKVGEVCHITCKPEYAYGSAGSPPKIPPNATLVFE

SEQ ID NO: 28482 - protein, 84 aa, Homo sapiens
  REGION 1..84: note = ENSP00000438491
  VARIANT 1: note = Any amino acid
XVNDFELARADFQKVLQLYPNNKAAKTQLAVCQQRIRRQLAREKKLYANMFERLAEEENKAPWLTPAIPALCRAKVGGSLEPSR

SEQ ID NO: 28483 - protein, 23 aa, Homo sapiens
  REGION 1..23: note = ENSP00000442193
  VARIANT 1: note = Any amino acid
XKEEQKSNTAGSQSQIRKPRLRS

SEQ ID NO: 28484 - protein, 51 aa, Homo sapiens; identical to SEQ ID NO: 28480
  REGION 1..51: note = ENSP00000486800

SEQ ID NO: 28485 - protein, 457 aa, Homo sapiens
  REGION 1..457: note = ENSP00000349811
MTTDEGAKNNEESPTATVAEQGEDITSKKDRGVLKIVKRVGNGEETPMIGDKVYVHYKGKLSNGKKFDSSHDRNEPFVFSLGKGQVIKAWDIGVATMKKGEICHLLCKPEYAYGSAGSLPKIPSNATLFFEIELLDFKGEDLFEDGGIIRRTKRKGEGYSNPNEGATVEIHLEGRCGGRMFDCRDVAFTVGEGEDHDIPIGIDKALEKMQREEQCILYLGPRYGFGEAGKPKFGIEPNAELIYEVTLKSFEKAKESWEMDTKEKLEQAAIVKEKGTVYFKGGKYMQAVIQYGKIVSWLEMEYGLSEKESKASESFLLAAFLNLAMCYLKLREYTKAVECCDKALGLDSANEKGLYRRGEAQLLMNEFESAKGDFEKVLEVNPQNKAARLQISMCQKKAKEHNERDRRIYANMFKKFAEQDAKEEANKAMGKKTSEGVTNEKGTDSQAMEEEKPEGHV

SEQ ID NO: 28486 - protein, 457 aa, Homo sapiens; identical to SEQ ID NO: 28485
  REGION 1..457: note = ENSP00000444810

SEQ ID NO: 28487 - protein, 457 aa, Homo sapiens; identical to SEQ ID NO: 28485
  REGION 1..457: note = ENSP00000441205

SEQ ID NO: 28488 - protein, 268 aa, Homo sapiens
  REGION 1..268: note = ENSP00000442340
MTTDEGAKNNEESPTATVAEQGEDITSKKDRGVLKIVKRVGNGEETPMIGDKVYVHYKGKLSNGKKFDSSHDRNEPFVFSLGKGQVIKAWDIGVATMKKGEICHLLCKPEYAYGSAGSLPKIPSNATLFFEIELLDFKGEDLFEDGGIIRRTKRKGEGYSNPNEGATVEIHLEGRCGGRMFDCRDVAFTVGEGEDHDIPIGIDKALEKMQREEQCILYLGPRPKNPGRWIPKKNWSRLPLSKRREPYTSRCVSPYAILSISKNLFKCW

SEQ ID NO: 28489 - protein, 49 aa, Homo sapiens
  REGION 1..49: note = ENSP00000477262
MTASGSPDYGQPHKINPLPPQQEWINQPVRVNVKREYDHMNGSRFTAGL

SEQ ID NO: 28490 - protein, 106 aa, Homo sapiens
  REGION 1..106: note = ENSP00000476428
MTASGSPDYGQPHKINPLPPQQEWINQPVRVNVKREYDHMNGSRESPVDCSVSKCSKLVGGGESNPMNYNSYMDEKNGPPPPNMTTNERRVIVPADPTLWTQEHVR

SEQ ID NO: 28491 - protein, 452 aa, Homo sapiens
  REGION 1..452: note = ENSP00000433488
MDGTIKEALSVVSDDQSLFDSAYGAAAHLPKADMTASGSPDYGQPHKINPLPPQQEWINQPVRVNVKREYDHMNGSRESPVDCSVSKCSKLVGGGESNPMNYNSYMDEKNGPPPPNMTTNERRVIVPADPTLWTQEHVRQWLEWAIKEYSLMEIDTSFFQNMDGKELCKMNKEDFLRATTLYNTEVLLSHLSYLRESSLLAYNTTSHTDQSSRLSVKEDPSYDSVRRGAWGNNMNSGLNKSPPLGGAQTISKNTEQRPQPDPYQILGPTSSRLANPGSGQIQLWQFLLELLSDSANASCITWEGTNGEFKMTDPDEVARRWGERKSKPNMNYDKLSRALRYYYDKNIMTKVHGKRYAYKFDFHGIAQALQPHPTESSMYKYPSDISYMPSYHAHQQKVNFVPPHPSSMPVTSSSFFGAASQYWTSPTGGIYPNPNVPRHPNTHVPSHLGSYY

SEQ ID NO: 28492 - protein, 82 aa, Homo sapiens
  REGION 1..82: note = ENSP00000399985
MDGTIKEALSVVSDDQSLFDSAYGAAAHLPKADMTASGSPDYGQPHKINPLPPQQEWINQPVRVNVKREYDHMNGSRRQLPH

SEQ ID NO: 28493 - protein, 419 aa, Homo sapiens
  REGION 1..419: note = ENSP00000432950
MTASGSPDYGQPHKINPLPPQQEWINQPVRVNVKREYDHMNGSRESPVDCSVSKCSKLVGGGESNPMNYNSYMDEKNGPPPPNMTTNERRVIVPADPTLWTQEHVRQWLEWAIKEYSLMEIDTSFFQNMDGKELCKMNKEDFLRATTLYNTEVLLSHLSYLRESSLLAYNTTSHTDQSSRLSVKEDPSYDSVRRGAWGNNMNSGLNKSPPLGGAQTISKNTEQRPQPDPYQILGPTSSRLANPGSGQIQLWQFLLELLSDSANASCITWEGTNGEFKMTDPDEVARRWGERKSKPNMNYDKLSRALRYYYDKNIMTKVHGKRYAYKFDFHGIAQALQPHPTESSMYKYPSDISYMPSYHAHQQKVNFVPPHPSSMPVTSSSFFGAASQYWTSPTGGIYPNPNVPRHPNTHVPSHLGSYY

SEQ ID NO: 28494 - protein, 259 aa, Homo sapiens
  REGION 1..259: note = ENSP00000339627
MDPGSLLAYNTTSHTDQSSRLSVKEDPSYDSVRRGAWGNNMNSGLNKSPPLGGAQTISKNTEQRPQPDPYQILGPTSSRLANPGSGQIQLWQFLLELLSDSANASCITWEGTNGEFKMTDPDEVARRWGERKSKPNMNYDKLSRALRYYYDKNIMTKVHGKRYAYKFDFHGIAQALQPHPTESSMYKYPSDISYMPSYHAHQQKVNFVPPHPSSMPVTSSSFFGAASQYWTSPTGGIYPNPNVPRHPNTHVPSHLGSYY

SEQ ID NO: 28495 - protein, 386 aa, Homo sapiens
  REGION 1..386: note = ENSP00000281428
MEGGLAGERARESPVDCSVSKCSKLVGGGESNPMNYNSYMDEKNGPPPPNMTTNERRVIVPADPTLWTQEHVRQWLEWAIKEYSLMEIDTSFFQNMDGKELCKMNKEDFLRATTLYNTEVLLSHLSYLRESSLLAYNTTSHTDQSSRLSVKEDPSYDSVRRGAWGNNMNSGLNKSPPLGGAQTISKNTEQRPQPDPYQILGPTSSRLANPGSGQIQLWQFLLELLSDSANASCITWEGTNGEFKMTDPDEVARRWGERKSKPNMNYDKLSRALRYYYDKNIMTKVHGKRYAYKFDFHGIAQALQPHPTESSMYKYPSDISYMPSYHAHQQKVNFVPPHPSSMPVTSSSFFGAASQYWTSPTGGIYPNPNVPRHPNTHVPSHLGSYY

SEQ ID NO: 28496 - protein, 2633 aa, Homo sapiens
  REGION 1..2633: note = ENSP00000420213
MPVTEKDLAEDAPWKKIQQNTFTRWCNEHLKCVNKRIGNLQTDLSDGLRLIALLEVLSQKRMYRKYHQRPTFRQMQLENVSVALEFLDRESIKLVSIDSKAIVDGNLKLILGLVWTLILHYSISMPVWEDEGDDDAKKQTPKQRLLGWIQNKIPYLPITNFNQNWQDGKALGALVDSCAPGLCPDWESWDPQKPVDNAREAMQQADDWLGVPQVITPEEIIHPDVDEHSVMTYLSQFPKAKLKPGAPLKPKLNPKKARAYGRGIEPTGNMVKQPAKFTVDTISAGQGDVMVFVEDPEGNKEEAQVTPDSDKNKTYSVEYLPKVTGLHKVTVLFAGQHISKSPFEVSVDKAQGDASKVTAKGPGLEAVGNIANKPTYFDIYTAGAGVGDIGVEVEDPQGKNTVELLVEDKGNQVYRCVYKPMQPGPHVVKIFFAGDTIPKSPFVVQVGEACNPNACRASGRGLQPKGVRIRETTDFKVDTKAAGSGELGVTMKGPKGLEELVKQKDFLDGVYAFEYYPSTPGRYSIAITWGGHHIPKSPFEVQVGPEAGMQKVRAWGPGLHGGIVGRSADFVVESIGSEVGSLGFAIEGPSQAKIEYNDQNDGSCDVKYWPKEPGEYAVHIMCDDEDIKDSPYMAFIHPATGGYNPDLVRAYGPGLEKSGCIVNNLAEFTVDPKDAGKAPLKIFAQDGEGQRIDIQMKNRMDGTYACSYTPVKAIKHTIAVVWGGVNIPHSPYRVNIGQGSHPQKVKVFGPGVERSGLKANEPTHFTVDCTEAGEGDVSVGIKCDARVLSEDEEDVDFDIIHNANDTFTVKYVPPAAGRYTIKVLFASQEIPASPFRVKVDPSHDASKVKAEGPGLSKAGVENGKPTHFTVYTKGAGKAPLNVQFNSPLPGDAVKDLDIIDNYDYSHTVKYTPTQQGNMQVLVTYGGDPIPKSPFTVGVAAPLDLSKIKLNGLENRVEVGKDQEFTVDTRGAGGQGKLDVTILSPSRKVVPCLVTPVTGRENSTAKFIPREEGLYAVDVTYDGHPVPGSPYTVEASLPPDPSKVKAHGPGLEGGLVGKPAEFTIDTKGAGTGGLGLTVEGPCEAKIECSDNGDGTCSVSYLPTKPGEYFVNILFEEVHIPGSPFKADIEMPFDPSKVVASGPGLEHGKVGEAGLLSVDCSEAGPGALGLEAVSDSGTKAEVSIQNNKDGTYAVTYVPLTAGMYTLTMKYGGELVPHFPARVKVEPAVDTSRIKVFGPGIEGKDVFREATTDFTVDSRPLTQVGGDHIKAHIANPSGASTECFVTDNADGTYQVEYTPFEKGLHVVEVTYDDVPIPNSPFKVAVTEGCQPSRVQAQGPGLKEAFTNKPNVFTVVTRGAGIGGLGITVEGPSESKINCRDNKDGSCSAEYIPFAPGDYDVNITYGGAHIPGSPFRVPVKDVVDPSKVKIAGPGLGSGVRARVLQSFTVDSSKAGLAPLEVRVLGPRADDTDSQSWRSPLKALSEFFKGDPKGDFNKTGLVEPVNVVDNGDGTHTVTYTPSQEGPYMVSVKYADEEIPRSPFKVKVLPTYDASKVTASGPGLSSYGVPASLPVDFAIDARDAGEGLLAVQITDQEGKPKRAIVHDNKDGTYAVTYIPDKTGRYMIGVTYGGDDIPLSPYRIRATQTGDASKCLATGPGIASTVKTGEEVGFVVDAKTAGKGKVTCTVLTPDGTEAEADVIENEDGTYDIFYTAAKPGTYVIYVRFGGVDIPNSPFTVMATDGEVTAVEEAPVNACPPGFRPWVTEEAYVPVSDMNGLGFKPFDLVIPFAVRKGEITGEVHMPSGKTATPEIVDNKDGTVTVRYAPTEVGLHEMHIKYMGSHIPESPLQFYVNYPNSGSVSAYGPGLVYGVANKTATFTIVTEDAGEGGLDLAIEGPSKAEISCIDNKDGTCTVTYLPTLPGDYSILVKYNDKHIPGSPFTAKITDDSRRCSQVKLGSAADFLLDISETDLSSLTASIKAPSGRDEPCLLKRLPNNHIGISFIPREVGEHLVSIKKNGNHVANSPVSIMVVQSEIGDARRAKVYGRGLSEGRTFEMSDFIVDTRDAGYGGISLAVEGPSKVDIQTEDLEDGTCKVSYFPTVPGVYIVSTKFADEHVPGSPFTVKISGEGRVKESITRTSRAPSVATVGSICDLNLKIPEINSSDMSAHVTSPSGRVTEAEIVPMGKNSHCVRFVPQEMGVHTVSVKYRGQHVTGSPFQFTVGPLGEGGAHKVRAGGPGLERGEAGVPAEFSIWTREAGAGGLSIAVEGPSKAEITFDDHKNGSCGVSYIAQEPGNYEVSIKFNDEHIPESPYLVPVIAPSDDARRLTVMSLQESGLKVNQPASFAIRLNGAKGKIDAKVHSPSGAVEECHVSELEPDKYAVRFIPHENGVHTIDVKFNGSHVVGSPFKVRVGEPGQAGNPALVSAYGTGLEGGTTGIQSEFFINTTRAGPGTLSVTIEGPSKVKMDCQETPEGYKVMYTPMAPGNYLISVKYGGPNHIVGSPFKAKVTGQRLVSPGSANETSSILVESVTRSSTETCYSAIPKASSDASKVTSKGAGLSKAFVGQKSSFLVDCSKAGSNMLLIGVHGPTTPCEEVSMKHVGNQQYNVTYVVKERGDYVLAVKWGEEHIPGSPFHVTVP

SEQ ID NO: 28497 - protein, 2602 aa, Homo sapiens
  REGION 1..2602: note = ENSP00000295956
MPVTEKDLAEDAPWKKIQQNTFTRWCNEHLKCVNKRIGNLQTDLSDGLRLIALLEVLSQKRMYRKYHQRPTFRQMQLENVSVALEFLDRESIKLVSIDSKAIVDGNLKLILGLVWTLILHYSISMPVWEDEGDDDAKKQTPKQRLLGWIQNKIPYLPITNFNQNWQDGKALGALVDSCAPGLCPDWESWDPQKPVDNAREAMQQADDWLGVPQVITPEEIIHPDVDEHSVMTYLSQFPKAKLKPGAPLKPKLNPKKARAYGRGIEPTGNMVKQPAKFTVDTISAGQGDVMVFVEDPEGNKEEAQVTPDSDKNKTYSVEYLPKVTGLHKVTVLFAGQHISKSPFEVSVDKAQGDASKVTAKGPGLEAVGNIANKPTYFDIYTAGAGVGDIGVEVEDPQGKNTVELLVEDKGNQVYRCVYKPMQPGPHVVKIFFAGDTIPKSPFVVQVGEACNPNACRASGRGLQPKGVRIRETTDFKVDTKAAGSGELGVTMKGPKGLEELVKQKDFLDGVYAFEYYPSTPGRYSIAITWGGHHIPKSPFEVQVGPEAGMQKVRAWGPGLHGGIVGRSADFVVESIGSEVGSLGFAIEGPSQAKIEYNDQNDGSCDVKYWPKEPGEYAVHIMCDDEDIKDSPYMAFIHPATGGYNPDLVRAYGPGLEKSGCIVNNLAEFTVDPKDAGKAPLKIFAQDGEGQRIDIQMKNRMDGTYACSYTPVKAIKHTIAVVWGGVNIPHSPYRVNIGQGSHPQKVKVFGPGVERSGLKANEPTHFTVDCTEAGEGDVSVGIKCDARVLSEDEEDVDFDIIHNANDTFTVKYVPPAAGRYTIKVLFASQEIPASPFRVKVDPSHDASKVKAEGPGLSKAGVENGKPTHFTVYTKGAGKAPLNVQFNSPLPGDAVKDLDIIDNYDYSHTVKYTPTQQGNMQVLVTYGGDPIPKSPFTVGVAAPLDLSKIKLNGLENRVEVGKDQEFTVDTRGAGGQGKLDVTILSPSRKVVPCLVTPVTGRENSTAKFIPREEGLYAVDVTYDGHPVPGSPYTVEASLPPDPSKVKAHGPGLEGGLVGKPAEFTIDTKGAGTGGLGLTVEGPCEAKIECSDNGDGTCSVSYLPTKPGEYFVNILFEEVHIPGSPFKADIEMPFDPSKVVASGPGLEHGKVGEAGLLSVDCSEAGPGALGLEAVSDSGTKAEVSIQNNKDGTYAVTYVPLTAGMYTLTMKYGGELVPHFPARVKVEPAVDTSRIKVFGPGIEGKDVFREATTDFTVDSRPLTQVGGDHIKAHIANPSGASTECFVTDNADGTYQVEYTPFEKGLHVVEVTYDDVPIPNSPFKVAVTEGCQPSRVQAQGPGLKEAFTNKPNVFTVVTRGAGIGGLGITVEGPSESKINCRDNKDGSCSAEYIPFAPGDYDVNITYGGAHIPGSPFRVPVKDVVDPSKVKIAGPGLGSGVRARVLQSFTVDSSKAGLAPLEVRVLGPRGLVEPVNVVDNGDGTHTVTYTPSQEGPYMVSVKYADEEIPRSPFKVKVLPTYDASKVTASGPGLSSYGVPASLPVDFAIDARDAGEGLLAVQITDQEGKPKRAIVHDNKDGTYAVTYIPDKTGRYMIGVTYGGDDIPLSPYRIRATQTGDASKCLATGPGIASTVKTGEEVGFVVDAKTAGKGKVTCTVLTPDGTEAEADVIENEDGTYDIFYTAAKPGTYVIYVRFGGVDIPNSPFTVMATDGEVTAVEEAPVNACPPGFRPWVTEEAYVPVSDMNGLGFKPFDLVIPFAVRKGEITGEVHMPSGKTATPEIVDNKDGTVTVRYAPTEVGLHEMHIKYMGSHIPESPLQFYVNYPNSGSVSAYGPGLVYGVANKTATFTIVTEDAGEGGLDLAIEGPSKAEISCIDNKDGTCTVTYLPTLPGDYSILVKYNDKHIPGSPFTAKITDDSRRCSQVKLGSAADFLLDISETDLSSLTASIKAPSGRDEPCLLKRLPNNHIGISFIPREVGEHLVSIKKNGNHVANSPVSIMVVQSEIGDARRAKVYGRGLSEGRTFEMSDFIVDTRDAGYGGISLAVEGPSKVDIQTEDLEDGTCKVSYFPTVPGVYIVSTKFADEHVPGSPFTVKISGEGRVKESITRTSRAPSVATVGSICDLNLKIPEINSSDMSAHVTSPSGRVTEAEIVPMGKNSHCVRFVPQEMGVHTVSVKYRGQHVTGSPFQFTVGPLGEGGAHKVRAGGPGLERGEAGVPAEFSIWTREAGAGGLSIAVEGPSKAEITFDDHKNGSCGVSYIAQEPGNYEVSIKFNDEHIPESPYLVPVIAPSDDARRLTVMSLQESGLKVNQPASFAIRLNGAKGKIDAKVHSPSGAVEECHVSELEPDKYAVRFIPHENGVHTIDVKFNGSHVVGSPFKVRVGEPGQAGNPALVSAYGTGLEGGTTGIQSEFFINTTRAGPGTLSVTIEGPSKVKMDCQETPEGYKVMYTPMAPGNYLISVKYGGPNHIVGSPFKAKVTGQRLVSPGSANETSSILVESVTRSSTETCYSAIPKASSDASKVTSKGAGLSKAFVGQKSSFLVDCSKAGSNMLLIGVHGPTTPCEEVSMKHVGNQQYNVTYVVKERGDYVLAVKWGEEHIPGSPFHVTVP

SEQ ID NO: 28498 - protein, 2578 aa, Homo sapiens
  REGION 1..2578: note = ENSP00000351339
MPVTEKDLAEDAPWKKIQQNTFTRWCNEHLKCVNKRIGNLQTDLSDGLRLIALLEVLSQKRMYRKYHQRPTFRQMQLENVSVALEFLDRESIKLVSIDSKAIVDGNLKLILGLVWTLILHYSISMPVWEDEGDDDAKKQTPKQRLLGWIQNKIPYLPITNFNQNWQDGKALGALVDSCAPGLCPDWESWDPQKPVDNAREAMQQADDWLGVPQVITPEEIIHPDVDEHSVMTYLSQFPKAKLKPGAPLKPKLNPKKARAYGRGIEPTGNMVKQPAKFTVDTISAGQGDVMVFVEDPEGNKEEAQVTPDSDKNKTYSVEYLPKVTGLHKVTVLFAGQHISKSPFEVSVDKAQGDASKVTAKGPGLEAVGNIANKPTYFDIYTAGAGVGDIGVEVEDPQGKNTVELLVEDKGNQVYRCVYKPMQPGPHVVKIFFAGDTIPKSPFVVQVGEACNPNACRASGRGLQPKGVRIRETTDFKVDTKAAGSGELGVTMKGPKGLEELVKQKDFLDGVYAFEYYPSTPGRYSIAITWGGHHIPKSPFEVQVGPEAGMQKVRAWGPGLHGGIVGRSADFVVESIGSEVGSLGFAIEGPSQAKIEYNDQNDGSCDVKYWPKEPGEYAVHIMCDDEDIKDSPYMAFIHPATGGYNPDLVRAYGPGLEKSGCIVNNLAEFTVDPKDAGKAPLKIFAQDGEGQRIDIQMKNRMDGTYACSYTPVKAIKHTIAVVWGGVNIPHSPYRVNIGQGSHPQKVKVFGPGVERSGLKANEPTHFTVDCTEAGEGDVSVGIKCDARVLSEDEEDVDFDIIHNANDTFTVKYVPPAAGRYTIKVLFASQEIPASPFRVKVDPSHDASKVKAEGPGLSKAGVENGKPTHFTVYTKGAGKAPLNVQFNSPLPGDAVKDLDIIDNYDYSHTVKYTPTQQGNMQVLVTYGGDPIPKSPFTVGVAAPLDLSKIKLNGLENRVEVGKDQEFTVDTRGAGGQGKLDVTILSPSRKVVPCLVTPVTGRENSTAKFIPREEGLYAVDVTYDGHPVPGSPYTVEASLPPDPSKVKAHGPGLEGGLVGKPAEFTIDTKGAGTGGLGLTVEGPCEAKIECSDNGDGTCSVSYLPTKPGEYFVNILFEEVHIPGSPFKADIEMPFDPSKVVASGPGLEHGKVGEAGLLSVDCSEAGPGALGLEAVSDSGTKAEVSIQNNKDGTYAVTYVPLTAGMYTLTMKYGGELVPHFPARVKVEPAVDTSRIKVFGPGIEGKDVFREATTDFTVDSRPLTQVGGDHIKAHIANPSGASTECFVTDNADGTYQVEYTPFEKGLHVVEVTYDDVPIPNSPFKVAVTEGCQPSRVQAQGPGLKEAFTNKPNVFTVVTRGAGIGGLGITVEGPSESKINCRDNKDGSCSAEYIPFAPGDYDVNITYGGAHIPGSPFRVPVKDVVDPSKVKIAGPGLGSGVRARVLQSFTVDSSKAGLAPLEVRVLGPRGLVEPVNVVDNGDGTHTVTYTPSQEGPYMVSVKYADEEIPRSPFKVKVLPTYDASKVTASGPGLSSYGVPASLPVDFAIDARDAGEGLLAVQITDQEGKPKRAIVHDNKDGTYAVTYIPDKTGRYMIGVTYGGDDIPLSPYRIRATQTGDASKCLATGPGIASTVKTGEEVGFVVDAKTAGKGKVTCTVLTPDGTEAEADVIENEDGTYDIFYTAAKPGTYVIYVRFGGVDIPNSPFTVMVTEEAYVPVSDMNGLGFKPFDLVIPFAVRKGEITGEVHMPSGKTATPEIVDNKDGTVTVRYAPTEVGLHEMHIKYMGSHIPESPLQFYVNYPNSGSVSAYGPGLVYGVANKTATFTIVTEDAGEGGLDLAIEGPSKAEISCIDNKDGTCTVTYLPTLPGDYSILVKYNDKHIPGSPFTAKITDDSRRCSQVKLGSAADFLLDISETDLSSLTASIKAPSGRDEPCLLKRLPNNHIGISFIPREVGEHLVSIKKNGNHVANSPVSIMVVQSEIGDARRAKVYGRGLSEGRTFEMSDFIVDTRDAGYGGISLAVEGPSKVDIQTEDLEDGTCKVSYFPTVPGVYIVSTKFADEHVPGSPFTVKISGEGRVKESITRTSRAPSVATVGSICDLNLKIPEINSSDMSAHVTSPSGRVTEAEIVPMGKNSHCVRFVPQEMGVHTVSVKYRGQHVTGSPFQFTVGPLGEGGAHKVRAGGPGLERGEAGVPAEFSIWTREAGAGGLSIAVEGPSKAEITFDDHKNGSCGVSYIAQEPGNYEVSIKFNDEHIPESPYLVPVIAPSDDARRLTVMSLQESGLKVNQPASFAIRLNGAKGKIDAKVHSPSGAVEECHVSELEPDKYAVRFIPHENGVHTIDVKFNGSHVVGSPFKVRVGEPGQAGNPALVSAYGTGLEGGTTGIQSEFFINTTRAGPGTLSVTIEGPSKVKMDCQETPEGYKVMYTPMAPGNYLISVKYGGPNHIVGSPFKAKVTGQRLVSPGSANETSSILVESVTRSSTETCYSAIPKASSDASKVTSKGAGLSKAFVGQKSSFLVDCSKAGSNMLLIGVHGPTTPCEEVSMKHVGNQQYNVTYVVKERGDYVLAVKWGEEHIPGSPFHVTVP

SEQ ID NO: 28499 - protein, 2591 aa, Homo sapiens
  REGION 1..2591: note = ENSP00000415599
MPVTEKDLAEDAPWKKIQQNTFTRWCNEHLKCVNKRIGNLQTDLSDGLRLIALLEVLSQKRMYRKYHQRPTFRQMQLENVSVALEFLDRESIKLVSIDSKAIVDGNLKLILGLVWTLILHYSISMPVWEDEGDDDAKKQTPKQRLLGWIQNKIPYLPITNFNQNWQDGKALGALVDSCAPGLCPDWESWDPQKPVDNAREAMQQADDWLGVPQVITPEEIIHPDVDEHSVMTYLSQFPKAKLKPGAPLKPKLNPKKARAYGRGIEPTGNMVKQPAKFTVDTISAGQGDVMVFVEDPEGNKEEAQVTPDSDKNKTYSVEYLPKVTGLHKVTVLFAGQHISKSPFEVSVDKAQGDASKVTAKGPGLEAVGNIANKPTYFDIYTAGAGVGDIGVEVEDPQGKNTVELLVEDKGNQVYRCVYKPMQPGPHVVKIFFAGDTIPKSPFVVQVGEACNPNACRASGRGLQPKGVRIRETTDFKVDTKAAGSGELGVTMKGPKGLEELVKQKDFLDGVYAFEYYPSTPGRYSIAITWGGHHIPKSPFEVQVGPEAGMQKVRAWGPGLHGGIVGRSADFVVESIGSEVGSLGFAIEGPSQAKIEYNDQNDGSCDVKYWPKEPGEYAVHIMCDDEDIKDSPYMAFIHPATGGYNPDLVRAYGPGLEKSGCIVNNLAEFTVDPKDAGKAPLKIFAQDGEGQRIDIQMKNRMDGTYACSYTPVKAIKHTIAVVWGGVNIPHSPYRVNIGQGSHPQKVKVFGPGVERSGLKANEPTHFTVDCTEAGEGDVSVGIKCDARVLSEDEEDVDFDIIHNANDTFTVKYVPPAAGRYTIKVLFASQEIPASPFRVKVDPSHDASKVKAEGPGLSKAGVENGKPTHFTVYTKGAGKAPLNVQFNSPLPGDAVKDLDIIDNYDYSHTVKYTPTQQGNMQVLVTYGGDPIPKSPFTVGVAAPLDLSKIKLNGLENRVEVGKDQEFTVDTRGAGGQGKLDVTILSPSRKVVPCLVTPVTGRENSTAKFIPREEGLYAVDVTYDGHPVPGSPYTVEASLPPDPSKVKAHGPGLEGGLVGKPAEFTIDTKGAGTGGLGLTVEGPCEAKIECSDNGDGTCSVSYLPTKPGEYFVNILFEEVHIPGSPFKADIEMPFDPSKVVASGPGLEHGKVGEAGLLSVDCSEAGPGALGLEAVSDSGTKAEVSIQNNKDGTYAVTYVPLTAGMYTLTMKYGGELVPHFPARVKVEPAVDTSRIKVFGPGIEGKDVFREATTDFTVDSRPLTQVGGDHIKAHIANPSGASTECFVTDNADGTYQVEYTPFEKGLHVVEVTYDDVPIPNSPFKVAVTEGCQPSRVQAQGPGLKEAFTNKPNVFTVVTRGAGIGGLGITVEGPSESKINCRDNKDGSCSAEYIPFAPGDYDVNITYGGAHIPGSPFRVPVKDVVDPSKVKIAGPGLGSGVRARVLQSFTVDSSKAGLAPLEVRVLGPRGLVEPVNVVDNGDGTHTVTYTPSQEGPYMVSVKYADEEIPRSPFKVKVLPTYDASKVTASGPGLSSYGVPASLPVDFAIDARDAGEGLLAVQITDQEGKPKRAIVHDNKDGTYAVTYIPDKTGRYMIGVTYGGDDIPLSPYRIRATQTGDASKCLATGPGIASTVKTGEEVGFVVDAKTAGKGKVTCTVLTPDGTEAEADVIENEDGTYDIFYTAAKPGTYVIYVRFGGVDIPNSPFTVMATDGEVTAVEEAPVTEEAYVPVSDMNGLGFKPFDLVIPFAVRKGEITGEVHMPSGKTATPEIVDNKDGTVTVRYAPTEVGLHEMHIKYMGSHIPESPLQFYVNYPNSGSVSAYGPGLVYGVANKTATFTIVTEDAGEGGLDLAIEGPSKAEISCIDNKDGTCTVTYLPTLPGDYSILVKYNDKHIPGSPFTAKITDDSRRCSQVKLGSAADFLLDISETDLSSLTASIKAPSGRDEPCLLKRLPNNHIGISFIPREVGEHLVSIKKNGNHVANSPVSIMVVQSEIGDARRAKVYGRGLSEGRTFEMSDFIVDTRDAGYGGISLAVEGPSKVDIQTEDLEDGTCKVSYFPTVPGVYIVSTKFADEHVPGSPFTVKISGEGRVKESITRTSRAPSVATVGSICDLNLKIPEINSSDMSAHVTSPSGRVTEAEIVPMGKNSHCVRFVPQEMGVHTVSVKYRGQHVTGSPFQFTVGPLGEGGAHKVRAGGPGLERGEAGVPAEFSIWTREAGAGGLSIAVEGPSKAEITFDDHKNGSCGVSYIAQEPGNYEVSIKFNDEHIPESPYLVPVIAPSDDARRLTVMSLQESGLKVNQPASFAIRLNGAKGKIDAKVHSPSGAVEECHVSELEPDKYAVRFIPHENGVHTIDVKFNGSHVVGSPFKVRVGEPGQAGNPALVSAYGTGLEGGTTGIQSEFFINTTRAGPGTLSVTIEGPSKVKMDCQETPEGYKVMYTPMAPGNYLISVKYGGPNHIVGSPFKAKVTGQRLVSPGSANETSSILVESVTRSSTETCYSAIPKASSDASKVTSKGAGLSKAFVGQKSSFLVDCSKAGSNMLLIGVHGPTTPCEEVSMKHVGNQQYNVTYVVKERGDYVLAVKWGEEHIPGSPFHVTVP

SEQ ID NO: 28500 - protein, 2409 aa, Homo sapiens
  REGION 1..2409: note = ENSP00000418510
MQEHSTRRRSLSLCPDWESWDPQKPVDNAREAMQQADDWLGVPQVITPEEIIHPDVDEHSVMTYLSQFPKAKLKPGAPLKPKLNPKKARAYGRGIEPTGNMVKQPAKFTVDTISAGQGDVMVFVEDPEGNKEEAQVTPDSDKNKTYSVEYLPKVTGLHKVTVLFAGQHISKSPFEVSVDKAQGDASKVTAKGPGLEAVGNIANKPTYFDIYTAGAGVGDIGVEVEDPQGKNTVELLVEDKGNQVYRCVYKPMQPGPHVVKIFFAGDTIPKSPFVVQVGEACNPNACRASGRGLQPKGVRIRETTDFKVDTKAAGSGELGVTMKGPKGLEELVKQKDFLDGVYAFEYYPSTPGRYSIAITWGGHHIPKSPFEVQVGPEAGMQKVRAWGPGLHGGIVGRSADFVVESIGSEVGSLGFAIEGPSQAKIEYNDQNDGSCDVKYWPKEPGEYAVHIMCDDEDIKDSPYMAFIHPATGGYNPDLVRAYGPGLEKSGCIVNNLAEFTVDPKDAGKAPLKIFAQDGEGQRIDIQMKNRMDGTYACSYTPVKAIKHTIAVVWGGVNIPHSPYRVNIGQGSHPQKVKVFGPGVERSGLKANEPTHFTVDCTEAGEGDVSVGIKCDARVLSEDEEDVDFDIIHNANDTFTVKYVPPAAGRYTIKVLFASQEIPASPFRVKVDPSHDASKVKAEGPGLSKAGVENGKPTHFTVYTKGAGKAPLNVQFNSPLPGDAVKDLDIIDNYDYSHTVKYTPTQQGNMQVLVTYGGDPIPKSPFTVGVAAPLDLSKIKLNGLENRVEVGKDQEFTVDTRGAGGQGKLDVTILSPSRKVVPCLVTPVTGRENSTAKFIPREEGLYAVDVTYDGHPVPGSPYTVEASLPPDPSKVKAHGPGLEGGLVGKPAEFTIDTKGAGTGGLGLTVEGPCEAKIECSDNGDGTCSVSYLPTKPGEYFVNILFEEVHIPGSPFKADIEMPFDPSKVVASGPGLEHGKVGEAGLLSVDCSEAGPGALGLEAVSDSGTKAEVSIQNNKDGTYAVTYVPLTAGMYTLTMKYGGELVPHFPARVKVEPAVDTSRIKVFGPGIEGKDVFREATTDFTVDSRPLTQVGGDHIKAHIANPSGASTECFVTDNADGTYQVEYTPFEKGLHVVEVTYDDVPIPNSPFKVAVTEGCQPSRVQAQGPGLKEAFTNKPNVFTVVTRGAGIGGLGITVEGPSESKINCRDNKDGSCSAEYIPFAPGDYDVNITYGGAHIPGSPFRVPVKDVVDPSKVKIAGPGLGSGVRARVLQSFTVDSSKAGLAPLEVRVLGPRGLVEPVNVVDNGDGTHTVTYTPSQEGPYMVSVKYADEEIPRSPFKVKVLPTYDASKVTASGPGLSSYGVPASLPVDFAIDARDAGEGLLAVQITDQEGKPKRAIVHDNKDGTYAVTYIPDKTGRYMIGVTYGGDDIPLSPYRIRATQTGDASKCLATGPGIASTVKTGEEVGFVVDAKTAGKGKVTCTVLTPDGTEAEADVIENEDGTYDIFYTAAKPGTYVIYVRFGGVDIPNSPFTVMVTEEAYVPVSDMNGLGFKPFDLVIPFAVRKGEITGEVHMPSGKTATPEIVDNKDGTVTVRYAPTEVGLHEMHIKYMGSHIPESPLQFYVNYPNSGSVSAYGPGLVYGVANKTATFTIVTEDAGEGGLDLAIEGPSKAEISCIDNKDGTCTVTYLPTLPGDYSILVKYNDKHIPGSPFTAKITDDSRRCSQVKLGSAADFLLDISETDLSSLTASIKAPSGRDEPCLLKRLPNNHIGISFIPREVGEHLVSIKKNGNHVANSPVSIMVVQSEIGDARRAKVYGRGLSEGRTFEMSDFIVDTRDAGYGGISLAVEGPSKVDIQTEDLEDGTCKVSYFPTVPGVYIVSTKFADEHVPGSPFTVKISGEGRVKESITRTSRAPSVATVGSICDLNLKIPEINSSDMSAHVTSPSGRVTEAEIVPMGKNSHCVRFVPQEMGVHTVSVKYRGQHVTGSPFQFTVGPLGEGGAHKVRAGGPGLERGEAGVPAEFSIWTREAGAGGLSIAVEGPSKAEITFDDHKNGSCGVSYIAQEPGNYEVSIKFNDEHIPESPYLVPVIAPSDDARRLTVMSLQESGLKVNQPASFAIRLNGAKGKIDAKVHSPSGAVEECHVSELEPDKYAVRFIPHENGVHTIDVKFNGSHVVGSPFKVRVGEPGQAGNPALVSAYGTGLEGGTTGIQSEFFINTTRAGPGTLSVTIEGPSKVKMDCQETPEGYKVMYTPMAPGNYLISVKYGGPNHIVGSPFKAKVTGQRLVSPGSANETSSILVESVTRSSTETCYSAIPKASSDASKVTSKGAGLSKAFVGQKSSFLVDCSKAGSNMLLIGVHGPTTPCEEVSMKHVGNQQYNVTYVVKERGDYVLAVKWGEEHIPGSPFHVTVP

SEQ ID NO: 28501 - protein, 135 aa, Homo sapiens
  REGION 1..135: note = ENSP00000420199
  VARIANT 1: note = Any amino acid
XLAVEGPSKVDIQTEDLEDGTCKVSYFPTVPGVYIVSTKFADEHVPEINSSDMSAHVTSPSGRVTEAEIVPMGKNSHCVRFVPQEMGVHTVSVKYRGQHVTGSPFQFTVGPLGEGGAHKVRAGGPGLERGEAGVP

SEQ ID NO: 28502 - protein, 72 aa, Homo sapiens
  REGION 1..72: note = ENSP00000419954
FADEHVPGSPFTVKISGEGRVKESITRTSRAPSVATVGSICDLNLKIPGVRVMNCSAQILWGWRVQFHTGSR

SEQ ID NO: 28503 - protein, 195 aa, Homo sapiens
  REGION 1..195: note = ENSP00000414532
MYTPMAPGNYLISVKYGGPNHIVGSPFKAKVTGQRLVSPGSANETSSILVESVTRSSTETCYSAIPKASSDASKVTSKGAGLSKAFVGQKSSFLVDCSKAGSNMLLIGVHGPTTPCEEVSMKHVGNQQYNVTYVVKERGDYVLAVKWGRNTSLAALFMSQCLKTVFSNPGESSCGCFCCLFVIHFIQSPPACLWG

SEQ ID NO: 28504 - protein, 660 aa, Homo sapiens
  REGION 1..660: note = ENSP00000332879
MGLQTTKWPSHGAFFLKSWLIISLGLYSQVSKLLACPSVCRCDRNFVYCNERSLTSVPLGIPEGVTVLYLHNNQINNAGFPAELHNVQSVHTVYLYGNQLDEFPMNLPKNVRVLHLQENNIQTISRAALAQLLKLEELHLDDNSISTVGVEDGAFREAISLKLLFLSKNHLSSVPVGLPVDLQELRVDENRIAVISDMAFQNLTSLERLIVDGNLLTNKGIAEGTFSHLTKLKEFSIVRNSLSHPPPDLPGTHLIRLYLQDNQINHIPLTAFSNLRKLERLDISNNQLRMLTQGVFDNLSNLKQLTARNNPWFCDCSIKWVTEWLKYIPSSLNVRGFMCQGPEQVRGMAVRELNMNLLSCPTTTPGLPLFTPAPSTASPTTQPPTLSIPNPSRSYTPPTPTTSKLPTIPDWDGRERVTPPISERIQLSIHFVNDTSIQVSWLSLFTVMAYKLTWVKMGHSLVGGIVQERIVSGEKQHLSLVNLEPRSTYRICLVPLDAFNYRAVEDTICSEATTHASYLNNGSNTASSHEQTTSHSMGSPFLLAGLIGGAVIFVLVVLLSVFCWHMHKKGRYTSQKWKYNRGRRKDDYCEAGTKKDNSILEMTETSFQIVSLNNDQLLKGDFRLQPIYTPNGGINYTDCHIPNNMRYCNSSVPDLEHCHT

SEQ ID NO: 28505 - protein, 660 aa, Homo sapiens; identical to SEQ ID NO: 28504
  REGION 1..660: note = ENSP00000451050

SEQ ID NO: 28506 - protein, 993 aa, Homo sapiens
  REGION 1..993: note = ENSP00000241453
MPALARDGGQLPLLVVFSAMIFGTITNQDLPVIKCVLINHKNNDSSVGKSSSYPMVSESPEDLGCALRPQSSGTVYEAAAVEVDVSASITLQVLVDAPGNISCLWVFKHSSLNCQPHFDLQNRGVVSMVILKMTETQAGEYLLFIQSEATNYTILFTVSIRNTLLYTLRRPYFRKMENQDALVCISESVPEPIVEWVLCDSQGESCKEESPAVVKKEEKVLHELFGTDIRCCARNELGRECTRLFTIDLNQTPQTTLPQLFLKVGEPLWIRCKAVHVNHGFGLTWELENKALEEGNYFEMSTYSTNRTMIRILFAFVSSVARNDTGYYTCSSSKHPSQSALVTIVEKGFINATNSSEDYEIDQYEEFCFSVRFKAYPQIRCTWTFSRKSFPCEQKGLDNGYSISKFCNHKHQPGEYIFHAENDDAQFTKMFTLNIRRKPQVLAEASASQASCFSDGYPLPSWTWKKCSDKSPNCTEEITEGVWNRKANRKVFGQWVSSSTLNMSEAIKGFLVKCCAYNSLGTSCETILLNSPGPFPFIQDNISFYATIGVCLLFIVVLTLLICHKYKKQFRYESQLQMVQVTGSSDNEYFYVDFREYEYDLKWEFPRENLEFGKVLGSGAFGKVMNATAYGISKTGVSIQVAVKMLKEKADSSEREALMSELKMMTQLGSHENIVNLLGACTLSGPIYLIFEYCCYGDLLNYLRSKREKFHRTWTEIFKEHNFSFYPTFQSHPNSSMPGSREVQIHPDSDQISGLHGNSFHSEDEIEYENQKRLEEEEDLNVLTFEDLLCFAYQVAKGMEFLEFKSCVHRDLAARNVLVTHGKVVKICDFGLARDIMSDSNYVVRGNARLPVKWMAPESLFEGIYTIKSDVWSYGILLWEIFSLGVNPYPGIPVDANFYKLIQNGFKMDQPFYATEEIYIIMQSCWAFDSRKRPSFPNLTSFLGCQLADAEEAMYQNVDGRVSECPHTYQNRRPFSREMDLGLLSPQAQVEDS

SEQ ID NO: 28507 - protein, 739 aa, Homo sapiens
  REGION 1..739: note = ENSP00000370374
MPALARDGGQLPLLVVFSAMIFGTITNQDLPVIKCVLINHKNNDSSVGKSSSYPMVSESPEDLGCALRPQSSGTVYEAAAVEVDVSASITLQVLVDAPGNISCLWVFKHSSLNCQPHFDLQNRGVVSMVILKMTETQAGEYLLFIQSEATNYTILFTVSIRNTLLYTLRRPYFRKMENQDALVCISESVPEPIVEWVLCDSQGESCKEESPAVVKKEEKVLHELFGTDIRCCARNELGRECTRLFTIDLNQTPQTTLPQLFLKVGEPLWIRCKAVHVNHGFGLTWELENKALEEGNYFEMSTYSTNRTMIRILFAFVSSVARNDTGYYTCSSSKHPSQSALVTIVEKGFINATNSSEDYEIDQYEEFCFSVRFKAYPQIRCTWTFSRKSFPCEQKGLDNGYSISKFCNHKHQPGEYIFHAENDDAQFTKMFTLNIRRKPQVLAEASASQASCFSDGYPLPSWTWKKCSDKSPNCTEEITEGVWNRKANRKVFGQWVSSSTLNMSEAIKGFLVKCCAYNSLGTSCETILLNSPGPFPFIQDNISFYATIGVCLLFIVVLTLLICHKYKKQFRYESQLQMVQVTGSSDNEYFYVDFREYEYDLKWEFPRENLEFGKVLGSGAFGKVMNATAYGISKTGVSIQVAVKMLKEKADSSEREALMSELKMMTQLGSHENIVNLLGACTLSGPIYLIFEYCCYGDLLNYLRSKREKFHRTWTEIFKEHNFSFYPTFQSHPNSSKKK

SEQ ID NO: 28508 - protein, 1100 aa, Homo sapiens
  REGION 1..1100: note = ENSP00000329219
MGNAAGSAEQPAGPAAPPPKQPAPPKQPMPAAGELEERFNRALNCMNLPPDKVQLLSQYDNEKKWELICDQERFQVKNPPAAYIQKLKSYVDTGGVSRKVAADWMSNLGFKRRVQESTQVLRELETSLRTNHIGWVQEFLNEENRGLDVLLEYLAFAQCSVTYDMESTDNGASNSEKNKPLEQSVEDLSKGPPSSVPKSRHLTIKLTPAHSRKALRNSRIVSQKDDVHVCIMCLRAIMNYQSGFSLVMNHPACVNEIALSLNNKNPRTKALVLELLAAVCLVRGGHDIILAAFDNFKEVCGEQHRFEKLMEYFRNEDSNIDFMVACMQFINIVVHSVENMNFRVFLQYEFTHLGLDLYLERLRLTESDKLQVQIQAYLDNIFDVGALLEDTETKNAVLEHMEELQEQVALLTERLRDAENESMAKIAELEKQLSQARKELETLRERFSESTAMGPSRRPPEPEKAPPAAPTRPSALELKVEELEEKGLIRILRGPGDAVSIEILPVAVATPSGGDAPTPGVPTGSPSPDLAPAAEPAPGAAPPPPPPLPGLPSPQEAPPSAPPQAPPLPGSPEPPPAPPLPGDLPPPPPPPPPPPGTDGPVPPPPPPPPPPPGGPPDALGRRDSELGPGVKAKKPIQTKFRMPLLNWVALKPSQITGTVFTELNDEKVLQELDMSDFEEQFKTKSQGPSLDLSALKSKAAQKAPSKATLIEANRAKNLAITLRKGNLGAERICQAIEAYDLQALGLDFLELLMRFLPTEYERSLITRFEREQRPMEELSEEDRFMLCFSRIPRLPERMTTLTFLGNFPDTAQLLMPQLNAIIAASMSIKSSDKLRQILEIVLAFGNYMNSSKRGAAYGFRLQSLDALLEMKSTDRKQTLLHYLVKVIAEKYPQLTGFHSDLHFLDKAGSVSLDSVLADVRSLQRGLELTQREFVRQDDCMVLKEFLRANSPTMDKLLADSKTAQEAFESVVEYFGENPKTTSPGLFFSLFSRFIKAYKKAEQEVEQWKKEAAAQEAGADTPGKGEPPAPKSPPKARRPQMDLISELKRRQQKEPLIYESDRDGAIEDIITVIKTVPFTARTGKRTSRLLCEASLGEEMPL

SEQ ID NO: 28509 - protein, 682 aa, Homo sapiens
  REGION 1..682: note = ENSP00000465474
MAKIAELEKQLSQARKELETLRERFSESTAMGPSRRPPEPEKAPPAAPTRPSALELKVEELEEKGLIRILRGPGDAVSIEILPVAVATPSGGDAPTPGVPTGSPSPDLAPAAEPAPGAAPPPPPPLPGLPSPQEAPPSAPPQAPPLPGSPEPPPAPPLPGDLPPPPPPPPPPPGTDGPVPPPPPPPPPPPGGPPDALGRRDSELGPGVKAKKPIQTKFRMPLLNWVALKPSQITGTVFTELNDEKVLQELDMSDFEEQFKTKSQGPSLDLSALKSKAAQKAPSKATLIEANRAKNLAITLRKGNLGAERICQAIEAYDLQALGLDFLELLMRFLPTEYERSLITRFEREQRPMEELSEEDRFMLCFSRIPRLPERMTTLTFLGNFPDTAQLLMPQLNAIIAASMSIKSSDKLRQILEIVLAFGNYMNSSKRGAAYGFRLQSLDALLEMKSTDRKQTLLHYLVKVIAEKYPQLTGFHSDLHFLDKAGSVSLDSVLADVRSLQRGLELTQREFVRQDDCMVLKEFLRANSPTMDKLLADSKTAQEAFESVVEYFGENPKTTSPGLFFSLFSRFIKAYKKAEQEVEQWKKEAAAQEAGADTPGKGEPPAPKSPPKARRPQMDLISELKRRQQKEPLIYESDRDGAIEDIITDLRNQPYIRADTGRRSARRRPPGPPLQVTSDLSL

SEQ ID NO: 28510 - protein, 488 aa, Homo sapiens
  REGION 1..488: note = ENSP00000465137
ELDMSDFEEQFKTKSQGPSLDLSALKSKAAQKAPSKATLIEANRAKNLAITLRKGNLGAERICQAIEAYDLQALGLDFLELLMRFLPTEYERSLITRFEREQRPMEELSEEDRFMLCFSRIPRLPERMTTLTFLGNFPDTAQLLMPQLNAIIAASMSIKSSDKLRQILEIVLAFGNYMNSSKRGAAYGFRLQSLDALLEMKSTDRKQTLLHYLVKVIAEKYPQLTGFHSDLHFLDKAGSVSLDSVLADVRSLQRGLELTQREFVRQDDCMVLKEFLRANSPTMDKLLADSKTAQEAFESVVEYFGENPKTTSPGLFFSLFSRFIKAYKKAEQEVEQWKKEAAAQEAGADTPGKGEPPAPKSPPKARRPQMDLISELKRRQQKEPLIYESDRDGAIEDIITGKGLARPWSYPQSVLLCFLLTQCAILWGTGCHTASCYLFCFSFLFPFSTPLHLPHPHSVIKTVPFTARTGKRTSRLLCEASLGEEMPL

SEQ ID NO: 28511 - protein, 127 aa, Homo sapiens
  REGION 1..127: note = ENSP00000466711
VRQDDCMVLKEFLRANSPTMDKLLADSKTAQKAEQEVEQWKKEAAAQEAGADTPGKGEPPAPKVGNCSWAWYWAAGMHGISSPSGATPTPSLLQTDPAPGAWDGKGFFLLKPAVLAVGDQADIPGFW

SEQ ID NO: 28512 - protein, 151 aa, Homo sapiens
  REGION 1..151: note = ENSP00000468301
  VARIANT 1: note = Any amino acid
XRQDDCMVLKEFLRANSPTMDKLLADSKTAQKAEQEVEQWKKEAAAQEAGADTPGKGEPPAPKSPPKARRPQMDLISELKRRQQKEPLIYESDRDGAIEDIITGKGLARPWSYPQSVLLCFLLTQCAILWGTGCHTASCYLFCFSFLFPFS

SEQ ID NO: 28513 - protein, 626 aa, Homo sapiens
  REGION 1..626: note = ENSP00000327442
MGNAAGSAEQPAGPAAPPPKQHRFEKLMEYFRNEDSNIDFMVACMQFINIVVHSVENMNFRVFLQYEFTHLGLDLYLERLRLTESDKLQVQIQAYLDNIFDVGALLEDTETKNAVLEHMEELQEQVALLTERLRDAENESMAKIAELEKQLSQARKELETLRERFSESTAMGPSRRPPEPEKAPPAAPTRPSALELKVEELEEKGLIRILRGPGDAVSIEILPVAVATPSGGDAPTPGVPTGSPSPDLAPAAEPAPGAAPPPPPPPPGGPPDALGRRDSELGPGVKAKKPIQTKFRMPLLNWVALKPSQITGTVFTELNDEKVLQELDMSDFEEQFKTKSQGPSLDLSALKSKAAQKAPSKATLIEANRAKNLAITLRKGNLGAERICQAIEAYDLQALGLDFLELLMRFLPTEYERSLITRFEREQRPMEELSEEDRFMLCFSRIPRLPERMTTLTFLGNFPDTAQLLMPQLNAIIAASMSIKSSDKLRQILEIVLAFGNYMNSSKRGAAYGFRLQSLDALLEMKSTDRKQTLLHYLVKVIAEKYPQLTGFHSDLHFLDKAGSVSLDSVLADVRSLQRGLELTQREFVRQDDCMVLKEFLRANSPTMDKLLADSKTAQAVPTGGL

SEQ ID NO: 28514 - protein, 1027 aa, Homo sapiens
  REGION 1..1027: note = ENSP00000335655
MGNLESAEGVPGEPPSVPLLLPPGKMPMPEPCELEERFALVLSSMNLPPDKARLLRQYDNEKKWDLICDQERFQVKNPPHTYIQKLQSFLDPSVTRKKFRRRVQESTKVLRELEISLRTNHIGWVREFLNDENKGLDVLVDYLSFAQCSVMFDFEGLESGDDGAFDKLRSWSRSIEDLQPPSALSAPFTNSLARSARQSVLRYSTLPGRRALKNSRLVSQKDDVHVCILCLRAIMNYQYGFNLVMSHPHAVNEIALSLNNKNPRTKALVLELLAAVCLVRGGHEIILAAFDNFKEVCKELHRFEKLMEYFRNEDSNIDFMVACMQFINIVVHSVEDMNFRVHLQYEFTKLGLEEFLQKSRHTESEKLQVQIQAYLDNVFDVGGLLEDAETKNVALEKVEELEEHVSHLTEKLLDLENENMMRVAELEKQLLQREKELESIKETYENTSHQVHTLRRLIKEKEEAFQRRCHLEPNVRGLESVDSEALARVGPAELSEGMPPSDLDLLAPAPPPEEVLPLPPPPAPPLPPPPPPLPDKCPPAPPLPGAAPSVVLTVGLSAIRIKKPIKTKFRLPVFNWTALKPNQISGTVFSELDDEKILEDLDLDKFEELFKTKAQGPALDLICSKNKTAQKAASKVTLLEANRAKNLAITLRKAGRSAEEICRAIHTFDLQTLPVDFVECLMRFLPTEAEVKLLRQYERERQPLEELAAEDRFMLLFSKVERLTQRMAGMAFLGNFQDNLQMLTPQLNAIIAASASVKSSQKLKQMLEIILALGNYMNSSKRGAVYGFKLQSLDLLLDTKSTDRKMTLLHFIALTVKEKYPDLANFWHELHFVEKAAAVSLENVLLDVKELGRGMELIRRECSIHDNSVLRNFLSTNEGKLDKLQRDAKTAEEAYNAVVRYFGESPKTTPPSVFFPVFVRFIRSYKEAEQENEARKKQEEVMREKQLAQEAKKLDAKTPSQRNKWQQQELIAELRRRQAKEHRPVYEGKDGTIEDIITGLHCQPMVVRHQARSAAPPSGPPRAPGPH

SEQ ID NO: 28515 - protein, 1027 aa, Homo sapiens
  REGION 1..1027: note = ENSP00000447479
MGNLESAEGVPGEPPSVPLLLPPGKMPMPEPCELEERFALVLSSMNLPPDKARLLRQYDNEKKWDLICDQERFQVKNPPHTYIQKLQSFLDPSVTRKKFRRRVQESTKVLRELEISLRTNHIGWVREFLNDENKGLDVLVDYLSFAQCSVMFDFEGLESGDDGAFDKLRSWSRSIEDLQPPSALSAPFTNSLARSARQSVLRYSTLPGRRALKNSRLVSQKDDVHVCILCLRAIMNYQYGFNLVMSHPHAVNEIALSLNNKNPRTKALVLELLAAVCLVRGGHEIILAAFDNFKEVCKELHRFEKLMEYFRNEDSNIDFMVACMQFINIVVHSVEDMNFRVHLQYEFTKLGLEEFLQKSRHTESEKLQVQIQAYLDNVFDVGGLLEDAETKNVALEKVEELEEHVSHLTEKLLDLENENMMRVAELEKQLLQREKELESIKETYENTSHQVHTLRRLIKEKEEAFQRRCHLEPNVRGLESVDSEALARVGPAELSEGMPPSDLDLLAPAPPPEEVLPLPPPPAPPLPPPPPPLPDKCPPAPPLPGAAPSVVLTVGLSAIRIKKPIKTKFRLPVFNWTALKPNQISGTVFSELDDEKILEDLDLDKFEELFKTKAQGPALDLICSKNKTAQKAASKVTLLEANRAKNLAITLRKAGRSAEEICRAIHTFDLQTLPVDFVECLMRFLPTEAEVKLLRQYERERQPLEELAAEDRFMLLFSKVERLTQRMAGMAFLGNFQDNLQMLTPQLNAIIAASASVKSSQKLKQMLEIILALGNYMNSSKRGAVYGFKLQSLDLLLDTKSTDRKMTLLHFIALTVKEKYPDLANFWHELHFVEKAAAVSLENVLLDVKELGRGMELIRRECSIHDNSVLRNFLSTNEGKLDKLQRDAKTAEAYNAVVRYFGESPKTTPPSVFFPVFVRFIRSYKEAEQENEARKKQEEVMREKQLAQEAKKLDAKTPSQRNKWQQQELIAELRRRQAKEHRPVYEGKDGTIEDIITVLKSVPFTARTAKRGSRFFCDAAHHDESNC

SEQ ID NO: 28516 - protein, 976 aa, Homo sapiens
  REGION 1..976: note = ENSP00000344311
MGNLESAEGVPGEPPSVPLLLPPGKMPMPEPCELEERFALVLSSMNLPPDKARLLRQYDNEKKWDLICDQERFQVKNPPHTYIQKLQSFLDPSVTRKKFRRRVQESTKVLRELEISLRTNHIGWVREFLNDENKGLDVLVDYLSFAQCSVMYSTLPGRRALKNSRLVSQKDDVHVCILCLRAIMNYQYGFNLVMSHPHAVNEIALSLNNKNPRTKALVLELLAAVCLVRGGHEIILAAFDNFKEVCKELHRFEKLMEYFRNEDSNIDFMVACMQFINIVVHSVEDMNFRVHLQYEFTKLGLEEFLQKSRHTESEKLQVQIQAYLDNVFDVGGLLEDAETKNVALEKVEELEEHVSHLTEKLLDLENENMMRVAELEKQLLQREKELESIKETYENTSHQVHTLRRLIKEKEEAFQRRCHLEPNVRGLESVDSEALARVGPAELSEGMPPSDLDLLAPAPPPEEVLPLPPPPAPPLPPPPPPLPDKCPPAPPLPGAAPSVVLTVGLSAIRIKKPIKTKFRLPVFNWTALKPNQISGTVFSELDDEKILEDLDLDKFEELFKTKAQGPALDLICSKNKTAQKAASKVTLLEANRAKNLAITLRKAGRSAEEICRAIHTFDLQTLPVDFVECLMRFLPTEAEVKLLRQYERERQPLEELAAEDRFMLLFSKVERLTQRMAGMAFLGNFQDNLQMLTPQLNAIIAASASVKSSQKLKQMLEIILALGNYMNSSKRGAVYGFKLQSLDLLLDTKSTDRKMTLLHFIALTVKEKYPDLANFWHELHFVEKAAAVSLENVLLDVKELGRGMELIRRECSIHDNSVLRNFLSTNEGKLDKLQRDAKTAEEAYNAVVRYFGESPKTTPPSVFFPVFVRFIRSYKEAEQENEARKKQEEVMREKQLAQEAKKLDAKTPSQRNKWQQQELIAELRRRQAKEHRPVYEGKDGTIEDIITGLHCQPMVVRHQARSAAPPSGPPRAPGPH

SEQ ID NO: 28517 - protein, 55 aa, Homo sapiens
  REGION 1..55: note = ENSP00000448939
MLRRVREGIGKSSMNLPPDKARLLRQYDNEKKWDLICDQERFQVKNPPHTYIQKL

SEQ ID NO: 28518 - protein, 532 aa, Homo sapiens
  REGION 1..532: note = ENSP00000356729
MGKKVAIIGAGVSGLASIRSCLEEGLEPTCFEKSNDIGGLWKFSDHAEEGRASIYKSVFSNSSKEMMCFPDFPFPDDFPNFMHNSKIQEYIIAFAKEKNLLKYIQFKTFVSSVNKHPDFATTGQWDVTTERDGKKESAVFDAVMVCSGHHVYPNLPKESFPGLNHFKGKCFHSRDYKEPGVFNGKRVLVVGLGNSGCDIATELSRTAEQVMISSRSGSWVMSRVWDNGYPWDMLLVTRFGTFLKNNLPTAISDWLYVKQMNARFKHENYGLMPLNGVLRKEPVFNDELPASILCGIVSVKPNVKEFTETSAIFEDGTIFEGIDCVIFATGYSFAYPFLDESIIKSRNNEIILFKGVFPPLLEKSTIAVIGFVQSLGAAIPTVDLQSRWAAQVIKGTCTLPSMEDMMNDINEKMEKKRKWFGKSETIQTDYIVYMDELSSFIGAKPNIPWLFLTDPKLAMEVYFGPCSPYQFRLVGPGQWPGARNAILTQWDRSLKPMQTRVVGRLQKPCFFFHWLKLFAIPILLIAVFLVLT

SEQ ID NO: 28519 - protein, 48 aa, Homo sapiens
  REGION 1..48: note = ENSP00000476963
MGKKVAIIGAGVSGLASIRSCLEEGLEPTCFEKSNDIGGLWKFSRSHE

SEQ ID NO: 28520 - protein, 218 aa, Homo sapiens
  REGION 1..218: note = ENSP00000477451
MGKKVAIIGAGVSGLASIRSCLEEGLEPTCFEKSNDIGGLWKFSDHAEEGRASIYKSVFSNSSKEMMCFPDFPFPDDFPNFMHNSKIQEYIIAFAKEKNLLKYIQFKTFVSSVNKHPDFATTGQWDVTTERDGKKESAVFDAVMVCSGHHVYPNLPDYKEPGVFNGKRVLVVGLGNSGCDIATELSRTAEQVMISSRSGSWVMSRVWDNGYPWDMLLV

SEQ ID NO: 28521 - protein, 71 aa, Homo sapiens
  REGION 1..71: note = ENSP00000408496
MYVTMMMTDQIPLELPPLLNGEVAMMPHLVNGDAAQQVILVQVNPGETFTIRAEDGTLQCIQDEVVKRACD

SEQ ID NO: 28522 - protein, 1204 aa, Homo sapiens
  REGION 1..1204: note = ENSP00000411242
MYVTMMMTDQIPLELPPLLNGEVAMMPHLVNGDAAQQVILVQVNPGETFTIRAEDGTLQCIQGPAEVPMMSPNGSIPPIHVPPGYISQVIEDSTGVRRVVVTPQSPECYPPSYPSAMSPTHHLPPYLTHHPHFIHNSHTAYYPPVTGPGDMPPQFFPQHHLPHTIYGEQEIIPFYGMSTYITREDQYSKPPHKKLKDRQIDRQNRLNSPPSSIYKSSCTTVYNGYGKGHSGGSGGGGSGSGPGIKKTERRARSSPKSNDSDLQEYELEVKRVQDILSGIEKPQVSNIQARAVVLSWAPPVGLSCGPHSGLSFPYSYEVALSDKGRDGKYKIIYSGEELECNLKDLRPATDYHVRVYAMYNSVKGSCSEPVSFTTHSCAPECPFPPKLAHRSKSSLTLQWKAPIDNGSKITNYLLEWDEGKRNSGFRQCFFGSQKHCKLTKLCPAMGYTFRLAARNDIGTSGYSQEVVCYTLGNIPQMPSAPRLVRAGITWVTLQWSKPEGCSPEEVITYTLEIQEDENDNLFHPKYTGEDLTCTVKNLKRSTQYKFRLTASNTEGKSCPSEVLVCTTSPDRPGPPTRPLVKGPVTSHGFSVKWDPPKDNGGSEILKYLLEITDGNSEANQWEVAYSGSATEYTFTHLKPGTLYKLRACCISTGGHSQCSESLPVRTLSIAPGQCRPPRVLGRPKHKEVHLEWDVPASESGCEVSEYSVEMTEPEDVASEVYHGPELECTVGNLLPGTVYRFRVRALNDGGYGPYSDVSEITTAAGPPGQCKAPCISCTPDGCVLVGWESPDSSGADISEYRLEWGEDEESLELIYHGTDTRFEIRDLLPAAQYCCRLQAFNQAGAGPYSELVLCQTPASAPDPVSTLCVLEEEPLDAYPDSPSACLVLNWEEPCNNGSEILAYTIDLGDTSITVGNTTMHVMKDLLPETTYRIRIQAINEIGAGPFSQFIKAKTRPLPPLPPRLECAAAGPQSLKLKWGDSNSKTHAAEDIVYTLQLEDRNKRFISIYRGPSHTYKVQRLTEFTCYSFRIQAASEAGEGPFSETYTFSTTKSVPPTIKAPRVTQLEGNSCEILWETVPSMKGDPVNYILQVLVGRESEYKQVYKGEEATFQISGLQTNTDYRFRVCACRRCLDTSQELSGAFSPSAAFVLQRSEVMLTGDMGSLDDPKMKSMMPTDEQFAAIIVLGFATLSILFAFILQYFLMK

SEQ ID NO: 28523 - protein, 1204 aa, Homo sapiens; identical to SEQ ID NO: 28522
  REGION 1..1204: note = ENSP00000338523

SEQ ID NO: 28524 - protein, 71 aa, Homo sapiens; identical to SEQ ID NO: 28521
  REGION 1..71: note = ENSP00000392471

SEQ ID NO: 28525 - protein, 1204 aa, Homo sapiens; identical to SEQ ID NO: 28522
  REGION 1..1204: note = ENSP00000389094

SEQ ID NO: 28526 - protein, 208 aa, Homo sapiens
  REGION 1..208: note = ENSP00000389064
MFTKEKIWSEVILVQVNPGETFTIRAEDGTLQCIQGPAEVPMMSPNGSIPPIHVPPGYISQVIEDSTGVRRVVVTPQSPECYPPSYPSAMSPTHHLPPYLTHHPHFIHNSHTAYYPPVTGPGDMPPQFFPQHHLPHTIYGEQEIIPFYGMSTYITREDQYSKPPHKKLKDRQIDRQNRLNSPPSSIYKSSCTTVYNGYGKGHSGGSGG

SEQ ID NO: 28527 - protein, 750 aa, Homo sapiens
  REGION 1..750: note = ENSP00000256999
MWNLLHETDSAVATARRPRWLCAGALVLAGGFFLLGFLFGWFIKSSNEATNITPKHNMKAFLDELKAENIKKFLYNFTQIPHLAGTEQNFQLAKQIQSQWKEFGLDSVELAHYDVLLSYPNKTHPNYISIINEDGNEIFNTSLFEPPPPGYENVSDIVPPFSAFSPQGMPEGDLVYVNYARTEDFFKLERDMKINCSGKIVIARYGKVFRGNKVKNAQLAGAKGVILYSDPADYFAPGVKSYPDGWNLPGGGVQRGNILNLNGAGDPLTPGYPANEYAYRRGIAEAVGLPSIPVHPIGYYDAQKLLEKMGGSAPPDSSWRGSLKVPYNVGPGFTGNFSTQKVKMHIHSTNEVTRIYNVIGTLRGAVEPDRYVILGGHRDSWVFGGIDPQSGAAVVHEIVRSFGTLKKEGWRPRRTILFASWDAEEFGLLGSTEWAEENSRLLQERGVAYINADSSIEGNYTLRVDCTPLMYSLVHNLTKELKSPDEGFEGKSLYESWTKKSPSPEFSGMPRISKLGSGNDFEVFFQRLGIASGRARYTKNWETNKFSGYPLYHSVYETYELVEKFYDPMFKYHLTVAQVRGGMVFELANSIVLPFDCRDYAVVLRKYADKIYSISMKHPQEMKTYSVSFDSLFSAVKNFTEIASKFSERLQDFDKSNPIVLRMMNDQLMFLERAFIDPLGLPDRPFYRHVIYAPSSHNKYAGESFPGIYDALFDIESKVDPSKAWGEVKRQIYVAAFTVQAAAETLSEVA

SEQ ID NO: 28528 - protein, 719 aa, Homo sapiens
  REGION 1..719: note = ENSP00000349129
MWNLLHETDSAVATARRPRWLCAGALVLAGGFFLLGFLFGWFIKSSNEATNITPKHNMKAFLDELKAENIKKFLYNFTQIPHLAGTEQNFQLAKQIQSQWKEFGLDSVELAHYDVLLSYPNKTHPNYISIINEDGNEIFNTSLFEPPPPGYENVSDIVPPFSAFSPQGMPEGDLVYVNYARTEDFFKLERDMKINCSGKIVIARYGKVFRGNKVKNAQLAGAKGVILYSDPADYFAPGVKSYPDGWNLPGGGVQRGNILNLNGAGDPLTPGYPANEYAYRRGIAEAVGLPSIPVHPIGYYDAQKLLEKMGGSAPPDSSWRGSLKVPYNVGPGFTGNFSTQKVKMHIHSTNEVTRIYNVIGTLRGAVEPDRYVILGGHRDSWVFGGIDPQSGAAVVHEIVRSFGTLKKEGWRPRRTILFASWDAEEFGLLGSTEWAEENSRLLQERGVAYINADSSIEGNYTLRVDCTPLMYSLVHNLTKELKSPDEGFEGKSLYESWTKKSPSPEFSGMPRISKLGSGNDFEVFFQRLGIASGRARYTKNWETNKFSGYPLYHSVYETYELVEKFYDPMFKYHLTVAQVRGGMVFELANSIVLPFDCRDYAVVLRKYADKIYSISMKHPQEMKTYSVSFDSLFSAVKNFTEIASKFSERLQDFDKSKHVIYAPSSHNKYAGESFPGIYDALFDIESKVDPSKAWGEVKRQIYVAAFTVQAAAETLSEVA

SEQ ID NO: 28529 - protein, 74 aa, Homo sapiens
  REGION 1..74: note = ENSP00000434928
MWNLLHETDSAVATARRPRWLCAGALVLAGGFFLLGFLFGWFIKSSNEATNITPKHNMKAFLDELKAENIKKFL

SEQ ID NO: 28530 - protein, 735 aa, Homo sapiens
  REGION 1..735: note = ENSP00000344131
MTAGSSYPLFLAAYACTGCLAERLGWFIKSSNEATNITPKHNMKAFLDELKAENIKKFLYNFTQIPHLAGTEQNFQLAKQIQSQWKEFGLDSVELAHYDVLLSYPNKTHPNYISIINEDGNEIFNTSLFEPPPPGYENVSDIVPPFSAFSPQGMPEGDLVYVNYARTEDFFKLERDMKINCSGKIVIARYGKVFRGNKVKNAQLAGAKGVILYSDPADYFAPGVKSYPDGWNLPGGGVQRGNILNLNGAGDPLTPGYPANEYAYRRGIAEAVGLPSIPVHPIGYYDAQKLLEKMGGSAPPDSSWRGSLKVPYNVGPGFTGNFSTQKVKMHIHSTNEVTRIYNVIGTLRGAVEPDRYVILGGHRDSWVFGGIDPQSGAAVVHEIVRSFGTLKKEGWRPRRTILFASWDAEEFGLLGSTEWAEENSRLLQERGVAYINADSSIEGNYTLRVDCTPLMYSLVHNLTKELKSPDEGFEGKSLYESWTKKSPSPEFSGMPRISKLGSGNDFEVFFQRLGIASGRARYTKNWETNKFSGYPLYHSVYETYELVEKFYDPMFKYHLTVAQVRGGMVFELANSIVLPFDCRDYAVVLRKYADKIYSISMKHPQEMKTYSVSFDSLFSAVKNFTEIASKFSERLQDFDKSNPIVLRMMNDQLMFLERAFIDPLGLPDRPFYRHVIYAPSSHNKYAGESFPGIYDALFDIESKVDPSKAWGEVKRQIYVAAFTVQAAAETLSEVA

SEQ ID NO: 28531 - protein, 704 aa, Homo sapiens
  REGION 1..704: note = ENSP00000431463
MTAGSSYPLFLAAYACTGCLAERLGWFIKSSNEATNITPKHNMKAFLDELKAENIKKFLYNFTQIPHLAGTEQNFQLAKQIQSQWKEFGLDSVELAHYDVLLSYPNKTHPNYISIINEDGNEIFNTSLFEPPPPGYENVSDIVPPFSAFSPQGMPEGDLVYVNYARTEDFFKLERDMKINCSGKIVIARYGKVFRGNKVKNAQLAGAKGVILYSDPADYFAPGVKSYPDGWNLPGGGVQRGNILNLNGAGDPLTPGYPANEYAYRRGIAEAVGLPSIPVHPIGYYDAQKLLEKMGGSAPPDSSWRGSLKVPYNVGPGFTGNFSTQKVKMHIHSTNEVTRIYNVIGTLRGAVEPDRYVILGGHRDSWVFGGIDPQSGAAVVHEIVRSFGTLKKEGWRPRRTILFASWDAEEFGLLGSTEWAEENSRLLQERGVAYINADSSIEGNYTLRVDCTPLMYSLVHNLTKELKSPDEGFEGKSLYESWTKKSPSPEFSGMPRISKLGSGNDFEVFFQRLGIASGRARYTKNWETNKFSGYPLYHSVYETYELVEKFYDPMFKYHLTVAQVRGGMVFELANSIVLPFDCRDYAVVLRKYADKIYSISMKHPQEMKTYSVSFDSLFSAVKNFTEIASKFSERLQDFDKSKHVIYAPSSHNKYAGESFPGIYDALFDIESKVDPSKAWGEVKRQIYVAAFTVQAAAETLSEVA

SEQ ID NO: 28532 - protein, 46 aa, Homo sapiens
  REGION 1..46: note = ENSP00000436569
MWNLLHETDSAVATARRPRWLCAGALVLAGGFFLLGFLFVKVGKRN

SEQ ID NO: 28533 - protein, 64 aa, Homo sapiens
  REGION 1..64: note = ENSP00000431577
MKAFLDELKAENIKKFLYNFTQIPHLAGTEQNFQLAKQIQSQWKEFGLDSVELAHYDVLLSYPN

SEQ ID NO: 28534 - protein, 48 aa, Homo sapiens
  REGION 1..48: note = ENSP00000431263
MWNLLHETDSAVATARRPRWLCAGALVLAGGFFLLGFLFVTEASLGTV

SEQ ID NO: 28535 - protein, 442 aa, Homo sapiens
  REGION 1..442: note = ENSP00000344086
MGGSAPPDSSWRGSLKVPYNVGPGFTGNFSTQKVKMHIHSTNEVTRIYNVIGTLRGAVEPDRYVILGGHRDSWVFGGIDPQSGAAVVHEIVRSFGTLKKEGWRPRRTILFASWDAEEFGLLGSTEWAEENSRLLQERGVAYINADSSIEGNYTLRVDCTPLMYSLVHNLTKELKSPDEGFEGKSLYESWTKKSPSPEFSGMPRISKLGSGNDFEVFFQRLGIASGRARYTKNWETNKFSGYPLYHSVYETYELVEKFYDPMFKYHLTVAQVRGGMVFELANSIVLPFDCRDYAVVLRKYADKIYSISMKHPQEMKTYSVSFDSLFSAVKNFTEIASKFSERLQDFDKSNPIVLRMMNDQLMFLERAFIDPLGLPDRPFYRHVIYAPSSHNKYAGESFPGIYDALFDIESKVDPSKAWGEVKRQIYVAAFTVQAAAETLSEVA

SEQ ID NO: 28536 - protein, 263 aa, Homo sapiens
  REGION 1..263: note = ENSP00000467497
MFQAFPGDYDSGSRCSSSPSAESQYLSSVDSFGSPPTAAASQSQGQPLASQPPVVDPYDMPGTSYSTPGMSGYSSGGASGSGGPSTSGTTSGPGPARPARARPRRPREETETDQLEEEKAELESEIAELQKEKERLEFVLVAHKPGCKIPYEEGPGPGPLAEVRDLPGSAPAKEDGFSWLLPPPPPPPLPFQTSQDAPPNLTASLFTHSEVQVLGDPFPVVNPSYTSSFVLTCPEVSAFAGAQRTSGSDQPSDPLNSPSLLAL

SEQ ID NO: 28537 - protein, 302 aa, Homo sapiens
  REGION 1..302: note = ENSP00000407207
MFQAFPGDYDSGSRCSSSPSAESQYLSSVDSFGSPPTAAASQECAGLGEMPGSFVPTVTAITTSQDLQWLVQPTLISSMAQSQGQPLASQPPVVDPYDMPGTSYSTPGMSGYSSGGASGSGGPSTSGTTSGPGPARPARARPRRPREETETDQLEEEKAELESEIAELQKEKERLEFVLVAHKPGCKIPYEEGPGPGPLAEVRDLPGSAPAKEDGFSWLLPPPPPPPLPFQTSQDAPPNLTASLFTHSEVQVLGDPFPVVNPSYTSSFVLTCPEVSAFAGAQRTSGSDQPSDPLNSPSLLAL

SEQ ID NO: 28538 - protein, 338 aa, Homo sapiens
  REGION 1..338: note = ENSP00000245919
MFQAFPGDYDSGSRCSSSPSAESQYLSSVDSFGSPPTAAASQECAGLGEMPGSFVPTVTAITTSQDLQWLVQPTLISSMAQSQGQPLASQPPVVDPYDMPGTSYSTPGMSGYSSGGASGSGGPSTSGTTSGPGPARPARARPRRPREETLTPEEEEKRRVRRERNKLAAAKCRNRRRELTDRLQAETDQLEEEKAELESEIAELQKEKERLEFVLVAHKPGCKIPYEEGPGPGPLAEVRDLPGSAPAKEDGFSWLLPPPPPPPLPFQTSQDAPPNLTASLFTHSEVQVLGDPFPVVNPSYTSSFVLTCPEVSAFAGAQRTSGSDQPSDPLNSPSLLAL

SEQ ID NO: 28539 - protein, 299 aa, Homo sapiens
  REGION 1..299: note = ENSP00000466530
MFQAFPGDYDSGSRCSSSPSAESQYLSSVDSFGSPPTAAASQSQGQPLASQPPVVDPYDMPGTSYSTPGMSGYSSGGASGSGGPSTSGTTSGPGPARPARARPRRPREETLTPEEEEKRRVRRERNKLAAAKCRNRRRELTDRLQAETDQLEEEKAELESEIAELQKEKERLEFVLVAHKPGCKIPYEEGPGPGPLAEVRDLPGSAPAKEDGFSWLLPPPPPPPLPFQTSQDAPPNLTASLFTHSEVQVLGDPFPVVNPSYTSSFVLTCPEVSAFAGAQRTSGSDQPSDPLNSPSLLAL

SEQ ID NO: 28540 - protein, 195 aa, Homo sapiens
  REGION 1..195: note = ENSP00000414177
MFQAFPGDYDSGSRCSSSPSAESQYLSSVDSFGSPPTAAASQETDQLEEEKAELESEIAELQKEKERLEFVLVAHKPGCKIPYEEGPGPGPLAEVRDLPGSAPAKEDGFSWLLPPPPPPPLPFQTSQDAPPNLTASLFTHSEVQVLGDPFPVVNPSYTSSFVLTCPEVSAFAGAQRTSGSDQPSDPLNSPSLLAL

SEQ ID NO: 28541 - protein, 177 aa, Homo sapiens
  REGION 1..177: note = ENSP00000465068
MFQAFPGDYDSGSRCSSSPSAESQYLSSVDSFGSPPTAAASQECAGLGEMPGSFVPTVTAITTSQDLQWLVQPTLISSMAQSQGQPLASQPPVVDPYDMPGTSYSTPGMSGYSSGGASGSGGPSTSGTTSGPGPARPARARPRRPREETVSKGHQNLAWVGGSKRGRKFLMNGGGLH

SEQ ID NO: 28542 - protein, 237 aa, Homo sapiens
  REGION 1..237: note = ENSP00000465552
MFQAFPGDYDSGSRCSSSPSAESQYLSSVDSFGSPPTAAASQECAGLGEMPGSFVPTVTAITTSQDLQWLVQPTLISSMAQSQGQPLASQPPVVDPYDMPGTSYSTPGMSGYSSGGASGSGGPSTSGTTSGPGPARPARARPRRPREETLTPEEEEKRRVRRERNKLAAAKCRNRRRELTDRLQAETDQLEEEKAELESEIAELQKEKERLEFVLVAHKPGCKIPYEEGPGPGPLAE

SEQ ID NO: 28543 - protein, 188 aa, Homo sapiens
  REGION 1..188: note = ENSP00000468482
MPGSFVPTVTAITTSQDLQWLVQPTLISSMAQSQGQPLASQPPVVDPYDMPGTSYSTPGMSGYSSGGASGSGGPSTSGTTSGPGPARPARARPRRPREETLTPEEEEKRRVRRERNKLAAAKCRNRRRELTDRLQAETDQLEEEKAELESEIAELQKEKERLEFVLVAHKPGCKIPYEEGPGPGPLAE

SEQ ID NO: 28544 - protein, 289 aa, Homo sapiens
  REGION 1..289: note = ENSP00000468207
MPGSFVPTVTAITTSQDLQWLVQPTLISSMAQSQGQPLASQPPVVDPYDMPGTSYSTPGMSGYSSGGASGSGGPSTSGTTSGPGPARPARARPRRPREETLTPEEEEKRRVRRERNKLAAAKCRNRRRELTDRLQAETDQLEEEKAELESEIAELQKEKERLEFVLVAHKPGCKIPYEEGPGPGPLAEVRDLPGSAPAKEDGFSWLLPPPPPPPLPFQTSQDAPPNLTASLFTHSEVQVLGDPFPVVNPSYTSSFVLTCPEVSAFAGAQRTSGSDQPSDPLNSPSLLAL

SEQ ID NO: 28545 - protein, 137 aa, Homo sapiens
  REGION 1..137: note = ENSP00000465528
MPGSFVPTVTAITTSQDLQWLVQPTLISSMAQSQGQPLASQPPVVDPYDMPGTSYSTPGMSGYSSGGASGSGGPSTSGTTSGPGPARPARARPRRPREETLTPEEEEKRRVRRERNKLAAAKCRNRRRELTDRLQAE

SEQ ID NO: 28546 - protein, 291 aa, Homo sapiens
  REGION 1..291: note = ENSP00000485018
MFQAFPGDYDSGSRCSSSPSAESQYLSSVDSFGSPPTAAASQECAGLGEMPGSFVPTVTAITTSQDLQWLVQPTLISSMAQSQGQPLASQPPVVDPYDMPGTSYSTPGMSGYSSGGASGSGGPSTSGTTSGPGPARPARARPRRPREETLTPEEEEKRRVRRERNKLAAAKCRNRRRELTDRLQAETDQLEEEKAELESEIAELQKEKERLEFVLVAHKPGCKIPYEEGPGPGPLAEEVQVLGDPFPVVNPSYTSSFVLTCPEVSAFAGAQRTSGSDQPSDPLNSPSLLAL

SEQ ID NO: 28547 - protein, 318 aa, Homo sapiens
  REGION 1..318: note = ENSP00000368939
MVQGWRIKSKFRVDMPGSGSAFIPTINAITTSQDLQWMVQPTVITSMSNPYPRSHPYSPLPGLASVPGHMALPRPGVIKTIGTTVGRRRRDEQLSPEEEEKRRIRRERNKLAAAKCRNRRRELTEKLQAIGPWQVAVPHIPLFPWQETEELEEEKSGLQKEIAELQKEKEKLEFMLVAHGPVCKISPEERRSPPAPGLQPMRSGGGSVGAVVVKQEPLEEDSPSSSSAGLDKAQRSVIKPISIAGGFYGEEPLHTPIVVTSTPAVTPGTSNLVFTYPSVLEQESPASPSESCSKAHRRSSSSGDQSSDSLNSPTLLAL

SEQ ID NO: 28548 - protein, 326 aa, Homo sapiens
  REGION 1..326: note = ENSP00000264716
MYQDYPGNFDTSSRGSSGSPAHAESYSSGGGGQQKFRVDMPGSGSAFIPTINAITTSQDLQWMVQPTVITSMSNPYPRSHPYSPLPGLASVPGHMALPRPGVIKTIGTTVGRRRRDEQLSPEEEEKRRIRRERNKLAAAKCRNRRRELTEKLQAETEELEEEKSGLQKEIAELQKEKEKLEFMLVAHGPVCKISPEERRSPPAPGLQPMRSGGGSVGAVVVKQEPLEEDSPSSSSAGLDKAQRSVIKPISIAGGFYGEEPLHTPIVVTSTPAVTPGTSNLVFTYPSVLEQESPASPSESCSKAHRRSSSSGDQSSDSLNSPTLLAL

SEQ ID NO: 28549 - protein, 202 aa, Homo sapiens
  REGION 1..202: note = ENSP00000396497
MPGSGSAFIPTINAITTSQDLQWMVQPTVITSMSNPYPRSHPYSPLPGLASVPGHMALPRPGVIKTIGTTVGRRRRDEQLSPEEEEKRRIRRERNKLAAAKCRNRRRELTEKLQAETEELEEEKSGLQKEIAELQKEKEKLEFMLVAHGPVCKISPEERRSPPAPGLQPMRSGGGSVGAVVVKQEPLEEDSPSSSSAGLDKA

SEQ ID NO: 28550 - protein, 472 aa, Homo sapiens
  REGION 1..472: note = ENSP00000250448
MLGTVKMEGHETSDWNSYYADTQEAYSSVPVSNMNSGLGSMNSMNTYMTMNTMTTSGNMTPASFNMSYANPGLGAGLSPGAVAGMPGGSAGAMNSMTAAGVTAMGTALSPSGMGAMGAQQAASMNGLGPYAAAMNPCMSPMAYAPSNLGRSRAGGGGDAKTFKRSYPHAKPPYSYISLITMAIQQAPSKMLTLSEIYQWIMDLFPYYRQNQQRWQNSIRHSLSFNDCFVKVARSPDKPGKGSYWTLHPDSGNMFENGCYLRRQKRFKCEKQPGAGGGGGSGSGGSGAKGGPESRKDPSGASNPSADSPLHRGVHGKTGQLEGAPAPGPAASPQTLDHSGATATGGASELKTPASSTAPPISSGPGALASVPASHPAHGLAPHESQLHLKGDPHYSFNHPFSINNLMSSSEQQHKLDFKAYEQALQYSPYGSTLPASLPLGSASVTTRSPIEPSALEPAYYQGVYSRPVLNTS

SEQ ID NO: 28551 - protein, 36 aa, Homo sapiens
  REGION 1..36: note = ENSP00000451704
MLGTVKMEGHETSDWNSYYADTQELAITLQKFNYHY

SEQ ID NO: 28552 - protein, 463 aa, Homo sapiens
  REGION 1..463: note = ENSP00000400341
MHSASSMLGAVKMEGHEPSDWSSYYAEPEGYSSVSNMNAGLGMNGMNTYMSMSAAAMGSGSGNMSAGSMNMSSYVGAGMSPSLAGMSPGAGAMAGMGGSAGAAGVAGMGPHLSPSLSPLGGQAAGAMGGLAPYANMNSMSPMYGQAGLSRARDPKTYRRSYTHAKPPYSYISLITMAIQQSPNKMLTLSEIYQWIMDLFPFYRQNQQRWQNSIRHSLSFNDCFLKVPRSPDKPGKGSFWTLHPDSGNMFENGCYLRRQKRFKCEKQLALKEAAGAAGSGKKAAAGAQASQAQLGEAAGPASETPAGTESPHSSASPCQEHKRGGLGELKGTPAAALSPPEPAPSPGQQQQAAAHLLGPPHHPGLPPEAHLKPEHHYAFNHPFSINNLMSSEQQHHHSHHHHQPHKMDLKAYEQVMHYPGYGSPMPGSLAMGPVTNKTGLDASPLAADTSYYQGVYSRPIMNSS

SEQ ID NO: 28553 - protein, 457 aa, Homo sapiens
  REGION 1..457: note = ENSP00000366319
MLGAVKMEGHEPSDWSSYYAEPEGYSSVSNMNAGLGMNGMNTYMSMSAAAMGSGSGNMSAGSMNMSSYVGAGMSPSLAGMSPGAGAMAGMGGSAGAAGVAGMGPHLSPSLSPLGGQAAGAMGGLAPYANMNSMSPMYGQAGLSRARDPKTYRRSYTHAKPPYSYISLITMAIQQSPNKMLTLSEIYQWIMDLFPFYRQNQQRWQNSIRHSLSFNDCFLKVPRSPDKPGKGSFWTLHPDSGNMFENGCYLRRQKRFKCEKQLALKEAAGAAGSGKKAAAGAQASQAQLGEAAGPASETPAGTESPHSSASPCQEHKRGGLGELKGTPAAALSPPEPAPSPGQQQQAAAHLLGPPHHPGLPPEAHLKPEHHYAFNHPFSINNLMSSEQQHHHSHHHHQPHKMDLKAYEQVMHYPGYGSPMPGSLAMGPVTNKTGLDASPLAADTSYYQGVYSRPIMNSS

SEQ ID NO: 28554 - protein, 489 aa, Homo sapiens [sequence omitted]

SEQ ID NO: 28555 - protein, 365 aa, Homo sapiens
  REGION 1..365: note = ENSP00000366534
MGPCSGSRLGPPEAESPSQPPKRRKKRYLRHDKPPYTYLAMIALVIQAAPSRRLKLAQIIRQVQAVFPFFREDYEGWKDSIRHNLSSNRCFRKVPKDPAKPQAKGNFWAVDVSLIPAEALRLQNTALCRRWQNGGARGAFAKDLGPYVLHGRPYRPPSPPPPPSEGFSIKSLLGGSGEGAPWPGLAPQSSPVPAGTGNSGEEAVPTPPLPSSERPLWPLCPLPGPTRVEGETVQGGAIGPSTLSPEPRAWPLHLLQGTAVPGGRSSGGHRASLWGQLPTSYLPIYTPNVVMPLAPPPTSCPQCPSTSPAYWGVAPETRGPPGLLCDLDALFQGVPPNKSIYDVWVSHPRDLAAPGPGWLLSWCSL

SEQ ID NO: 28556 - protein, 667 aa, Homo sapiens
  REGION 1..667: note = ENSP00000362154
MMVESASETIRSAPSGQNGVGSLSGQADGSSGGATGTTASGTGREVTTGADSNGEMSPAELLHFQQQQALQVARQFLLQQASGLSSPGNNDSKQSASAVQVPVSVAMMSPQMLTPQQMQQILSPPQLQALLQQQQALMLQQLQEYYKKQQEQLHLQLLTQQQAGKPQPKEALGNKQLAFQQQLLQMQQLQQQHLLNLQRQGLVSLQPNQASGPLQTLPQAVCPTDLPQLWKGEGAPGQPAEDSVKQEGLDLTGTAATATSFAAPPKVSPPLSHHTLPNGQPTVLTSRRDSSSHEETPGSHPLYGHGECKWPGCETLCEDLGQFIKHLNTEHALDDRSTAQCRVQMQVVQQLEIQLAKESERLQAMMAHLHMRPSEPKPFSQPVTVSAADSFPDGLVHPPTSAAAPVTPLRPPGLGSASLHGGGPARRRSSDKFCSPISSELAQNHEFYKNADVRPPFTYASLIRQAILETPDRQLTLNEIYNWFTRMFAYFRRNTATWKNAVRHNLSLHKCFVRVENVKGAVWTVDEREYQKRRPPKMTGSPTLVKNMISGLSYGALNASYQAALAESSFPLLNSPGMLNPGSASSLLPLSHDDVGAPVEPLPSNGSSSPPRLSPPQYSHQVQVKEEPAEAEEDRQPGPPLGAPNPSASGPPEDRDLEEELPGEELS

SEQ ID NO: 28557 - protein, 668 aa, Homo sapiens
  REGION 1..668: note = ENSP00000386958
MMVESASETIRSAPSGQNGVGSLSGQADGSSGGATGTTASGTGREVTTGADSNGEMSPAELLHFQQQQALQVARQFLLQQASGLSSPGNNDSKQSASAVQVPVSVAMMSPQMLTPQQMQQILSPPQLQALLQQQQALMLQQLQEYYKKQQEQLHLQLLTQQQAGKPQPKEALGNKQLAFQQQLLQMQQLQQQHLLNLQRQGLVSLQPNQASGPLQTLPQAAVCPTDLPQLWKGEGAPGQPAEDSVKQEGLDLTGTAATATSFAAPPKVSPPLSHHTLPNGQPTVLTSRRDSSSHEETPGSHPLYGHGECKWPGCETLCEDLGQFIKHLNTEHALDDRSTAQCRVQMQVVQQLEIQLAKESERLQAMMAHLHMRPSEPKPFSQPVTVSAADSFPDGLVHPPTSAAAPVTPLRPPGLGSASLHGGGPARRRSSDKFCSPISSELAQNHEFYKNADVRPPFTYASLIRQAILETPDRQLTLNEIYNWFTRMFAYFRRNTATWKNAVRHNLSLHKCFVRVENVKGAVWTVDEREYQKRRPPKMTGSPTLVKNMISGLSYGALNASYQAALAESSFPLLNSPGMLNPGSASSLLPLSHDDVGAPVEPLPSNGSSSPPRLSPPQYSHQVQVKEEPAEAEEDRQPGPPLGAPNPSASGPPEDRDLEEELPGEELS

SEQ ID NO: 28558 - protein, 678 aa, Homo sapiens
  REGION 1..678: note = ENSP00000362148
MMVESASETIRSAPSGQNGVGSLSGQADGSSGGATGTTASGTGREVTTGADSNGEMSPAELLHFQQQQALQVARQFLLQQASGLSSPGNNDSKQSASAVQVPVSVAMMSPQMLTPQQMQQILSPPQLQALLQQQQALMLQQEYYKKQQEQLHLQLLTQQQAGKPQPKEALGNKQLAFQQQLLQMQQLQQQHLLNLQRQGLVSLQPNQASGPLQTLPQAAVCPTDLPQLWKGEGAPGQPAEDSVKQEGLDLTGTAATATSFAAPPKVSPPLSHHTLPNGQPTVLTSRRDSSSHEETPGSHPLYGHGECKWPGCETLCEDLGQFIKHLNTEHALDDRSTAQCRVQMQVVQQLEIQLAKESERLQAMMAHLHMRPSEPKPFSQPLNPVPGSSSFSKVTVSAADSFPDGLVHPPTSAAAPVTPLRPPGLGSASLHGGGPARRRSSDKFCSPISSELAQNHEFYKNADVRPPFTYASLIRQAILETPDRQLTLNEIYNWFTRMFAYFRRNTATWKNAVRHNLSLHKCFVRVENVKGAVWTVDEREYQKRRPPKMTGSPTLVKNMISGLSYGALNASYQAALAESSFPLLNSPGMLNPGSASSLLPLSHDDVGAPVEPLPSNGSSSPPRLSPPQYSHQVQVKEEPAEAEEDRQPGPPLGAPNPSASGPPEDRDLEEELPGEELS

SEQ ID NO: 28559 - protein, 680 aa, Homo sapiens
  REGION 1..680: note = ENSP00000309823
MMVESASETIRSAPSGQNGVGSLSGQADGSSGGATGTTASGTGREVTTGADSNGEMSPAELLHFQQQQALQVARQFLLQQASGLSSPGNNDSKQSASAVQVPVSVAMMSPQMLTPQQMQQILSPPQLQALLQQQQALMLQQLQEYYKKQQEQLHLQLLTQQQAGKPQPKEALGNKQLAFQQQLLQMQQLQQQHLLNLQRQGLVSLQPNQASGPLQTLPQAAVCPTDLPQLWKGEGAPGQPAEDSVKQEGLDLTGTAATATSFAAPPKVSPPLSHHTLPNGQPTVLTSRRDSSSHEETPGSHPLYGHGECKWPGCETLCEDLGQFIKHLNTEHALDDRSTAQCRVQMQVVQQLEIQLAKESERLQAMMAHLHMRPSEPKPFSQPLNPVPGSSSFSKVTVSAADSFPDGLVHPPTSAAAPVTPLRPPGLGSASLHGGGPARRRSSDKFCSPISSELAQNHEFYKNADVRPPFTYASLIRQAILETPDRQLTLNEIYNWFTRMFAYFRRNTATWKNAVRHNLSLHKCFVRVENVKGAVWTVDEREYQKRRPPKMTGSPTLVKNMISGLSYGALNASYQAALAESSFPLLNSPGMLNPGSASSLLPLSHDDVGAPVEPLPSNGSSSPPRLSPPQYSHQVQVKEEPAEAEEDRQPGPPLGAPNPSASGPPEDRDLEEELPGEELS

SEQ ID NO: 28560 - protein, 87 aa, Homo sapiens
  REGION 1..87: note = ENSP00000393704
MEGELGPALSRGEAYGHHTSSYQLLGNAQKLPFPPWPDTALQVARQFLLQQASGLSSPGNNDSKQSASAVQVPVSVAMMSPQMLTPQ

SEQ ID NO: 28561 - protein, 680 aa, Homo sapiens; identical to SEQ ID NO: 28559
  REGION 1..680: note = ENSP00000362151

SEQ ID NO: 28562 - protein, 1976 aa, Homo sapiens
  REGION 1..1976: note = ENSP00000326330
MGVLKVWLGLALALAEFAVLPHHSEGACVYQDSLLADATIWKPDSCQSCRCHGDIVICKPAVCRNPQCAFEKGEVLQIAANQCCPECVLRTPGSCHHEKKIHEHGTEWASSPCSVCSCNHGEVRCTPQPCPPLSCGHQELAFIPEGSCCPVCVGLGKPCSYEGHVFQDGEDWRLSRCAKCLCRNGVAQCFTAQCQPLFCNQDETVVRVPGKCCPQCSARSCSAAGQVYEHGEQWSENACTTCICDRGEVRCHKQACLPLRCGKGQSRARRHGQCCEECVSPAGSCSYDGVVRYQDEMWKGSACEFCMCDHGQVTCQTGECAKVECARDEELIHLDGKCCPECISRNGYCVYEETGEFMSSNASEVKRIPEGEKWEDGPCKVCECRGAQVTCYEPSCPPCPVGTLALEVKGQCCPDCTSVHCHPDCLTCSQSPDHCDLCQDPTKLLQNGWCVHSCGLGFYQAGSLCLACQPQCSTCTSGLECSSCQPPLLMRHGQCVPTCGDGFYQDRHSCAVCHESCAGCWGPTEKHCLACRDPLHVLRDGGCESSCGKGFYNRQGTCSACDQSCDSCGPSSPRCLTCTEKTVLHDGKCMSECPGGYYADATGRCKVCHNSCASCSGPTPSHCTACSPPKALRQGHCLPRCGEGFYSDHGVCKACHSSCLACMGPAPSHCTGCKKPEEGLQVEQLSDVGIPSGECLAQCRAHFYLESTGICEACHQSCFRCAGKSPHNCTDCGPSHVLLDGQCLSQCPDGYFHQEGSCTECHPTCRQCHGPLESDCISCYPHISLTNGNCRTSCREEQFLNLVGYCADCHHLCQHCAADLHNTGSICLRCQNAHYLLLGDHCVPDCPSGYYAERGACKKCHSSCRTCQGRGPFSCSSCDTNLVLSHTGTCSTTCFPGHYLDDNHVCQPCNTHCGSCDSQASCTSCRDPNKVLLFGECQYESCAPQYYLDFSTNTCKECDWSCSACSGPLKTDCLQCMDGYVLQDGACVEQCLSSFYQDSGLCKNCDSYCLQCQGPHECTRCKGPFLLLEAQCVQECGKGYFADHAKHKCTACPQGCLQCSHRDRCHLCDHGFFLKSGLCVYNCVPGFSVHTSNETCSGKIHTPSLHVNGSLILPIGSIKPLDFSLLNVQDQEGRVEDLLFHVVSTPTNGQLVLSRNGKEVQLDKAGRFSWKDVNEKKVRFVHSKEKLRKGYLFLKISDQQFFSEPQLINIQAFSTQAPYVLRNEVLHISRGERATITTQMLDIRDDDNPQDVVIEIIDPPLHGQLLQTLQSPATPIYQFQLDELSRGLLHYAHDGSDSTSDVAVLQANDGHSFHNILFQVKTVPQNDRGLQLVANSMVWVPEGGMLQITNRILQAEAPGASAEEIIYKITQDYPQFGEVVLLVNMPADSPADEGQHLPDGRTATPTSTFTQQDINEGIVWYRHSGAPAQSDSFRFEVSSASNAQTRLESHMFNIAILPQTPEAPKVSLEASLHMTAREDGLTVIQPHSLSFINSEKPSGKIVYNITLPLHPNQGIIEHRDHPHSPIRYFTQEDINQGKVMYRPPPAAPHLQELMAFSFAGLPESVKFHFTVSDGEHTSPEMVLTIHLLPSDQQLPVFQVTAPRLAVSPGGSTSVGLQVVVRDAETAPKELFFELRRPPQHGVLLKHTAEFRRPMATGDTFTYEDVEKNALQYIHDGSSTREDSMEISVTDGLTVTMLEVRVEVSLSEDRGPRLAAGSSLSITVASKSTAIITRSHLAYVDDSSPDPEIWIQLNYLPSYGTLLRISGSEVEELSEVSNFTMEDINNKKIRYSAVFETDGHLVTDSFYFSVSDMDHNHLDNQIFTIMITPAENPPPVIAFADLITVDEGGRAPLSFHHFFATDDDDNLQRDAIIKLSALPKYGCIENTGTGDRFGPETASDLEASFPIQDVLENYIYYFQSVHESIEPTHDIFSFYVSDGTSRSEIHSINITIEVKTLEVGKVEPLTTIFHTIRELSL

SEQ ID NO: 28563 - protein, 4012 aa, Homo sapiens
  REGION 1..4012: note = ENSP00000422834
MGVLKVWLGLALALAEFAVLPHHSEGACVYQDSLLADATIWKPDSCQSCRCHGDIVICKPAVCRNPQCAFEKGEVLQIAANQCCPECVLRTPGSCHHEKKIHEHGTEWASSPCSVCSCNHGEVRCTPQPCPPLSCGHQELAFIPEGSCCPVCVGLGKPCSYEGHVFQDGEDWRLSRCAKCLCRNGVAQCFTAQCQPLFCNQDETVVRVPGKCCPQCSARSCSAAGQVYEHGEQWSENACTTCICDRGEVRCHKQACLPLRCGKGQSRARRHGQCCEECVSPAGSCSYDGVVRYQDEMWKGSACEFCMCDHGQVTCQTGECAKVECARDEELIHLDGKCCPECISRNGYCVYEETGEFMSSNASEVKRIPEGEKWEDGPCKVCECRGAQVTCYEPSCPPCPVGTLALEVKGQCCPDCTSVHCHPDCLTCSQSPDHCDLCQDPTKLLQNGWCVHSCGLGFYQAGSLCLACQPQCSTCTSGLECSSCQPPLLMRHGQCVPTCGDGFYQDRHSCAVCHESCAGCWGPTEKHCLACRDPLHVLRDGGCESSCGKGFYNRQGTCSACDQSCDSCGPSSPRCLTCTEKTVLHDGKCMSECPGGYYADATGRCKVCHNSCASCSGPTPSHCTACSPPKALRQGHCLPRCGEGFYSDHGVCKACHSSCLACMGPAPSHCTGCKKPEEGLQVEQLSDVGIPSGECLAQCRAHFYLESTGICEACHQSCFRCAGKSPHNCTDCGPSHVLLDGQCLSQCPDGYFHQEGSCTECHPTCRQCHGPLESDCISCYPHISLTNGNCRTSCREEQFLNLVGYCADCHHLCQHCAADLHNTGSICLRCQNAHYLLLGDHCVPDCPSGYYAERGACKKCHSSCRTCQGRGPFSCSSCDTNLVLSHTGTCSTTCFPGHYLDDNHVCQPCNTHCGSCDSQASCTSCRDPNKVLLFGECQYESCAPQYYLDFSTNTCKECDWSCSACSGPLKTDCLQCMDGYVLQDGACVEQCLSSFYQDSGLCKNCDSYCLQCQGPHECTRCKGPFLLLEAQCVQECGKGYFADHAKHKCTACPQGCLQCSHRDRCHLCDHGFFLKSGLCVYNCVPGFSVHTSNETCSGKIHTPSLHVNGSLILPIGSIKPLDFSLLNVQDQEGRVEDLLFHVVSTPTNGQLVLSRNGKEVQLDKAGRFSWKDVNEKKVRFVHSKEKLRKGYLFLKISDQQFFSEPQLINIQAFSTQAPYVLRNEVLHISRGERATITTQMLDIRDDDNPQDVVIEIIDPPLHGQLLQTLQSPATPIYQFQLDELSRGLLHYAHDGSDSTSDVAVLQANDGHSFHNILFQVKTVPQNDRGLQLVANSMVWVPEGGMLQITNRILQAEAPGASAEEIIYKITQDYPQFGEVVLLVNMPADSPADEGQHLPDGRTATPTSTFTQQDINEGIVWYRHSGAPAQSDSFRFEVSSASNAQTRLESHMFNIAILPQTPEAPKVSLEASLHMTAREDGLTVIQPHSLSFINSEKPSGKIVYNITLPLHPNQGIIEHRDHPHSPIRYFTQEDINQGKVMYRPPPAAPHLQELMAFSFAGLPESVKFHFTVSDGEHTSPEMVLTIHLLPSDQQLPVFQVTAPRLAVSPGGSTSVGLQVVVRDAETAPKELFFELRRPPQHGVLLKHTAEFRRPMATGDTFTYEDVEKNALQYIHDGSSTREDSMEISVTDGLTVTMLEVRVEVSLSEDRGPRLAAGSSLSITVASKSTAIITRSHLAYVDDSSPDPEIWIQLNYLPSYGTLLRISGSEVEELSEVSNFTMEDINNKKIRYSAVFETDGHLVTDSFYFSVSDMDHNHLDNQIFTIMITPAENPPPVIAFADLITVDEGGRAPLSFHHFFATDDDDNLQRDAIIKLSALPKYGCIENTGTGDRFGPETASDLEASFPIQDVLENYIYYFQSVHESIEPTHDIFSFYVSDGTSRSEIHSINITIERKNDEPPRMTLQPLRVQLSSGVVISNSSLSLQDLDTPDNELIFVLTKKPDHGHVLWRQTASEPLENGRVLVQGSTFTYQDILAGLVGYVPSVPGMVVDEFQFSLTDGLHVDTGRMKIYTELPASDTPHLAINQGLQLSAGSVARITEQHLKVTDIDSDDHQVMYIMKEDPGAGRLQMMKHGNLEQISIKGPIRSFTQADISQGHVEYSHGTGEPGGSFAFKFDVVDGEGNRLIDKSFSISILEDKSPPVITTNKGLVLDENSVKKITTLQLSATDQDSGPTELIYRITRQPQLGHLEHAASPGIQISSFTQADLTSRNVQYVHSSEAEKHSDAFSFTLSDGVSEVTQTFHITLHPVDDSLPVVQNLGMRVQEGMRKTITEFELKAVDADTEAESVTFTIVQPPRHGTIERTSNGQHFHLTSTFTMKDIYQNRVSYSHDGSNSLKDRFTFTVSDGTNPFFIIEEGGKEIMTAAPQPFRVDILPVDDGTPRIVTNLGLQWLEYMDGKATNLITKKELLTMDPDTEDAQLVYEITTGPKHGFVENKLQPGRAAATFTQEDVNLGLIRYVLHKEKIREMMDSFQFLVKDSKPNVVSDNVFHIQWSLISFKYTSYNVSEKAGSVSVTVQRTGNLNQYAIVLCRTEQGTASSSSRVSSQPGQQDYVEYAGQVQFDEREDTKSCTIVINDDDVFENVESFTVELSMPAYALLGEFTQAKVIINDTEDEPTLEFDKKIYWVNESAGFLFAPIERKGDASSIVSAICYTVPKSAMGSSLYALESGSDFKSRGMSAASRVIFGPGVTMSTCDVMLIDDSEYEEEEEFEIALADASDNARIGRVATAKVLISGPNDASTVSLGNTAFTVSEDAGTVKIPVIRHGTDLSTFASVWCATRPSDPASATPGVDYVPSSRKVEFGPGVIEQYCTLTILDDTQYPVIEGLETFVVFLSSAQGAELTKPFQAVIAINDTFQDVPSMQFAKDLLLVKEKEGVLHVPITRSGDLSYESSVRCYTQSHSAQVMEDFEERQNADSSRITFLKGDKVKNCTVYIHDDSMFEPEEQFRVYLGLPLGNHWSGARIGKNNMATITISNDEDAPTIEFEEAAYQVREPAGPDAIAILNIKVIRRGDQNRTSKVRCSTRDGSAQSGVDYYPKSRVLKFSPGVDHIFFKVEILSNEDREWHESFSLVLGPDDPVEAVLGDVTTATVTILDQEAAGSLILPAPPIVVTLADYDHVEEVTKEGVKKSPSPGYPLVCVTPCDPHFPRYAVMKERCSEAGINQTSVQFSWEVAAPTDGNGARSPFETITDNTPFTSVNHMVLDSIYFSRRFHVRCVAKAVDKVGHVGTPLRSNIVTIGTDSAICHTPVVAGTSRGFQAQSFIATLKYLDVKHKEHPNRIHISVQIPHQDGMLPLISTMPLHNLHFLLSESIYRHQHVCSNLVTTYDLRGISEAGFLDDVVYDSTALGPGYDRPFQFDPSVREPKTIQLYKHLNLKSCVWTFDAYYDMTELIDVCGGSVTADFQVRDSAQSFLTVHVPLYVSYIYVTAPRGWASLEHHTEMEFSFFYDTVLWRTGIQTDSVLSARLQIIRIYIREDGRLVIEFKTHAKFRGQFVMEHHTLPEVKSFVLTPDHLGGIEFDLQLLWSAQTFDSPHQLWRATSSYNRKDYSGEYTIYLIPCTVQPTQPWVDPGEKPLACTAHAPERFLIPIAFQQTNRPVPVVYSLNTEFQLCNNEKVFLMDPNTSDMSLAEMDYKGAFSKGQILYGRVLWNPEQNLNSAYKLQLEKVYLCTGKDGYVPFFDPTGTIYNEGPQYGCIQPNKHLKHRFLLLDRNQPEVTDKYFHDVPFEAHFASELPDFHVVSNMPGVDGFTLKVDALYKVEAGHQWYLQVIYIIGPDTISGPRVQRSLTAPLRRNRRDLVEPDGQLILDDSLIYDNEGDQVKNGTNMKSLNLEMQELAVAASLSQTGASIGSALAAIMLLLLVFLVACFINRKCQKQRKKKPAEDILEEYPLNTKVEVPKRHPDRVEKNVNRHYCTVRNVNILSEPEAAYTFKGAKVKRLNLEVRVHNNLQDGTEV

SEQ ID NO: 28564 - protein, 39 aa, Homo sapiens
  REGION 1..39: note = ENSP00000425583
MGVLKVWLGLALALAEFAVLPHHSEGACVYQDSLLAEGG

SEQ ID NO: 28565 - protein, 666 aa, Homo sapiens
  REGION 1..666: note = ENSP00000423645
  VARIANT 1: note = Any amino acid
XGEVLQIAANQCCPECVLRTPGSCHHEKKIHEHGTEWASSPCSVCSCNHGEVRCTPQPCPPLSCGHQELAFIPEGSCCPVCVGLGKPCSYEGHVFQDGEDWRLSRCAKCLCRNGVAQCFTAQCQPLFCNQDETVVRVPGKCCPQCSARSCSAAGQVYEHGEQWSENACTTCICDRGEVRCHKQACLPLRCGKGQSRARRHGQCCEECVSPAGSCSYDGVVRYQDEMWKGSACEFCMCDHGQVTCQTGECAKVECARDEELIHLDGKCCPECISRNGYCVYEETGEFMSSNASEVKRIPEGEKWEDGPCKVCECRGAQVTCYEPSCPPCPVGTLALEVKGQCCPDCTSVHCHPDCLTCSQSPDHCDLCQDPTKLLQNGWCVHSCGLGFYQAGSLCLACQPQCSTCTSGLECSSCQPPLLMRHGQCVPTCGDGFYQDRHSCAVCHESCAGCWGPTEKHCLACRDPLHVLRDGGCESSCGKGFYNRQGTCSACDQSCDSCGPSSPRCLTCTEKTVLHDGKCMSECPGGYYADATGRCKVCHNSCASCSGPTPSHCTACSPPKALRQGHCLPRCGEGFYSDHGVCKACHSSCLACMGPAPSHCTGCKKPEEGLQVEQLSDVGIPSGECLAQCRAHFYLESTGICEGQNLDFCQNLEVISAVCLGISSTEN

SEQ ID NO: 28566 - protein, 652 aa, Homo sapiens
  REGION 1..652: note = ENSP00000423809
  VARIANT 1: note = Any amino acid
XCSYEGHVFQDGEDWRLSRCAKCLCRNGVAQCFTAQCQPLFCNQDETVVRVPGKCCPQCSARSCSAAGQVYEHGEQWSENACTTCICDRGEVRCHKQACLPLRCGKGQSRARRHGQCCEECVSPAGSCSYDGVVRYQDEMWKGSACEFCMCDHGQVTCQTGECAKVECARDEELIHLDGKCCPECISRNGYCVYEETGEFMSSNASEVKRIPEGEKWEDGPCKVCECRGAQVTCYEPSCPPCPVGTLALEVKGQCCPDCTSVHCHPDCLTCSQSPDHCDLCQDPTKLLQNGWCVHSCGLGFYQAGSLCLACQPQCSTCTSGLECSSCQPPLLMRHGQCVPTCGDGFYQDRHSCAVCHESCAGCWGPTEKHCLACRDPLHVLRDGGCESSCGKGFYNRQGTCSACDQSCDSCGPSSPRCLTCTEKTVLHDGKCMSECPGGYYADATGRCKVCHNSCASCSGPTPSHCTACSPPKALRQGHCLPRCGEGFYSDHGVCKACHSSCLACMGPAPSHCTGCKKPEEGLQVEQLSDVGIPSGECLAQCRAHFYLESTGICEACHQSCFRCAGKSPHNCTDCGPSHVLLDGQCLSQCPDGYFHQEGSCTECHPTCRQCHGPLESDCISCYPHISLTNGNCRTSCREEQFLNLVGYCAGE

SEQ ID NO: 28567 - protein, 426 aa, Homo sapiens
  REGION 1..426: note = ENSP00000422221
  VARIANT 1: note = Any amino acid
XTLPLHPNQGLPESVKFHFTVSDGEHTSPEMVLTIHLLPSDQQLPVFQVTAPRLAVSPGGSTSVGLQVVVRDAETAPKELFFELRRPPQHGVLLKHTAEFRRPMATGDTFTYEDVEKNALQYIHDGSSTREDSMEISVTDGLTVTMLEVRVEVSLSEDRGPRLAAGSSLSITVASKSTAIITRSHLAYVDDSSPDPEIWIQLNYLPSYGTLLRISGSEVEELSEVSNFTMEDINNKKIRYSAVFETDGHLVTDSFYFSVSDMDHNHLDNQIFTIMITPAENPPPVIAFADLITVDEGGRAPLSFHHFFATDDDDNLQRDAIIKLSALPKYGCIENTGTGDRFGPETASDLEASFPIQDVLENYIYYFQSVHESIEPTHDIFSFYVSDGTSRSEIHSINITIEVKTLEVGKVEPLTTIFHTIRELSL

SEQ ID NO: 28568 - protein, 715 aa, Homo sapiens
  REGION 1..715: note = ENSP00000370278
MVTQESMLKAALPLFTRFIISNGLRTEHGVFEITLETVDRALPVVTRNKGLRLAQGAVGLLSPDLLQLTDPDTPAENLTFLLVQLPQHGQLYLWGTGLLQHNFTQQDVDSKNVAYRHSGGDSQTDCFTFMATDGTNQGFIVNGRVWEEPVLFTIQVDQLDKTAPRITLLHSPSQVGLLKNGCYGIYITSRVLKASDPDTEDDQIIFKILQGPKHGHLENTTTGEFIHEKFSQKDLNSKTILYIINPSLEVNSDTVEFQIMDPTGNSATPQILELKWSHIEWSQTEYEVCENVGLLPLEIIRRGYSMDSAFVGIKVNQVSAAVGKDFTVIPSKLIQFDPGMSTKMWNIAITYDGLEEDDEVFEVILNSPVNAVLGTKTKAAVKILDSKGGQCHPSYSSNQSKHSTWEKGIWHLLPPGSSSSTTSGSFHLERRPLPSSMQLAVIRGDTLRGFDSTDLSQRKLRTRGNGKTVRPSSVYRNGTDIIYNYHGIVSLKLEDDSFPTHKRKAKVSIISQPQKTIKVAELPQADKVESTTDSHFPRQDQLPSFPKNCTLELKGLFHFEEGIQKLYQCNGIAWKAWSPQTKDVEDKSCPAGWHQHSGYCHILITEQKGTWNAAAQACREQYLGNLVTVFSRQHMRWLWDIGGRKSFWIGLNDQVHAGHWEWIGGEPVAFTNGRRGPSQRSKLGKSCVLVQRQGKWQTKDCRRAKPHNYVCSRKL

SEQ ID NO: 28569 - protein, 1335 aa, Homo sapiens
  REGION 1..1335: note = ENSP00000370257
MNSLSWGAANAVLLLLLLAWASPTFISINRGVRVMKGHSAFLSGDDLKFAIPKEKDACKVEVVMNEPITQRVGKLTPQVFDCHFLPNEVKYVHNGCPILDEDTVKLRLYRFTERDTFIETFILWVYLLEPDCNIIHMSNNVLEVPEFNGLSQAIDKNLLRFDYDRMASLECTVSLDTARTRLPAHGQMVLGEPRPEEPRGDQPHSFFPESQLRAKLKCPGGSCTPGLKKIGSLKVSCEEFLLMGLRYQHLDPPSPNIDYISIQLDLTDTRSKIVYKSESAWLPVYIRAGIPNQIPKAAFMAVFILEVDQFILTSLTTSVLDCEEDETPKPLLVFNITKAPLQGYVTHLLDHTRPISSFTWKDLSDMQIAYQPPNSSHSERRHDEVELEVYDFFFERSAPMTVHISIRTADTNAPRVSWNTGLSLLEGQSRAITWEQFQVVDNDDIGAVRLVTVGGLQHGWLTLRGGKGFLFTVADLQAGVVRYHHDDSDSTKDFVVFRIFDGHHSIRHKFPINVLPKDDSPPFLITNVVIELEEGQTILIQGSMLRASDVDASDDYIFFNITKPPQAGEIMKKPGPGLIGYPVHGFLQRDLFNGIIYYRHFGGEIFEDSFQFVLWDSHEPPNLSVPQVATIHITPVDDQLPKEAPGVSRHLVVKETEVAYITKKQLHFIDSESYDRELVYTITTPPFFSFSHRHLDAGKLFMVDSIPKVVKNPTALELRSFTQHAVNYMKVAYMPPMQDIGPHCRDVQFTFSVSNQHGGTLHGICFNITILPVDNQVPEAFTNPLKVTEGGQSIISTEHILISDADTKLDNIDLSLRELPLHGRVELNGFPLNSGGTFSWGDLHTLKVRYQHDGTEVLQDDLLLEVTDGTNSAEFVLHVEVFPVNDEPPVLKADLMPVMNCSEGGEVVITSEYIFATDVDSDNLKLMFVIAREPQHGVVRRAGVTVDQFSQRDVISEAVTYKHTGGEIGLMPCFDTITLVVSDGEAGPFVNGCCYNGPNPSVPLHASFPVYDLNITVYPVDNQPPSIAIGPVFVVDEGCSTALTVNHLSATDPDTAADDLEFVLVSPPQFGYLENILPSVGFEKSNIGISIDSFQWKDMNAFHINYVQSRHLRIEPTADQFTVYVTDGKHHSLEIPFSIIINPTNDEAPDFVVQNITVCEGQMKELDSSIISAVDLDIPQDALLFSITQKPRHGLLIDRGFSKDFSENKQPANPHQKHAPVHSFSMELLKTGMRLTYMHDDSESLADDFTIQLSDGKHKILKTISVEVIPVNDEKPMLSKKAEIAMNMGETRIISSAILSAIDEDSPREKIYYVFERLPQNGQLQLKECQLRCGI

SEQ ID NO: 28570 - protein, 222 aa, Homo sapiens
  REGION 1..222: note = ENSP00000412597
MLDESLAVRRSKKCKEMIMHWEKKEDIDIVNTVDQLDKTAPRITLLHSPSQVGLLKNGCYGIYITSRVLKASDPDTEDDQIIFKILQGPKHGHLENTTTGEFIHEKFSQKDLNSKTILYIINPSLEVNSDTVEFQIMDPTGNSATPQILELKWSHIEWSQTEYEVCENVGLLPLEIIRRGYSMDSAFVGIKVNQVSAAVGKDFTVIPSKLIQFDPGSSILCL

SEQ ID NO: 28571 - protein, 2179 aa, Homo sapiens
  REGION 1..2179: note = ENSP00000370262
MNSLSWGAANAVLLLLLLAWASPTFISINRGVRVMKGHSAFLSGDDLKFAIPKEKDACKVEVVMNEPITQRVGKLTPQVFDCHFLPNEVKYVHNGCPILDEDTVKLRLYRFTERDTFIETFILWVYLLEPDCNIIHMSNNVLEVPEFNGLSQAIDKNLLRFDYDRMASLECTVSLDTARTRLPAHGQMVLGEPRPEEPRGDQPHSFFPESQLRAKLKCPGGSCTPGLKKIGSLKVSCEEFLLMGLRYQHLDPPSPNIDYISIQLDLTDTRSKIVYKSESAWLPVYIRAGIPNQIPKAAFMAVFILEVDQFILTSLTTSVLDCEEDETPKPLLVFNITKAPLQGYVTHLLDHTRPISSFTWKDLSDMQIAYQPPNSSHSERRHDEVELEVYDFFFERSAPMTVHISIRTADTNAPRVSWNTGLSLLEGQSRAITWEQFQVVDNDDIGAVRLVTVGGLQHGWLTLRGGKGFLFTVADLQAGVVRYHHDDSDSTKDFVVFRIFDGHHSIRHKFPINVLPKDDSPPFLITNVVIELEEGQTILIQGSMLRASDVDASDDYIFFNITKPPQAGEIMKKPGPGLIGYPVHGFLQRDLFNGIIYYRHFGGEIFEDSFQFVLWDSHEPPNLSVPQVATIHITPVDDQLPKEAPGVSRHLVVKETEVAYITKKQLHFIDSESYDRELVYTITTPPFFSFSHRHLDAGKLFMVDSIPKVVKNPTALELRSFTQHAVNYMKVAYMPPMQDIGPHCRDVQFTFSVSNQHGGTLHGICFNITILPVDNQVPEAFTNPLKVTEGGQSIISTEHILISDADTKLDNIDLSLRELPLHGRVELNGFPLNSGGTFSWGDLHTLKVRYQHDGTEVLQDDLLLEVTDGTNSAEFVLHVEVFPVNDEPPVLKADLMPVMNCSEGGEVVITSEYIFATDVDSDNLKLMFVIAREPQHGVVRRAGVTVDQFSQRDVISEAVTYKHTGGEIGLMPCFDTITLVVSDGEAGPFVNGCCYNGPNPSVPLHASFPVYDLNITVYPVDNQPPSIAIGPVFVVDEGCSTALTVNHLSATDPDTAADDLEFVLVSPPQFGYLENILPSVGFEKSNIGISIDSFQWKDMNAFHINYVQSRHLRIEPTADQFTVYVTDGKHHSLEIPFSIIINPTNDEAPDFVVQNITVCEGQMKELDSSIISAVDLDIPQDALLFSITQKPRHGLLIDRGFSKDFSENKQPANPHQKHAPVHSFSMELLKTGMRLTYMHDDSESLADDFTIQLSDGKHKILKTISVEVIPVNDEKPMLSKKAEIAMNMGETRIISSAILSAIDEDSPREKIYYVFERLPQNGQLQLKIGRDWVPLSPGMKCTQEEVDLNLLRYTHTGAMDSQNQDSFTFYLWDGNNRSPALDCQITIKDMEKGDIVILTKPLVVSKGDRGFLTTTTLLAVDGTDKPEELLYVITSPPRYGQIEYVHYPGVPITNFSQMDVVGQTVCYVHKSKVTVSSDRFRFIISNGLRTEHGVFEITLETVDRALPVVTRNKGLRLAQGAVGLLSPDLLQLTDPDTPAENLTFLLVQLPQHGQLYLWGTGLLQHNFTQQDVDSKNVAYRHSGGDSQTDCFTFMATDGTNQGFIVNGRVWEEPVLFTIQVDQLDKTAPRITLLHSPSQVGLLKNGCYGIYITSRVLKASDPDTEDDQIIFKILQGPKHGHLENTTTGEFIHEKFSQKDLNSKTILYIINPSLEVNSDTVEFQIMDPTGNSATPQILELKWSHIEWSQTEYEVCENVGLLPLEIIRRGYSMDSAFVGIKVNQVSAAVGKDFTVIPSKLIQFDPGMSTKMWNIAITYDGLEEDDEVFEVILNSPVNAVLGTKTKAAVKILDSKGGQCHPSYSSNQSKHSTWEKGIWHLLPPGSSSSTTSGSFHLERRPLPSSMQLAVIRGDTLRGFDSTDLSQRKLRTRGNGKTVRPSSVYRNGTDIIYNYHGIVSLKLEDDSFPTHKRKAKVSIISQPQKTIKVAELPQADKVESTTDSHFPRQDQLPSFPKNCTLELKGLFHFEEGIQKLYQCNGIAWKAWSPQTKDVEDKSCPAGWHQHSGYCHILITEQKGTWNAAAQACREQYLGNLVTVFSRQHMRWLWDIGGRKSFWIGLNDQVHAGHWEWIGGEPVAFTNGRRGPSQRSKLGKSCVLVQRQGKWQTKDCRRAKPHNYVCSRKL

SEQ ID NO: 28572 - protein, 2179 aa, Homo sapiens; identical to SEQ ID NO: 28571
  REGION 1..2179: note = ENSP00000412940

SEQ ID NO: 28573 - protein, 549 aa, Homo sapiens
  REGION 1..549: note = ENSP00000283309
MAVPPRGRGIDPARTNPDTFPPSGARCMEPSPERPACSQQEPTLGMDAMASEHRDVLVLLPSREQLRLAVGVKATGRELFQQVCNVASIRDAQFFGLCVVRNNEYIFMDLEQKLSKYFSKDWKKERNEGNEKPRAPFVAFLRVQHYVENGRVISDHRARHLYYCHLKERVLRSQCAHREEAYFLLAACALQADLGEHRESAHAGRYFEPHSYFPQWIITKRGIDYILRHMPTLHRERQGLSPKEAMLCFIQEACRLEDVPVHFFRLHKDKKEGRPTVILGLALRGVHIYQGKKLEIQLDGLPAAQKLVYYTGCTWRSRHLLHLLRASHQLHLRVRPTLQQLRQREEAEEKQHYRESYISDELELDLASRSFPGSGVSSQHCPHCLSRHSADSHGSSYTSGIKANSWLRESREMSVDVPLEVHGLHEKEPSSSPRTSRSHPSTRGDSQATRQEPCTQVRTRGQSAEAVHQIQEMTAGVSEEQHSHGLDDMQLHQLALHPAPTSLSHTFHRALDCRLAGPCETRATLPSKRSSNCLALDLFGEAPPQEFVV

SEQ ID NO: 28574 - protein, 481 aa, Homo sapiens
  REGION 1..481: note = ENSP00000414115
MDDVKATGRELFQQVCNVASIRDAQFFGLCVVRNNEYIFMDLEQKLSKYFSKDWKKERNEGNEKPRAPFVAFLRVQHYVENGRVISDHRARHLYYCHLKERVLRSQCAHREEAYFLLAACALQADLGEHRESAHAGRYFEPHSYFPQWIITKRGIDYILRHMPTLHRERQGLSPKEAMLCFIQEACRLEDVPVHFFRLHKDKKEGRPTVILGLALRGVHIYQGKKLEIQLDGLPAAQKLVYYTGCTWRSRHLLHLLRASHQLHLRVRPTLQQLRQREEAEEKQHYRESYISDELELDLASRSFPGSGVSSQHCPHCLSRHSADSHGSSYTSGIKANSWLRESREMSVDVPLEVHGLHEKEPSSSPRTSRSHPSTRGDSQATRQEPCTQVRTRGQSAEAVHQIQEMTAGVSEEQHSHGLDDMQLHQLALHPAPTSLSHTFHRALDCRLAGPCETRATLPSKRSSNCLALDLFGEAPPQEFVV

SEQ ID NO: 28575 - protein, 180 aa, Homo sapiens
  REGION 1..180: note = ENSP00000427668
SRPEEERVGPRRTPGLSHEEIWAVVSSSSRPLPVHCPALTSRTWQASLFHHEQASREDKTFRGARCMEPSPERPACSQQEPTLGMDAMASEHRDVLVLLPSREQLRLAVGVKATGRELFQQVCNVASIRDAQFFGLCVVRNNEYIFMDLEQKLSKYFSKDWKKERNELLRPEGLSAGGLW

SEQ ID NO: 28576 - protein, 180 aa, Homo sapiens; identical to SEQ ID NO: 28575
  REGION 1..180: note = ENSP00000423552

SEQ ID NO: 28577 - protein, 195 aa, Homo sapiens
  REGION 1..195: note = ENSP00000424439
METSRPEEERVGPRRTPGLSHEEIWAVVSSSSRPLPVHCPALTSRTWQASLFHHEQASREDKTFRGARCMEPSPERPACSQQEPTLGMDAMASEHRDVLVLLPSREQLRLAVGVKATGRELFQQVCNVASIRDAQFFGLCVVRNNEYIFMDLEQKLSKYFSKDWKKERNEGNEKPRAPFVAFLRVQHYVENGRVI

SEQ ID NO: 28578 - protein, 213 aa, Homo sapiens
  REGION 1..213: note = ENSP00000328615
MQAEETKGIGITSMAKCLVKIQTRRSLQLHMVNHCNSNVFVRLLRLGSKVTARNTGVPLPKEENISAPLISSSPVKAAREYEDPPSEEEDKIKEEPLTISELVYNPSASLLPTPVDDDEIDMLFDCPSRLELEREDTDSFEDLEADENAFLIAEEEELKEARRALSWSYDILTGHIRVNPLVKSFSRLLVVGLGLLLFVFPLLLLLLESVSMQ

SEQ ID NO: 28579 - protein, 362 aa, Homo sapiens
  REGION 1..362: note = ENSP00000365617
MVFRRGQSPPVAEFNLLLKAHTLETYGVDPHPCKDSTGTTTFLGFTAAGFVVFQGNKRIHLIKWPDVCKLKFEGKTFYVIGTQKEKKAMLAFHTSTPAACKHLWKCGVENQAFYKYAKSSQIKTVSSSKIFFKGSRFRYSGKVAKEVVEASSKIQREPPEVHRANITQSRSSHSLNKQLIINMEPLQPLLPSPSEQEEELPLGEGVPLPKEENISAPLISSSPVKAAREYEDPPSEEEDKIKEEPLTISELVYNPSASLLPTPVDDDEIDMLFDCPSRLELEREDTDSFEDLEADENAFLIAEEEELKEARRALSWSYDILTGHIRVNPLVKSFSRLLVVGLGLLLFVFPLLLLLLESVSMQ

SEQ ID NO: 28580 - protein, 556 aa, Homo sapiens
  REGION 1..556: note = ENSP00000365621
MFASCHCVPRGRRTMKMIHFRSSSVKSLSQEMRCTIRLLDDSEISCHIQRETKGQFLIDHICNYYSLLEKDYFGIRYVDPEKQRHWLEPNKSIFKQMKTHPPYTMCFRVKFYPHEPLKIKEELTRYLLYLQIKRDIFHGRLLCSFSDAAYLGACIVQAELGDYDPDEHPENYISEFEIFPKQSQKLERKIVEIHKNELRGQSPPVAEFNLLLKAHTLETYGVDPHPCKDSTGTTTFLGFTAAGFVVFQGNKRIHLIKWPDVCKLKFEGKTFYVIGTQKEKKAMLAFHTSTPAACKHLWKCGVENQAFYKYAKSSQIKTVSSSKIFFKGSRFRYSGKVAKEVVEASSKIQREPPEVHRANITQSRSSHSLNKQLIINMEPLQPLLPSPSEQEEELPLGEGVPLPKEENISAPLISSSPVKAAREYEDPPSEEEDKIKEEPLTISELVYNPSASLLPTPVDDDEIDMLFDCPSRLELEREDTDSFEDLEADENAFLIAEEEELKEARRALSWSYDILTGHIRVNPLVKSFSRLLVVGLGLLLFVFPLLLLLLESVSMQ

SEQ ID NO: 28581 - protein, 597 aa, Homo sapiens
  REGION 1..597: note = ENSP00000303508
MFASCHCVPRGRRTMKMIHFRSSSVKSLSQEMRCTIRLLDDSEISCHIQRETKGQFLIDHICNYYSLLEKDYFGIRYVDPEKQRHWLEPNKSIFKQMKTHPPYTMCFRVKFYPHEPLKIKEELTRYLLYLQIKRDIFHGRLLCSFSDAAYLGACIVQAELGDYDPDEHPENYISEFEIFPKQSQKLERKIVEIHKNELRGQSPPVAEFNLLLKAHTLETYGVDPHPCKDSTGTTTFLGFTAAGFVVFQGNKRIHLIKWPDVCKLKFEGKTFYVIGTQKEKKAMLAFHTSTPAACKHLWKCGVENQAFYKYAKSSQIKTVSSSKIFFKGSRFRYSGKVAKEVVEASSKIQREPPEVHRANITQSRSSHSLNKQLIINMEPLQPLLPSPSEQEEELPLGEGVPLPKEENISAPLISSSPVKAAREYEDPPSEEEDKIKEEPLTISELVYNPSASLLPTPVDDDEIDMLFDCPSRLELEREDTDSFEDLEADENAFLIAEEEELKEARRALSWSYDILTGHIRVNPLVKSFSRLLVVGLGLLLFVFPLLLLLLESGIDLSFLCEIRQTPEFEQFHYEYYCPLKEWVAGKVHLILYMLGCS

SEQ ID NO: 28582 - protein, 140 aa, Homo sapiens
  REGION 1..140: note = ENSP00000412719
GTTTFLGFTAAGFVVFQGNKRIHLIKWPDVCKLKFEGKTFYVIGTQKEKKAMLAFHTSTPAACKHLWKCGVENQAFYKYAKSSQIKTVSSSKIFFKGSRFRYSGKVAKEVVEASSKIQREPPEVHRCVQKKICSCFGVTW

SEQ ID NO: 28583 - protein, 553 aa, Homo sapiens
  REGION 1..553: note = ENSP00000484839
MQLSKRETKGQFLIDHICNYYSLLEKDYFGIRYVDPEKQRHWLEPNKSIFKQMKTHPPYTMCFRVKFYPHEPLKIKEELTRYLLYLQIKRDIFHGRLLCSFSDAAYLGACIVQAELGDYDPDEHPENYISEFEIFPKQSQKLERKIVEIHKNELRGQSPPVAEFNLLLKAHTLETYGVDPHPCKDSTGTTTFLGFTAAGFVVFQGNKRIHLIKWPDVCKLKFEGKTFYVIGTQKEKKAMLAFHTSTPAACKHLWKCGVENQAFYKYAKSSQIKTVSSSKIFFKGSRFRYSGKVAKEVVEASSKIQREPPEVHRANITQSRSSHSLNKQLIINMEPLQPLLPSPSEQEEELPLGEGVPLPKEENISAPLISSSPVKAAREYEDPPSEEEDKIKEEPLTISELVYNPSASLLPTPVDDDEIDMLFDCPSRLELEREDTDSFEDLEADENAFLIAEEEELKEARRALSWSYDILTGHIRVNPLVKSFSRLLVVGLGLLLFVFPLLLLLLESGIDLSFLCEIRQTPEFEQFHYEYYCPLKEWVAGKVHLILYMLGCS

SEQ ID NO: 28584 - protein, 1039 aa, Homo sapiens
  REGION 1..1039: note = ENSP00000350032
MAVQLVPDSALGLLMMTEGRRCQVHLLDDRKLELLVQPKLLAKELLDLVASHFNLKEKEYFGIAFTDETGHLNWLQLDRRVLEHDFPKKSGPVVLYFCVRFYIESISYLKDNATIELFFLNAKSCIYKELIDVDSEVVFELASYILQEAKGDFSSNEVVRSDLKKLPALPTQALKEHPSLAYCEDRVIEHYKKLNGQTRGQAIVNYMSIVESLPTYGVHYYAVKDKQGIPWWLGLSYKGIFQYDYHDKVKPRKIFQWRQLENLYFREKKFSVEVHDPRRASVTRRTFGHSGIAVHTWYACPALIKSIWAMAISQHQFYLDRKQSKSKIHAARSLSEIAIDLTETGTLKTSKLANMGSKGKIISGSSGSLLSSGSQESDSSQSAKKDMLAALKSRQEALEETLRQRLEELKKLCLREAELTGKLPVEYPLDPGEEPPIVRRRIGTAFKLDEQKILPKGEEAELERLEREFAIQSQITEAARRLASDPNVSKKLKKQRKTSYLNALKKLQEIENAINENRIKSGKKPTQRASLIIDDGNIASEDSSLSDALVLEDEDSQVTSTISPLHSPHKGLPPRPPSHNRPPPPQSLEGLRQMHYHRNDYDKSPIKPKMWSESSLDEPYEKVKKRSSHSHSSSHKRFPSTGSCAEAGGGSNSLQNSPIRGLPHWNSQSSMPSTPDLRVRSPHYVHSTRSVDISPTRLHSLALHFRHRSSSLESQGKLLGSENDTGSPDFYTPRTRSSNGSDPMDDCSSCTSHSSSEHYYPAQMNANYSTLAEDSPSKARQRQRQRQRAAGALGSASSGSMPNLAARGGAGGAGGAGGGVYLHSQSQPSSQYRIKEYPLYIEGGATPVVVRSLESDQEGHYSVKAQFKTSNSYTAGGLFKESWRGGGGDEGDTGRLTPSRSQILRTPSLGREGAHDKGAGRAAVSDELRQWYQRSTASHKEHSRLSHTSSTSSDSGSQYSTSSQSTFVAHSRVTRMPQMCKATSAALPQSQRSSTPSSEIGATPPSSPHHILTWQTGEATENSPILDGSESPPHQSTDE

SEQ ID NO: 28585 - protein, 229 aa, Homo sapiens
  REGION 1..229: note = ENSP00000488764
  VARIANT 1: note = Any amino acid
XHSQSQPSSQYRIKEYPLYIEGGATPVVVRSLESDQEGHYSVKAQFKTSNSYTAGGLFKESWRGGGGDEGDTGRLTPSRSQILRTPSLGREGAHDKGAGRAAVSDELRQWYQRSTASHKEHSRLSHTSSTSSDSGSQYSTSSQSTFVAHSRVTRMPQMCKATSAALPQSQRSSTPSSEIGATPPSSPHHILTWQTGSYNDSCFLDSSLYPELADVQWYGQEKAKPGTLV

SEQ ID NO: 28586 - protein, 525 aa, Homo sapiens
  REGION 1..525: note = ENSP00000264546
MAAGLLGSEDPPWSWNLTCRALRTCQVRNIRVLQLLLKPWCISRAVYQMTEGRRCQVHLLDDRKLELLVQPKLLAKELLDLVASHFNLKEKEYFGIAFTDETGHLNWLQLDRRVLEHDFPKKSGPVVLYFCVRFYIESISYLKDNATIELFFLNAKSCIYKELIDVDSEVVFELASYILQEAKGDFSSNEVVRSDLKKLPALPTQALKEHPSLAYCEDRVIEHYKKLNGQTRGQAIVNYMSIVESLPTYGVHYYAVKDKQGIPWWLGLSYKGIFQYDYHDKVKPRKIFQWRQLENLYFREKKFSVEVHDPRRASVTRRTFGHSGIAVHTWYACPALIKSIWAMAISQHQFYLDRKQSKSKIHAARSLSEIAIDLTETGTLKTSKLANMGSKGKIISGSSGSLLSSGSQESDSSQSAKKDMLAALKSRQEALEETLRQRLEELKKLCLREAELTGKLPVEYPLDPGEEPPIVRRRIGTAFKLDEQKILPKGEEAELERLEREFAIQSQITEAARRLASDPNVSKKL

SEQ ID NO: 28587 - protein, 77 aa, Homo sapiens
  REGION 1..77: note = ENSP00000487974
MAISQHQFYLDRKQSKSKIHAARSLSEIAIDLTETGTLKTSKLANMGSKGKIISGSSGSLLSSGSGARRHCILLPGS

SEQ ID NO: 28588 - protein, 35 aa, Homo sapiens
  REGION 1..35: note = ENSP00000488325
MAISQHQFYLDRKQSKSKIHAARSLSEIAIDLTET

SEQ ID NO: 28589 - protein, 141 aa, Homo sapiens
  REGION 1..141: note = ENSP00000492091
MVVQAAVAPNRSQRLLLKIPYGSLRRRSVERMTEGRRCQVHLLDDRKLELLVQPKLLAKELLDLVASHFNLKEKEYFGIAFTDETGHLNWLQLDRRVLEHDFPKKSGPVVLYFCVRFYIESISYLKDNATIELFFLNAKSC

SEQ ID NO: 28590 - protein, 53 aa, Homo sapiens
  REGION 1..53: note = ENSP00000474863
MAVQLVPDSALGLLMMESHCVVQAGGQWCHLGSLQSPISASRVQAILLLHPPE

SEQ ID NO: 28591 - protein, 72 aa, Homo sapiens
  REGION 1..72: note = ENSP00000473870
MAVQLVPDSALGLLMDRATHMTTEGGTWREDTFWWWRWPFRLLKSCLSHLCKNLRQRKKILLCSPTREEASD

SEQ ID NO: 28592 - protein, 1034 aa, Homo sapiens
  REGION 1..1034: note = ENSP00000381549
MASVFMCGVEDLLFSGSRFVWNLTVSTLRRWYTERLRACHQVLRTWCGLQDVYQMTEGRHCQVHLLDDRRLELLVQPKLLARELLDLVASHFNLKEKEYFGITFIDDTGQQNWLQLDHRVLDHDLPKKPGPTILHFAVRFYIESISFLKDKTTVELFFLNAKACVHKGQIEVESETIFKLAAFILQEAKGDYTSDENARKDLKTLPAFPTKTLQEHPSLAYCEDRVIEHYLKIKGLTRGQAVVQYMKIVEALPTYGVHYYAVKDKQGLPWWLGISYKGIGQYDIQDKVKPRKLFQWKQLENLYFREKKFAVEVHDPRRISVSRRTFGQSGLFVQTWYANSSLIKSIWVMAISQHQFYLDRKQSKAKIPSARSLDEIAMDLTETGTQRASKLVTLETKSQFIMASNGSLISSGSQDSEVSEEQKREKILELKKKEKLLQEKLLKKVEELKKICLREAELTGKMPKEYPLNIGEKPPQVRRRVGTAFKLDDNLLPSEEDPALQELESNFLIQQKLVEAAKKLANEPDLCKTVKKKRKQDYTDAMKKLQEIENAINEYRIRCGKKPSQKATVLPEDIIPSESSSLSDTTTYDDPSDAFTFPGQRSSSVPHSPRILPPKSLGIERIHFRKSSINEQFVDTRQSREMLSTHSSPYKTLERRPQGGRSMPTTPVLTRNAYSSSHLEPESSSQHCRQRSGSLESQSHLLSEMDSDKPFFSLSKSQRSSSTEILDDGSSYTSQSSTEYYCVTPVTGPYYTTQTLDTRTRGRRRSKKQNVSTSNSGSMPNLAQKDSLRNGVYSKSQEPPSSSYYIAGYTPYAECDFYYSGGYVYENDTEGQYSVNPSYRSSAHYGYERQRDYSRSFHEDEVDRVPHNPYATLRLPRKAAAKSEHITKNIHKALVAEHLRGWYQRASGQKDQGHSPQTSFDSDRGSQRCLGFAGLQVPCSPSSRASSYSSVSSTNASGNWRTQLTIGLSDYETPAHSSYTSCYGNVYNPLPSPSRQYTEISQLDGTDGNQLEDNLESSEQRLFWHEDSKPGTLV

SEQ ID NO: 28593 - protein, 686 aa, Homo sapiens
  REGION 1..686: note = ENSP00000418682
MAISQHQFYLDRKQSKAKIPSARSLDEIAMDLTETGTQRASKLVTLETKSQFIMASNGSLISSGSQDSEVSEEQKREKILELKKKEKLLQEKLLKKVEELKKICLREAELTGKMPKEYPLNIGEKPPQVRRRVGTAFKLDDNLLPSEEDPALQELESNFLIQQKLVEAAKKLANEPDLCKTVKKKRKQDYTDAMKKLQEIENAINEYRIRCGKKPSQKATVLPEDIIPSESSSLSDTTTYDDPSDAFTFPGQRSSSVPHSPRILPPKSLGIERIHFRKSSINEQFVDTRQSREMLSTHSSPYKTLERRPQGGRSMPTTPVLTRNAYSSSHLEPESSSQHCRQRSGSLESQSHLLSEMDSDKPFFSLSKSQRSSSTEILDDGSSYTSQSSTEYYCVTPVTGPYYTTQTLDTRTRGRRRSKKQNVSTSNSGSMPNLAQKDSLRNGVYSKSQEPPSSSYYIAGYTPYAECDFYYSGGYVYENDTEGQYSVNPSYRSSAHYGYERQRDYSRSFHEDEVDRVPHNPYATLRLPRKAAAKSEHITKNIHKALVAEHLRGWYQRASGQKDQGHSPQTSFDSDRGSQRCLGFAGLQVPCSPSSRASSYSSVSSTNASGNWRTQLTIGLSDYETPAHSSYTSCYGNVYNPLPSPSRQYTEISQLDGTDGNQLEDNLESSEQRLFWHEDSKPGTLV

SEQ ID NO: 28594 - protein, 161 aa, Homo sapiens
  REGION 1..161: note = ENSP00000419869
MSRLFQWKQLENLYFREKKFAVEVHDPRRISVSRRTFGQSGLFVQTWYANSSLIKSIWVMAISQHQFYLDRKQSKAKIPSARSLDEIAMDLTETGTQRASKLVTLETKSQFIMASNGSLISSGSQDSEVSEEQKREKILELKKKEKLLQEKLLKKVEELKK

SEQ ID NO: 28595 - protein, 17 aa, Homo sapiens
  REGION 1..17: note = ENSP00000420735
MAISQHQFYLDRKQSKV

SEQ ID NO: 28596 - protein, 183 aa, Homo sapiens
  REGION 1..183: note = ENSP00000418962
RNANGRSPNNSDKTFLSKFSSQEITLVKPRFYIESISFLKDKTTVELFFLNAKACVHKGQIEVESETIFKLAAFILQEAKGDYTSDENARKDLKTLPAFPTKTLQEHPSLAYCEDRVIEHYLKIKGLTRGQAVVQYMKIVEALPTYGVHYYAVKDKQGLPWWLGISYKGIGQYDIQDKVKPRK

SEQ ID NO: 28597 - protein, 167 aa, Homo sapiens
  REGION 1..167: note = ENSP00000418373
MTEGRHCQVHLLDDRRLELLVQPKLLARELLDLVASHFNLKEKEYFGITFIDDTGQQNWLQLDHRVLDHDLPKKPGPTILHFAVRFYIESISFLKDKTTVELFFLNAKACVHKGQIEVESETIFKLAAFILQEAKGDYTSDENARKDLKTLPAFPTKTLQEHPSLAY

SEQ ID NO: 28598 - protein, 142 aa, Homo sapiens
  REGION 1..142: note = ENSP00000418023
MTEGRHCQVHLLDDRRLELLVQPKLLARELLDLVASHFNLKEKEYFGITFIDDTGQQNWLQLDHRVLDHDLPKKPGPTILHFAVRFYIESISFLKDKTTVELFFLNAKACVHKGQIEVESETIFKLAAFILQEAKGDYTSDE

SEQ ID NO: 28599 - protein, 113 aa, Homo sapiens
  REGION 1..113: note = ENSP00000417550
MTEGRHCQVHLLDDRRLELLVQPKLLARELLDLVASHFNLKEKEYFGITFIDDTGQQNWLQLDHRVLDHDLPKKPGPTILHFAVRFYIESISFLKDKTTVELFFLNAKACVHK

SEQ ID NO: 28600 - protein, 80 aa, Homo sapiens
  REGION 1..80: note = ENSP00000417765
MTEGRHCQVHLLDDRRLELLVQPKLLARELLDLVASHFNLKEKEYFGITFIDDTPICLHFMQPDTLSEESFHFLQIISKE

SEQ ID NO: 28601 - protein, 1578 aa, Homo sapiens
  REGION 1..1578: note = ENSP00000366995
MEELETSLFQTRKAHRIEQMVARWLRRSRDSSARAKVAAADGPARNPTQTLIPVRHTVKIDKDTLLQDYGFHISESLPLTVVAVTAGGSAHGKLFPGDQILQMNNEPAEDLSWERAVDILREAEDSLSITVVRCTSGVPKSSFLTEEKRARLKTNPVKVHFAEEVLISGHSQGNSLLCMPNVLKLYLENGQTKAFKFEANTTVKDIILTVKEKLSIRSIEYFALALEEQYSISRLHLLHEEELIQQVVEREESHDYRCLFRVCFVPKDPLDLLKEDPVAFEYLYLQSCSDVLQERFAVEMKCSSALRLAALHIQERIYACAQPQKISLKYIEKDWGIENFISPTLLRNMKGKDIKKAISFHMKRNQNLLEPRQKQLISAAQLRLNYLQILGELKTYGGRIFNATLMLQDRESYIALLVGAKYGISQVINSKLNIMSTLAEFANISRVELTEESEKVSVVKVYLQDVKVLTLLLESNSAKDLACLIAGYYRLLVDPVTSIFLWPGNKQQAHRVSAEEGYESRACSDSEESSEVDCVLEPLSDRRLVKLAPCRSLIKEEQPPGNSPTPEVARRGPSTCGASSTTDSAESEASDSANTESRGYRTSGSSESMDALEEDDLDTCSSSRSTFFHFGSPGLAESIDSDSQEERSGIETSGFLCLLDLAQRANPQCQKTEFSESAALETFGWAPELSTVRLDPRLYEGSHADYYSLCSSVSPASYLSDSSESTASRQGGAPPAWGQQGWTEAQPSSMLEPLALHPPLAFEDGSSDEEYYDAADKLTPPGPPSGPRDVSTAEPSATSLQNKASTSSPENSLPCGPDGRQPSRRGGVKKYAKTLRKRRSFLQTDYTSQVSFPLVPSASLESVDDVCYYDREPYLALGAPSPTVSSLQDMQGEPGLLETKALGLLAPLRETKSTNPASRVMEMEPETMETKSVIDSRVSSISAIRFRIDPNNKENSGVVPAASSSASTPHCSNPGSSGPDTAQARPSQILPLSQDLDGIAPKEPTIEHGDSSFSLSSGDPNPDRACLASNPGLNNVSQGDTLELQLEPHVQLEMGLESFCTNHIQETAPKYTEPLLSPRDEPRSDECGINPGEKIASIPTKEEPQGQLSLERDREVTNKNGTNVFQEESRKDSGDSPGDVSNNVSQTLDISSPAGKIVTSLSLDAPVTGTEQIPPHPPRDPQGQSREPPGQGCQAQEQKLFVELDLDPDFFLGKQTVSPAVPPEGIKAEAPNHVTGQDIAPRDSPEWVCFNPEPSLPEPLPCPQEDPHLETSNHCLLSEGKSDSSSICLSAEKSFLCFAPESHPEVSASLRVATSLGFAGMNEMVAPRIGMDQCSCQFSYATCFRGPQPETEEEDRDLEAHPMAPLTSPPSAGSPVVLPWRPARAHSCTTAPLSRKSHIWPEYCSRALRQLKATPASTPEGFIQLMESLLELQDILETSWGVGNKHPPEKCTWHFTESRSRLCMGSQKLLSSCRHVIRMDQSPEEMQGAVRDTFQHLVQLAGLCFQFTDCSRCSARHREAAGNLRDVVYTYHQFIEAAKSTCERGYHDLSVKLLARQCTALTAAVFCLTQKFRASTAL

SEQ ID NO: 28602 - protein, 1578 aa, Homo sapiens; identical to SEQ ID NO: 28601
  REGION 1..1578: note = ENSP00000444411

SEQ ID NO: 28603 - protein, 62 aa, Homo sapiens
  REGION 1..62: note = ENSP00000439868
MEELETSLFQTRKAHRIEQMVARWLRRSRDSSARAKVAAADGPARNPTQTLIPVRHTVKIDK

SEQ ID NO: 28604 - protein, 66 aa, Homo sapiens
  REGION 1..66: note = ENSP00000490362
MQPLTKDAGMSLSSVTLASALQVRGEALSEEEIWSLLFLAAEQLLEDLRNAPAALRAPALHPADHV

SEQ ID NO: 28605 - protein, 1397 aa, Homo sapiens
  REGION 1..1397: note = ENSP00000490201
MQPLTKDAGMSLSSVTLASALQVRGEALSEEEIWSLLFLAAEQLLEDLRNDSSDYVVCPWSALLSAAGSLSFQGRVSHIEAAPFKAPELLQGQSEDEQPDASQMHVYSLGMTLYWSAGFHVPPHQPLQLCEPLHSILLTMCEDQPHRRCTLQSVLEACRVHEKEVSVYPAPAGLHIRRLVGLVLGTISEVEKRVVEESSSVQQNRSYLLRKRLRGTSSESPAAQAPECLHPCRVSERSTETQSSPEPHWSTLTHSHCSLLVNRALPGADPQDQQAGRRLSSGSVHSAADSSWPTTPSQRGFLQRRSKFSRPEFILLAGEAPMTLHLPGSVVTKKGKSYLALRDLCVVLLNGQHLEVKCDVESTVGAVFNAVTSFANLEELTYFGLAYMKSKEFFFLDSETRLCKIAPEGWREQPQKTSMNTFTLFLRIKFFVSHYGLLQHSLTRHQFYLQLRKDILEERLYCNEEILLQLGVLALQAEFGNYPKEQVESKPYFHVEDYIPASLIERMTALRVQVEVSEMHRLSSALWGEDAELKFLRVTQQLPEYGVLVHQVFSEKRRPEEEMALGICAKGVIVYEVKNNSRIAMLRFQWRETGKISTYQKKFTITSSVTGKKHTFVTDSAKTSKYLLDLCSAQHGFNAQMGSGQPSHVLFDHDKFVQMANLSPAHQARSKPLIWIQRLSCSENELFVSRLQGAAGGLLSTSMDNFNVDGSKEAGAEGIGRSPCTGREQLKSACVIQKPMTWDSLSGPPVQSMHAGSKNNRRKSFIAEPGREIVRVTLKRDPHRGFGFVINEGEYSGQADPGIFISSIIPGGPAEKAKTIKPGGQILALNHISLEGFTFNMAVRMIQNSPDNIELIISQSKGVGGNNPDEEKNSTANSGVSSTDILSFGYQGSLLSHTQDQDRNTEELDMAGVQSLVPRLRHQLSFLPLKGAGSSCPPSPPEISAGEIYFVELVKEDGTLGFSVTGGINTSVPYGGIYVKSIVPGGPAAKEGQILQGDRLLQVDGVILCGLTHKQAVQCLTGPGQVARLVLERRVPRSTQQCPSANDSMGDERTAVSLVTALPGRPSSCVSVTDGPKFEVKLKKNANGLGFSFVQMEKESCSHLKSDLVRIKRLFPGQPAEENGAIAAGDIILAVNGRSTEGLIFQEVLHLLRGAPQEVTLLLCRPPPGALPELEQEWQTPELSADKEFTRATCTDSCTSPILDQEDSWRDSASPDAGEGLGLRPESSQKAIREAQWGQNRERPWASSLTHSPESHPHLCKLHQERDESTLATSLEKDVRQNCYSVCDIMRLGSPELDGEDGEGDMYHPCGAPSPTSEDEEYLTINSTCQGQLPCEECLEADSGTIPLPQFCSWGTVPESLPPEESPESGSEWEDLEEPVALEYGALRSLSFGGLNV

SEQ ID NO: 28606 - protein, 1309 aa, Homo sapiens
  REGION 1..1309: note = ENSP00000363317
MQPLTKDAGMSLSSVTLASALQVRGEALSEEEIWSLLFLAAEQLLEDLRNDSSDYVVCPWSALLSAAGSLSFQGRVSHIEAAPFKAPELLQGQSEDEQPDASQMHVYSLGMTLYWSAGFHVPPHQPLQLCEPLHSILLTMCEDQPHRRCTLQSVLEACRVHEKEVSVYPAPAGLHIRRLVGLVLGTISEVEKRVVEESSSVQQNRSYLLRKRLRGTSSESPAAQAPECLHPCRVSERSTETQSSPEPHWSTLTHSHCSLLVNRALPGADPQDQQAGRRLSSGSVHSAADSSWPTTPSQRGFLQRRSKFSRPEFILLAGEAPMTLHLPGSVVTKKGKSYLALRDLCVVLLNGQHLEVKCDVESTVGAVFNAVTSFANLEELTYFGLAYMKSKEFFFLDSETRLCKIAPEGWREQPQKTSMNTFTLFLRIKFFVSHYGLLQHSLTRHQFYLQLRKDILEERLYCNEEILLQLGVLALQAEFGNYPKEQVESKPYFHVEDYIPASLIERMTALRVQVEVSEMHRLSSALWGEDAELKFLRVTQQLPEYGVLVHQVFSEKRRPEEEMALGICAKGVIVYEVKNNSRIAMLRFQWRETGKISTYQKKFTITSSVTGKKHTFVTDSAKTSKYLLDLCSAQHGFNAQMGSGQPSHVLFDHDKFVQMANLSPAHQARSKPLIWIQRLSCSENELFVSRLQGAAGGLLSTSMDNFNVDGSKEAGAEGIGRSPCTGREQLKSACVIQKPMTWDSLSGPPVQSMHAGSKNNRRKSFIAEPGREIVRVTLKRDPHRGFGFVINEGEYSGQADPGIFISSIIPGGPAEKAKTIKPGGQILALNHISLEGFTFNMAVRMIQNSPDNIELIISQSKGVGGNNPDEEKNSTANSGVSSTDILSFGYQGSLLSHTQDQDRNTEELDMAGVQSLVPRLRHQLSFLPLKGAGSSCPPSPPEISAGEIYFVELVKEDGTLGFSVTGGINTSVPYGGIYVKSIVPGGPAAKEGQILQGDRLLQVDGVILCGLTHKQAVQCLTGPGQVARLVLERRVPRSTQQCPSANDSMGDERTAVSLVTALPGRPSSCVSVTDGPKFEVKLKKNANGLGFSFVQMEKESCSHLKSDLVRIKRLFPGQPAEENGAIAAGDIILAVNGRSTEGLIFQEVLHLLRGAPQEVTLLLCRPPPGALPELEQEWQTPELSADKEFTRATCTDSCTSPILDQEDSWRDSASPDAGEGLGLRPESSQKAIREAQWGQNRERPWASSLTHSPESHPHLCKLHQERDESTLATSLEKDVRQNCYSVCDIMRLGRYSFSSPLTRLSTDIF

SEQ ID NO: 28607 - protein, 1284 aa, Homo sapiens
  REGION 1..1284: note = ENSP00000307079
MHVFIVGMSLSSVTLASALQVRGEALSEEEIWSLLFLAAEQLLEDLRNDSSDYVVCPWSALLSAAGSLSFQGRVSHIEAAPFKAPELLQGQSEDEQPDASQPLQLCEPLHSILLTMCEDQPHRRCTLQSVLEACRVHEKEVSVYPAPAGLHIRRLVGLVLGTISEVEKRVVEESSSVQQNRSYLLRKRLRGTSSESPAAQAPECLHPCRVSERSTETQSSPEPHWSTLTHSHCSLLVNRALPGADPQDQQAGRRLSSGSVHSAADSSWPTTPSQRGFLQRRSKFSRPEFILLAGEAPMTLHLPGSVVTKKGKSYLALRDLCVVLLNGQHLEVKCDVESTVGAVFNAVTSFANLEELTYFGLAYMKSKEFFFLDSETRLCKIAPEGWREQPQKTSMNTFTLFLRIKFFVSHYGLLQHSLTRHQFYLQLRKDILEERLYCNEEILLQLGVLALQAEFGNYPKEVESKPYFHVEDYIPASLIERMTALRVQVEVSEMHRLSSALWGEDAELKFLRVTQQLPEYGVLVHQVFSEKRRPEEEMALGICAKGVIVYEVKNNSRIAMLRFQWRETGKISTYQKKFTITSSVTGKKHTFVTDSAKTSKYLLDLCSAQHGFNAQMGSGQPSHVLFDHDKFVQMANLSPAHQARSKPLIWIQRLSCSENELFVSRLQGAAGGLLSTSMDNFNVDGSKEAGAEGIGRSPCTGREQLKSACVIQKPMTWDSLSGPPVQSMHAGSKNNRRKSFIAEPGREIVRVTLKRDPHRGFGFVINEGEYSGQADPGIFISSIIPGGPAEKAKTIKPGGQILALNHISLEGFTFNMAVRMIQNSPDNIELIISQSKGVGGNNPDEEKNSTANSGVSSTDILSFGYQGSLLSHTQDQDRNTEELDMAGVQSLVPRLRHQLSFLPLKGAGSSCPPSPPEISAGEIYFVELVKEDGTLGFSVTGGINTSVPYGGIYVKSIVPGGPAAKEGQILQGDRLLQVDGVILCGLTHKQAVQCLTGPGQVARLVLERRVPRSTQQCPSANDSMGDERTAVSLVTALPGRPSSCVSVTDGPKFEVKLKKNANGLGFSFVQMEKESCSHLKSDLVRIKRLFPGQPAEENGAIAAGDIILAVNGRSTEGLIFQEVLHLLRGAPQEVTLLLCRPPPGALPELEQEWQTPELSADKEFTRATCTDSCTSPILDQEDSWRDSASPDAGEGLGLRPESSQKAIREAQWGQNRERPWASSLTHSPESHPHLCKLHQERDESTLATSLEKDVRQNCYSVCDIMRLGRYSFSSPLTRLSTDIF

SEQ ID NO: 28608 - protein, 1322 aa, Homo sapiens
  REGION 1..1322: note = ENSP00000370057
MDVFSFVKIAKLSSHRTKSSGWPPPSGTWGLSQVPPYGWEMTANRDGRDYFINHMTQAIPFDDPRLESCQIIPPAPRKVEMRRDPVLGFGFVAGSEKPVVVRSVTPGGPSEGKLIPGDQIVMINDEPVSAAPRERVIDLVRSCKESILLTVIQPYPSPKSAFISAAKKARLKSNPVKVRFSEEVIINGQVSETVKDNSLLFMPNVLKVYLENGQTKSFRFDCSTSIKDVILTLQEKLSIKGIEHFSLMLEQRTEGAGTKLLLLHEQETLTQVTQRPSSHKMRCLFRISFVPKDPIDLLRRDPVAFEYLYVQSCNDVVQERFGPELKYDIALRLAALQMYIATVTTKQTQKISLKYIEKEWGLETFLPSAVLQSMKEKNIKKALSHLVKANQNLVPPGKKLSALQAKVHYLKFLSDLRLYGGRVFKATLVQAEKRSEVTLLVGPRYGISHVINTKTNLVALLADFSHVNRIEMFSEEESLVRVELHVLDVKPITLLMESSDAMNLACLTAGYYRLLVDSRRSIFNMANKKNTATQETGPENKGKHNLLGPDWNCIPQMTTFIGEGEQEAQITYIDSKQKTVEITDSTMCPKEHRHLYIDNAYSSDGLNQQLSQPGEAPCEADYRSLAQRSLLTLSGPETLKKAQESPRGAKVSFIFGDFALDDGISPPTLGYETLLDEGPEMLEKQRNLYIGSANDMKGLDLTPEAEGIQFVENSVYANIGDVKSFQAAEGIEEPLLHDICYAENTDDAEDEDEVSCEEDLVVGEMNQPAILNLSGSSDDIIDLTSLPPPEGDDNEDDFLLRSLNMAIAAPPPGFRDSSDEEDSQSQAASFPEDKEKGSSLQNDEIPVSLIDAVPTSAEGKCEKGLDNAVVSTLGALEALSVSEEQQTSDNSGVAILRAYSPESSSDSGNETNSSEMTESSELATAQKQSENLSRMFLATHEGYHPLAEEQTEFPASKTPAGGLPPKSSHALAARPATDLPPKVVPSKQLLHSDHMEMEPETMETKSVTDYFSKLHMGSVAYSCTSKRKSKLADGEGKAPPNGNTTGKKQQGTKTAEMEEEASGKFGTVSSRDSQHLSTFNLERTAFRKDSQRWYVATEGGMAEKSGLEAATGKTFPRASGLGAREAEGKEEGAPDGETSDGSGLGQGDRFLTDVTCASSAKDLDNPEDADSSTCDHPSKLPEADESVARLCDYHLAKRMSSLQSEGHFSLQSSQGSSVDAGCGTGSSGSACATPVESPLCPSLGKHLIPDASGKGVNYIPSEERAPGLPNHGATFKELHPQTEGMCPRMTVPALHTAINTEPLFGTLRDGCHRLPKIKETTV

SEQ ID NO: 28609 - protein, 467 aa, Homo sapiens
  REGION 1..467: note = ENSP00000492353
  VARIANT 1: note = Any amino acid
XAINTEPLFGTLRDGCHRLPKIKETTALTEPGKERRGGMPSAWSQHPEADPILLPSNIHSESKVPIPNQDPNDFSQANQAYGEAVSWRPPDLRGGSLRTPPSQKALRHSSSILSGSVDLETFRERTKGAVSLKCPGITEAQEASSERRAELPLGRKLTKSFSQSSMHLSSEGRFHKRSPVAHKDSKLYRTLPLRKLEGSNWRCRGPFSYCFLNRGQDEDGEEEEERGEATVQVSCLYRPQMTQAMPEPSSPCLAVAIQKQRGELSRGSVLKVWAEDLRDPDDLDFSNLAFDARIARINALKESTYAMPDGFLAAQNDANELLCLVRATKEKREESRPEAYDLTLSQYKQLLSIESRQLGSACRKMAMAEKSPEEMLLAMTSSFQVLCCLTEACMRLVKVVNSETQRQEIVGKIDEVVINYICLLKAAEAATGKNPGDPNVGLSARHSTTMAALVSTLTRSLKRLLNK

SEQ ID NO: 28610 - protein, 1282 aa, Homo sapiens [sequence omitted]

SEQ ID NO: 28611 - protein, 626 aa, Homo sapiens
  REGION 1..626: note = ENSP00000287474
MAVSGFTLGTCILLLHISYVANYPNGKVTQSCHGMIPEHGHSPQSVPVHDIYVSQMTFRPGDQIEVTLSGHPFKGFLLEARNAEDLNGPPIGSFTLIDSEVSQLLTCEDIQGSAVSHRSASKKTEIKVYWNAPSSAPNHTQFLVTVVEKYKIYWVKIPGPIISQPNAFPFTTPKATVVPLPTLPPVSHLTKPFSASDCGNKKFCIRSPLNCDPEKEASCVFLSFTRDDQSVMVEMSGPSKGYLSFALSHDQWMGDDDAYLCIHEDQTVYIQPSHLTGRSHPVMDSRDTLEDMAWRLADGVMQCSFRRNITLPGVKNRFDLNTSYYIFLADGAANDGRIYKHSQQPLITYEKYDVTDSPKNIGGSHSVLLLKVHGALMFVAWMTTVSIGVLVARFFKPVWSKAFLLGEAAWFQVHRMLMFTTTVLTCIAFVMPFIYRGGWSRHAGYHPYLGCIVMTLAVLQPLLAVFRPPLHDPRRQMFNWTHWSMGTAARIIAVAAMFLGMDLPGLNLPDSWKTYAMTGFVAWHVGTEVVLELKYWMMTEFRSFSHLLQWKQRVMLLKRQCWQFMSVGMLLFSSYFYLQSTIYEQAKTLAFAGQVIIIIKPKKLEACPDCLEHICEFSLGRLGSCL

SEQ ID NO: 28612 - protein, 344 aa, Homo sapiens
  REGION 1..344: note = ENSP00000477141
MRRPRQGGGGAGGSAAARARAGGLGGGSVPARARGAPAAARAAWLRDLCARMARPPRQHPGVWASLLLLLLTGPAACAASPADDGAGPGGRGPRGRARGDTGADEAVPRHDSSYGTFAGEFYDLRYLSEEGYPFPTAPPVDPFAKIKVDDCGKTKGCFRYGKPGCNAETCDYFLSYRMIGADVEFELSADTDGWVAVGFSSDKKMGGDDVMACVHDDNGRVRIQHFYNVGQWAKEIQRNPARDEEGVFENNRVTCRFKRPVNVPRDETIVDLHLSWYYLFAWGPAIQGSITRHDIDSPPASERVVSIYKYEDIFMPSAAYQTFSSPFCLLLIVALTFYLLMGTP

SEQ ID NO: 28613 - protein, 3016 aa, Homo sapiens
  REGION 1..3016: note = ENSP00000493189
MASQQDSGFFEISIKYLLKSWSNTSPVGNGYIKPPVPPASGTHREKGPPTMLPINVDPDSKPGEYVLKSLFVNFTTQAERKIRIIMAEPLEKPLTKSLQRGEDPQFDQVISSMSSLSEYCLPSILRTLFDWYKRQNGIEDESHEYRPRTSNKSKSDEQQRDYLMERRDLAIDFIFSLVLIEVLKQIPLHPVIDSLIHDVINLAFKHFKYKEGYLGPNTGNMHIVADLYAEVIGVLAQAKFPAVKKKFMAELKELRHKEQNPYVVQSIISLIMGMKFFRIKMYPVEDFEASLQFMQECAHYFLEVKDKDIKHALAGLFVEILVPVAAAVKNEVNVPCLRNFVESLYDTTLELSSRKKHSLALYPLVTCLLCVSQKQLFLNRWHIFLNNCLSNLKNKDPKMARVALESLYRLLWVYMIRIKCESNTATQSRLITIITTLFPKGSRGVVPRDMPLNIFVKIIQFIAQERLDFAMKEIIFDFLCVGKPAKAFSLNPERMNIGLRAFLVIADSLQQKDGEPPMPVTGAVLPSGNTLRVKKTYLSKTLTEEEAKMIGMSLYYSQVRKAVDNILRHLDKEVGRCMMLTNVQMLNKEPEDMITGERKPKIDLFRTCVAAIPRLLPDGMSKLELIDLLARLSIHMDDELRHIAQNSLQGLLVDFSDWREDVLFGFTNFLLREVNDMHHTLLDSSLKLLLQLLTQWKLVIQTQGKVYEQANKIRNSELIANGSSHRIQSERGPHCSVLHAVEGFALVLLCSFQVATRKLSVLILKEIRALFIALGQPEDDDRPMIDVMDQLSSSILESFIHVAVSDSATLPLTHNVDLQWLVEWNAVLVNSHYDVKSPSHVWIFAQSVKDPWVLCLFSFLRQENLPKHCPTALSYAWPYAFTRLQSVMPLVDPNSPINAKKTSTAGSGDNYVTLWRNYLILCFGVAKPSIMSPGHLRASTPEIMATTPDGTVSYDNKAIGTPSVGVLLKQLVPLMRLESIEITESLVLGFGRTNSLVFRELVEELHPLMKEALERRPENKKRRERRDLLRLQLLRIFELLADAGVISDSTNGALERDTLALGALFLEYVDLTRMLLEAENDKEVEILKDIRAHFSAMVANLIQCVPVHHRRFLFPQQSLRHHLFILFSQWAGPFSIMFTPLDRYSDRNHQITRYQYCALKAMSAVLCCGPVFDNVGLSPDGYLYKWLDNILACQDLRVHQLGCEVVVLLLELNPDQINLFNWAIDRCYTGSYQLASGCFKAIATVCGSRNYPFDIVTLLNLVLFKASDTNREIYEISMQLMQILEAKLFVYSKKVAEQRPGSILYGTHGPLPPLYSVSLALLSCELARMYPELTLPLFSEVSQRFPTTHPNGRQIMLTYLLPWLHNIELVDSRLLLPGSSPSSPEDEVKDREGDVTASHGLRGNGWGSPEATSLVLNNLMYMTAKYGDEVPGPEMENAWNALANNEKWSNNLRITLQFLISLCGVSSDTVLLPYIKKVAIYLCRNNTIQTMEELLFELQQTEPVNPIVQHCDNPPFYRFTASSKASAAASGTTSSSNTVVAGQENFPDAEENKILKESDERFSNVIRAHTRLESRYSNSSGGSYDEDKNDPISPYTGWLLTITETKQPQPLPMPCTGGCWAPLVDYLPETITPRGPLHRCNIAVIFMTEMVVDHSVREDWALHLPLLLHAVFLGLDHYRPEVFEHSKKLLLHLLIALSCNSNFHSIASVLLQTREMGEAKTLTVQPAYQPEYLYTGGFDFLREDQSSPVPDSGLSSSSTSSSISLGGSSGNLPQMTQEVEDVDTAAETDEKANKLIEFLTTRAFGPLWCHEDITPKNQNSKSAEQLTNFLRHVVSVFKDSKSGFHLEHQLSEVALQTALASSSRHYAGRSFQIFRALKQPLSAHALSDLLSRLVEVIGEHGDEIQGYVMEALLTLEAAVDNLSDCLKNSDLLTVLSRSSSPDLSSSSKLTASRKSTGQLNMNPGTTSGNTATAERSRHQRSFSVPKKFGVIDRSSDPPRSATLDRIQACTQQGLSSKTRSSSSLKDSLTDPSHINHPTNLLATIFWVTVALMESDFEFEYLMALRLLSRLLAHMPLDKAENREKLEKLQAQLKWADFSGLQQLLLKGFTSLTTTDLTLQLFSLLTPVSKISMVDASHAIGFPLNVLCLLPQLIQHFENPNQFCKDIAERIAQVCLEEKNPKLSNLAHVMTLYKTHSYTRDCATWVNVVCRYLHEAYADITLNMVTYLAELLEKGLPSVQQPLLQVIYSLLSYMDLSVVPVKQFNVEVLKTIEKYVQSVHWREALNILKLVVSRSASLVLPSYQHSDLSKIEIHRVWTSASKELPGKTLDFHFDISETPIIGRRYDELQNSSGRDGKPRAMAVTRSTSSTSSGSNSNVLVPVSWKRPQYSQKRTKEKLVHVLSLCGQEVGLSKNPSVIFSSCGDLDLLEHQTSLVSSEDGAREQENMDDTNSEQQFRVFRDFDFLDVELEDGEELQGESMDNFNWGVRRRSLDSLDKCDMQILEERQLSGSTPSLNKMHHEDSDESSEEEDLTASQILEHSDLIMTLSPSEETNPMELLTTACDSTPAEPHSFNTRMSSFDASLPDMNNLQISEGSKAEAVREEEDTTVHEDDLSSSINELPAAFECSDSFSLDMTEGEEKGNRALDQFTLASFGEGDRGVSPPPSPFFSAILAAFQPAACDDAEEAWRSHINQLMCDSDGSCAVYTFHVFSSLFKNIQKRFCFLTCDAASYLGDNLRGIGSKFVSSSQMLTSCSECPTLFVDAETLLSCGLLDKLKFSVLELQEYLDTYNNRKEATLSWLANCKATFAGGSRDGVITCQPGDSEEKQLELCQRLYKLHFQLLLLFQSYCKLIGQVHEVSSMPELLNMSRELSDLKKHLKEASAVIAADPLYSDGAWSEPTFTSTEAAIQSMLECLKNNELGKALRQIRECRSLWPNDIFGSSSDDEVQTLLNIYFRHQTLGQTGTYALVGSNQSLTEICTKLMELNMEIRDMIRRAQSYRVLTTFLPDSSVSGTSL

SEQ ID NO: 28614 - protein, 3013 aa, Homo sapiens
  REGION 1..3013: note = ENSP00000445043
MASQQDSGFFEISIKYLLKSWSNTSPVGNGYIKPPVPPASGTHREKGPPTMLPINVDPDSKPGEYVLKSLFVNFTTQAERKIRIIMAEPLEKPLTKSLQRGEDPQFDQVISSMSSLSEYCLPSILRTLFDWYKRQNGIEDESHEYRPRTSNKSKSDEQQRDYLMERRDLAIDFIFSLVLIEVLKQIPLHPVIDSLIHDVINLAFKHFKYKEGYLGPNTGNMHIVADLYAEVIGVLAQAKFPAVKKKFMAELKELRHKEQNPYVVQSIISLIMGMKFFRIKMYPVEDFEASLQFMQECAHYFLEVKDKDIKHALAGLFVEILVPVAAAVKNEVNVPCLRNFVESLYDTTLELSSRKKHSLALYPLVTCLLCVSQKQLFLNRWHIFLNNCLSNLKNKDPKMARVALESLYRLLWVYMIRIKCESNTATQSRLITIITTLFPKGSRGVVPRDMPLNIFVKIIQFIAQERLDFAMKEIIFDFLCVGKPAKAFSLNPERMNIGLRAFLVIADSLQQKDGEPPMPVTGAVLPSGNTLRVKKTYLSKTLTEEEAKMIGMSLYYSQVRKAVDNILRHLDKEVGRCMMLTNVQMLNKEPEDMITGERKPKIDLFRTCVAAIPRLLPDGMSKLELIDLLARLSIHMDDELRHIAQNSLQGLLVDFSDWREDVLFGFTNFLLREVNDMHHTLLDSSLKLLLQLLTQWKLVIQTQGKVYEQANKIRNSELIANGSSHRIQSERGPHCSVLHAVEGFALVLLCSFQVATRKLSVLILKEIRALFIALGQPEDDDRPMIDVMDQLSSSILESFIHVAVSDSATLPLTHNVDLQWLVEWNAVLVNSHYDVKSPSHVWIFAQSVKDPWVLCLFSFLRQENLPKHCPTALSYAWPYAFTRLQSVMPLVDPNSPINAKKTSTAGSGDNYVTLWRNYLILCFGVAKPSIMSPGHLRASTPEIMATTPDGTVSYDNKAIGTPSVGVLLKQLVPLMRLESIEITESLVLGFGRTNSLVFRELVEELHPLMKEALERRPENKKRRERRDLLRLQLLRIFELLADAGVISDSTNGALERDTLALGALFLEYVDLTRMLLEAENDKEVEILKDIRAHFSAMVANLIQCVPVHHRRFLFPQQSLRHHLFILFSQWAGPFSIMFTPLDRYSDRNHQITRYQYCALKAMSAVLCCGPVFDNVGLSPDGYLYKWLDNILACQDLRVHQLGCEVVVLLLELNPDQINLFNWAIDRCYTGSYQLASGCFKAIATVCGSRNYPFDIVTLLNLVLFKASDTNREIYEISMQLMQILEAKLFVYSKKVAEQRPGSILYGTHGPLPPLYSVSLALLSCELARMYPELTLPLFSEVSQRFPTTHPNGRQIMLTYLLPWLHNIELVDSRLLLPGSSPSSPEDEVKDREGDVTASHGLRGNGWGSPEATSLVLNNLMYMTAKYGDEVPGPEMENAWNALANNEKWSNNLRITLQFLISLCGVSSDTVLLPYIKKVAIYLCRNNTIQTMEELLFELQQTEPVNPIVQHCDNPPFYRFTASSKASAAASGTTSSSNTVVAGQENFPDAEENKILKESDERFSNVIRAHTRLESRYSNSSGGSYDEDKNDPISPYTGWLLTITETKQPQPLPMPCTGGCWAPLVDYLPETITPRGPLHRCNIAVIFMTEMVVDHSVREDWALHLPLLLHAVFLGLDHYRPEVFEHSKKLLLHLLIALSCNSNFHSIASVLLQTREMGEAKTLTVQPAYQPEYLYTGGFDFLREDQSSPVPDSGLSSSSTSSSISLGGSSGNLPQMTQEVEDVDTAAETDEKANKLIEFLTTRAFGPLWCHEDITPKNQNSKSAEQLTNFLRHVVSVFKDSKSGFHLEHQLSEVALQTALASSSRHYAGRSFQIFRALKQPLSAHALSDLLSRLVEVIGEHGDEIQGYVMEALLTLEAAVDNLSDCLKNSDLLTVLSRSSSPDLSSSSKLTASRKSTGQLNMNPGTTSGNTATAERSRHQRSFSVPKKFGVIDRSSDPPRSATLDRIQACTQQGLSSKTRSSSSLKDSLTDPSHINHPTNLLATIFWVTVALMESDFEFEYLMALRLLSRLLAHMPLDKAENREKLEKLQAQLKWADFSGLQQLLLKGFTSLTTTDLTLQLFSLLTPVSKISMVDASHAIGFPLNVLCLLPQLIQHFENPNQFCKDIAERIAQVCLEEKNPKLSNLAHVMTLYKTHSYTRDCATWVNVVCRYLHEAYADITLNMVTYLAELLEKGLPSVQQPLLQVIYSLLSYMDLSVVPVKQFNVEVLKTIEKYVQSVHWREALNILKLVVSRSASLVLPSYQHSDLSKIEIHRVWTSASKELPGKTLDFHFDISETPIIGRRYDELQNSSGRDGKPRAMAVTRSTSSTSSGSNSNVLVPVSWKRPQYSQKRTKEKLVHVLSLCGQEVGLSKNPSVIFSSCGDLDLLEHQTSLVSSEDGAREQENMDDTNSEQQFRVFRDFDFLDVELEDGEGESMDNFNWGVRRRSLDSLDKCDMQILEERQLSGSTPSLNKMHHEDSDESSEEEDLTASQILEHSDLIMTLSPSEETNPMELLTTACDSTPAEPHSFNTRMSSFDASLPDMNNLQISEGSKAEAVREEEDTTVHEDDLSSSINELPAAFECSDSFSLDMTEGEEKGNRALDQFTLASFGEGDRGVSPPPSPFFSAILAAFQPAACDDAEEAWRSHINQLMCDSDGSCAVYTFHVFSSLFKNIQKRFCFLTCDAASYLGDNLRGIGSKFVSSSQMLTSCSECPTLFVDAETLLSCGLLDKLKFSVLELQEYLDTYNNRKEATLSWLANCKATFAGGSRDGVITCQPGDSEEKQLELCQRLYKLHFQLLLLFQSYCKLIGQVHEVSSMPELLNMSRELSDLKKHLKEASAVIAADPLYSDGAWSEPTFTSTEAAIQSMLECLKNNELGKALRQIRECRSLWPNDIFGSSSDDEVQTLLNIYFRHQTLGQTGTYALVGSNQSLTEICTKLMELNMEIRDMIRRAQSYRVLTTFLPDSSVSGTSL

SEQ ID NO: 28615 - protein, 150 aa, Homo sapiens
  REGION 1..150: note = ENSP00000398010
MEITTACWRRSCVISFIKGLASPVGNGYIKPPVPPASGTHREKGPPTMLPINVDPDSKPGEYVLKSLFVNFTTQAERKIRIIMAEPLEKPLTKSLQRGEDPQFDQVISSMSSLSEYCLPSILRTLFDWYKRQNGIEDESHEYRPRTSNKS

SEQ ID NO: 28616 - protein, 132 aa, Homo sapiens
  REGION 1..132: note = ENSP00000434694
EPHSFNTRMSSFDASLPDMNNLQISEGSKAEAVREEEDTTVHEDDLSSSINELPAAFECSDSFSLDMTEGEEKGNRALDQFTLASPQPVTMPRRPGAATSTSLCVTQMAPVLCIHFMCSPPCLRIFRKGSAS

SEQ ID NO: 28617 - protein, 3012 aa, Homo sapiens
  REGION 1..3012: note = ENSP00000369600
MASQQDSGFFEISIKYLLKSWSNTSPVGNGYIKPPVPPASGTHREKGPPTMLPINVDPDSKPGEYVLKSLFVNFTTQAERKIRIIMAEPLEKPLTKSLQRGEDPQFDQVISSMSSLSEYCLPSILRTLFDWYKRQNGIEDESHEYRPRTSNKSKSDEQQRDYLMERRDLAIDFIFSLVLIEVLKQIPLHPVIDSLIHDVINLAFKHFKYKEGYLGPNTGNMHIVADLYAEVIGVLAQAKFPAVKKKFMAELKELRHKEQNPYVVQSIISLIMGMKFFRIKMYPVEDFEASLQFMQECAHYFLEVKDKDIKHALAGLFVEILVPVAAAVKNEVNVPCLRNFVESLYDTTLELSSRKKHSLALYPLVTCLLCVSQKQLFLNRWHIFLNNCLSNLKNKDPKMARVALESLYRLLWVYMIRIKCESNTATQSRLITIITTLFPKGSRGVVPRDMPLNIFVKIIQFIAQERLDFAMKEIIFDFLCVGKPAKAFSLNPERMNIGLRAFLVIADSLQQKDGEPPMPVTGAVLPSGNTLRVKKTYLSKTLTEEEAKMIGMSLYYSQVRKAVDNILRHLDKEVGRCMMLTNVQMLNKEPEDMITGERKPKIDLFRTCVAAIPRLLPDGMSKLELIDLLARLSIHMDDELRHIAQNSLQGLLVDFSDWREDVLFGFTNFLLREVNDMHHTLLDSSLKLLLQLLTQWKLVIQTQGKVYEQANKIRNSELIANGSSHRIQSERGPHCSVLHAVEGFALVLLCSFQVATRKLSVLILKEIRALFIALGQPEDDDRPMIDVMDQLSSSILESFIHVAVSDSATLPLTHNVDLQWLVEWNAVLVNSHYDVKSPSHVWIFAQSVKDPWVLCLFSFLRQENLPKHCPTALSYAWPYAFTRLQSVMPLVDPNSPINAKKTSTAGSGDNYVTLWRNYLILCFGVAKPSIMSPGHLRASTPEIMATTPDGTVSYDNKAIGTPSVGVLLKQLVPLMRLESIEITESLVLGFGRTNSLVFRELVEELHPLMKEALERRPENKKRRERRDLLRLQLLRIFELLADAGVISDSTNGALERDTLALGALFLEYVDLTRMLLEAENDKEVEILKDIRAHFSAMVANLIQCVPVHHRRFLFPQQSLRHHLFILFSQWAGPFSIMFTPLDRYSDRNHQITRYQYCALKAMSAVLCCGPVFDNVGLSPDGYLYKWLDNILACQDLRVHQLGCEVVVLLLELNPDQINLFNWAIDRCYTGSYQLASGCFKAIATVCGSRNYPFDIVTLLNLVLFKASDTNREIYEISMQLMQILEAKLFVYSKKVAEQRPGSILYGTHGPLPPLYSVSLALLSCELARMYPELTLPLFSGKPAIPHNTPQRAPDHAYLPAALAAQHRAGGQQAPPPGSSPSSPEDEVKDREGDVTASHGLRGNGWGSPEATSLVLNNLMYMTAKYGDEVPGPEMENAWNALANNEKWSNNLRITLQFLISLCGVSSDTVLLPYIKKVAIYLCRNNTIQTMEELLFELQQTEPVNPIVQHCDNPPFYRFTASSKASAAASGTTSSSNTVVAGQENFPDAEENKILKESDERFSNVIRAHTRLESRYSNSSGGSYDEDKNDPISPYTGWLLTITETKQPQPLPMPCTGGCWAPLVDYLPETITPRGPLHRCNIAVIFMTEMVVDHSVREDWALHLPLLLHAVFLGLDHYRPEVFEHSKKLLLHLLIALSCNSNFHSIASVLLQTREMGEAKTLTVQPAYQPEYLYTGGFDFLREDQSSPVPDSGLSSSSTSSSISLGGSSGNLPQMTQEVEDVDTAAETDEKANKLIEFLTTRAFGPLWCHEDITPKNQNSKSAEQLTNFLRHVVSVFKDSKSGFHLEHQLSEVALQTALASSSRHYAGRSFQIFRALKQPLSAHALSDLLSRLVEVIGEHGDEIQGYVMEALLTLEAAVDNLSDCLKNSDLLTVLSRSSSPDLSSSSKLTASRKSTGQLNMNPGTTSGNTATAERSRHQRSFSVPKKFGVIDRSSDPPRSATLDRIQACTQQGLSSKTRSSSSLKDSLTDPSHINHPTNLLATIFWVTVALMESDFEFEYLMALRLLSRLLAHMPLDKAENREKLEKLQAQLKWADFSGLQQLLLKGFTSLTTTDLTLQLFSLLTPVSKISMVDASHAIGFPLNVLCLLPQLIQHFENPNQFCKDIAERIAQVCLEEKNPKLSNLAHVMTLYKTHSYTRDCATWVNVVCRYLHEAYADITLNMVTYLAELLEKGLPSVQQPLLQVIYSLLSYMDLSVVPVKQFNVEVLKTIEKYVQSVHWREALNILKLVVSRSASLVLPSYQHSDLSKIEIHRVWTSASKELPGKTLDFHFDISETPIIGRRYDELQNSSGRDGKPRAMAVTRSTSSTSSGSNSNVLVPVSWKRPQYSQKRTKEKLVHVLSLCGQEVGLSKNPSVIFSSCGDLDLLEHQTSLVSSEDGAREQENMDDTNSEQQFRVFRDFDFLDVELEDGEGESMDNFNWGVRRRSLDSLDKCDMQILEERQLSGSTPSLNKMHHEDSDESSEEEDLTASQILEHSDLIMTLSPSEETNPMELLTTACDSTPAEPHSFNTRMSSFDASLPDMNNLQISEGSKAEAVREEEDTTVHEDDLSSSINELPAAFECSDSFSLDMTEGEEKGNRALDQFTLASFGEGDRGVSPPPSPFFSAILAAFQPAACDDAEEAWRSHINQLMCDSDGSCAVYTFHVFSSLFKNIQKRFCFLTCDAASYLGDNLRGIGSKFVSSSQMLTSCSECPTLFVDAETLLSCGLLDKLKFSVLELQEYLDTYNNRKEATLSWLANCKATFAGGSRDGVITCQPGDSEEKQLELCQRLYKLHFQLLLLFQSYCKLIGQVHEVSSMPELLNMSRELSDLKKHLKEASAVIAADPLYSDGAWSEPTFTSTEAAIQSMLECLKNNELGKALRQIRECRSLWPNDIFGSSSDDEVQTLLNIYFRHQTLGQTGTYALVGSNQSLTEICTKLMELNMEIRDMIRRAQSYRVLTTFLPDSSVSGTSL

SEQ ID NO: 28618 - protein, 749 aa, Homo sapiens
  REGION 1..749: note = ENSP00000335651
MEEESGEELGLDRSTPKDFHFYHMDLYDSEDRLHLFPEENTRMRKVVQAEMANESRGAGDGKAQRDLQEEVDELVHLYGLEDDHELGDEFVDENIPRTGVSEYPPYMMKRRDPAREQRDWRLSGEAAEAEDLGFGGWGSAGQCQDLREAYRYTHGRASEEYECYVIPEEEDEEEAADVFCVTCKTPIRAFQKVFDEHKEHEVIPLNEALESAKDEIHKNMYKLEKQIIEMENFANHLEEVFITVEENFGKQEQNFESHYNEILETLAQKYEEKIQALGEKKKEKLEALYGQLVSCGENLDTCKELMETIEEMCHEEKVDFIKDAVAMADRLGKFLKTKTDVEISAQPEFEDQTLDFSDVEQLMGSINTIPAPSAPVINPQVPNSATGSSVRVCWSLYSDDTVESYQLSYRPVQDSSPGTDQAEFTVTVKETYCSVTNLVPNTQYEFWVTAHNRAGPSPSSERAVYMTAPSPPIIKTKEIRSCEEAVLICWESGNLNPVDSYTVELTQAESPEASGVTESVVGIPTCESVVQLQPGRSYIIYVRALNMGGPSVRSEPATVHTIGSYFRLNKDTCHPWLTISEDGLTAVRSERRTPARELSPSDTHFTRCVAVMGNLIPVRGHHYWEVEVDEHLDYRVGVAFADVRKQEDLGANCLSWCMRHTFASSRHKYEFLHNRTTPDIRITVPPKKIGILLDYEHSKLSFFNVDLSQHLYTFSCQLHEFVHPCFSLEKPGCLKVHNGISMPKHVTFY

SEQ ID NO: 28619 - protein, 704 aa, Homo sapiens
  REGION 1..704: note = ENSP00000444078
MEEESGEELGLDRSTPKDFHFYHMDLYDSEDRLHLFPEENTRMRKVVQAEMANESRGAGDGKAQRDLQEEVDELVHLYGLEDDHELGDEFVDENIPRTGVSEYPPYMMKRRDPAREQRDWRLSGEAAEAEDLGFGGWGSAGQCQDLREAYRYTHGRASEEYECYVIPEEEDEEEAADVFCVTCKTPIRAFQKVFDEHKEHEVIPLNEALESAKDEIHKNMYKLEKQIIEMENFANHLEEVFITVEENFGKQEQNFESHYNEILETLAQKYEEKIQALGEKKKEKLEALYGQLVSCGENLDTCKELMETIEEMCHEEKVDFIKDAVAMADRLGKFLKTKTDVEISAQPEFEDQTLDFSDVEQLMGSINTIPAPSAPVINPQVPNSATGSSVRVCWSLYSDDTVESYQLSYRPVQDSSPGTDQAAPSPPIIKTKEIRSCEEAVLICWESGNLNPVDSYTVELTQAESPEASGVTESVVGIPTCESVVQLQPGRSYIIYVRALNMGGPSVRSEPATVHTIGSYFRLNKDTCHPWLTISEDGLTAVRSERRTPARELSPSDTHFTRCVAVMGNLIPVRGHHYWEVEVDEHLDYRVGVAFADVRKQEDLGANCLSWCMRHTFASSRHKYEFLHNRTTPDIRITVPPKKIGILLDYEHSKLSFFNVDLSQHLYTFSCQLHEFVHPCFSLEKPGCLKVHNGISMPKHVTFY

SEQ ID NO: 28620 - protein, 101 aa, Homo sapiens
  REGION 1..101: note = ENSP00000453127
MEEESGEELGLDRSTPKDFHFYHMDLYDSEDRLHLFPEENTRMRKVVQAEMANESRGAGDGKAQRDLQEEVDELVHLYGLEDDHELGDEFVDENIPRTGVS

SEQ ID NO: 28621 - protein, 6907 aa, Homo sapiens
  REGION 1..6907: note = ENSP00000401306
MELYLGACSKPAKVAVTKTVASVLAADTQQCRDGVHKTHFAGVGPAQLLDLPLGVKLPVIPGSNAVFYTTNFGEKLFRPSYGFNLTDPYCRLLENQYKSLHDPHLKAYYKRKDILKRLKKGGYITSNNKVVCTLRELNKYRQYLTSLKLDFERNYIKEQRILAKQLHNIPENNQIPQHCDVAQVQNWLLKEGTESIKDQERLMRHRYLDMISRKLEQLERTAEEQRLFLMDREERRQREHTRRKLTLRRKIEEEWKTKEMLLLTRMAEDVKREERIEEQQHRNREESDRKKQDLLEKKMAYHLQKMQDTGFNGEDIGKNTFKYRGQDGTHASPKNKKKTSEDIMLVYPAGDQNTYKETHGHTANAAHQRQNSSNNFTKKNSASVVYQADVQDNGINQKRDGMVSKNSSIFDDRGGINISGQGSIISAQVSPTRNFSRVSQAFLDPSKEEKETNADWDGRPTKRSSYLCESGPQAHATDPGIFSSPVYTNMQQNLLQNCLQEKVTSEELNIIIQNVMTWVVATVTSILYPAITKYEKRLQNNTYPVSDDSILSSDSSSFCSTCSEDFTYRSYTSATTKTFQAEPCAFVVDTSVRRPTTPIKPPPAHVEKTVVGKTCHIKGQSIISKHKYNKTNLLYSYPKLRSCKSDSHLLASFETGTKKSKDATTETDSLGSSLHCDKTAKAMDEMKNLKNVFVNFKCYLKGETEVILESILREIMSDLTQAIPSLSSVTAEVFVEQCEREKEILLSNAHIPSVASEIVENMLEKLESAVEKKCVEMFSQDLSVDIKPSLAASDELLTSSNGKPLKNSMPHTLDPMCDIAEDMVHAILEKLMTLVSFKQNEFLHLKDTNKLSCQQHKTDPICMFLQRAGKNKSSLESDEASLIVNEEVQNLISNIFSQSSLVAYIEEAINAILGYIQTELNNERIIASEETVVLLQLLEDILFQLHQEPVNESFQKSRQPRISSPSDTKEKYRLTGTRLSNSPRSGRPFPPINVPGMVLYSDDENEEIDNIVKNVLDSTFKDEKVKSQEQIPNHWFTKGNTCFECKRNIKPPTKPGSRSKAAFHDWELKTEPPSTNHEDILKKKLSSNKDISTFSQDQKHQIEKASENIVTSILKEMLKDISSVPFGHLDSKTGSEASVLVSEKPQGLSHQEWIDQMFSVSEISTVAQEITDSVLNILHKASNYISNTTKSSISSSVHQISLHNSDTEHIVKEAPNKYPLKTWFDSEKKMKYLSLFDVDPEKPPWLKSGKSEPKPVDDINDKIIRTIFKRLKSFICPKLHMGFKSSLRSQLSKYTAKIVNIVLCAIQNELELHKENLNLREIDHTKSLTDKGFFANTDKKLESLVTSIDDDILASPLLTCIYDMLLSSENAHQRSISLSSRKPKSATDSVDVQSILPNRQDKKSFHKYLATPCTHHSVNGGNHIKENAKLQVLERIGETLHEMLSKLLGTHLHSQLSCSQQSREMTNKNQKMAAALQSNIQLISKAILDYILAKLCGVDMDTSFASCGLKAISESLDIDNPSFASIIEKMAKSTKIISSIVSRRVQEDNKEETKSKAKPVAPVSSKTPSTKEMHPNKLKAVASDILNMVFAKLEGFANGHLEILGAINDGNKKSNKIGWEYESTNISRDTHEASFLSALYMHAKKVSSAILKVIQTELNVTSSDLKTSVENPPPETQILKYVVKLILDAVSSDMFNEMESEGGGIETYRYRPTYGSLPGGAESDSFLEDDAYTAKKIIDERSPQREEVKTRSLKQWALEKTLNKIEVKLKEPHISPIAPIIRNILNEIFQSTLINQLNVLSLSHSNFNGMPHNVDEPTPQTSVQFMDKMMDPLLSEADITIVTDNIVRTVFHKLYSAAMTERNVRENRYKTITFSANVSSHEHTYKGKSSVTALDENPCTFQSRFSVADKETKVNLAEDIVQAILTNLETFATSKVKSLFYSQVNFTVPVALPIQQDHSTLSKALSAKDSYSDEQFSCCSVDHTKSGKTNLCQLSLSKLNTYALQVARRNLQGIKQELDKERENPFLTHDIGISESIASQIVNALLDIISRKGKCDKNSSDKEIDLDQQKGVIEKLLNETKYRKVLQLQIQDTIEGILCDIYEKTLFQNNLSFATPTLKCSIADKHSEENSEMFMEGANKIIPKLSVPKSDVILISNDIVNIVLHNLSSAATLVINAKNPTSARLPLTFCDTFPKIDCQQPLKGSKTERKTERFSYSRNQKSAYADDNQITVVEKEDTQKSATDSCEENANFITKTIFKRLESFATERIDSLITLAFQSKEKSFVIPELENCKQNDSIFYDSSQVESDVNVLKISATETILSQELTDFTFVGRREKLGSTIHLSQARLKTYADVIASAILKLIKNDLDLEIQKIYPYQNNILFQENIIVSEIVDSMLKMLDDKRSVKEICFNSKENSNFSQLALSNEILLGHKEKERSTKQSLFTKYPLEQNQMILENKRQIIVLEEIFMRNGESKNKEKGELLIAVEELLNKLYQRVREVTGHLPPLNETANFISNSKIKTSDTTQKNSFQSHINSVANDIVESVLGKMYLVVVTSLYENNKSRTEVEISDHNDSLLMKPLRFRETKQAGKISNSPRYAISQAYSYVDSQNISVMENTLLPYLPLQVKKDLIQMVLNKITNFVSLPLKVSPKDNPKPCFKAHLKTRSKITTLPKFTKKTHLGLSAAKAKSKTKLGPGEKTLKDSRSKTAIGLSHIMSAGDAKNLLDTKLPTSELKIYAKDIIINILETIVKEFGKVKQTKALPSDQIIAAGKIVNTVLQELYVTNNCNLAYPMKSSHLRLSQGNIGTGSLPKQQACFYLENVSSQLEHIFPREGIFKKLFDKWQTESNDKENEKCKLLMIAENVLTEISIKAKELEYSLSLLNLPPLENCESRFYNHFKGASTRAEDTKAQINMFGREIVEMLLEKLQLCFLSQIPTPDSEETLSNSKEHITAKSKYGFPNKHSLSSLPIYNTKTKDQISVGSSNQIVQEIVETVLNMLESFVDLQFKHISKYEFSEIVKMPIENLSSIQQKLLNKKMLPKLQPLKMFSDKSESNTINFKENIQNILLRVHSFHSQLLTYAVNIISDMLAVIKNKLDNEISQMEPSSISILKENIVASEIIGTLMDQCTYFNESLIQNLSRESLFQGAENAYTVNQVELATNMKMFTSKLKEGSLGINPSQVSKTGFVFCSDEDMKEKYRVSSDLPTSVRSSVEDTVKNSEPTKRPDSETMPSCSTRNKVQDHRPRESNFGSFDQTMKGNSYLPEGSFLQKLLRKASDSTEAALKQVLSFIEMGKGENLRVFHYENLKPVVEPNQIQTTISPLKICLAAENIVNTVLSSCGFPSQPHTNENREIMKPFFISKQSSLSEVSGGQKDNEKSLLRMQDKKINYIPEEENENLEASREDSSFLQKLKKKEYPKIETVKEVEAFTFADHEMGSNEVHLIARHVTTSVVTYLKNFETTVFSEEKMSVSTWSRKKYESKQFLRNIYDDSSIYQCCEHLTESVLYHLTSSISDGTKKGREKEKAWEIQEATFSKIISIHSQVFESRSISIGELALCISEIIIKILFNNKIIQADIAQKMVAIPTKYTYCPGIVSGGFDDLFQDLLVGVIHVLSKEIEVDYHFESNVRNKSFSMHRNNSVPLCNKINRQASPRDWQFSTQQIGQLFQKNKLSYLACKLNSLVGNLKTSESKEVVNKVFNIVSDLFSPDECLDTGMDSGKIQRTYFYSSNNEQPNSILTNNLQLSSKSVFLLNVVCEKLIRILLEECTSTAFPDKGSVSEETSAEECQLLKMLQSVEDGKSDYRKGGMDCECLQVDYMSDLLENVAEIDQDLLTSDSMLTIISHSLVKSLMDKLSHSIQQAPESLPFANKHLNYRTREIQSSFIKARKSELIELGQSKSSLELRSYDSNSLTVSLNNPSVVSSKIQAPFNKHCAVKSSSVSPFERQRTKEMDKVAIHNKLHQEGIYAGVYSATFLEGIISELFFNLSMSLWGKNKNITVSWLNEMNTLFVNNVVNEFNNAQVTVLRNAEERLCFPPVHTETVSKIVDSVYYDVLQQYELKVACGNNPVYDNASIAEQITNGILLEILDYKLPSCFKEHLIPHSYYPLKPEIILQKLQSNLTEFTSLPRSSSDYSTMLSHSFLEDVIRRLLSQLIPPPITCSSLGKKYLMSSDFNEMSTCIINKVMSAISKHKIWFTIYDNQYLYTGKNLQKMVDSVYCNILQMSDSLVSIQKSIVSRSPIMIDQIASFIIQEIIENHLQPFLSGEVLCHPRTPLDPVSTIVTQVLSEVIESHRPQKQSPLDIHLDSFVREIVARLLSKIFSPKHNTEIELKNMTQRIVNSINRHFNKAKIHILYDDKEQAFFSFNTDIVDELATSVYRNALKQHGLDLAVDKESEDSGIFVENITNLIVAAISDYLLHPLFSGDFSASTYSNSVAENIVQDILSNISKSTEPSQSVPLYNTLLPYTFLEDMIRVLLSKLFSSASSLVLNRDTQKDISRVNFNDIASNLVSDIRMKVSQHEIRFSKEEEETKFIYSEDDIQHLVDSVFANVVQTSGSQESAVQNITSSNDILIDRIAGFIIKHICQKHLQPFVSGKSLSSSDTYFDDERRQLFYTSVYSSTFLEDVISGVLRKIFHRVVGIVQTKSIRDSEDELFEKAEELIHLITGEFSKAQVSIIDNTEERLCLPPVERDVVKTIVDMVYSKVLQEYEMEVVPNKDFLNDTKTLAARITNIILAEIFDFQIHPDLIANLPFKSHSKLSANVLIQRVQYDISKSRFQRQASTMYTTMLSHSHLEKIVTQLTSQISPLNTSAEQSDTTKSDLSNTVIKLINEIMSIISKHEICIIKYGNKKQSMISAKDIQSMVDSIYADLSHSNIYQSITKDKKSISDIPVSKIASFIIKEIFNHHIQSFLSEDKTLLLAAVDQTYKLKAIDPKQRELSFIVNSSVFLEEVISELLCKILYAFSHNMLVTENPDRVKLKLTRIVTTLVNSIVLEFTTSEILVADNFDKNLCFSERYKEMVQKIVNSVYGKVLDQYKSLIQIHRVIQSDTICFGRKIYYLLLEEIYDYQVQSLVSGELESSSYSYPQADNIIRNVLNIITKDSHALPPYITVLPHSLLEDMVYRLLGHVFPSTHTENELKEKKFPPDDEFVEAASKLTDEIIKEISEHEIRLSMAEDNAESMQLEPIENLVDSICNNILKTSEFQAEVQKDADKKGCSFLSKLAGFIMKEIMYHHLQPFLHGEESSFSDLSDYDHVSELAKSGKEKTQPSLYSATFLEDIIIDLVHKFCSLLIITEDSKKNEMAELDIMGLALKLANSLIREFKKSDIKVLPNAEKMFSFPPIDKETVDKISNFVYEQFIEKCTSHDIQKGDESNIAIGMIAALTQKAISAFRIQPLFSGDWSSTFFSFLNPDNITQRVQHLPQNTFTQISRCAKENQLSLPDQSYKDTSSTPDCKNMMSTLEINRGTMNRKKSFKTKDTSVKKGDIQNPVLSSINAIMKSGMINLTSGLATGVTNKKEVDENKVGICTQKHSENVSKVTSTTTVKSKDTQEPNLSETFNNNEIEKKRNLIPTDKKGKDDEIYTHFSLIIDDTEYEKEVLGSDSEIGYKKKIDNARESSFKKDDKLFQLSSLKSKRNLGTTTDTLEIRIRTSSNEGRRDSPTQTCRDEEHHSDYEHVQNVIENIFEDVLELSSSPEPAYYSKLSYDQSPPGDNVLNVIQEISRDSAQSVTTKKVSSSTNKNISAKEKEEEEREKEKVREEIKSEPSKPDDPQNQRESKPGIFPAKFLEDVITEMVKQLIFSSIPETQIQDRCQNVSDKQNQAKLYDTAMKLINSLLKEFSDAQIKVFRPDKGNQFPGGKVSSVPKVPPRYKEPTTDEAPSSIKIKSADKMPPMHKMMRKPSSDKIPSIDKTLVNKVVHSSVCNILNDYGSQDSIWKNINSNGENLARRLTSAVINEIFQRQVNLIFCDEVSVSACLPLESKDVVKKVQKLAQTASKECQTSSPYTIILPHKFLENVISALFSKIFSTISSTKTKEPEDNLSTELNFLQMKLVSAVATEISQDKYMTIQYVETLQSDDDEIIQLVVQSVYNNLLPQFGSQEIIQNCVTSGCKILSENIVDLVLREVASNQLQSYFCGELTPHQCVEVENIVEKILKDVFQTTDVPLPKPSHADKLSYNIIEEIAVKFLSKLLSIFPKVHKERTKSLETDMQKITSKVLNSVQEFISKSKIKLVPPTKESPTVPVADNATIENIVNSIYTSVLKHSGSYTSVFKDLMGKSNVLSDTIGFLMVNAISNSEFQPQVEEEVSNSELVLEAVKIMEKVIKIIDELKSKEKSSSRKGLTLDAKLLEEVLALFLAKLIRLPSSSSKDEKNLSKTELNKIASQLSKLVTAEISRSSISLIASDPEEHCLNPENTERIYQVVDSVYSNILQQSGTNKEFYYDIKDTNTAFPKKVASLIIDGVSSFPLDTINSTISNADLSGELDVNRIVQKAQEHAFNVIPELEQEKLDQNLSEEESPIKIVPHVGKKPVKIDPKIISEHLAVISIKTQPLEKLKQECLKRTGHSIAELRRASISGRNYSLGSPDLEKRKTERRTSLDKTGRLDVKPLEAVARNSFQNIRKPDITKVELLKDVQSKNDLIVRLVAHDIDQVYLENYIKEERDSDEDEVVLTQTFAKEEGIKVFEDQVKEVKKPIQSKLSPKSTLSTSSLKKFLSLSKCCQTTASANIESTEAISNQVIESKETHVKRAVAELDMATPKTMPETASSSWEEKPQCKKEEKNLVTEPTHYFIHRIMSSSSYNQEDLISSTGEAEDCHSDPSAKILEESSQEQKPEHGNSVKFITIFERSKDVLGSANPSKEVISETPKPDVSKQGSKMLTKMSSTLSKVFSQCNTNISRSSSPAHQDEH

SEQ ID NO: 28622 - protein, 136 aa, Homo sapiens
  REGION 1..136: note = ENSP00000395888
KDQERLMRHRYLDMISRKLEQLERTAEEQRLFLMDREERRQREHTRRKLTLRRKIEEEWKTKEMLLLTRMAEDVKREERIEEQQHRNREESDRKKQDLLEKKMAYHLQKMQDTGFNGEDIGKNTFKYRGQDGTHGE

SEQ ID NO: 28623 - protein, 973 aa, Homo sapiens
  REGION 1..973: note = ENSP00000390251
  VARIANT 1: note = Any amino acid
XYQRVREVTGHLPPLNETANFISNSKIKTSDTTQKNSFQSHINSVANDIVESVLGKMYLVVVTSLYENNKSRTEVEISDHNDSLLMKPLRFRETKQAGKISNSPRYAISQAYSYVDSQNISVMENTLLPYLPLQVKKDLIQMVLNKITNFVSLPLKVSPKDNPKPCFKAHLKTRSKITTLPKFTKKTHLGLSAAKAKSKTKLGPGEKTLKDSRSKTAIGLSHIMSAGDAKNLLDTKLPTSELKIYAKDIIINILETIVKEFGKVKQTKALPSDQIIAAGKIVNTVLQELYVTNNCNLAYPMKSSHLRLSQGNIGTGSLPKQQACFYLENVSSQLEHIFPREGIFKKLFDKWQTESNDKENEKCKLLMIAENVLTEISIKAKELEYSLSLLNLPPLENCESRFYNHFKGASTRAEDTKAQINMFGREIVEMLLEKLQLCFLSQIPTPDSEETLSNSKEHITAKSKYGFPNKHSLSSLPIYNTKTKDQISVGSSNQIVQEIVETVLNMLESFVDLQFKHISKYEFSEIVKMPIENLSSIQQKLLNKKMLPKLQPLKMFSDKSESNTINFKENIQNILLRVHSFHSQLLTYAVNIISDMLAVIKNKLDNEISQMEPSSISILKENIVASEIIGTLMDQCTYFNESLIQNLSRESLFQGAENAYTVNQVELATNMKMFTSKLKEGSLGINPSQVSKTGFVFCSDEDMKEKYRVSSDLPTSVRSSVEDTVKNSEPTKRPDSETMPSCSTRNKVQDHRPRESNFGSFDQTMKGNSYLPEGSFLQKLLRKASDSTEAALKQVLSFIEMGKGENLRVFHYENLKPVVEPNQIQTTISPLKICLAAENIVNTVLSSCGFPSQPHTNENREIMKPFFISKQSSLSEVSGGQKDNEKSLLRMQDKKINYIPEEENENLEASREDSSFLQKLKKKEYPKIETVKEVEAFTFADHEMGSNEVHLIARHVTTSVVTYLKNFETTGRC

SEQ ID NO: 28624 - protein, 646 aa, Homo sapiens
  REGION 1..646: note = ENSP00000478995
MVKQLIFSSIPETQIQDRCQNVSDKQNQAKLYDTAMKLINSLLKEFSDAQIKVFRPDKGNQFPGGKVSSVPKVPPRYKEPTTDEAPSSIKIKSADKMPPMHKMMRKPSSDKIPSIDKTLVNKVVHSSVCNILNDYGSQDSIWKNINSNGENLARRLTSAVINEIFQRQVNLIFCDEVSVSACLPLESKDVVKKVQKLAQTASKECQTSSPYTIILPHKFLENVISALFSKIFSTISSTKTKEPEDNLSTELNFLQMKLVSAVATEISQDKYMTIQYVETLQSDDDEIIQLVVQSVYNNLLPQFGSQEIIQNCVTSGCKILSENIVDLVLPKPSHADKLSYNIIEEIAVKFLSKLLSIFPKVHKERTKSLETDMQKITSKVLNSVQEFISKSKIKLVPPTKESPTVPVADNATIENIVNSIYTSVLKHSGSYTSVFKDLMGKSNVLSDTIGFLMVNAISNSEFQPQVEEEVSNSELVLEAVKIMEKVIKIIDELKSKEKSSSRKGLTLDAKLLEEVLALFLAKLIRLPSSSSKDEKNLSKTELNKIASQLSKLVTAEISRSSISLIASDPEEHCLNPENTERIYQVVDSVYSNILQQSGTNKEFYYDIKDTNTAFPKKVASLIIDGVSSFPLIQLTQQFQMLISLES

SEQ ID NO: 28625 - protein, 842 aa, Homo sapiens
  REGION 1..842: note = ENSP00000265342
MKPGGFWLHLTLLGASLPAALGWMDPGTSRGPDVGVGESQAEEPRSFEVTRREGLSSHNELLASCGKKFCSRGSRCVLSRKTGEPECQCLEACRPSYVPVCGSDGRFYENHCKLHRAACLLGKRITVIHSKDCFLKGDTCTMAGYARLKNVLLALQTRLQPLQEGDSRQDPASQKRLLVESLFRDLDADGNGHLSSSELAQHVLKKQDLDEDLLGCSPGDLLRFDDYNSDSSLTLREFYMAFQVVQLSLAPEDRVSVTTVTVGLSTVLTCAVHGDLRPPIIWKRNGLTLNFLDLEDINDFGEDDSLYITKVTTIHMGNYTCHASGHEQLFQTHVLQVNVPPVIRVYPESQAQEPGVAASLRCHAEGIPMPRITWLKNGVDVSTQMSKQLSLLANGSELHISSVRYEDTGAYTCIAKNEVGVDEDISSLFIEDSARKTLANILWREEGLSVGNMFYVFSDDGIIVIHPVDCEIQRHLKPTEKIFMSYEEICPQREKNATQPCQWVSAVNVRNRYIYVAQPALSRVLVVDIQAQKVLQSIGVDPLPAKLSYDKSHDQVWVLSWGDVHKSRPSLQVITEASTGQSQHLIRTPFAGVDDFFIPPTNLIINHIRFGFIFNKSDPAVHKVDLETMMPLKTIGLHHHGCVPQAMAHTHLGGYFFIQCRQDSPASAARQLLVDSVTDSVLGPNGDVTGTPHTSPDGRFIVSAAADSPWLHVQEITVRGEIQTLYDLQINSGISDLAFQRSFTESNQYNIYAALHTEPDLLFLELSTGKVGMLKNLKEPPAGPAQPWGGTHRIMRDSGLFGQYLLTPARESLFLINGRQNTLRCEVSGIKGGTTVVWVGEV

SEQ ID NO: 28626 - protein, 157 aa, Homo sapiens
  REGION 1..157: note = ENSP00000427662
MNPVPQMEMQKSPVFCVAHAGSCRPELFLFGHLGSSWGLDLKEEEPRSFEVTRREGLSSHNELLASCGKKFCSRGSRCVLSRKTGEPECQCLEACRPSYVPVCGSDGRFYENHCKLHRAACLLGKRITVIHSKDCFLKGDTCTMAGYARLKNVLLAL

SEQ ID NO: 28627 - protein, 673 aa, Homo sapiens
  REGION 1..673: note = ENSP00000484273
MKPGGFWLHLTLLGASLPAALGWMDPGTSRGPDVGVGESQAEEPRSFEVTRREGLSSHNELLASCGKKFCSRGSRCVLSLAPEDRVSVTTVTVGLSTVLTCAVHGDLRPPIIWKRNGLTLNFLDLEDINDFGEDDSLYITKVTTIHMGNYTCHASGHEQLFQTHVLQVNVPPVIRVYPESQAQEPGVAASLRCHAEGIPMPRITWLKNGVDVSTQMSKQLSLLANGSELHISSVRYEDTGAYTCIAKNEVGVDEDISSLFIEDSARKTLANILWREEGLSVGNMFYVFSDDGIIVIHPVDCEIQRHLKPTEKIFMSYEEICPQREKNATQPCQWVSAVNVRNRYIYVAQPALSRVLVVDIQAQKVLQSIGVDPLPAKLSYDKSHDQVWVLSWGDVHKSRPSLQVITEASTGQSQHLIRTPFAGVDDFFIPPTNLIINHIRFGFIFNKSDPAVHKVDLETMMPLKTIGLHHHGCVPQAMAHTHLGGYFFIQCRQDSPASAARQLLVDSVTDSVLGPNGDVTGTPHTSPDGRFIVSAAADSPWLHVQEITVRGEIQTLYDLQINSGISDLAFQRSFTESNQYNIYAALHTEPDLLFLELSTGKVGMLKNLKEPPAGPAQPWGGTHRIMRDSGLFGQYLLTPARESLFLINGRQNTLRCEVSGIKGGTTVVWVGEV

SEQ ID NO: 28628 - protein, 846 aa, Homo sapiens
  REGION 1..846: note = ENSP00000368462
MFKCWSVVLVLGFIFLESEGRPTKEGGYGLKSYQPLMRLRHKEKNQESSRVKGFMIQDGPFGSCENKYCGLGRHCVTSRETGQAECACMDLCKRHYKPVCGSDGEFYENHCEVHRAACLKKQKITIVHNEDCFFKGDKCKTTEYSKMKNMLLDLQNQKYIMQENENPNGDDISRKKLLVDQMFKYFDADSNGLVDINELTQVIKQEELGKDLFDCTLYVLLKYDDFNADKHLALEEFYRAFQVIQLSLPEDQKLSITAATVGQSAVLSCAIQGTLRPPIIWKRNNIILNNLDLEDINDFGDDGSLYITKVTTTHVGNYTCYADGYEQVYQTHIFQVNVPPVIRVYPESQAREPGVTASLRCHAEGIPKPQLGWLKNGIDITPKLSKQLTLQANGSEVHISNVRYEDTGAYTCIAKNEAGVDEDISSLFVEDSARKTLANILWREEGLGIGNMFYVFYEDGIKVIQPIECEFQRHIKPSEKLLGFQDEVCPKAEGDEVQRCVWASAVNVKDKFIYVAQPTLDRVLIVDVQSQKVVQAVSTDPVPVKLHYDKSHDQVWVLSWGTLEKTSPTLQVITLASGNVPHHTIHTQPVGKQFDRVDDFFIPTTTLIITHMRFGFILHKDEAALQKIDLETMSYIKTINLKDYKCVPQSLAYTHLGGYYFIGCKPDSTGAVSPQVMVDGVTDSVIGFNSDVTGTPYVSPDGHYLVSINDVKGLVRVQYITIRGEIQEAFDIYTNLHISDLAFQPSFTEAHQYNIYGSSSTQTDVLFVELSSGKVKMIKSLKEPLKAEEWPWNRKNRQIQDSGLFGQYLMTPSKDSLFILDGRLNKLNCEITEVEKGNTVIWVGDA

SEQ ID NO: 28629 - protein, 837 aa, Homo sapiens
  REGION 1..837: note = ENSP00000389270
MFKCWSVVLVLGFIFLESEGRPTKEGGYGLKSYQPLMRLRHKEKNQESSRVKGFMIQDGPFGSCENKYCGLGRHCVTSRETGQAECACMDLCKRHYKPVCGSDGEFYENHCEVHRAACLKKQKITIVHNEDCFFKGDKCKTTEYSKMKNMLLDLQNQKYIMQENENPNGDDISRKKLLVDQMFKYFDADSNGLVDINELTQVIKQEELGKDLFDCTLYVLLKYDDFNADKHLALEEFYRAFQVIQLSLPEDQKLSITAATVGQSAVLSCAIQGTLRPPIIWKRNNIILNNLDLEDINDFGDDGSLYITKVTTTHVGNYTCYADGYEQVYQTHIFQVNVPPVIRVYPESQAREPGVTASLRCHAEGIPKPQLGWLKNGIDITPKLSKQLTLQANGSEVHISNVRYEDTGAYTCIAKNEAGVDEDISSLFVEDSARKTRLGIGNMFYVFYEDGIKVIQPIECEFQRHIKPSEKLLGFQDEVCPKAEGDEVQRCVWASAVNVKDKFIYVAQPTLDRVLIVDVQSQKVVQAVSTDPVPVKLHYDKSHDQVWVLSWGTLEKTSPTLQVITLASGNVPHHTIHTQPVGKQFDRVDDFFIPTTTLIITHMRFGFILHKDEAALQKIDLETMSYIKTINLKDYKCVPQSLAYTHLGGYYFIGCKPDSTGAVSPQVMVDGVTDSVIGFNSDVTGTPYVSPDGHYLVSINDVKGLVRVQYITIRGEIQEAFDIYTNLHISDLAFQPSFTEAHQYNIYGSSSTQTDVLFVELSSGKVKMIKSLKEPLKAEEWPWNRKNRQIQDSGLFGQYLMTPSKDSLFILDGRLNKLNCEITEVEKGNTVIWVGDA

SEQ ID NO: 28630 - protein, 847 aa, Homo sapiens
  REGION 1..847: note = ENSP00000305334
MFKCWSVVLVLGFIFLESEGRPTKEGGYGLKSYQPLMRLRHKQEKNQESSRVKGFMIQDGPFGSCENKYCGLGRHCVTSRETGQAECACMDLCKRHYKPVCGSDGEFYENHCEVHRAACLKKQKITIVHNEDCFFKGDKCKTTEYSKMKNMLLDLQNQKYIMQENENPNGDDISRKKLLVDQMFKYFDADSNGLVDINELTQVIKQEELGKDLFDCTLYVLLKYDDFNADKHLALEEFYRAFQVIQLSLPEDQKLSITAATVGQSAVLSCAIQGTLRPPIIWKRNNIILNNLDLEDINDFGDDGSLYITKVTTTHVGNYTCYADGYEQVYQTHIFQVNVPPVIRVYPESQAREPGVTASLRCHAEGIPKPQLGWLKNGIDITPKLSKQLTLQANGSEVHISNVRYEDTGAYTCIAKNEAGVDEDISSLFVEDSARKTLANILWREEGLGIGNMFYVFYEDGIKVIQPIECEFQRHIKPSEKLLGFQDEVCPKAEGDEVQRCVWASAVNVKDKFIYVAQPTLDRVLIVDVQSQKVVQAVSTDPVPVKLHYDKSHDQVWVLSWGTLEKTSPTLQVITLASGNVPHHTIHTQPVGKQFDRVDDFFIPTTTLIITHMRFGFILHKDEAALQKIDLETMSYIKTINLKDYKCVPQSLAYTHLGGYYFIGCKPDSTGAVSPQVMVDGVTDSVIGFNSDVTGTPYVSPDGHYLVSINDVKGLVRVQYITIRGEIQEAFDIYTNLHISDLAFQPSFTEAHQYNIYGSSSTQTDVLFVELSSGKVKMIKSLKEPLKAEEWPWNRKNRQIQDSGLFGQYLMTPSKDSLFILDGRLNKLNCEITEVEKGNTVIWVGDA

SEQ ID NO: 28631 - protein, 102 aa, Homo sapiens
  REGION 1..102: note = ENSP00000431659
MTTASTSQVRQNYHQDSEAAINRQINLELYASYVYLSMVLVHLIHSQQGHLVTRDRRSPTERSSQAGPCMCLMTWRNLSLSLDLSFPACEMGRWVPACSLKD

SEQ ID NO: 28632 - protein, 81 aa, Homo sapiens
  REGION 1..81: note = ENSP00000431575
MTTASTSQVRQNYHQDSEAAINRQINLELYASYVYLSMPTGTPGHQGQKKSHRKIIPGRTLYVPDDLEESLPLSGPQFPCL

SEQ ID NO: 28633 - protein, 114 aa, Homo sapiens
  REGION 1..114: note = ENSP00000433470
MTTASTSQVRQNYHQDSEAAINRQINLELYASYVYLSMSYYFDRDDVALKNFAKYFLHQSHEEREHAEKLMKLQNQRGGRIFLQDIKPTGTPGHQGQKKSHRKIIPGRTLYVPD

SEQ ID NO: 28634 - protein, 183 aa, Homo sapiens
  REGION 1..183: note = ENSP00000273550
MTTASTSQVRQNYHQDSEAAINRQINLELYASYVYLSMSYYFDRDDVALKNFAKYFLHQSHEEREHAEKLMKLQNQRGGRIFLQDIKKPDCDDWESGLNAMECALHLEKNVNQSLLELHKLATDKNDPHLCDFIETHYLNEQVKAIKELGDHVTNLRKMGAPESGLAEYLFDKHTLGDSDNES

SEQ ID NO: 28635 - protein, 95 aa, Homo sapiens
  REGION 1..95: note = ENSP00000432223
MTTASTSQVRQNYHQDSEAAINRQINLELYASYVYLSMSYYFDRDDVALKNFAKYFLHQSHEEREHAEKLMKLQNQRGGRIFLQDIKTVMTGRAG

SEQ ID NO: 28636 - protein, 50 aa, Homo sapiens
  REGION 1..50: note = ENSP00000434403
MTTASTSQVRQNYHQDSEAAINRQINLELYASYVYLSMIVTATCLWGSLV

SEQ ID NO: 28637 - protein, 153 aa, Homo sapiens
  REGION 1..153: note = ENSP00000433321
MTTASTSQSYYFDRDDVALKNFAKYFLHQSHEEREHAEKLMKLQNQRGGRIFLQDIKKPDCDDWESGLNAMECALHLEKNVNQSLLELHKLATDKNDPHLCDFIETHYLNEQVKAIKELGDHVTNLRKMGAPESGLAEYLFDKHTLGDSDNES

SEQ ID NO: 28638 - protein, 113 aa, Homo sapiens
  REGION 1..113: note = ENSP00000435111
MKLQNQRGGRIFLQDIKKPDCDDWESGLNAMECALHLEKNVNQSLLELHKLATDKNDPHLCDFIETHYLNEQVKAIKELGDHVTNLRKMGAPESGLAEYLFDKHTLGDSDNES

SEQ ID NO: 28639 - protein, 58 aa, Homo sapiens
  REGION 1..58: note = ENSP00000436947
MKLQNQRGGRIFLQDIKKPDCDDWESGLNAMECALHLEKNVNQSLLELHKLATDKNDP

SEQ ID NO: 28640 - protein, 183 aa, Homo sapiens; identical to SEQ ID NO: 28634
  REGION 1..183: note = ENSP00000484477

SEQ ID NO: 28641 - protein, 175 aa, Homo sapiens
  REGION 1..175: note = ENSP00000366525
MSSQIRQNYSTDVEAAVNSLVNLYLQASYTYLSLGFYFDRDDVALEGVSHFFRELAEEKREGYERLLKMQNQRGGRALFQDIKKPAEDEWGKTPDAMKAAMALEKKLNQALLDLHALGSARTDPHLCDFLETHFLDEEVKLIKKMGDHLTNLHRLGGPEAGLGEYLFERLTLKHD

SEQ ID NO: 28642 - protein, 92 aa, Homo sapiens
  REGION 1..92: note = ENSP00000343314
MASLGHILVFCVGLLTMAKAESPKEHDPFTYDYQSLQIGGLVIAGILFILGILIVLSRRCRCKFNQQQRTGEPDEEEGTFRSSIRRLSTRRR

SEQ ID NO: 28643 - protein, 92 aa, Homo sapiens; identical to SEQ ID NO: 28642
  REGION 1..92: note = ENSP00000466398

SEQ ID NO: 28644 - protein, 92 aa, Homo sapiens; identical to SEQ ID NO: 28642
  REGION 1..92: note = ENSP00000393611

SEQ ID NO: 28645 - protein, 92 aa, Homo sapiens; identical to SEQ ID NO: 28642
  REGION 1..92: note = ENSP00000465289

SEQ ID NO: 28646 - protein, 92 aa, Homo sapiens; identical to SEQ ID NO: 28642
  REGION 1..92: note = ENSP00000468535

SEQ ID NO: 28647 - protein, 92 aa, Homo sapiens; identical to SEQ ID NO: 28642
  REGION 1..92: note = ENSP00000467727

SEQ ID NO: 28648 - protein, 115 aa, Homo sapiens
  REGION 1..115: note = ENSP00000467818
  VARIANT 1: note = Any amino acid
XFCVGLLTMAKAESPKEHDPFTYDYQSLQIGGLVIAGILFILGILIVLTPPLARASWSYSAAWRPPGGSLSFSYLSTPTGRRCRCKFNQQQRTGEPDEEEGTFRSSIRRLSTRRR

SEQ ID NO: 28649 - protein, 92 aa, Homo sapiens; identical to SEQ ID NO: 28642
  REGION 1..92: note = ENSP00000481244

SEQ ID NO: 28650 - protein, 77 aa, Homo sapiens
  REGION 1..77: note = ENSP00000466915
MATPTQTPTKAPEEPDPFYYDYNTVQTVGMTLATILFLLGILIVISKKVKCRKADSSPTCKSCKSELPSSAPGGGGV

SEQ ID NO: 28651 - protein, 80 aa, Homo sapiens
  REGION 1..80: note = ENSP00000270310
MATPTQTPTKAPEEPDPFYYDYNTVQTVGMTLATILFLLGILIVISKKVKCRKADSRSESPTCKSCKSELPSSAPGGGGV

SEQ ID NO: 28652 - protein, 117 aa, Homo sapiens
  REGION 1..117: note = ENSP00000465784
MATPTQTPTKAPEEPDPFYYDYNTVQTVGMTLATILFLLGILIVISKCDPFLGCLSLRFLCWLSSISYPLCPVFLFCLSLPTGKKVKCRKADSRSESPTCKSCKSELPSSAPGGGGV

SEQ ID NO: 28653 - protein, 574 aa, Homo sapiens
  REGION 1..574: note = ENSP00000286201
MRDPGAAAPLSSLGLCALVLALLGALSAGAGAQPYHGEKGISVPDHGFCQPISIPLCTDIAYNQTILPNLLGHTNQEDAGLEVHQFYPLVKVQCSPELRFFLCSMYAPVCTVLDQAIPPCRSLCERARQGCEALMNKFGFQWPERLRCENFPVHGAGEICVGQNTSDGSGGPGGGPTAYPTAPYLPDLPFTALPPGASDGRGRPAFPFSCPRQLKVPPYLGYRFLGERDCGAPCEPGRANGLMYFKEEERRFARLWVGVWSVLCCASTLFTVLTYLVDMRRFSYPERPIIFLSGCYFMVAVAHVAGFLLEDRAVCVERFSDDGYRTVAQGTKKEGCTILFMVLYFFGMASSIWWVILSLTWFLAAGMKWGHEAIEANSQYFHLAAWAVPAVKTITILAMGQVDGDLLSGVCYVGLSSVDALRGFVLAPLFVYLFIGTSFLLAGFVSLFRIRTIMKHDGTKTEKLEKLMVRIGVFSVLYTVPATIVLACYFYEQAFREHWERTWLLQTCKSYAVPCPPGHFPPMSPDFTVFMIKYLMTMIVGITTGFWIWSGKTLQSWRRFYHRLSHSSKGETAV

SEQ ID NO: 28654 - protein, 694 aa, Homo sapiens
  REGION 1..694: note = ENSP00000363826
MEWGYLLEVTSLLAALALLQRSSGAAAASAKELACQEITVPLCKGIGYNYTYMPNQFNHDTQDEAGLEVHQFWPLVEIQCSPDLKFFLCSMYTPICLEDYKKPLPPCRSVCERAKAGCAPLMRQYGFAWPDRMRCDRLPEQGNPDTLCMDYNRTDLTTAAPSPPRRLPPPPPGEQPPSGSGHGRPPGARPPHRGGGRGGGGGDAAAPPARGGGGGGKARPPGGGAAPCEPGCQCRAPMVSVSSERHPLYNRVKTGQIANCALPCHNPFFSQDERAFTVFWIGLWSVLCFVSTFATVSTFLIDMERFKYPERPIIFLSACYLFVSVGYLVRLVAGHEKVACSGGAPGAGGAGGAGGAAAGAGAAGAGAGGPGGRGEYEELGAVEQHVRYETTGPALCTVVFLLVYFFGMASSIWWVILSLTWFLAAGMKWGNEAIAGYSQYFHLAAWLVPSVKSIAVLALSSVDGDPVAGICYVGNQSLDNLRGFVLAPLVIYLFIGTMFLLAGFVSLFRIRSVIKQQDGPTKTHKLEKLMIRLGLFTVLYTVPAAVVVACLFYEQHNRPRWEATHNCPCLRDLQPDQARRPDYAVFMLKYFMCLVVGITSGVWVWSGKTLESWRSLCTRCCWASKGAAVGGGAGATAAGGGGGPGGGGGGGPGGGGGPGGGGGSLYSDVSTGLTWRSGTASSVSYPKQMPLSQV

SEQ ID NO: 28655 - protein, 591 aa, Homo sapiens
  REGION 1..591: note = ENSP00000345785
MAVAPLRGALLLWQLLAAGGAALEIGRFDPERGRGAAPCQAVEIPMCRGIGYNLTRMPNLLGHTSQGEAAAELAEFAPLVQYGCHSHLRFFLCSLYAPMCTDQVSTPIPACRPMCEQARLRCAPIMEQFNFGWPDSLDCARLPTRNDPHALCMEAPENATAGPAEPHKGLGMLPVAPRPARPPGDLGPGAGGSGTCENPEKFQYVEKSRSCAPRCGPGVEVFWSRRDKDFALVWMAVWSALCFFSTAFTVLTFLLEPHRFQYPERPIIFLSMCYNVYSLAFLIRAVAGAQSVACDQEAGALYVIQEGLENTGCTLVFLLLYYFGMASSLWWVVLTLTWFLAAGKKWGHEAIEAHGSYFHMAAWGLPALKTIVILTLRKVAGDELTGLCYVASTDAAALTGFVLVPLSGYLVLGSSFLLTGFVALFHIRKIMKTGGTNTEKLEKLMVKIGVFSILYTVPATCVIVCYVYERLNMDFWRLRATEQPCAAAAGPGGRRDCSLPGGSVPTVAVFMLKIFMSLVVGITSGVWVWSSKTFQTWQSLCYRKIAAGRARAKACRAPGSYGRGTHCHYKAPTVVLHMTKTDPSLENPTHL

SEQ ID NO: 28656 - protein, 493 aa, Homo sapiens
  REGION 1..493: note = ENSP00000410369
MDQDYERRLLRQIVIQNENTMPRVTEMRRTLTPASSPVSSPSKHGDRFIPSRAGANWSVNFHRINENEKSPSQNRKAKDATSDNGKDGLAYSALLKNELLGAGIEKVQDPQTEDRRLQPSTPEKKGLFTYSLSTKRSSPDDGNDVSPYSLSPVSNKSQKLLRSPRKPTRKISKIPFKVLDAPELQDDFYLNLVDWSSLNVLSVGLGTCVYLWSACTSQVTRLCDLSVEGDSVTSVGWSERGNLVAVGTHKGFVQIWDAAAGKKLSMLEGHTARVGALAWNAEQLSSGSRDRMILQRDIRTPPLQSERRLQGHRQEVCGLKWSTDHQLLASGGNDNKLLVWNHSSLSPVQQYTEHLAAVKAIAWSPHQHGLLASGGGTADRCIRFWNTLTGQPLQCIDTGSQVCNLAWSKHANELVSTHGYSQNQILVWKYPSLTQVAKLTGHSYRVLYLAMSPDGEAIVTGAGDETLRFWNVFSKTRSTKESVSVLNLFTRIR

SEQ ID NO: 28657 - protein, 361 aa, Homo sapiens
  REGION 1..361: note = ENSP00000467967
MDQDYERRLLRQIVIQNENTMPRVTEMRRTLTPASSPVSSPSKHGDRFIPSRAGANWSVNFHRINENEKSPSQNRKAKDATSDNGKDGLAYSALLKNELLGAGIEKVQDPQTEDRRLQPSTPEKKGLFTYSLSTKRSSPDDGNDVSPYSLSPVSNKSQKLLRSPRKPTRKISKIPFKVLDAPELQDDFYLNLVDWSSLNVLSVGLGTCVYLWSACTSQVTRLCDLSVEGDSVTSVGWSERGNLVAVGTHKGFVQIWDAAAGKKLSMLEGHTARVGALAWNAEQLSSGSRDRMILQRDIRTPPLQSERRLQGHRQEVCGLKWSTDHQLLASGGNDNKDNHCSVSTRAPKCAIWPGPSTPTSW

SEQ ID NO: 28658 - protein, 496 aa, Homo sapiens
  REGION 1..496: note = ENSP00000378529
MDQDYERRLLRQIVIQNENTMPRVTEMRRTLTPASSPVSSPSKHGDRFIPSRAGANWSVNFHRINENEKSPSQNRKAKDATSDNGKDGLAYSALLKNELLGAGIEKVQDPQTEDRRLQPSTPEKKGLFTYSLSTKRSSPDDGNDVSPYSLSPVSNKSQKLLRSPRKPTRKISKIPFKVLDAPELQDDFYLNLVDWSSLNVLSVGLGTCVYLWSACTSQVTRLCDLSVEGDSVTSVGWSERGNLVAVGTHKGFVQIWDAAAGKKLSMLEGHTARVGALAWNAEQLSSGSRDRMILQRDIRTPPLQSERRLQGHRQEVCGLKWSTDHQLLASGGNDNKLLVWNHSSLSPVQQYTEHLAAVKAIAWSPHQHGLLASGGGTADRCIRFWNTLTGQPLQCIDTGSQVCNLAWSKHANELVSTHGYSQNQILVWKYPSLTQVAKLTGHSYRVLYLAMSPDGEAIVTGAGDETLRFWNVFSKTRSTKVKWESVSVLNLFTRIR

SEQ ID NO: 28659 - protein, 404 aa, Homo sapiens
  REGION 1..404: note = ENSP00000321800
MDQDYERRLLRQIVIQNENTMPRVTEMRRTLTPASSPVSSPSKHGDRFIPSRAGANWSVNFHRINENEKSPSQNRKAKDATSDNGKDGLAYSALLKNELLGAGIEKVQDPQTEDRRLQPSTPEKKGLFTVTRLCDLSVEGDSVTSVGWSERGNLVAVGTHKGFVQIWDAAAGKKLSMLEGHTARVGALAWNAEQLSSGSRDRMILQRDIRTPPLQSERRLQGHRQEVCGLKWSTDHQLLASGGNDNKLLVWNHSSLSPVQQYTEHLAAVKAIAWSPHQHGLLASGGGTADRCIRFWNTLTGQPLQCIDTGSQVCNLAWSKHANELVSTHGYSQNQILVWKYPSLTQVAKLTGHSYRVLYLAMSPDGEAIVTGAGDETLRFWNVFSKTRSTKESVSVLNLFTRIR

SEQ ID NO: 28660 - protein, 724 aa, Homo sapiens
  REGION 1..724: note = ENSP00000262995
MSGGEVVCSGWLRKSPPEKKLKRYAWKRRWFVLRSGRLTGDPDVLEYYKNDHAKKPIRIIDLNLCQQVDAGLTFNKKEFENSYIFDINTIDRIFYLVADSEEEMNKWVRCICDICGFNPTEEDPVKPPGSSLQAPADLPLAINTAPPSTQADSSSATLPPPYQLINVPPHLETLGIQEDPQDYLLLINCQSKKPEPTRTHADSAKSTSSETDCNDNVPSHKNPASSQSKHGMNGFFQQQMIYDSPPSRAPSASVDSSLYNLPRSYSHDVLPKVSPSSTEADGELYVFNTPSGTSSVETQMRHVSISYDIPPTPGNTYQIPRTFPEGTLGQTSKLDTIPDIPPPRPPKPHPAHDRSPVETCSIPRTASDTDSSYCIPTAGMSPSRSNTISTVDLNKLRKDASSQDCYDIPRAFPSDRSSSLEGFHNHFKVKNVLTVGSVSSEELDENYVPMNPNSPPRQHSSSFTEPIQEANYVPMTPGTFDFSSFGMQVPPPAHMGFRSSPKTPPRRPVPVADCEPPPVDRNLKPDRKGQSPKILRLKPHGLERTDSQTIGDFATRRKVKPAPLEIKPLPEWEELQAPVRSPITRSFARDSSRFPMSPRPDSVHSTTSSSDSHDSEENYVPMNPNLSSEDPNLFGSNSLDGGSSPMIKPKGDKQVEYLDLDLDSGKSTPPRKQKSSGSGSSVADERVDYVVVDQQKTLALKSTREAWTDGRQSTESETPAKSVK

SEQ ID NO: 28661 - protein, 694 aa, Homo sapiens
  REGION 1..694: note = ENSP00000262994
MSGGEVVCSGWLRKSPPEKKLKRYAWKRRWFVLRSGRLTGDPDVLEYYKNDHAKKPIRIIDLNLCQQVDAGLTFNKKEFENSYIFDINTIDRIFYLVADSEEEMNKWVRCICDICGFNPTEEDPVKPPGSSLQAPADLPLAINTAPPSTQADSSSATLPPPYQLINVPPHLETLGIQEDPQDYLLLINCQSKKPEPTRTHADSAKSTSSETDCNDNVPSHKNPASSQSKHGMNGFFQQQMIYDSPPSRAPSASVDSSLYNLPRSYSHDVLPKVSPSSTEADGELYVFNTPSGTSSVETQMRHVSISYDIPPTPGNTYQIPRTFPEGTLGQTSKLDTIPDIPPPRPPKPHPAHDRSPVETCSIPRTASDTDSSYCIPTAGMSPSRSNTISTVDLNKLRKDASSQDCYDIPRAFPSDRSSSLEGFHNHFKVKNVLTVGSVSSEELDENYVPMNPNSPPRQHSSSFTEPIQEANYVPMTPGTFDFSSFGMQVPPPAHMGFRSSPKTPPRRPVPVADCEPPPVDRNLKPDRKVKPAPLEIKPLPEWEELQAPVRSPITRSFARDSSRFPMSPRPDSVHSTTSSSDSHDSEENYVPMNPNLSSEDPNLFGSNSLDGGSSPMIKPKGDKQVEYLDLDLDSGKSTPPRKQKSSGSGSSVADERVDYVVVDQQKTLALKSTREAWTDGRQSTESETPAKSVK

SEQ ID NO: 28662 - protein, 239 aa, Homo sapiens
  REGION 1..239: note = ENSP00000427435
MSGGEVVCSGWLRKSPPEKKLKRYAWKRRWFVLRSGRLTGDPDVLEYYKNDHAKKPIRIIDLNLCQQVDAGLTFNKKEFENSYIFDINTIDRIFYLVADSEEEMNKWVRCICDICGFNPTEEDPVKPPGSSLQAPADLPLAINTAPPSTQADSSSATLPPPYQLINVPPHLETLGIQEDPQDYLLLINCQSKKPEPTSQGSSFVSEEGEEYLLLEDFESKTIPLQTHADSAKSTSSETD

SEQ ID NO: 28663 - protein, 48 aa, Homo sapiens
  REGION 1..48: note = ENSP00000426668
MNKWVRCICDICGFNPTEEDPVKPPGSSLQAPADLPLAINTAPPSTQA

SEQ ID NO: 28664 - protein, 591 aa, Homo sapiens
  REGION 1..591: note = ENSP00000424554
MNKWVRCICDICGFNPTEEDPVKPPGSSLQAPADLPLAINTAPPSTQADSSSATLPPPYQLINVPPHLETLGIQEDPQDYLLLINCQSKKPEPTRTHADSAKSTSSETDCNDNVPSHKNPASSQSKHGMNGFFQQQMIYDSPPSRAPSASVDSSLYNLPRSYSHDVLPKVSPSSTEADGELYVFNTPSGTSSVETQMRHVSISYDIPPTPGNTYQIPRTFPEGTLGQTSKLDTIPDIPPPRPPKPHPAHDRSPVETCSIPRTASDTDSSYCIPTAGMSPSRSNTISTVDLNKLRKDASSQDCYDIPRAFPSDRSSSLEGFHNHFKVKNVLTVGSVSSEELDENYVPMNPNSPPRQHSSSFTEPIQEANYVPMTPGTFDFSSFGMQVPPPAHMGFRSSPKTPPRRPVPVADCEPPPVDRNLKPDRKVKPAPLEIKPLPEWEELQAPVRSPITRSFARDSSRFPMSPRPDSVHSTTSSSDSHDSEENYVPMNPNLSSEDPNLFGSNSLDGGSSPMIKPKGDKQVEYLDLDLDSGKSTPPRKQKSSGSGSSVADERVDYVVVDQQKTLALKSTREAWTDGRQSTESETPAKSVK

SEQ ID NO: 28665 - protein, 176 aa, Homo sapiens
  REGION 1..176: note = ENSP00000425921
MDEAWKRRWFVLRSGRLTGDPDVLEYYKNDHAKKPIRIIDLNLCQQVDAGLTFNKKEFENSYIFDINTIDRIFYLVADSEEEMNKWVRCICDICGFNPTEEDPVKPPGSSLQAPADLPLAINTAPPSTQADSSSATLPPPYQLINVPPHLETLGIQEDPQDYLLLINCQSKKPEPT

SEQ ID NO: 28666 - protein, 94 aa, Homo sapiens
  REGION 1..94: note = ENSP00000420867
  VARIANT 1: note = Any amino acid
XGRLTGDPDVLEYYKNDHAKKPIRIIDLNLCQQVDAGLTFNKKEFENSYIFDINTIDRIFYLVADSEEEMNKWVRCICDICGFNPTEEGSHFVV

SEQ ID NO: 28667 - protein, 91 aa, Homo sapiens
  REGION 1..91: note = ENSP00000426297
  VARIANT 1: note = Any amino acid
XPVKPPGSSLQAPADLPLAINTAPPSTQADSSSATLPPPYQLINVPPHLETLGIQEDPQDYLLLINCQSKKPEPTRNASEECEMKILPCHF

SEQ ID NO: 28668 - protein, 638 aa, Homo sapiens
  REGION 1..638: note = ENSP00000343959
MSGDPDVLEYYKNDHSKKPLRIINLNFCEQVDAGLTFNKKELQDSFVFDIKTSERTFYLVAETEEDMNKWVQSICQICGFNQAEESTDSLRNVSSAGHGPRSSPAELSSSSQHLLRERKSSAPSHSSQPTLFTFEPPVSNHMQPTLSTSAPQEYLYLHQCISRRAENARSASFSQGTRASFLMRSDTAVQKLAQGNGHCVNGISGQVHGFYSLPKPSRHNTEFRDSTYDLPRSLASHGHTKGSLTGSETDNEDVYTFKTPSNTLCREFGDLLVDNMDVPATPLSAYQIPRTFTLDKNHNAMTVATPGDSAIAPPPRPPKPSQAETPRWGSPQQRPPISENSRSVAATIPRRNTLPAMDNSRLHRASSCETYEYPQRGGESAGRSAESMSDGVGSFLPGKMIVGRSDSTNSEDNYVPMNPGSSTLLAMERAGDNSQSVYIPMSPGAHHFDSLGYPSTTLPVHRGPSRGSEIQPPPVNRNLKPDRKAKPTPLDLRNNTVIDELPFKSPITKSWSRANHTFNSSSSQYCRPISTQSITSTDSGDSEENYVPMQNPVSASPVPSGTNSPAPKKSTGSVDYLALDFQPSSPSPHRKPSTSSVTSDEKVDYVQVDKEKTQALQNTMQEWTDVRQSSEPSKGAKL

SEQ ID NO: 28669 - protein, 676 aa, Homo sapiens
  REGION 1..676: note = ENSP00000354952
MSGGGDVVCTGWLRKSPPEKKLRRYAWKKRWFILRSGRMSGDPDVLEYYKNDHSKKPLRIINLNFCEQVDAGLTFNKKELQDSFVFDIKTSERTFYLVAETEEDMNKWVQSICQICGFNQAEESTDSLRNVSSAGHGPRSSPAELSSSSQHLLRERKSSAPSHSSQPTLFTFEPPVSNHMQPTLSTSAPQEYLYLHQCISRRAENARSASFSQGTRASFLMRSDTAVQKLAQGNGHCVNGISGQVHGFYSLPKPSRHNTEFRDSTYDLPRSLASHGHTKGSLTGSETDNEDVYTFKTPSNTLCREFGDLLVDNMDVPATPLSAYQIPRTFTLDKNHNAMTVATPGDSAIAPPPRPPKPSQAETPRWGSPQQRPPISENSRSVAATIPRRNTLPAMDNSRLHRASSCETYEYPQRGGESAGRSAESMSDGVGSFLPGKMIVGRSDSTNSEDNYVPMNPGSSTLLAMERAGDNSQSVYIPMSPGAHHFDSLGYPSTTLPVHRGPSRGSEIQPPPVNRNLKPDRKAKPTPLDLRNNTVIDELPFKSPITKSWSRANHTFNSSSSQYCRPISTQSITSTDSGDSEENYVPMQNPVSASPVPSGTNSPAPKKSTGSVDYLALDFQPSSPSPHRKPSTSSVTSDEKVDYVQVDKEKTQALQNTMQEWTDVRQSSEPSKGAKL

SEQ ID NO: 28670 - protein, 130 aa, Homo sapiens
  REGION 1..130: note = ENSP00000433762
MSGDPDVLEYYKNDHSKKPLRIINLNFCEQVDAGLTFNKKELQDSFVFDIKTSERTFYLVAETEEDMNKWVQSICQICGFNQAEESTDSLRNVSSAGHGPRSSPAELSSSSQHLLRERKSSAPSHSSQPT

SEQ ID NO: 28671 - protein, 102 aa, Homo sapiens
  REGION 1..102: note = ENSP00000431868
MSGDPDVLEYYKNDHSKKPLRIINLNFCEQVDAGLTFNKKELQDSFVFDIKTSERTFYLVAETEEDMNKWVQSICQICGFNQAEESTDSLRNVSSAGHGPRS

SEQ ID NO: 28672 - protein, 43 aa, Homo sapiens
  REGION 1..43: note = ENSP00000443122
MKFQYKEDHPFEYRKKEGEKIRKKYPDRVPAPGLVWGQPASSC

SEQ ID NO: 28673 - protein, 43 aa, Homo sapiens; identical to SEQ ID NO: 28672
  REGION 1..43: note = ENSP00000438029

SEQ ID NO: 28674 - protein, 70 aa, Homo sapiens
  REGION 1..70: note = ENSP00000444108
MKFQYKEDHPFEYRKKEGEKIRKKYPDRVPVIVEKAPKARVPDLDKRKYLVPSDLTVGQFYFLIRKRIHL

SEQ ID NO: 28675 - protein, 117 aa, Homo sapiens
  REGION 1..117: note = ENSP00000266458
MKFQYKEDHPFEYRKKEGEKIRKKYPDRVPVIVEKAPKARVPDLDKRKYLVPSDLTVGQFYFLIRKRIHLRPEDALFFFVNNTIPPTSATMGQLYEDNHEEDYFLYVAYSDESVYGK

SEQ ID NO: 28676 - protein, 146 aa, Homo sapiens
  REGION 1..146: note = ENSP00000411256
MKFQYKEDHPFEYRKKEGEKIRKKYPDRVPVIVEKAPKARVPDLDKRKYLVPSDLTVGQFYFLIRKRIHLRPEDALFFFVNNTIPPTSATMGQLYEVMVLVAQYWMPSSAVWHPLALVLDALITHLRSGAEGVIYPDPLTYGSVRL

SEQ ID NO: 28677 - protein, 27 aa, Homo sapiens
  REGION 1..27: note = ENSP00000439734
MGQLYEDNHEEDYFLYVAYSDESVYGK

SEQ ID NO: 28678 - protein, 36 aa, Homo sapiens
  REGION 1..36: note = ENSP00000441165
MKFQYKEDHPFEYRKKEGEKIRKKYPDRVPLASSTS

SEQ ID NO: 28679 - protein, 36 aa, Homo sapiens; identical to SEQ ID NO: 28678
  REGION 1..36: note = ENSP00000446297

SEQ ID NO: 28680 - protein, 146 aa, Homo sapiens; identical to SEQ ID NO: 28676
  REGION 1..146: note = ENSP00000445857

SEQ ID NO: 28681 - protein, 43 aa, Homo sapiens; identical to SEQ ID NO: 28672
  REGION 1..43: note = ENSP00000443720

SEQ ID NO: 28682 - protein, 43 aa, Homo sapiens; identical to SEQ ID NO: 28672
  REGION 1..43: note = ENSP00000444055

SEQ ID NO: 28683 - protein, 117 aa, Homo sapiens; identical to SEQ ID NO: 28675
  REGION 1..117: note = ENSP00000444186

SEQ ID NO: 28684 - protein, 103 aa, Homo sapiens
  REGION 1..103: note = ENSP00000445709
MKFQYKEDHPFEYRKKEGEKIRKKYPDRVPVSVEERRGWEGKGPRGRGRVVEMASLGRPGGSGEGRFRELLNPERPSVPEPMDVQTVELLKPRMPGPRTPLQG

SEQ ID NO: 28685 - protein, 27 aa, Homo sapiens
  REGION 1..27: note = ENSP00000446456
MGQLYEDNHEEDYFLYVAYSDESVYGK

SEQ ID NO: 28686 - protein, 27 aa, Homo sapiens
  REGION 1..27: note = ENSP00000444738
MGQLYEDNHEEDYFLYVAYSDESVYGK

SEQ ID NO: 28687 - protein, 27 aa, Homo sapiens
  REGION 1..27: note = ENSP00000444209
MGQLYEDNHEEDYFLYVAYSDESVYGK

SEQ ID NO: 28688 - protein, 10 aa, Homo sapiens
  REGION 1..10: note = ENSP00000437451
MGQLYEDNHE

SEQ ID NO: 28689 - protein, 43 aa, Homo sapiens; identical to SEQ ID NO: 28672
  REGION 1..43: note = ENSP00000486133

SEQ ID NO: 28690 - protein, 961 aa, Homo sapiens
  REGION 1..961: note = ENSP00000411286
MLLLLLLAPLFLRPPGAGGAQTPNATSEGCQIIHPPWEGGIRYRGLTRDQVKAINFLPVDYEIEYVCRGEREVVGPKVRKCLANGSWTDMDTPSRCVRICSKSYLTLENGKVFLTGGDLPALDGARVDFRCDPDFHLVGSSRSICSQGQWSTPKPHCQVNRTPHSERRAVYIGALFPMSGGWPGGQACQPAVEMALEDVNSRRDILPDYELKLIHHDSKCDPGQATKYLYELLYNDPIKIILMPGCSSVSTLVAEAARMWNLIVLSYGSSSPALSNRQRFPTFFRTHPSATLHNPTRVKLFEKWGWKKIATIQQTTEVFTSTLDDLEERVKEAGIEITFRQSFFSDPAVPVKNLKRQDARIIVGLFYETEARKVFCEVYKERLFGKKYVWFLIGWYADNWFKIYDPSINCTVDEMTEAVEGHITTEIVMLNPANTRSISNMTSQEFVEKLTKRLKRHPEETGGFQEAPLAYDAIWALALALNKTSGGGGRSGVRLEDFNYNNQTITDQIYRAMNSSSFEGVSGHVVFDASGSRMAWTLIEQLQGGSYKKIGYYDSTKDDLSWSKTDKWIGGSPPADQTLVIKTFRFLSQKLFISVSVLSSLGIVLAVVCLSFNIYNSHVRYIQNSQPNLNNLTAVGCSLALAAVFPLGLDGYHIGRNQFPFVCQARLWLLGLGFSLGYGSMFTKIWWVHTVFTKKEEKKEWRKTLEPWKLYATVGLLVGMDVLTLAIWQIVDPLHRTIETFAKEEPKEDIDVSILPQLEHCSSRKMNTWLGIFYGYKGLLLLLGIFLAYETKSVSTEKINDHRAVGMAIYNVAVLCLITAPVTMILSSQQDAAFAFASLAIVFSSYITLVVLFVPKMRRLITRGEWQSEAQDTMKTGSSTNNNEEEKSRLLEKENRELEKIIAEKEERVSELRHQLQSRQQLRSRRHPPTPPEPSGGLPRGPPEPPDRLSCDGSRVHLLYK

SEQ ID NO: 28691 - protein, 844 aa, Homo sapiens
  REGION 1..844: note = ENSP00000394528
MGPGAPFARVGWPLPLLVVMAAGVAPVWASHSPHLPRPHSRVPPHPSSERRAVYIGALFPMSGGWPGGQACQPAVEMALEDVNSRRDILPDYELKLIHHDSKCDPGQATKYLYELLYNDPIKIILMPGCSSVSTLVAEAARMWNLIVLSYGSSSPALSNRQRFPTFFRTHPSATLHNPTRVKLFEKWGWKKIATIQQTTEVFTSTLDDLEERVKEAGIEITFRQSFFSDPAVPVKNLKRQDARIIVGLFYETEARKVFCEVYKERLFGKKYVWFLIGWYADNWFKIYDPSINCTVDEMTEAVEGHITTEIVMLNPANTRSISNMTSQEFVEKLTKRLKRHPEETGGFQEAPLAYDAIWALALALNKTSGGGGRSGVRLEDFNYNNQTITDQIYRAMNSSSFEGVSGHVVFDASGSRMAWTLIEQLQGGSYKKIGYYDSTKDDLSWSKTDKWIGGSPPADQTLVIKTFRFLSQKLFISVSVLSSLGIVLAVVCLSFNIYNSHVRYIQNSQPNLNNLTAVGCSLALAAVFPLGLDGYHIGRNQFPFVCQARLWLLGLGFSLGYGSMFTKIWWVHTVFTKKEEKKEWRKTLEPWKLYATVGLLVGMDVLTLAIWQIVDPLHRTIETFAKEEPKEDIDVSILPQLEHCSSRKMNTWLGIFYGYKGLLLLLGIFLAYETKSVSTEKINDHRAVGMAIYNVAVLCLITAPVTMILSSQQDAAFAFASLAIVFSSYITLVVLFVPKMRRLITRGEWQSEAQDTMKTGSSTNNNEEEKSRLLEKENRELEKIIAEKEERVSELRHQLQSRQQLRSRRHPPTPPEPSGGLPRGPPEPPDRLSCDGSRVHLLYK

SEQ ID NO: 28692 - protein, 899 aa, Homo sapiens
  REGION 1..899: note = ENSP00000399318
MLLLLLLAPLFLRPPGAGGAQTPNATSEGCQIIHPPWEGGIRYRGLTRDQVKAINFLPVDYEIEYVCRGEREVVGPKVRKCLANGSWTDMDTPSRCVNRTPHSERRAVYIGALFPMSGGWPGGQACQPAVEMALEDVNSRRDILPDYELKLIHHDSKCDPGQATKYLYELLYNDPIKIILMPGCSSVSTLVAEAARMWNLIVLSYGSSSPALSNRQRFPTFFRTHPSATLHNPTRVKLFEKWGWKKIATIQQTTEVFTSTLDDLEERVKEAGIEITFRQSFFSDPAVPVKNLKRQDARIIVGLFYETEARKVFCEVYKERLFGKKYVWFLIGWYADNWFKIYDPSINCTVDEMTEAVEGHITTEIVMLNPANTRSISNMTSQEFVEKLTKRLKRHPEETGGFQEAPLAYDAIWALALALNKTSGGGGRSGVRLEDFNYNNQTITDQIYRAMNSSSFEGVSGHVVFDASGSRMAWTLIEQLQGGSYKKIGYYDSTKDDLSWSKTDKWIGGSPPADQTLVIKTFRFLSQKLFISVSVLSSLGIVLAVVCLSFNIYNSHVRYIQNSQPNLNNLTAVGCSLALAAVFPLGLDGYHIGRNQFPFVCQARLWLLGLGFSLGYGSMFTKIWWVHTVFTKKEEKKEWRKTLEPWKLYATVGLLVGMDVLTLAIWQIVDPLHRTIETFAKEEPKEDIDVSILPQLEHCSSRKMNTWLGIFYGYKGLLLLLGIFLAYETKSVSTEKINDHRAVGMAIYNVAVLCLITAPVTMILSSQQDAAFAFASLAIVFSSYITLVVLFVPKMRRLITRGEWQSEAQDTMKTGSSTNNNEEEKSRLLEKENRELEKIIAEKEERVSELRHQLQSRQQLRSRRHPPTPPEPSGGLPRGPPEPPDRLSCDGSRVHLLYK

SEQ ID NO: 28693 - protein, 844 aa, Homo sapiens; identical to SEQ ID NO: 28691
  REGION 1..844: note = ENSP00000391572

SEQ ID NO: 28694 - protein, 578 aa, Homo sapiens
  REGION 1..578: note = ENSP00000448654
MLLLLLLAPLFLRPPGAGGAQTPNATSEGCQIIHPPWEGGIRYRGLTRDQVKAINFLPVDYEIEYVCRGEREVVGPKVRKCLANGSWTDMDTPSRCVRICSKSYLTLENGKVFLTGGDLPALDGARVDFRCDPDFHLVGSSRSICSQGQWSTPKPHCQVNRTPHSERRAVYIGALFPMSGGWPGGQACQPAVEMALEDVNSRRDILPDYELKLIHHDSKCDPGQATKYLYELLYNDPIKIILMPGCSSVSTLVAEAARMWNLIVLSYGSSSPALSNRQRFPTFFRTHPSATLHNPTRVKLFEKWGWKKIATIQQTTEVFTSTLDDLEERVKEAGIEITFRQSFFSDPAVPVKNLKRQDARIIVGLFYETEARKVFCEVYKERLFGKKYVWFLIGWYADNWFKIYDPSINCTVDEMTEAVEGHITTEIVMLNPANTRSISNMTSQEFVEKLTKRLKRHPEETGGFQEAPLAYDAIWALALALNKTSGGGGRSGVRLEDFNYNNQTITDQIYRAMNSSSFEGVSGHVVFDASGSRMAWTLIEQLQGGSYKKIGYYDSTKDDLSWSKTDKWIVISRTHSPT

SEQ ID NO: 28695 - protein, 844 aa, Homo sapiens; identical to SEQ ID NO: 28691
  REGION 1..844: note = ENSP00000348248

SEQ ID NO: 28696 - protein, 131 aa, Homo sapiens
  REGION 1..131: note = ENSP00000419356
MLLLLLLAPLFLRPPGAGGAQTPNATSEGCQIIHPPWEGGIRYRGLTRDQVKAINFLPVDYEIEYVCRGEREVVGPKVRKCLANGSWTDMDTPSRCGTLPSETQASALPGLQHGQVWEGAGDQAREAGRQW

SEQ ID NO: 28697 - protein, 899 aa, Homo sapiens; identical to SEQ ID NO: 28692
  REGION 1..899: note = ENSP00000366215

SEQ ID NO: 28698 - protein, 844 aa, Homo sapiens; identical to SEQ ID NO: 28691
  REGION 1..844: note = ENSP00000366211

SEQ ID NO: 28699 - protein, 137 aa, Homo sapiens
  REGION 1..137: note = ENSP00000417478
MLLLLLLAPLFLRPPGAGGAQTPNATSEGCQIIHPPWEGGIRYRGLTRDQVKAINFLPVDYEIEYVCRGEREVVGPKVRKCLANGSWTDMDTPSRCVRICSKSYLTLENGKVFLTGGDLPALDGARVDFRCDPDFHL

SEQ ID NO: 28700 - protein, 961 aa, Homo sapiens; identical to SEQ ID NO: 28690
  REGION 1..961: note = ENSP00000366233

SEQ ID NO: 28701 - protein, 578 aa, Homo sapiens; identical to SEQ ID NO: 28694
  REGION 1..578: note = ENSP00000419061

SEQ ID NO: 28702 - protein, 97 aa, Homo sapiens
  REGION 1..97: note = ENSP00000417663
MLLLLLLAPLFLRPPGAGGAQTPNATSEGCQIIHPPWEGGIRYRGLTRDQVKAINFLPVDYEIEYVCRGEREVVGPKVRKCLANGSWTDMDTPSRCV

SEQ ID NO: 28703 - protein, 193 aa, Homo sapiens
  REGION 1..193: note = ENSP00000420602
MLLLLLLAPLFLRPPGAGGAQTPNATSEGCQIIHPPWEGGIRYRGLTRDQVKAINFLPVDYEIEYVCRGEREVVGPKVRKCLANGSWTDMDTPSRCVRICSKSYLTLENGKVFLTGGDLPALDGARVDFRCDPDFHLVGSSRSICSQGQWSTPKPHCQGTLPSETQASALPGLQHGQVWEGAGDQAREAGRQW

SEQ ID NO: 28704 - protein, 156 aa, Homo sapiens
  REGION 1..156: note = ENSP00000419755
MLLLLLLAPLFLRPPGAGGAQTPNATSEGCQIIHPPWEGGIRYRGLTRDQVKAINFLPVDYEIEYVCRGEREVVGPKVRKCLANGSWTDMDTPSRCVRICSKSYLTLENGKVFLTGGDLPALDGARVDFRCDPDFHLVGSSRSICSQGQWSTPKPH

SEQ ID NO: 28705 - protein, 133 aa, Homo sapiens
  REGION 1..133: note = ENSP00000417332
MPGAWMLLLLLLAPLFLRPPGAGGAQTPNATSEGCQIIHPPWEGGIRYRGLTRDQVKAINFLPVDYEIEYVCRGEREVVGPKVRKCLANGSWTDMDTPSRCVRICSKSYLTLENGKVFLTGGDLPALDGARVD

SEQ ID NO: 28706 - protein, 578 aa, Homo sapiens; identical to SEQ ID NO: 28694
  REGION 1..578: note = ENSP00000366176

SEQ ID NO: 28707 - protein, 961 aa, Homo sapiens; identical to SEQ ID NO: 28690
  REGION 1..961: note = ENSP00000373134

SEQ ID NO: 28708 - protein, 844 aa, Homo sapiens; identical to SEQ ID NO: 28691
  REGION 1..844: note = ENSP00000373132

SEQ ID NO: 28709 - protein, 899 aa, Homo sapiens; identical to SEQ ID NO: 28692
  REGION 1..899: note = ENSP00000373133

SEQ ID NO: 28710 - protein, 844 aa, Homo sapiens; identical to SEQ ID NO: 28691
  REGION 1..844: note = ENSP00000373135

SEQ ID NO: 28711 - protein, 578 aa, Homo sapiens; identical to SEQ ID NO: 28694
  REGION 1..578: note = ENSP00000449342

SEQ ID NO: 28712 - protein, 961 aa, Homo sapiens; identical to SEQ ID NO: 28690
  REGION 1..961: note = ENSP00000406066

SEQ ID NO: 28713 - protein, 844 aa, Homo sapiens; identical to SEQ ID NO: 28691
  REGION 1..844: note = ENSP00000408938

SEQ ID NO: 28714 - protein, 899 aa, Homo sapiens; identical to SEQ ID NO: 28692
  REGION 1..899: note = ENSP00000399861

SEQ ID NO: 28715 - protein, 844 aa, Homo sapiens; identical to SEQ ID NO: 28691
  REGION 1..844: note = ENSP00000411263

SEQ ID NO: 28716 - protein, 578 aa, Homo sapiens; identical to SEQ ID NO: 28694
  REGION 1..578: note = ENSP00000448531

SEQ ID NO: 28717 - protein, 961 aa, Homo sapiens; identical to SEQ ID NO: 28690
  REGION 1..961: note = ENSP00000448999

SEQ ID NO: 28718 - protein, 961 aa, Homo sapiens; identical to SEQ ID NO: 28690
  REGION 1..961: note = ENSP00000373034

SEQ ID NO: 28719 - protein, 844 aa, Homo sapiens; identical to SEQ ID NO: 28691
  REGION 1..844: note = ENSP00000373029

SEQ ID NO: 28720 - protein, 899 aa, Homo sapiens; identical to SEQ ID NO: 28692
  REGION 1..899: note = ENSP00000373033

SEQ ID NO: 28721 - protein, 844 aa, Homo sapiens; identical to SEQ ID NO: 28691
  REGION 1..844: note = ENSP00000373035

SEQ ID NO: 28722 - protein, 578 aa, Homo sapiens; identical to SEQ ID NO: 28694
  REGION 1..578: note = ENSP00000449449

SEQ ID NO: 28723 - protein, 844 aa, Homo sapiens; identical to SEQ ID NO: 28691
  REGION 1..844: note = ENSP00000406285

SEQ ID NO: 28724 - protein, 899 aa, Homo sapiens; identical to SEQ ID NO: 28692
  REGION 1..899: note = ENSP00000412167

SEQ ID NO: 28725 - protein, 961 aa, Homo sapiens; identical to SEQ ID NO: 28690
  REGION 1..961: note = ENSP00000388035

SEQ ID NO: 28726 - protein, 844 aa, Homo sapiens; identical to SEQ ID NO: 28691
  REGION 1..844: note = ENSP00000406499

SEQ ID NO: 28727 - protein, 578 aa, Homo sapiens; identical to SEQ ID NO: 28694
  REGION 1..578: note = ENSP00000446983

SEQ ID NO: 28728 - protein, 961 aa, Homo sapiens
  REGION 1..961: note = ENSP00000416731
MLLLLLLAPLFLRPPGAGGVQTPNATSEGCQIIHPPWEGGIRYRGLTRDQVKAINFLPVDYEIEYVCRGEREVVGPKVRKCLANGSWTDMDTPSRCVRICSKSYLTLENGKVFLTGGDLPALDGARVDFRCDPDFHLVGSSRSICSQGQWSTPKPHCQVNRTPHSERRAVYIGALFPMSGGWPGGQACQPAVEMALEDVNSRRDILPDYELKLIHHDSKCDPGQATKYLYELLYNDPIKIILMPGCSSVSTLVAEAARMWNLIVLSYGSSSPALSNRQRFPTFFRTHPSATLHNPTRVKLFEKWGWKKIATIQQTTEVFTSTLDDLEERVKEAGIEITFRQSFFSDPAVPVKNLKRQDARIIVGLFYETEARKVFCEVYKERLFGKKYVWFLIGWYADNWFKIYDPSINCTVDEMTEAVEGHITTEIVMLNPANTRSISNMTSQEFVEKLTKRLKRHPEETGGFQEAPLAYDAIWALALALNKTSGGGGRSGVRLEDFNYNNQTITDQIYRAMNSSSFEGVSGHVVFDASGSRMAWTLIEQLQGGSYKKIGYYDSTKDDLSWSKTDKWIGGSPPADQTLVIKTFRFLSQKLFISVSVLSSLGIVLAVVCLSFNIYNSHVRYIQNSQPNLNNLTAVGCSLALAAVFPLGLDGYHIGRNQFPFVCQARLWLLGLGFSLGYGSMFTKIWWVHTVFTKKEEKKEWRKTLEPWKLYATVGLLVGMDVLTLAIWQIVDPLHRTIETFAKEEPKEDIDVSILPQLEHCSSRKMNTWLGIFYGYKGLLLLLGIFLAYETKSVSTEKINDHRAVGMAIYNVAVLCLITAPVTMILSSQQDAAFAFASLAIVFSSYITLVVLFVPKMRRLITRGEWQSEAQDTMKTGSSTNNNEEEKSRLLEKENRELEKIIAEKEERVSELRHQLQSRQQLRSRRHPPTPPEPSGGLPRGPPEPPDRLSCDGSRVHLLYK

SEQ ID NO: 28729 - protein, 844 aa, Homo sapiens; identical to SEQ ID NO: 28691
  REGION 1..844: note = ENSP00000416903

SEQ ID NO: 28730 - protein, 899 aa, Homo sapiens
  REGION 1..899: note = ENSP00000412044
MLLLLLLAPLFLRPPGAGGVQTPNATSEGCQIIHPPWEGGIRYRGLTRDQVKAINFLPVDYEIEYVCRGEREVVGPKVRKCLANGSWTDMDTPSRCVNRTPHSERRAVYIGALFPMSGGWPGGQACQPAVEMALEDVNSRRDILPDYELKLIHHDSKCDPGQATKYLYELLYNDPIKIILMPGCSSVSTLVAEAARMWNLIVLSYGSSSPALSNRQRFPTFFRTHPSATLHNPTRVKLFEKWGWKKIATIQQTTEVFTSTLDDLEERVKEAGIEITFRQSFFSDPAVPVKNLKRQDARIIVGLFYETEARKVFCEVYKERLFGKKYVWFLIGWYADNWFKIYDPSINCTVDEMTEAVEGHITTEIVMLNPANTRSISNMTSQEFVEKLTKRLKRHPEETGGFQEAPLAYDAIWALALALNKTSGGGGRSGVRLEDFNYNNQTITDQIYRAMNSSSFEGVSGHVVFDASGSRMAWTLIEQLQGGSYKKIGYYDSTKDDLSWSKTDKWIGGSPPADQTLVIKTFRFLSQKLFISVSVLSSLGIVLAVVCLSFNIYNSHVRYIQNSQPNLNNLTAVGCSLALAAVFPLGLDGYHIGRNQFPFVCQARLWLLGLGFSLGYGSMFTKIWWVHTVFTKKEEKKEWRKTLEPWKLYATVGLLVGMDVLTLAIWQIVDPLHRTIETFAKEEPKEDIDVSILPQLEHCSSRKMNTWLGIFYGYKGLLLLLGIFLAYETKSVSTEKINDHRAVGMAIYNVAVLCLITAPVTMILSSQQDAAFAFASLAIVFSSYITLVVLFVPKMRRLITRGEWQSEAQDTMKTGSSTNNNEEEKSRLLEKENRELEKIIAEKEERVSELRHQLQSRQQLRSRRHPPTPPEPSGGLPRGPPEPPDRLSCDGSRVHLLYK

SEQ ID NO: 28731 - protein, 844 aa, Homo sapiens; identical to SEQ ID NO: 28691
  REGION 1..844: note = ENSP00000405709

SEQ ID NO: 28732 - protein, 578 aa, Homo sapiens
  REGION 1..578: note = ENSP00000448763
MLLLLLLAPLFLRPPGAGGVQTPNATSEGCQIIHPPWEGGIRYRGLTRDQVKAINFLPVDYEIEYVCRGEREVVGPKVRKCLANGSWTDMDTPSRCVRICSKSYLTLENGKVFLTGGDLPALDGARVDFRCDPDFHLVGSSRSICSQGQWSTPKPHCQVNRTPHSERRAVYIGALFPMSGGWPGGQACQPAVEMALEDVNSRRDILPDYELKLIHHDSKCDPGQATKYLYELLYNDPIKIILMPGCSSVSTLVAEAARMWNLIVLSYGSSSPALSNRQRFPTFFRTHPSATLHNPTRVKLFEKWGWKKIATIQQTTEVFTSTLDDLEERVKEAGIEITFRQSFFSDPAVPVKNLKRQDARIIVGLFYETEARKVFCEVYKERLFGKKYVWFLIGWYADNWFKIYDPSINCTVDEMTEAVEGHITTEIVMLNPANTRSISNMTSQEFVEKLTKRLKRHPEETGGFQEAPLAYDAIWALALALNKTSGGGGRSGVRLEDFNYNNQTITDQIYRAMNSSSFEGVSGHVVFDASGSRMAWTLIEQLQGGSYKKIGYYDSTKDDLSWSKTDKWIVISRTHSPT

SEQ ID NO: 28733 - protein, 941 aa, Homo sapiens
  REGION 1..941: note = ENSP00000259455
MASPRSSGQPGPPPPPPPPPARLLLLLLLPLLLPLAPGAWGWARGAPRPPPSSPPLSIMGLMPLTKEVAKGSIGRGVLPAVELAIEQIRNESLLRPYFLDLRLYDTECDNAKGLKAFYDAIKYGPNHLMVFGGVCPSVTSIIAESLQGWNLVQLSFAATTPVLADKKKYPYFFRTVPSDNAVNPAILKLLKHYQWKRVGTLTQDVQRFSEVRNDLTGVLYGEDIEISDTESFSNDPCTSVKKLKGNDVRIILGQFDQNMAAKVFCCAYEENMYGSKYQWIIPGWYEPSWWEQVHTEANSSRCLRKNLLAAMEGYIGVDFEPLSSKQIKTISGKTPQQYEREYNNKRSGVGPSKFHGYAYDGIWVIAKTLQRAMETLHASSRHQRIQDFNYTDHTLGRIILNAMNETNFFGVTGQVVFRNGERMGTIKFTQFQDSREVKVGEYNAVADTLEIINDTIRFQGSEPPKDKTIILEQLRKISLPLYSILSALTILGMIMASAFLFFNIKNRNQKLIKMSSPYMNNLIILGGMLSYASIFLFGLDGSFVSEKTFETLCTVRTWILTVGYTTAFGAMFAKTWRVHAIFKNVKMKKKIIKDQKLLVIVGGMLLIDLCILICWQAVDPLRRTVEKYSMEPDPAGRDISIRPLLEHCENTHMTIWLGIVYAYKGLLMLFGCFLAWETRNVSIPALNDSKYIGMSVYNVGIMCIIGAAVSFLTRDQPNVQFCIVALVIIFCSTITLCLVFVPKLITLRTNPDAATQNRRFQFTQNQKKEDSKTSTSVTSVNQASTSRLEGLQSENHRLRMKITELDKDLEEVTMQLQDTPEKTTYIKQNHYQELNDILNLGNFTESTDGGKAILKNHLDQNPQLQWNTTEPSRTCKDPIEDINSPEHIQRRLSLQLPILHHAYLPSIGGVDASCVSPCVSPTASPRHRHVPPSFRVMVSGL

SEQ ID NO: 28734 - protein, 183 aa, Homo sapiens
  REGION 1..183: note = ENSP00000489352
VRTWILTVGYTTAFGAMFAKTWRVHAIFKNVKMKKKIIKDQKLLVIVGGMLLIDLCILICWQAVDPLRRTVEKYSMELFGCFLAWETRNVSIPALNDSKYIGMSVYNVGIMCIIGAAVSFLTRDQPNVQFCIVALVIIFCSTITLCLVFVPKLITLRTNPDAATQNRRFQFTQNQKKEDSKTS

SEQ ID NO: 28735 - protein, 77 aa, Homo sapiens
  REGION 1..77: note = ENSP00000490789
MVFGGVCPSVTSIIAESLQGWNLVQLSFAATTPVLADKKKYPYFFRTVPSDNAVNPAILKLLKHYQWKRVGTLTQDV

SEQ ID NO: 28736 - protein, 451 aa, Homo sapiens
  REGION 1..451: note = ENSP00000421828
MKTKLNIYNMQFLLFVFLVWDPARLVLANIQEDEAKNNITIFTRILDRLLDGYDNRLRPGLGDSITEVFTNIYVTSFGPVSDTDMEYTIDVFFRQKWKDERLKFKGPMNILRLNNLMASKIWTPDTFFHNGKKSVAHNMTMPNKLLRIQDDGTLLYTMRLTVQAECPMHLEDFPMDAHSCPLKFGSYAYTTSEVTYIWTYNASDSVQVAPDGSRLNQYDLLGQSIGKETIKSSTGEYTVMTAHFHLKRKIGYFVIQTYLPCIMTVILSQVSFWLNRESVPARTVFGVTTVLTMTTLSISARNSLPKVAYATAMDWFIAVCYAFVFSALIEFATVNYFTKRGWAWDGKSVVNDKKKEKASVMIQNNAYAVAVANYAPNLSKDPVLSTISKSATTPEPNKKPENKPAEAKKTFNSVSKIDRMSRIVFPVLFGTFNLVYWATYLNREPVLGVSP

SEQ ID NO: 28737 - protein, 451 aa, Homo sapiens; identical to SEQ ID NO: 28736
  REGION 1..451: note = ENSP00000421300

SEQ ID NO: 28738 - protein, 451 aa, Homo sapiens; identical to SEQ ID NO: 28736
  REGION 1..451: note = ENSP00000371033

SEQ ID NO: 28739 - protein, 451 aa, Homo sapiens; identical to SEQ ID NO: 28736
  REGION 1..451: note = ENSP00000348897

SEQ ID NO: 28740 - protein, 66 aa, Homo sapiens
  REGION 1..66: note = ENSP00000486333
MKTKLNIYNMQFLLFVFLVWDPARLVLANIQEDEAKNNITIFTRILDRLLDGYDNRLRPGLGGIYN

SEQ ID NO: 28741 - protein, 159 aa, Homo sapiens
  REGION 1..159: note = ENSP00000422642
MKTKLNIYNMQFLLFVFLVWDPARLVLANIQEDEAKNNITIFTRILDRLLDGYDNRLRPGLGDSITEVFTNIYVTSFGPVSDTDMEYTIDVFFRQKWKDERLKFKGPMNILRLNNLMASKIWTPDTFFHNGKKSVAHNMTMPNKLLRIQDDGTLLYTMR

SEQ ID NO: 28742 - protein, 511 aa, Homo sapiens
  REGION 1..511: note = ENSP00000427603
MKTKLNIYNMQFLLFVFLVWDPARLVLANIQEDEAKNNITIFTRILDRLLDGYDNRLRPGLGDSITEVFTNIYVTSFGPVSDTDMEYTIDVFFRQKWKDERLKFKGPMNILRLNNLMASKIWTPDTFFHNGKKSVAHNMTMPNKLLRIQDDGTLLYTMRLTVQAECPMHLEDFPMDAHSCPLKFGSYAYTTSEVTYIWTYNASDSVQVAPDGSRLNQYDLLGQSIGKETIKSSTGEYTVMTAHFHLKRKIGYFVIQTYLPCIMTVILSQVSFWLNRESVPARTVFGVTTVLTMTTLSISARNSLPKVAYATAMDWFIAVCYAFVFSALIEFATVNYFTKRGWAWDGKSVVNDKSPSIKAEGITLTYNSVKAILQGAKLIWSKYIAFSWPSLFQEKTLEYLEKWMDCLTFKQSSKKEKASVMIQNNAYAVAVANYAPNLSKDPVLSTISKSATTPEPNKKPENKPAEAKKTFNSVSKIDRMSRIVFPVLFGTFNLVYWATYLNREPVLGVSP

SEQ ID NO: 28743 - protein, 66 aa, Homo sapiens; identical to SEQ ID NO: 28740
  REGION 1..66: note = ENSP00000421639

SEQ ID NO: 28744 - protein, 367 aa, Homo sapiens
  REGION 1..367: note = ENSP00000423840
MKTKLNIYNMQFLLFVFLVWDPARLVLANIQEDEAKNNITIFTRILDRLLDGYDNRLRPGLGDSITEVFTNIYVTSFGPVSDTDMEYTIDVFFRQKWKDERLKFKGPMNILRLNNLMASKIWTPDTFFHNGKKSVAHNMTMPNKLLRIQDDGTLLYTMRLTVQAECPMHLEDFPMDAHSCPLKFGSYAYTTSEVTYIWTYNASDSVQVAPDGSRLNQYDLLGQSIGKETIKSSTGEYTVMTAHFHLKRKIGYFVIQTYLPCIMTVILSQVSFWLNRESVPARTVFGVTTVLTMTTLSISARNSLPKVAYATAMDWFIAVCYAFVFSALIEFATVNYFTKRGWAWDGKSVVNDKVSESFRVIIIKKIP

SEQ ID NO: 28745 - protein, 56 aa, Homo sapiens
  REGION 1..56: note = ENSP00000425240
SSTGEYTVMTAHFHLKRKIGYFVIQTYLPCIMTVILSQVSFWLNRESVPARTVFGE

SEQ ID NO: 28746 - protein, 66 aa, Homo sapiens; identical to SEQ ID NO: 28740
  REGION 1..66: note = ENSP00000425526

SEQ ID NO: 28747 - protein, 151 aa, Homo sapiens
  REGION 1..151: note = ENSP00000424362
MKTKLNIYNMQFLLFVFLVWDPARLVLANIQEDEAKNNITIFTRILDRLLDGYDNRLRPGLGDSITEVFTNIYVTSFGPVSDTDMEYTIDVFFRQKWKDERLKFKGPMNILRLNNLMASKIWTPDTFFHNGKKSVAHNMTMPNKLLRIQDD

SEQ ID NO: 28748 - protein, 137 aa, Homo sapiens
  REGION 1..137: note = ENSP00000424093
MKTKLNIYNMQFLLFVFLVWDPARLVLANIQEDEAKNNITIFTRILDRLLDGYDNRLRPGLGDSITEVFTNIYVTSFGPVSDTDMEYTIDVFFRQKWKDERLKFKGPMNILRLNNLMASKIWTPDTFFHNGKKSVAH

SEQ ID NO: 28749 - protein, 73 aa, Homo sapiens
  REGION 1..73: note = ENSP00000422805
MKTKLNIYNMQFLLFVFLVWDPARLVLANIQEDEAKNNITIFTRILDRLLDGYDNRLRPGLGVSRVESPVCVT

SEQ ID NO: 28750 - protein, 427 aa, Homo sapiens
  REGION 1..427: note = ENSP00000444409
MEYTIDVFFRQKWKDERLKFKGPMNILRLNNLMASKIWTPDTFFHNGKKSVAHNMTMPNKLLRIQDDGTLLYTMRLTVQAECPMHLEDFPMDAHSCPLKFGSYAYTTSEVTYIWTYNASDSVQVAPDGSRLNQYDLLGQSIGKETIKSSTGEYTVMTAHFHLKRKIGYFVIQTYLPCIMTVILSQVSFWLNRESVPARTVFGVTTVLTMTTLSISARNSLPKVAYATAMDWFIAVCYAFVFSALIEFATVNYFTKRGWAWDGKSVVNDKSPSIKAEGITLTYNSVKAILQGAKLIWSKYIAFSWPSLFQEKTLEYLEKWMDCLTFKQSSKKEKASVMIQNNAYAVAVANYAPNLSKDPVLSTISKSATTPEPNKKPENKPAEAKKTFNSVSKIDRMSRIVFPVLFGTFNLVYWATYLNREPVLGVSP

SEQ ID NO: 28751 - protein, 554 aa, Homo sapiens [sequence omitted]

SEQ ID NO: 28752 - protein, 36 aa, Homo sapiens
  REGION 1..36: note = ENSP00000422152
MVSAKKFKRIPRTEPKGGEIVHRKFHPHPGQFARWL

SEQ ID NO: 28753 - protein, 36 aa, Homo sapiens; identical to SEQ ID NO: 28752
  REGION 1..36: note = ENSP00000425445

SEQ ID NO: 28754 - protein, 36 aa, Homo sapiens
  REGION 1..36: note = ENSP00000424386
MVSAKKVPAIALSAGVSFALLRFLCLAVWSCYRSEN

SEQ ID NO: 28755 - protein, 453 aa, Homo sapiens
  REGION 1..453: note = ENSP00000274545
MASSLPWLCIILWLENALGKLEVEGNFYSENVSRILDNLLEGYDNRLRPGFGGAVTEVKTDIYVTSFGPVSDVEMEYTMDVFFRQTWTDERLKFGGPTEILSLNNLMVSKIWTPDTFFRNGKKSIAHNMTTPNKLFRIMQNGTILYTMRLTINADCPMRLVNFPMDGHACPLKFGSYAYPKSEIIYTWKKGPLYSVEVPEESSSLLQYDLIGQTVSSETIKSNTGEYVIMTVYFHLQRKMGYFMIQIYTPCIMTVILSQVSFWINKESVPARTVFGITTVLTMTTLSISARHSLPKVSYATAMDWFIAVCFAFVFSALIEFAAVNYFTNLQTQKAKRKAQFAAPPTVTISKATEPLEAEIVLHPDSKYHLKKRITSLSLPIVSSSEANKVLTRAPILQSTPVTPPPLSPAFGGTSKIDQYSRILFPVAFAGFNLVYWVVYLSKDTMEVSSSVE

SEQ ID NO: 28756 - protein, 443 aa, Homo sapiens
  REGION 1..443: note = ENSP00000430527
MASSLPWLCIILWLENALGKLEVEGNFYSENVSRILDNLLEGYDNRLRPGFGGAVTEVKTDIYVTSFGPVSDVEMTWTDERLKFGGPTEILSLNNLMVSKIWTPDTFFRNGKKSIAHNMTTPNKLFRIMQNGTILYTMRLTINADCPMRLVNFPMDGHACPLKFGSYAYPKSEIIYTWKKGPLYSVEVPEESSSLLQYDLIGQTVSSETIKSNTGEYVIMTVYFHLQRKMGYFMIQIYTPCIMTVILSQVSFWINKESVPARTVFGITTVLTMTTLSISARHSLPKVSYATAMDWFIAVCFAFVFSALIEFAAVNYFTNLQTQKAKRKAQFAAPPTVTISKATEPLEAEIVLHPDSKYHLKKRITSLSLPIVSSSEANKVLTRAPILQSTPVTPPPLSPAFGGTSKIDQYSRILFPVAFAGFNLVYWVVYLSKDTMEVSSSVE

SEQ ID NO: 28757 - protein, 197 aa, Homo sapiens
  REGION 1..197: note = ENSP00000429943
  VARIANT 1: note = Any amino acid
XIEDGPVGVLGTLFQEYTMDVFFRQTWTDERLKFGGPTEILSLNNLMVSKIWTPDTFFRNGKKSIAHNMTTPNKLFRIMQNGTILYTMRLTINADCPMRLVNFPMDGHACPLKFGSYAYPKSEIIYTWKKGPLYSVEVPEESSSLLQYDLIGQTVSSETIKSNTGEYVIMTVYFHLQRKMGYFMIQIYTPCIMTVIL

SEQ ID NO: 28758 - protein, 185 aa, Homo sapiens
  REGION 1..185: note = ENSP00000430212
SRCSGDSVPGTDGCSIHKRVFIEYTMDVFFRQTWTDERLKFGGPTEILSLNNLMVSKIWTPDTFFRNGKKSIAHNMTTPNKLFRIMQNGTILYTMRLTINADCPMRLVNFPMDGHACPLKFGSYAYPKSEIIYTWKKGPLYSVEVPEESSSLLQYDLIGQTVSSETIKSNTGEYVIMTVYFHLQR

SEQ ID NO: 28759 - protein, 191 aa, Homo sapiens
  REGION 1..191: note = ENSP00000427989
LMVSKIWTPDTFFRNGKKSIAHNMTTPNKLFRIMQNGTILYTMRLTINADCPMRLVNFPMDGHACPLKFGSYNVHFEGKKDNSSNSLLYLICFKYLDAYPKSEIIYTWKKGPLYSVEVPEESSSLLQYDLIGQTVSSETIKSNTGEYVIMTVYFHLQRKMGYFMIQIYTPCIMTVILSQVSFWINKESVPA

SEQ ID NO: 28760 - protein, 117 aa, Homo sapiens
  REGION 1..117: note = ENSP00000426753
MSYVKETVDRLLKGYDIRLRPDFGGPPVDVGMRIDVASIDMVSEVNMDYTLTMYFQQSWKDKRLSYSGIPLNLTLDNRVADQLWVPDTYFLNDKKSFVHGVTVKNRMIRLHPDGTVL

SEQ ID NO: 28761 - protein, 474 aa, Homo sapiens
  REGION 1..474: note = ENSP00000295454
MWTVQNRESLGLLSFPVMITMVCCAHSTNEPSNMSYVKETVDRLLKGYDIRLRPDFGGPPVDVGMRIDVASIDMVSEVNMDYTLTMYFQQSWKDKRLSYSGIPLNLTLDNRVADQLWVPDTYFLNDKKSFVHGVTVKNRMIRLHPDGTVLYGLRITTTAACMMDLRRYPLDEQNCTLEIESYGYTTDDIEFYWNGGEGAVTGVNKIELPQFSIVDYKMVSKKVEFTTGAYPRLSLSFRLKRNIGYFILQTYMPSTLITILSWVSFWINYDASAARVALGITTVLTMTTISTHLRETLPKIPYVKAIDIYLMGCFVFVFLALLEYAFVNYIFFGKGPQKKGASKQDQSANEKNKLEMNKVQVDAHGNILLSTLEIRNETSGSEVLTSVSDPKATMYSYDSASIQYRKPLSSREAYGRALDRHGVPSKGRIRRRASQLKVKIPDLTDVNSIDKWSRMFFPITFSLFNVVYWLYYVH

SEQ ID NO: 28762 - protein, 87 aa, Homo sapiens
  REGION 1..87: note = ENSP00000426766
MWTVQNRESLGLLSFPVMITMVCCAHSTNEPSNMSYVKETVDRLLKGYDIRLRPDFGGLYTHHVFPAVLERQKAFLFWNPTEPHPRQ

SEQ ID NO: 28763 - protein, 452 aa, Homo sapiens [sequence omitted]

SEQ ID NO: 28764 - protein, 395 aa, Homo sapiens
  REGION 1..395: note = ENSP00000491632
MDAPARLLAPLLLLCAQQLRGTRAMNDIGDYVGSNLEISWLPNLDGLIAGYARNFRPGIGGPPVNVALALEVASIDHISEANMVGATSLCLRHGVHHDGVPAPELAGQQALLQPHQRDPGSGQPLRGQAVAARHLHRERQVGLVPRRDGGEQAHPAAARRRDPVQHPNHLHCGLRHGPGQIPHGRAGVHAGPGELRLLIGGHRLLLVGEPGAHPRAGQAAAGAVHHHQLPLHHGADELQVRWPVPTAQPALPPAEEPRRVHHPILHALRPAGRHVLGLLLDQPGGGARQGVSRHHHGADDDHAHGQCPLLPATGISHQGTGRLLLDLLCLRVCRPGGVRLCSFQRRLQEEAEGQGQGLQAEGRDGREERHCPLLPLCCRRHAGAGHLPPAAPRPG

SEQ ID NO: 28765 - protein, 35 aa, Homo sapiens
  REGION 1..35: note = ENSP00000491997
MDAPARLLAPLLLLCAQQLRGTRRTGMTITTNWTA

SEQ ID NO: 28766 - protein, 480 aa, Homo sapiens
  REGION 1..480: note = ENSP00000491844
MDAPARLLAPLLLLCAQQLRGTRAMNDIGDYVGSNLEISWLPNLDGLIAGYARNFRPGIGGPPVNVALALEVASIDHISEANMEYTMTVFLHQSWRDSRLSYNHTNETLGLDSRFVDKLWLPDTFIVNAKSAWFHDVTVENKLIRLQPDGVILYSIRITSTVACDMDLAKYPMDEQECMLDLESCFLCGRSAPARAPGAGPGSAAHLCAFPPDGYSSEDIVYYWSESQEHIHGLDKLQLAQFTITSYRFTTELMNFKSAGQFPRLSLHFHLRRNRGVYIIQSYMPSVLLVAMSWVSFWISQAAVPARVSLGITTVLTMTTLMVSARSSLPRASAIKALDVYFWICYVFVFAALVEYAFAHFNADYRKKQKAKVKVSRPRAEMDVRNAIVLFSLSAAGVTQELAISRRQRRVPGNLMGSYRSVGVETGETKKEGAARSGGQGGIRARLRPIDADTIDIYARAVFPAAFAAVNVIYWAAYAM

SEQ ID NO: 28767 - protein, 500 aa, Homo sapiens
  REGION 1..500: note = ENSP00000492435
MDAPARLLAPLLLLCAQQLRGTRAMNDIGDYVGSNLEISWLPNLDGLIAGYARNFRPGIGGPPVNVALALEVASIDHISEANMEYTMTVFLHQSWRDSRLSYNHTNETLGLDSRFVDKLWLPDTFIVNAKSAWFHDVTVENKLIRLQPDGVILYSIRITSTVACDMDLAKYPMDEQECMLDLESYGYSSEDIVYYWSESQEHIHGLDKLQLAQFTITSYRFTTELMNFKSAGQFPRLSLHFHLRRNRGVYIIQSYMPSVLLVAMSWVSFWISQAAVPARVSLGITTVLTMTTLMVSARSSLPRASAIKALDVYFWICYVFVFAALVEYAFAHFNADYRKKQKAKVKVSRPRAEVRAWGRARDSTAGGPNQDPSAAPAHCGSQLCSLSVGGWSCWSRRGPRMGTPVVQGPGSCTPVLSPVSPTGLRADGREERHCPLLPLCCRRHAGAGHLPPAAPRPGEPDGLLQVGGGGDRGDEEGGGSPLRRPGGHPCPAQAHRRRHH

SEQ ID NO: 28768 - protein, 429 aa, Homo sapiens
  REGION 1..429: note = ENSP00000492500
MDAPARLLAPLLLLCAQQLRGTRAMNDIGDYVGSNLEISWLPNLDGLIAGYARNFRPGIGGPPVNVALALEVASIDHISEANMEYTMTVFLHQSWRDSRLSYNHTNETLGLDSRFVDKLWLPDTFIVNAKSAWFHDVTVENKLIRLQPDGVILYSIRITSTVACDMDLAKYPMDEQECMLDLESYGYSSEDIVYYWSESQEHIHGLDKLQLAQFTITSYRFTTELMNFKSAGQFPRLSLHFHLRRNRGVYIIQSYMPSVLLVAMSWVSFWISQAAVPARVSLAIKALDVYFWICYVFVFAALVEYAFAHFNADYRKKQKAKVKVSRPRAEMDVRNAIVLFSLSAAGVTQELAISRRQRRVPGNLMGSYRSVGVETGETKKEGAARSGGQGGIRARLRPIDADTIDIYARAVFPAAFAAVNVIYWAAYAM

SEQ ID NO: 28769 - protein, 380 aa, Homo sapiens
  REGION 1..380: note = ENSP00000491411
GTRAMNDIGDYVGSNLEISWLPNLDGLIAGYARNFRPGIGGPPVNVALALEVASIDHISEANMEYTMTVFLHQSWRDSRLSYNHTNETLGLDSRFVDKLWLPDTFIVNAKSAWFHDVTVENKLIRLQPDGVILYSIRITSTVACDMDLAKYPMDEQECMLDLESYGYSSEDIVYYWSESQEHIHGLDKLQLAQFTITSYRFTTELMNFKSGITTVLTMTTLMVSARSSLPRASAIKALDVYFWICYVFVFAALVEYAFAHFNADYRKKQKAKVKVSRPRAEMDVRNAIVLFSLSAAGVTQELAISRRQRRVPGNLMGSYRSVGVETGETKKEGAARSGGQGGIRARLRPIDADTIDIYARAVFPAAFAAVNVIYWAAYAM

SEQ ID NO: 28770 - protein, 320 aa, Homo sapiens
  REGION 1..320: note = ENSP00000491287
  VARIANT 1: note = Any amino acid
XVALALEVASIDHISEANMEYTMTVFLHQSWRDSRLSYNHTNETLGLDSRFVDKLWLPDTFIVNAKSAWFHDVTVENKLIRLQPDGVILYSIRITSTVACDMDLAKYPMDEQECMLDLESYGYSSEDIVYYWSESQEHIHGLDKLQLAQFTITSYRFTTELMNFKSAGQFPRLSLHFHLRRNRGVYIIQSYMPSVLLVAMSWVSFWISQAAVPARVSLGTGPRRCSEGAGRAALGNRTPHPSAGGSALASGPCQLSWGSGQPGQARHHHGADDDHAHGQCPLLPATGISHQGTGRLLLDLLCLRVCRPGGVRLCSFQRRL

SEQ ID NO: 28771 - protein, 168 aa, Homo sapiens
  REGION 1..168: note = ENSP00000492352
  VARIANT 1: note = Any amino acid
XMTVFLHQSWRDSRLSYNHTNETLGLDSRFVDKLWLPDTFIVNAKSAWFHDVTVENKLIRLQPDGVILYSIRITSTVACDMDLAKYPMDEQECMLDLESYGYSSEDIVYYWSESQEHIHGLDKLQLAQFTITSYRFTTELMNFNWPVPTAQPALPPAEEPRRVHHPIL

SEQ ID NO: 28772 - protein, 168 aa, Homo sapiens
  REGION 1..168: note = ENSP00000491871
EQECMLDLESYGYSSEDIVYYWSESQEHIHGLDKLQLAQFTITSYRFTTELMNFKSAGQFPRLSLHFHLRRNRGVYIIQSYMPSVLLVAMSWVSFWISQAAVPARVSLVPAPPCHGHQPSRHWTSTSGSAMSSCLPPWWSTPLLISTPTTGRSRRPRSRSPGRGQRWT

SEQ ID NO: 28773 - protein, 397 aa, Homo sapiens
  REGION 1..397: note = ENSP00000491958
VWILLLLSLYPGFTSQKSDDDYEDYASNKTWVLTPKVPEGDVTVILNNLLEGYDNKLRPDIGVKPTLIHTDMYVNSIGPVNAINMEYTIDIFFAQTWYDRRLKFNSTIKVLRLNSNMVGKIWIPDTFFRNSKKADAHWITTPNRMLRIWNDGRVLYTLRLTIDAECQLQLHNFPMDEHSCPLEFSSYGYPREEIVYQWKRSSVEVGDTRSWRLYQFSFVGLRNTTEVVKTTSGDYVVMSVYFDLSRRMGYFTIQTYIPCTLIVVLSWVSFWINKDAVPARTSLGITTVLTMTTLSTIARKSLPKVSYVTAMDLFVSVCFIFVFSALVEYGTLHYFVSNRKPSKDKDKKKKNPKVVLLRVGILPASYNKDMRTGFQTSSDESFGKSPLALSVSYAIAE

SEQ ID NO: 28774 - protein, 380 aa, Homo sapiens
  REGION 1..380: note = ENSP00000492869
MYVNSIGPVNAINMEYTIDIFFAQTWYDRRLKFNSTIKVLRLNSNMVGKIWIPDTFFRNSKKADAHWITTPNRMLRIWNDGRVLYTLRLTIDAECQLQLHNFPMDEHSCPLEFSSYGYPREEIVYQWKRSSVEVGDTRSWRLYQFSFVGLRNTTEVVKTTSGDYVVMSVYFDLSRRMGYFTIQTYIPCTLIVVLSWVSFWINKDAVPARTSLGITTVLTMTTLSTIARKSLPKVSYVTAMDLFVSVCFIFVFSALVEYGTLHYFVSNRKPSKDKDKKKKNPLLRMFSFKAPTIDIRPRSATIQMNNATHLQERDEEYGYECLDGKDCASFFCCFEDCRTGAWRHGRIHIRIAKMDSYARIFFPTAFCLFNLVYWVSYLYL

SEQ ID NO: 28775 - protein, 372 aa, Homo sapiens
  REGION 1..372: note = ENSP00000491763
MYVNSIGPVNAINMEYTIDIFFAQTWYDRRLKFNSTIKVLRLNSNMVGKIWIPDTFFRNSKKADAHWITTPNRMLRIWNDGRVLYTLRLTIDAECQLQLHNFPMDEHSCPLEFSSYGYPREEIVYQWKRSSVEVGDTRSWRLYQFSFVGLRNTTEVVKTTSGDYVVMSVYFDLSRRMGYFTIQTYIPCTLIVVLSWVSFWINKDAVPARTSLGITTVLTMTTLSTIARKSLPKVSYVTAMDLFVSVCFIFVFSALVEYGTLHYFVSNRKPSKDKDKKKKNPAPTIDIRPRSATIQMNNATHLQERDEEYGYECLDGKDCASFFCCFEDCRTGAWRHGRIHIRIAKMDSYARIFFPTAFCLFNLVYWVSYLYL

SEQ ID NO: 28776 - protein, 290 aa, Homo sapiens
  REGION 1..290: note = ENSP00000491582
MYVNSIGPVNAINMEYTIDIFFAQTWYDRRLKFNSTIKVLRLNSNMVGKIWIPDTFFRNSKKADAHWITTPNRMLRIWNDGRVLYTLRLTIDAECQLQLHNFPMDEHSCPLEFSSYGYPREEIVYQWKRSSVEVGDTRSWRLYQFSFVGLRNTTEVVKTTSGDYVVMSVYFDLSRRMGYFTIQTYIPCTLIVVLSWVSFWINKDAVPARTSLGITTVLTMTTLSTIARKSLPKVSYVTAMDLFVSVCFIFVFSALVEYGTLHYFVSNRKPSKDKDKKKKNPVCIIFHWHH

SEQ ID NO: 28777 - protein, 475 aa, Homo sapiens
  REGION 1..475: note = ENSP00000492125
MSSPNIWSTGSSVYSTPVFSQKMTVWILLLLSLYPGFTSQKSDDDYEDYASNKTWVLTPKVPEGDVTVILNNLLEGYDNKLRPDIGVKPTLIHTDMYVNSIGPVNAINMEYTIDIFFAQTWYDRRLKFNSTIKVLRLNSNMVGKIWIPDTFFRNSKKADAHWITTPNRMLRIWNDGRVLYTLRLTIDAECQLQLHNFPMDEHSCPLEFSSYGYPREEIVYQWKRSSVEVGDTRSWRLYQFSFVGLRNTTEVVKTTSGDYVVMSVYFDLSRRMGYFTIQTYIPCTLIVVLSWVSFWINKDAVPARTSLGITTVLTMTTLSTIARKSLPKVSYVTAMDLFVSVCFIFVFSALVEYGTLHYFVSNRKPSKDKDKKKKNPLLRMFSFKAPTIDIRPRSATIQMNNATHLQERDEEYGYECLDGKDCASFFCCFEDCRTGAWRHGRIHIRIAKMDSYARIFFPTAFCLFNLVYWVSYLYL

SEQ ID NO: 28778 - protein, 445 aa, Homo sapiens
  REGION 1..445: note = ENSP00000492096
MTVWILLLLSLYPGFTSQKSDDDYEDYASNKTWVLTPKVPEGDVTVILNNLLEGYDNKLRPDIGVKPTLIHTDMYVNSIGPVNAINMEYTIDIFFAQTWYDRRLKFNSTIKVLRLNSNMVGKIWIPDTFFRNSKKADAHWITTPNRMLRIWNDGRVLYTLRLTIDAECQLQLHNFPMDEHSCPLEFSSYGYPREEIVYQWKRSSVEVGDTRSWRLYQFSFVGLRNTTEVVKTTSGDYVVMSVYFDLSRRMGYFTIQTYIPCTLIVVLSWVSFWINKDAVPARTSLGITTVLTMTTLSTIARKSLPKVSYVTAMDLFVSVCFIFVFSALVEYGTLHYFVSNRKPSKDKDKKKKNPAPTIDIRPRSATIQMNNATHLQERDEEYGYECLDGKDCASFFCCFEDCRTGAWRHGRIHIRIAKMDSYARIFFPTAFCLFNLVYWVSYLYL

SEQ ID NO: 28779 - protein, 467 aa, Homo sapiens
  REGION 1..467: note = ENSP00000491909
MSSPNIWSTGSSVYSTPVFSQKMTVWILLLLSLYPGFTSQKSDDDYEDYASNKTWVLTPKVPEGDVTVILNNLLEGYDNKLRPDIGVKPTLIHTDMYVNSIGPVNAINMEYTIDIFFAQTWYDRRLKFNSTIKVLRLNSNMVGKIWIPDTFFRNSKKADAHWITTPNRMLRIWNDGRVLYTLRLTIDAECQLQLHNFPMDEHSCPLEFSSYGYPREEIVYQWKRSSVEVGDTRSWRLYQFSFVGLRNTTEVVKTTSGDYVVMSVYFDLSRRMGYFTIQTYIPCTLIVVLSWVSFWINKDAVPARTSLGITTVLTMTTLSTIARKSLPKVSYVTAMDLFVSVCFIFVFSALVEYGTLHYFVSNRKPSKDKDKKKKNPAPTIDIRPRSATIQMNNATHLQERDEEYGYECLDGKDCASFFCCFEDCRTGAWRHGRIHIRIAKMDSYARIFFPTAFCLFNLVYWVSYLYL

SEQ ID NO: 28780 - protein, 453 aa, Homo sapiens
  REGION 1..453: note = ENSP00000492581
MTVWILLLLSLYPGFTSQKSDDDYEDYASNKTWVLTPKVPEGDVTVILNNLLEGYDNKLRPDIGVKPTLIHTDMYVNSIGPVNAINMEYTIDIFFAQTWYDRRLKFNSTIKVLRLNSNMVGKIWIPDTFFRNSKKADAHWITTPNRMLRIWNDGRVLYTLRLTIDAECQLQLHNFPMDEHSCPLEFSSYGYPREEIVYQWKRSSVEVGDTRSWRLYQFSFVGLRNTTEVVKTTSGDYVVMSVYFDLSRRMGYFTIQTYIPCTLIVVLSWVSFWINKDAVPARTSLGITTVLTMTTLSTIARKSLPKVSYVTAMDLFVSVCFIFVFSALVEYGTLHYFVSNRKPSKDKDKKKKNPLLRMFSFKAPTIDIRPRSATIQMNNATHLQERDEEYGYECLDGKDCASFFCCFEDCRTGAWRHGRIHIRIAKMDSYARIFFPTAFCLFNLVYWVSYLYL

SEQ ID NO: 28781 - protein, 385 aa, Homo sapiens
  REGION 1..385: note = ENSP00000491240
MSSPNIWSTGSSVYSTPVFSQKMTVWILLLLSLYPGFTSQKSDDDYEDYASNKTWVLTPKVPEGDVTVILNNLLEGYDNKLRPDIGVKPTLIHTDMYVNSIGPVNAINMEYTIDIFFAQTWYDRRLKFNSTIKVLRLNSNMVGKIWIPDTFFRNSKKADAHWITTPNRMLRIWNDGRVLYTLRLTIDAECQLQLHNFPMDEHSCPLEFSSYGYPREEIVYQWKRSSVEVGDTRSWRLYQFSFVGLRNTTEVVKTTSGDYVVMSVYFDLSRRMGYFTIQTYIPCTLIVVLSWVSFWINKDAVPARTSLGITTVLTMTTLSTIARKSLPKVSYVTAMDLFVSVCFIFVFSALVEYGTLHYFVSNRKPSKDKDKKKKNPLLRMFSFKV

SEQ ID NO: 28782 - protein, 446 aa, Homo sapiens
  REGION 1..446: note = ENSP00000492293
MDPGENAFTSQKSDDDYEDYASNKTWVLTPKVPEGDVTVILNNLLEGYDNKLRPDIGVKPTLIHTDMYVNSIGPVNAINMEYTIDIFFAQTWYDRRLKFNSTIKVLRLNSNMVGKIWIPDTFFRNSKKADAHWITTPNRMLRIWNDGRVLYTLRLTIDAECQLQLHNFPMDEHSCPLEFSSYGYPREEIVYQWKRSSVEVGDTRSWRLYQFSFVGLRNTTEVVKTTSGDYVVMSVYFDLSRRMGYFTIQTYIPCTLIVVLSWVSFWINKDAVPARTSLGITTVLTMTTLSTIARKSLPKVSYVTAMDLFVSVCFIFVFSALVEYGTLHYFVSNRKPSKDKDKKKKNPLLRMFSFKAPTIDIRPRSATIQMNNATHLQERDEEYGYECLDGKDCASFFCCFEDCRTGAWRHGRIHIRIAKMDSYARIFFPTAFCLFNLVYWVSYLYL

SEQ ID NO: 28783 - protein, 385 aa, Homo sapiens
  REGION 1..385: note = ENSP00000491557
MSSPNIWSTGSSVYSTPVFSQKMTVWILLLLSLYPGFTSQKSDDDYEDYASNKTWVLTPKVPEGDVTVILNNLLEGYDNKLRPDIGVKPTLIHTDMYVNSIGPVNAINMEYTIDIFFAQTWYDRRLKFNSTIKVLRLNSNMVGKIWIPDTFFRNSKKADAHWITTPNRMLRIWNDGRVLYTLRLTIDAECQLQLHNFPMDEHSCPLEFSSYGYPREEIVYQWKRSSVEVGDTRSWRLYQFSFVGLRNTTEVVKTTSGDYVVMSVYFDLSRRMGYFTIQTYIPCTLIVVLSWVSFWINKDAVPARTSLGITTVLTMTTLSTIARKSLPKVSYVTAMDLFVSVCFIFVFSALVEYGTLHYFVSNRKPSKDKDKKKKNPVCIIFHWHH

SEQ ID NO: 28784 - protein, 45 aa, Homo sapiens
  REGION 1..45: note = ENSP00000491245
MSSPNIWSTGSSVYSTPVFSQKMTVWILLLLSLYPGRLCGHVCLL

SEQ ID NO: 28785 - protein, 515 aa, Homo sapiens
  REGION 1..515: note = ENSP00000410732
MSSPNIWSTGSSVYSTPVFSQKMTVWILLLLSLYPGFTSQKSDDDYEDYASNKTWVLTPKVPEGDVTVILNNLLEGYDNKLRPDIGVKPTLIHTDMYVNSIGPVNAINMEYTIDIFFAQTWYDRRLKFNSTIKVLRLNSNMVGKIWIPDTFFRNSKKADAHWITTPNRMLRIWNDGRVLYTLRLTIDAECQLQLHNFPMDEHSCPLEFSSWSRSIAQAGMCSGVISAHYSLRFWGSTDPPTLASRVAGISDGYPREEIVYQWKRSSVEVGDTRSWRLYQFSFVGLRNTTEVVKTTSGDYVVMSVYFDLSRRMGYFTIQTYIPCTLIVVLSWVSFWINKDAVPARTSLGITTVLTMTTLSTIARKSLPKVSYVTAMDLFVSVCFIFVFSALVEYGTLHYFVSNRKPSKDKDKKKKNPLLRMFSFKAPTIDIRPRSATIQMNNATHLQERDEEYGYECLDGKDCASFFCCFEDCRTGAWRHGRIHIRIAKMDSYARIFFPTAFCLFNLVYWVSYLYL

SEQ ID NO: 28786 - protein, 111 aa, Homo sapiens
  REGION 1..111: note = ENSP00000430732
MSSPNIWSTGSSVYSTPVFSQKMTVWILLLLSLYPGFTSQKSDDDYEDYASNKTWVLTPKVPEGDVTVILNNLLEGYDNKLRPDIGVKPTLIHTDMYVNSIGPVNAINMHH

SEQ ID NO: 28787 - protein, 507 aa, Homo sapiens
  REGION 1..507: note = ENSP00000354651
MSSPNIWSTGSSVYSTPVFSQKMTVWILLLLSLYPGFTSQKSDDDYEDYASNKTWVLTPKVPEGDVTVILNNLLEGYDNKLRPDIGVKPTLIHTDMYVNSIGPVNAINMEYTIDIFFAQTWYDRRLKFNSTIKVLRLNSNMVGKIWIPDTFFRNSKKADAHWITTPNRMLRIWNDGRVLYTLRLTIDAECQLQLHNFPMDEHSCPLEFSSWSRSIAQAGMCSGVISAHYSLRFWGSTDPPTLASRVAGISDGYPREEIVYQWKRSSVEVGDTRSWRLYQFSFVGLRNTTEVVKTTSGDYVVMSVYFDLSRRMGYFTIQTYIPCTLIVVLSWVSFWINKDAVPARTSLGITTVLTMTTLSTIARKSLPKVSYVTAMDLFVSVCFIFVFSALVEYGTLHYFVSNRKPSKDKDKKKKNPAPTIDIRPRSATIQMNNATHLQERDEEYGYECLDGKDCASFFCCFEDCRTGAWRHGRIHIRIAKMDSYARIFFPTAFCLFNLVYWVSYLYL

SEQ ID NO: 28788 - protein, 498 aa, Homo sapiens
  REGION 1..498: note = ENSP00000493461
MSSPNIWSTGSSVYSTPVFSQKMTVWILLLLSLYPGFTSQKSDDDYEDYASNKTWVLTPKVPEGDVTVILNNLLEGYDNKLRPDIGVKPTLIHTDMYVNSIGPVNAINMEYTIDIFFAQTWYDRRLKFNSTIKVLRLNSNMVGKIWIPDTFFRNSKKADAHWITTPNRMLRIWNDGRVLYTLRLTIDAECQLQLHNFPMDEHSCPLEFSSYGYPREEIVYQWKRSSVEVGDTRSWRLYQFSFVGLRNTTEVVKTTSGDYVVMSVYFDLSRRMGYFTIQTYIPCTLIVVLSWVSFWINKDAVPARTSLGITTVLTMTTLSTIARKSLPKVSYVTAMDLFVSVCFIFVFSALVEYGTLHYFVSNRKPSKDKDKKKKNPIHHHIGDIVEKQPRISREQLTDPSPSLPSSQAPTIDIRPRSATIQMNNATHLQERDEEYGYECLDGKDCASFFCCFEDCRTGAWRHGRIHIRIAKMDSYARIFFPTAFCLFNLVYWVSYLYL

SEQ ID NO: 28789 - protein, 28 aa, Homo sapiens
  REGION 1..28: note = ENSP00000492545
  VARIANT 1: note = Any amino acid
XYSTPVFSQKMTVWILLLLSLYPGWLST

SEQ ID NO: 28790 - protein, 39 aa, Homo sapiens
  REGION 1..39: note = ENSP00000430124
  VARIANT 1: note = Any amino acid
XYSTPVFSQKMTVWILLLLSLYPGRKLSSYPHKLRFENE

SEQ ID NO: 28791 - protein, 476 aa, Homo sapiens
  REGION 1..476: note = ENSP00000349000
  VARIANT 1: note = Any amino acid
XYSTPVFSQKMTVWILLLLSLYPGFTSQKSDDDYEDYASNKTWVLTPKVPEGDVTVILNNLLEGYDNKLRPDIGVKPTLIHTDMYVNSIGPVNAINMEYTIDIFFAQTWYDRRLKFNSTIKVLRLNSNMVGKIWIPDTFFRNSKKADAHWITTPNRMLRIWNDGRVLYTLRLTIDAECQLQLHNFPMDEHSCPLEFSSYGYPREEIVYQWKRSSVEVGDTRSWRLYQFSFVGLRNTTEVVKTTSEDKLHEILVNLTLGDYVVMSVYFDLSRRMGYFTIQTYIPCTLIVVLSWVSFWINKDAVPARTSLGITTVLTMTTLSTIARKSLPKVSYVTAMDLFVSVCFIFVFSALVEYGTLHYFVSNRKPSKDKDKKKKNPLLRMFSFKAPTIDIRPRSATIQMNNATHLQERDEEYGYECLDGKDCASFFCCFEDCRTGAWRHGRIHIRIAKMDSYARIFFPTAFCLFNLVYWVSYLYL

SEQ ID NO: 28792 - protein, 91 aa, Homo sapiens
  REGION 1..91: note = ENSP00000491621
  VARIANT 1: note = Any amino acid
XKMTVWILLLLSLYPGFTSQKSDDDYEDYASNKTWVLTPKVPEGDVTVILNNLLEGYDNKLRPDIGVKPTLIHTDMYVNSIGPVNAINMHH

SEQ ID NO: 28793 - protein, 264 aa, Homo sapiens
  REGION 1..264: note = ENSP00000492659
MDYDLHKDGYPREEIVYQWKRSSVEVGDTRSWRLYQFSFVGLRNTTEVVKTTSGDYVVMSVYFDLSRRMGYFTIQTYIPCTLIVVLSWVSFWINKDAVPARTSLGITTVLTMTTLSTIARKSLPKVSYVTAMDLFVSVCFIFVFSALVEYGTLHYFVSNRKPSKDKDKKKKNPAPTIDIRPRSATIQMNNATHLQERDEEYGYECLDGKDCASFFCCFEDCRTGAWRHGRIHIRIAKMDSYARIFFPTAFCLFNLVYWVSYLYL

SEQ ID NO: 28794 - protein, 119 aa, Homo sapiens
  REGION 1..119: note = ENSP00000492329
MNPVPQMEMQKSPVFCVAQAGSCRPELFIFRHLGSSPRFTSQKSDDDYEDYASNKTWVLTPKVPEGDVTVILNNLLEGYDNKLRPDIGVKPTLIHTDMYVNSIGPVNAINMEYTIDIFF

SEQ ID NO: 28795 - protein, 467 aa, Homo sapiens
  REGION 1..467: note = ENSP00000479113
MAPKLLLLLCLFSGLHARSRKVEEDEYEDSSSNQKWVLAPKSQDTDVTLILNKLLREYDKKLRPDIGIKPTVIDVDIYVNSIGPVSSINMEYQIDIFFAQTWTDSRLRFNSTMKILTLNSNMVGLIWIPDTIFRNSKTAEAHWITTPNQLLRIWNDGKILYTLRLTINAECQLQLHNFPMDEHSCPLIFSSYGYPKEEMIYRWRKNSVEAADQKSWRLYQFDFMGLRNTTEIVTTSAGDYVVMTIYFELSRRMGYFTIQTYIPCILTVVLSWVSFWIKKDATPARTALGITTVLTMTTLSTIARKSLPRVSYVTAMDLFVTVCFLFVFAALMEYATLNYYSSCRKPTTTKKTTSLLHPDSSRWIPERISLQAPSNYSLLDMRPPPTAMITLNNSVYWQEFEDTCVYECLDGKDCQSFFCCYEECKSGSWRKGRIHIDILELDSYSRVFFPTSFLLFNLVYWVGYLYL

SEQ ID NO: 28796 - protein, 253 aa, Homo sapiens
  REGION 1..253: note = ENSP00000452244
MAPKLLLLLCLFSGLHARSRKVEEDEYEDSSSNQKWVLAPKSQDTDVTLILNKLLREYDKKLRPDIGIKPTVIDVDIYVNSIGPVSSINMEYQIDIFFAQTWTDSRLRFNSTMKILTLNSNMVGLIWIPDTIFRNSKTAEAHWITTPNQLLRIWNDGKILYTLRLTINAECQLQLHNFPMDEHSCPLIFSSYGYPKEEMIYRWRKNSVEAADQKSWRLYQFDFMGLRNTTEIVTTSAGRNLLKEAQLSKAREA

SEQ ID NO: 28797 - protein, 258 aa, Homo sapiens
  REGION 1..258: note = ENSP00000451862
EAGVRGTEEDGCWVCNLESVSQSQTWQENKLSEYQIDIFFAQTWTDSRLRFNSTMKILTLNSNMVGLIWIPDTIFRNSKTAEAHWITTPNQLLRIWNDGKILYTLRLTINAECQLQLHNFPMDEHSCPLIFSSYGYPKEEMIYRWRKNSVEAADQKSWRLYQFDFMGLRNTTEIVTTSAGDYVVMTIYFELSRRMGYFTIQTYIPCILTVVLSWVSFWIKKDATPARTALGITTVLTMTTLSTIARKSLPRVSYVTAM

SEQ ID NO: 28798 - protein, 38 aa, Homo sapiens
  REGION 1..38: note = ENSP00000450976
  VARIANT 1: note = Any amino acid
XAECQLQLHNFPMDEHSCPLIFSSSTILAFRLSLHAYR

SEQ ID NO: 28799 - protein, 169 aa, Homo sapiens
  REGION 1..169: note = ENSP00000390708
  VARIANT 1: note = Any amino acid
XDYVVMTIYFELSRRMGYFTIQTYIPCILTVVLSWVSFWIKKDATPARTALGITTVLTMTTLSTIARKSLPRVSYVTAMDLFVTVCFLFVFAALMEYATLNYYSSCRKPTTTKKTTSLLHPDSSRWIPERISLQAPSKPSCCPACGLQGLPFRSLVSHPRISRAFCLPV

SEQ ID NO: 28800 - protein, 288 aa, Homo sapiens
  REGION 1..288: note = ENSP00000331912
MDEHSCPLIFSSYGYPKEEMIYRWRKNSVEAADQKSWRLYQFDFMGLRNTTEIVTTSAGDYVVMTIYFELSRRMGYFTIQTYIPCILTVVLSWVSFWIKKDATPARTALGITTVLTMTTLSTIARKSLPRVSYVTAMDLFVTVCFLFVFAALMEYATLNYYSSCRKPTTTKKTTSLLHPDSSRWIPERISLQAPSNYSLLDMRPPPTAMITLNNSVYWQEFEDTCVYECLDGKDCQSFFCCYEECKSGSWRKGRIHIDILELDSYSRVFFPTSFLLFNLVYWVGYLYL

SEQ ID NO: 28801 - protein, 585 aa, Homo sapiens
  REGION 1..585: note = ENSP00000365437
MASPGSGFWSFGSEDGSGDSENPGTARAWCQVAQKFTGGIGNKLCALLYGDAEKPAESGGSQPPRAAARKAACACDQKPCSCSKVDVNYAFLHATDLLPACDGERPTLAFLQDVMNILLQYVVKSFDRSTKVIDFHYPNELLQEYNWELADQPQNLEEILMHCQTTLKYAIKTGHPRYFNQLSTGLDMVGLAADWLTSTANTNMFTYEIAPVFVLLEYVTLKKMREIIGWPGGSGDGIFSPGGAISNMYAMMIARFKMFPEVKEKGMAALPRLIAFTSEHSHFSLKKGAAALGIGTDSVILIKCDERGKMIPSDLERRILEAKQKGFVPFLVSATAGTTVYGAFDPLLAVADICKKYKIWMHVDAAWGGGLLMSRKHKWKLSGVERANSVTWNPHKMMGVPLQCSALLVREEGLMQNCNQMHASYLFQQDKHYDLSYDTGDKALQCGRHVDVFKLWLMWRAKGTTGFEAHVDKCLELAEYLYNIIKNREGYEMVFDGKPQHTNVCFWYIPPSLRTLEDNEERMSRLSKVAPVIKARMMEYGTTMVSYQPLGDKVNFFRMVISNPAATHQDIDFLIEEIERLGQDL

SEQ ID NO: 28802 - protein, 585 aa, Homo sapiens; identical to SEQ ID NO: 28801
  REGION 1..585: note = ENSP00000259271

SEQ ID NO: 28803 - protein, 188 aa, Homo sapiens
  REGION 1..188: note = ENSP00000390434
MASPGSGFWSFGSEDGSGDSENPGTARAWCQVAQKFTGGIGNKLCALLYGDAEKPAESGGSQPPRAAARKAACACDQKPCSCSKVDVNYAFLHATDLLPACDGERPTLAFLQDVMNILLQYVVKSFDRSTKVIDFHYPNELLQEYNWELADQPQNLEEILMHCQTTLKYAIKTGIVSSKIIKLFFRLQ

SEQ ID NO: 28804 - protein, 129 aa, Homo sapiens
  REGION 1..129: note = ENSP00000365424
MNILLQYVVKSFDRSTKVIDFHYPNELLQEYNWELADQPQNLEEILMHCQTTLKYAIKTGHPRYFNQLSTGLDMVGLAADWLTSTANTNMFTYEIAPVFVLLEYVTLKKMREIIGWPGGSGDGIFSPGT

SEQ ID NO: 28805 - protein, 165 aa, Homo sapiens
  REGION 1..165: note = ENSP00000360025
MTLEEFSAGEQKTERMDKVGDALEEVLSKALSQRTITVGVYEAAKLLNVDPDNVVLCLLAADEDDDRDVALQIHFTLIQAFCCENDINILRVSNPGRLAELLLLETDAGPAASEGAEQPPDLHCVLVTNPHSSQWKDPALSQLICFCRESRYMDQWVPVINLPER

SEQ ID NO: 28806 - protein, 131 aa, Homo sapiens
  REGION 1..131: note = ENSP00000360024
MTLEEFSAGEQKTESDPDNVVLCLLAADEDDDRDVALQIHFTLIQAFCCENDINILRVSNPGRLAELLLLETDAGPAASEGAEQPPDLHCVLVTNPHSSQWKDPALSQLICFCRESRYMDQWVPVINLPER

SEQ ID NO: 28807 - protein, 60 aa, Homo sapiens
  REGION 1..60: note = ENSP00000482814
MTLEEFSAGEQKTERMDKVGDALEEVLSKALSQRTITVGVYEAAKLLNVIHIHLNGRILP

SEQ ID NO: 28808 - protein, 423 aa, Homo sapiens
  REGION 1..423: note = ENSP00000385825
MLPPQKKPWESMAKGLVLGALFTSFLLLVYSYAVPPLHAGLASTTPEAAASCSPPALEPEAVIRANGSAGECQPRRNIVFLKTHKTASSTLLNILFRFGQKHRLKFAFPNGRNDFDYPTFFARSLVQDYRPGACFNIICNHMRFHYDEVRGLVPTNAIFITVLRDPARLFESSFHYFGPVVPLTWKLSAGDKLTEFLQDPDRYYDPNGFNAHYLRNLLFFDLGYDNSLDPSSPQVQEHILEVERRFHLVLLQEYFDESLVLLKDLLCWELEDVLYFKLNARRDSPVPRLSGELYGRATAWNMLDSHLYRHFNASFWRKVEAFGRERMAREVAALRHANERMRTICIDGGHAVDAAAIQDEAMQPWQPLGTKSILGYNLKKSIGQRHAQLCRRMLTPEIQYLMDLGANLWVTKLWKFIRDFLRW

SEQ ID NO: 28809 - protein, 423 aa, Homo sapiens; identical to SEQ ID NO: 28808
  REGION 1..423: note = ENSP00000385735

SEQ ID NO: 28810 - protein, 423 aa, Homo sapiens; identical to SEQ ID NO: 28808
  REGION 1..423: note = ENSP00000384122

SEQ ID NO: 28811 - protein, 423 aa, Homo sapiens; identical to SEQ ID NO: 28808
  REGION 1..423: note = ENSP00000384388

SEQ ID NO: 28812 - protein, 423 aa, Homo sapiens; identical to SEQ ID NO: 28808
  REGION 1..423: note = ENSP00000385207

SEQ ID NO: 28813 - protein, 279 aa, Homo sapiens
  REGION 1..279: note = ENSP00000390545
MLPPQKKPWESMAKGLVLGALFTSFLLLVYSYAVPPLHAGLASTTPEAAASCSPPALEPEAVIRANGSAGECQPRRNIVFLKTHKTASSTLLNILFRFGQKHRLKFAFPNGRNDFDYPTFFARSLVQDYRPGACFNIICNHMRFHYDEVRGLVPTNAIFITVLRDPARLFESSFHYFGPVVPLTWKLSAGDKLTEFLQDPDRYYDPNGFNAHYLRNLLFFDLGYDNSLDPSSPQVQEHILEVERRFHLVLLQEYFDESLVLLKDLLCWELEDVLYFKLN

SEQ ID NO: 28814 - protein, 265 aa, Homo sapiens
  REGION 1..265: note = ENSP00000395080
MLPPQKKPWESMAKGLVLGALFTSFLLLVYSYAVPPLHAGLASTRTPEAAASCSPPALEPEAVIRANGSAGECQPRRNIVFLKTHKTASSTLLNILFRFGQKHRLKFAFPNGRNDFDYPTFFARSLVQDYRPGACFNIICNHMRFHYDEVRGLVPTNAIFITVLRDPARLFESSFHYFGPVVPLTWKLSAGDKLTEFLQDPDRYYDPNGFNAHYLRNLLFFDLGYDNSLDPSSPQVQEHILEVERRFHLVLLQEYFDESLVLLKD

SEQ ID NO: 28815 - protein, 242 aa, Homo sapiens
  REGION 1..242: note = ENSP00000405017
MLPPQKKPWESMAKGLVLGALFTSFLLLVYSYAVPPLHAGLASTTPEAAASCSPPALEPEAVIRANGSAGECQPRRNIVFLKTHKTASSTLLNILFRFGQKHRLKFAFPNGRNDFDYPTFFARSLVQDYRPGACFNIICNHMRFHYDEVRGLVPTNAIFITVLRDPARLFESSFHYFGPVVPLTWKLSAGDKLTEFLQDPDRYYDPNGFNAHYLRNLLFFDLGYDNSLDPSSPQVQEHILEV

SEQ ID NO: 28816 - protein, 199 aa, Homo sapiens
  REGION 1..199: note = ENSP00000401426
MLPPQKKPWESMAKGLVLGALFTSFLLLVYSYAVPPLHAGLASTTPEAAASCSPPALEPEAVIRANGSAGECQPRRNIVFLKTHKTASSTLLNILFRFGQKHRLKFAFPNGRNDFDYPTFFARSLVQDYRPGACFNIICNHMRFHYDEVRGLVPTNAIFITVLRDPARLFESSFHYFGPVVPLTWKLSAGDKLTEFLQD

SEQ ID NO: 28817 - protein, 170 aa, Homo sapiens
  REGION 1..170: note = ENSP00000391485
MLPPQKKPWESMAKGLVLGALFTSFLLLVYSYAVPPLHAGLASTTPEAAASCSPPALEPEAVIRANGSAGECQPRRNIVFLKTHKTASSTLLNILFRFGQKHRLKFAFPNGRNDFDYPTFFARSLVQDYRPGACFNIICNHMRFHYDEVRGLVPTNAIFITVLRDPARLF

SEQ ID NO: 28818 - protein, 163 aa, Homo sapiens
  REGION 1..163: note = ENSP00000397092
MLPPQKKPWESMAKGLVLGALFTSFLLLVYSYAVPPLHAGLASTRTPEAAASCSPPALEPEAVIRANGSAGECQPRRNIVFLKTHKTASSTLLNILFRFGQKHRLKFAFPNGRNDFDYPTFFARSLVQDYRPGACFNIICNHMRFHYDEVRGLVPTNAIFITV

SEQ ID NO: 28819 - protein, 149 aa, Homo sapiens
  REGION 1..149: note = ENSP00000391996
MLPPQKKPWESMAKGLVLGALFTSFLLLVYSYAVPPLHAGLASTTPEAAASCSPPALEPEAVIRANGSAGECQPRRNIVFLKTHKTASSTLLNILFRFGQKHRLKFAFPNGRNDFDYPTFFARSLVQDYRPGACFNIICNHMRFHYDEV

SEQ ID NO: 28820 - protein, 143 aa, Homo sapiens
  REGION 1..143: note = ENSP00000405381
MLPPQKKPWESMAKGLVLGALFTSFLLLVYSYAVPPLHAGLASTTPEAAASCSPPALEPEAVIRANGSAGECQPRRNIVFLKTHKTASSTLLNILFRFGQKHRLKFAFPNGRNDFDYPTFFARSLVQDYRPGACFNIICNHMR

SEQ ID NO: 28821 - protein, 112 aa, Homo sapiens
  REGION 1..112: note = ENSP00000401074
MLPPQKKPWESMAKGLVLGALFTSFLLLVYSYAVPPLHAGLASTRTPEAAASCSPPALEPEAVIRANGSAGECQPRRNIVFLKTHKTASSTLLNILFRFGQKHRLKFAFPNG

SEQ ID NO: 28822 - protein, 102 aa, Homo sapiens
  REGION 1..102: note = ENSP00000389876
MLPPQKKPWESMAKGLVLGALFTSFLLLVYSYAVPPLHAGLASTTPEAAASCSPPALEPEAVIRANGSAGECQPRRNIVFLKTHKTASSTLLNILFRFGQKH

SEQ ID NO: 28823 - protein, 100 aa, Homo sapiens
  REGION 1..100: note = ENSP00000398380
MLPPQKKPWESMAKGLVLGALFTSFLLLVYSYAVPPLHAGLASTTPEAAASCSPPALEPEAVIRANGSAGECQPRRNIVFLKTHKTASSTLLNILFRFGQ

SEQ ID NO: 28824 - protein, 98 aa, Homo sapiens
  REGION 1..98: note = ENSP00000414542
MLPPQKKPWESMAKGLVLGALFTSFLLLVYSYAVPPLHAGLASTTPEAAASCSPPALEPEAVIRANGSAGECQPRRNIVFLKTHKTASSTLLNILFRF

SEQ ID NO: 28825 - protein, 95 aa, Homo sapiens
  REGION 1..95: note = ENSP00000412995
MLPPQKKPWESMAKGLVLGALFTSFLLLVYSYAVPPLHAGLASTTPEAAASCSPPALEPEAVIRANGSAGECQPRRNIVFLKTHKTASSTLLNIL

SEQ ID NO: 28826 - protein, 85 aa, Homo sapiens
  REGION 1..85: note = ENSP00000394912
MLPPQKKPWESMAKGLVLGALFTSFLLLVYSYAVPPLHAGLASTTPEAAASCSPPALEPEAVIRANGSAGECQPRRNIVFLKTHK

SEQ ID NO: 28827 - protein, 75 aa, Homo sapiens
  REGION 1..75: note = ENSP00000399649
MLPPQKKPWESMAKGLVLGALFTSFLLLVYSYAVPPLHAGLASTTPEAAASCSPPALEPEAVIRANGSAGECQPR

SEQ ID NO: 28828 - protein, 71 aa, Homo sapiens
  REGION 1..71: note = ENSP00000390068
MLPPQKKPWESMAKGLVLGALFTSFLLLVYSYAVPPLHAGLASTTPEAAASCSPPALEPEAVIRANGSAGE

SEQ ID NO: 28829 - protein, 423 aa, Homo sapiens; identical to SEQ ID NO: 28808
  REGION 1..423: note = ENSP00000343234

SEQ ID NO: 28830 - protein, 110 aa, Homo sapiens
  REGION 1..110: note = ENSP00000488800
MGPLSPARTLRLWGPRSLGVALGVFMTIGFALQLLGGPFQRRLPGLQLRQPSAPSLRPALPSCPPRQRLVFLKTHKSGSSSVLSLLHRYGDQHGLRFALPARYQFGYPKL

SEQ ID NO: 28831 - protein, 132 aa, Homo sapiens
  REGION 1..132: note = ENSP00000487594
MGPLSPARTLRLWGPRSLGVALGVFMTIGFALQLLGGPFQRRLPGLQLRQPSAPSLRPALPSCPPRQRLVFLKTHKSGSSSVLSLLHRYGDQHGLRFALPARYQFGYPKLFQASRVKGYRPQGGGTQLPFHI

SEQ ID NO: 28832 - protein, 118 aa, Homo sapiens
  REGION 1..118: note = ENSP00000488586
MGPLSPARTLRLWGPRSLGVALGVFMTIGFALQLLGGPFQRRYFRSCLLTASFFPLSETQRLWLALPSPTINPPHQPSASHHLWLPSWPILEASTGLGPVGTTTLATYYGLTLACPFP

SEQ ID NO: 28833 - protein, 220 aa, Homo sapiens
  REGION 1..220: note = ENSP00000414733
MGPLSPARTLRLWGPRSLGVALGVFMTIGFALQLLGGPFQRRYFRSCLLTASFFPLSETQRLWLALPSPTINPPHQPSASHHLWLPSWPILEASTGLGPVGTTTLATYYGLTLACPFPQRRGPREGIFIPPETPTPHSCRSCLLVLALEPKPSIPMPSSILFPLLLIIAARYQALPLSIWGLHPSSSGVWHGWTLSLTWSWWLSTSMSHWFCWQMPCAGV

SEQ ID NO: 28834 - protein, 220 aa, Homo sapiens; identical to SEQ ID NO: 28833
  REGION 1..220: note = ENSP00000399066

SEQ ID NO: 28835 - protein, 486 aa, Homo sapiens
  REGION 1..486: note = ENSP00000353142
MGPLSPARTLRLWGPRSLGVALGVFMTIGFALQLLGGPFQRRLPGLQLRQPSAPSLRPALPSCPPRQRLVFLKTHKSGSSSVLSLLHRYGDQHGLRFALPARYQFGYPKLFQASRVKGYRPQGGGTQLPFHILCHHMRFNLKEVLQVMPSDSFFFSIVRDPAALARSAFSYYKSTSSAFRKSPSLAAFLANPRGFYRPGARGDHYARNLLWFDFGLPFPPEKRAKRGNIHPPRDPNPPQLQVLPSGAGPRAQTLNPNALIHPVSTVTDHRSQISSPASFDLGSSSFIQWGLAWLDSVFDLVMVAEYFDESLVLLADALCWGLDDVVGFMHNAQAGHKQGLSTVSNSGLTAEDRQLTARARAWNNLDWALYVHFNRSLWARIEKYGQGRLQTAVAELRARREALAKHCLVGGEASDPKYITDRRFRPFQFGSAKVLGYILRSGLSPQDQEECERLATPELQYKDKLDAKQFPPTVSLPLKTSRPLSP

SEQ ID NO: 28836 - protein, 486 aa, Homo sapiens; identical to SEQ ID NO: 28835
  REGION 1..486: note = ENSP00000400451

SEQ ID NO: 28837 - protein, 557 aa, Homo sapiens
  REGION 1..557: note = ENSP00000314500
MRRLTRRLVLPVFGVLWITVLLFFWVTKRKLEVPTGPEVQTPKVWSLFFKVAGMSPWAPQVPVSPTPPYQRGHLPTGGHLAVCHFPCLLQEAQFHLQTQVFLQVRCTLLVYCTDLPPTSIIITFHNEARSTLLRTIRSVLNRTPTHLIREIILVDDFSNDPDDCKQLIKLPKVKCLRNNERQGLVRSRIRGADIAQGTTLTFLDSHCEVNRDWLQPLLHRVKEDYTRVVCPVIDIINLDTFTYIESASELRGGFDWSLHFQWEQLSPEQKARRLDPTEPIRTPIIAGGLFVIDKAWFDYLGKYDMDMDIWGGENFEISFRVWMCGGSLEIVPCSRVGHVFRKKHPYVFPDGNANTYIKNTKRTAEVWMDEYKQYYYAARPFALERPFGNVESRLDLRKNLRCQSFKWYLENIYPELSIPKESSIQKGNIRQRQKCLESQRQNNQETPNLKLSPCAKVKGEDAKSQVWAFTYTQQILQEELCLSVITLFPGAPVVLVLCKNGDDRQQWTKTGSHIEHIASHLCLDTDMFGDGTENGKEIVVNPCESSLMSQHWDMVSS

SEQ ID NO: 28838 - protein, 552 aa, Homo sapiens
  REGION 1..552: note = ENSP00000288988
MRRLTRRLVLPVFGVLWITVLLFFWVTKRKLEVPTGPEVQTPKPSDADWDDLWDQFDERRYLNAKKWRVGDDPYKLYAFNQRESERISSNRAIPDTRHLRCTLLVYCTDLPPTSIIITFHNEARSTLLRTIRSVLNRTPTHLIREIILVDDFSNDPDDCKQLIKLPKVKCLRNNERQGLVRSRIRGADIAQGTTLTFLDSHCEVNRDWLQPLLHRVKEDYTRVVCPVIDIINLDTFTYIESASELRGGFDWSLHFQWEQLSPEQKARRLDPTEPIRTPIIAGGLFVIDKAWFDYLGKYDMDMDIWGGENFEISFRVWMCGGSLEIVPCSRVGHVFRKKHPYVFPDGNANTYIKNTKRTAEVWMDEYKQYYYAARPFALERPFGNVESRLDLRKNLRCQSFKWYLENIYPELSIPKESSIQKGNIRQRQKCLESQRQNNQETPNLKLSPCAKVKGEDAKSQVWAFTYTQQILQEELCLSVITLFPGAPVVLVLCKNGDDRQQWTKTGSHIEHIASHLCLDTDMFGDGTENGKEIVVNPCESSLMSQHWDMVSS

SEQ ID NO: 28839 - protein, 532 aa, Homo sapiens
  REGION 1..532: note = ENSP00000385435
MSFPMSLARSSVPFADSGLSSSQPSDADWDDLWDQFDERRYLNAKKWRVGDDPYKLYAFNQRESERISSNRAIPDTRHLRCTLLVYCTDLPPTSIIITFHNEARSTLLRTIRSVLNRTPTHLIREIILVDDFSNDPDDCKQLIKLPKVKCLRNNERQGLVRSRIRGADIAQGTTLTFLDSHCEVNRDWLQPLLHRVKEDYTRVVCPVIDIINLDTFTYIESASELRGGFDWSLHFQWEQLSPEQKARRLDPTEPIRTPIIAGGLFVIDKAWFDYLGKYDMDMDIWGGENFEISFRVWMCGGSLEIVPCSRVGHVFRKKHPYVFPDGNANTYIKNTKRTAEVWMDEYKQYYYAARPFALERPFGNVESRLDLRKNLRCQSFKWYLENIYPELSIPKESSIQKGNIRQRQKCLESQRQNNQETPNLKLSPCAKVKGEDAKSQVWAFTYTQQILQEELCLSVITLFPGAPVVLVLCKNGDDRQQWTKTGSHIEHIASHLCLDTDMFGDGTENGKEIVVNPCESSLMSQHWDMVSS

SEQ ID NO: 28840 - protein, 400 aa, Homo sapiens
  REGION 1..400: note = ENSP00000406399
MRRLTRRLVLPVFGVLWITVLLFFWVTKRKLEVPTGPEVQTPKPSDADWDDLWDQFDERRYLNAKKWRVGDDPYKLYAFNQRESERISSNRAIPDTRHLSVLNRTPTHLIREIILVDDFSNDPDDCKQLIKLPKVKCLRNNERQGLVRSRIRGADIAQGTTLTFLDSHCEVNRDWLQPLLHRVKEDYTRVVCPVIDIINLDTFTYIESASELRGGFDWSLHFQWEQLSPEQKARRLDPTEPIRTPIIAGGLFVIDKAWFDYLGKYDMDMDIWGGENFEISFRVWMCGGSLEIVPCSRVGHVFRKKHPYVFPDGNANTYIKNTKRTAEVWMDEYKQYYYAARPFALERPFGNVESRLDLRKNLRCQSFKWYLENIYPELSIPKESSIQKGNIRQRQKCLES

SEQ ID NO: 28841 - protein, 70 aa, Homo sapiens
  REGION 1..70: note = ENSP00000399886
  VARIANT 1: note = Any amino acid
XVFGVLWITVLLFFWVTKRKLEVPTGPEVQTPKVWSLFFKVAGMSPWAPQVPVSPTPPYQRGHLPTAFGR

SEQ ID NO: 28842 - protein, 38 aa, Homo sapiens
  REGION 1..38: note = ENSP00000398723
  VARIANT 1: note = Any amino acid
XVFGVLWITVLLFFWVTKRKLEVPTGPEVQTPKGSSQS

SEQ ID NO: 28843 - protein, 639 aa, Homo sapiens
  REGION 1..639: note = ENSP00000344260
MLLRKRYRHRPCRLQFLLLLLMLGCVLMMVAMLHPPHHTLHQTVTAQASKHSPEARYRLDFGESQDWVLEAEDEGEEYSPLEGLPPFISLREDQLLVAVALPQARRNQSQGRRGGSYRLIKQPRRQDKEAPKRDWGADEDGEVSEEEELTPFSLDPRGLQEALSARIPLQRALPEVRHPLCLQQHPQDSLPTASVILCFHDEAWSTLLRTVHSILDTVPRAFLKEIILVDDLSQQGQLKSALSEYVARLEGVKLLRSNKRLGAIRARMLGATRATGDVLVFMDAHCECHPGWLEPLLSRIAGDRSRVVSPVIDVIDWKTFQYYPSKDLQRGVLDWKLDFHWEPLPEHVRKALQSPISPIRSPVVPGEVVAMDRHYFQNTGAYDSLMSLRGGENLELSFKAWLCGGSVEILPCSRVGHIYQNQDSHSPLDQEATLRNRVRIAETWLGSFKETFYKHSPEAFSLSKAEKPDCMERLQLQRRLGCRTFHWFLANVYPELYPSEPRPSFSGKLHNTGLGLCADCQAEGDILGCPMVLAPCSDSRQQQYLQHTSRKEIHFGSPQHLCFAVRQEQVILQNCTEEGLAIHQQHWDFQENGMIVHILSGKCMEAVVQENNKDLYLRPCDGKARQQWRFDQINAVDER

SEQ ID NO: 28844 - protein, 617 aa, Homo sapiens
  REGION 1..617: note = ENSP00000395873
MLLRKRYRHRPCRLQFLLLLLMLGCVLMMVAMLHPPHHTLHQTVTAQASKHSPEARYRLDFGESQDWVLEAEDEGEEYSPLEGLPPFISLREDQLLVAVALPQARRNQSQGRRGGSYRLIKQPRRQDKEAPKRDWGADEDGEVSEEEELTPFSLDPRGLQEALSARIPLQRALPEVRHPLCLQQHPQDSLPTASVILCFHDEAWSTLLRTVHSILDTVPRAFLKEIILVDDLSQQGQLKSALSEYVARLEGVKLLRSNKRLGAIRARMLGATRATGDVLVFMDAHCECHPGWLEPLLSRIAGDRSRVVSPVIDVIDWKTFQYYPSKDLQRGVLDWKLDFHWEPLPEHVRKALQSPISPIRSPVVPGEVVAMDRHYFQNTGAYDSLMSLRGGENLELSFKAWLCGGSVEILPCSRVGHIYQNQDSHSPLDQEATLRNRVRIAETWLGSFKETFYKHSPEAFSLSKAEKPDCMERLQLQRRLGCRTFHWFLANVYPELYPSEPRPSFSGKLHNTGLGLCADCQAEGDILGCPMVLAPCSDSRQQQYLQHTSRKEIHFGSPQHLCFAVRQEQVILQNCTEEGLAIHQQHWDFQEDENRANSAAAEAYQRPLTFQQIVNNG

SEQ ID NO: 28845 - protein, 141 aa, Homo sapiens
  REGION 1..141: note = ENSP00000389079
ALPEVRHPLCLQQHPQDSLPTASVILCFHDEAWSTLLRTVHSILDTVPRAFLKEIILVDDLSQQGSHGFPPGSSGTTQVCSQRICGQAGGGEVTQEQQEAGCHQGPDAGGHQSHRGCARLHGCPLRVPPRLAGAPPQQNSW

SEQ ID NO: 28846 - protein, 196 aa, Homo sapiens
  REGION 1..196: note = ENSP00000480229
MERLQLQRRLGCRTFHWFLANVYPELYPSEPRPSFSGKLHNTGLGLCADCQAEGDILGCPMVLAPCSDSRQQQYLQHTSRKEIHFGSPQHLCFAVRQEQVILQNCTEEGLAIHQQHWDFQENGMIVHILSGKCMEAVVQENNKDLYLRPCDEKPASSGVLTRSMLWMNDECQCQKEKRILAIKIQLQVNLKSLYIS

SEQ ID NO: 28847 - protein, 558 aa, Homo sapiens
  REGION 1..558: note = ENSP00000336729
MRKIRANAIAILTVAWILGTFYYLWQDNRAHAASSGGRGAQRAGRRSEQLREDRTIPLIVTGTPSKGFDEKAYLSAKQLKAGEDPYRQHAFNQLESDKLSPDRPIRDTRHYSCPSVSYSSDLPATSVIITFHNEARSTLLRTVKSVLNRTPANLIQEIILVDDFSSDPEDCLLLTRIPKVKCLRNDRREGLIRSRVRGADVAAATVLTFLDSHCEVNTEWLPPMLQRVKEDHTRVVSPIIDVISLDNFAYLAASADLRGGFDWSLHFKWEQIPLEQKMTRTDPTRPIRTPVIAGGIFVIDKSWFNHLGKYDAQMDIWGGENFELSFRVWMCGGSLEIVPCSRVGHVFRKRHPYNFPEGNALTYIRNTKRTAEVWMDEYKQYYYEARPSAIGKAFGSVATRIEQRKKMNCKSFRWYLENVYPELTVPVKEALPGIIKQGVNCLESQGQNTAGDFLLGMGICRGSAKNPQPAQAWLFSDHLIQQQGKCLAATSTLMSSPGSPVILQMCNPREGKQKWRRKGSFIQHSVSGLCLETKPAQLVTSKCQADAQAQQWQLLPHT

SEQ ID NO: 28848 - protein, 542 aa, Homo sapiens
  REGION 1..542: note = ENSP00000451420
MRKIRANAIAILTVAWILGTFYYLWQDNRAHAASSGGRGAQRAGRRSEQLREDRTIPLIVTGTPSKGFDEKAYLSAKQLKAGEDPYRQHAFNQLESDKLSPDRPIRDTRHYSCPSVSYSSDLPATSVIITFHNEARSTLLRTVKSVLNRTPANLIQEIILVDDFSSDPEDCLLLTRIPKVKCLRNDRREGLIRSRVRGADVAAATVLTFLDSHCEVNTEWLPPMLQRVKEDHTRVVSPIIDVISLDNFAYLAASADLRGGFDWSLHFKWEQIPLEQKMTRTDPTRPIRTPVIAGGIFVIDKSWFNHLGKYDAQMDIWGGENFELSFRVWMCGGSLEIVPCSRVGHVFRKRHPYNFPEGNALTYIRNTKRTAEVWMDEYKQYYYEARPSAIGKAFGSVATRIEQRKKMNCKSFRWYLENVYPELTVPVKEALPGIIKQGVNCLESQGQNTAGDFLLGMGICRGSAKNPQPAQAWLFSDHLIQQQGKCLAATSTLMSSPGSPVILQMCNPREGKQVSLLASGPEAQQPEGPCLRVADLGRRAPD

SEQ ID NO: 28849 - protein, 558 aa, Homo sapiens; identical to SEQ ID NO: 28847
  REGION 1..558: note = ENSP00000402970

SEQ ID NO: 28850 - protein, 542 aa, Homo sapiens; identical to SEQ ID NO: 28848
  REGION 1..542: note = ENSP00000451200

SEQ ID NO: 28851 - protein, 607 aa, Homo sapiens
  REGION 1..607: note = ENSP00000227756
MVCTRKTKTLVSTCVILSGMTNIICLLYVGWVTNYIASVYVRGQEPAPDKKLEEDKGDTLKIIERLDHLENVIKQHIQEAPAKPEEAEAEPFTDSSLFAHWGQELSPEGRRVALKQFQYYGYNAYLSDRLPLDRPLPDLRPSGCRNLSFPDSLPEVSIVFIFVNEALSVLLRSIHSAMERTPPHLLKEIILVDDNSSNEELKEKLTEYVDKVNSQKPGFIKVVRHSKQEGLIRSRVSGWRAATAPVVALFDAHVEFNVGWAEPVLTRIKENRKRIISPSFDNIKYDNFEIEEYPLAAQGFDWELWCRYLNPPKAWWKLENSTAPIRSPALIGCFIVDRQYFQEIGLLDEGMEVYGGENVELGIRVWQCGGSVEVLPCSRIAHIERAHKPYTEDLTAHVRRNALRVAEVWMDEFKSHVYMAWNIPQEDSGIDIGDITARKALRKQLQCKTFRWYLVSVYPEMRMYSDIIAYGVLQNSLKTDLCLDQGPDTENVPIMYICHGMTPQNVYYTSSQQIHVGILSPTVDDDDNRCLVDVNSRPRLIECSYAKAKRMKLHWQFSQGGPIQNRKSKRCLELQENSDLEFGFQLVLQKCSGQHWSITNVLRSLAS

SEQ ID NO: 28852 - protein, 633 aa, Homo sapiens
  REGION 1..633: note = ENSP00000376465
MAHLKRLVKLHIKRHYHKKFWKLGAVIFFFIIVLVLMQREVSVQYSKEESRMERNMKNKNKMLDLMLEAVNNIKDAMPKMQIGAPVRQNIDAGERPCLQGYYTAAELKPVLDRPPQDSNAPGASGKAFKTTNLSVEEQKEKERGEAKHCFNAFASDRISLHRDLGPDTRPPECIEQKFKRCPPLPTTSVIIVFHNEAWSTLLRTVHSVLYSSPAILLKEIILVDDASVDEYLHDKLDEYVKQFSIVKIVRQRERKGLITARLLGATVATAETLTFLDAHCECFYGWLEPLLARIAENYTAVVSPDIASIDLNTFEFNKPSPYGSNHNRGNFDWSLSFGWESLPDHEKQRRKDETYPIKTPTFAGGLFSISKEYFEYIGSYDEEMEIWGGENIEMSFRVWQCGGQLEIMPCSVVGHVFRSKSPHSFPKGTQVIARNQVRLAEVWMDEYKEIFYRRNTDAAKIVKQKAFGDLSKRFEIKHRLQCKNFTWYLNNIYPEVYVPDLNPVISGYIKSVGQPLCLDVGENNQGGKPLIMYTCHGLGGNQYFEYSAQHEIRHNIQKELCLHAAQGLVQLKACTYKGHKTVVTGEQIWEIQKDQLLYNPFLKMCLSANGEHPSLVSCNPSDPLQKWILSQND

SEQ ID NO: 28853 - protein, 371 aa, Homo sapiens
  REGION 1..371: note = ENSP00000386955
MYGYGCNIFPPSPSNLKGECFYGWLEPLLARIAENYTAVVSPDIASIDLNTFEFNKPSPYGSNHNRGNFDWSLSFGWESLPDHEKQRRKDETYPIKTPTFAGGLFSISKEYFEYIGSYDEEMEIWGGENIEMSFRVWQCGGQLEIMPCSVVGHVFRSKSPHSFPKGTQVIARNQVRLAEVWMDEYKEIFYRRNTDAAKIVKQKAFGDLSKRFEIKHRLQCKNFTWYLNNIYPEVYVPDLNPVISGYIKSVGQPLCLDVGENNQGGKPLIMYTCHGLGGNQYFEYSAQHEIRHNIQKELCLHAAQGLVQLKACTYKGHKTVVTGEQIWEIQKDQLLYNPFLKMCLSANGEHPSLVSCNPSDPLQKWILSQND

SEQ ID NO: 28854 - protein, 464 aa, Homo sapiens
  REGION 1..464: note = ENSP00000412643
MAHLKRLVKLHIKRHYHKKFWKLGAVIFFFIIVLVLMQREVSVQYSKEESRMERNMKNKNKMLDLMLEAVNNIKDAMPKMQIGAPVRQNIDAGERPCLQGYYTAAELKPVLDRPPQDSNAPGASGKAFKTTNLSVEEQKEKERGEAKHCFNAFASDRISLHRDLGPDTRPPECIEQKFKRCPPLPTTSVIIVFHNEAWSTLLRTVHSVLYSSPAILLKEIILVDDASVDEYLHDKLDEYVKQFSIVKIVRQRERKGLITARLLGATVATAETLTFLDAHCECFYGWLEPLLARIAENYTAVVSPDIASIDLNTFEFNKPSPYGSNHNRGNFDWSLSFGWESLPDHEKQRRKDETYPIKTPTFAGGLFSISKEYFEYIGSYDEEMEIWGGENIEMSFRVWQCGGQLEIMPCSVVGHVFRSKSPHSFPKGTQVIARNQVRLAEVWMDEYKEIFYRRNTDAAKIVKQ

SEQ ID NO: 28855 - protein, 89 aa, Homo sapiens
  REGION 1..89: note = ENSP00000391104
VHSVLYSSPAILLKEIILVDDASVDEYLHDKLDEYVKQFSIVKIVRQRERKGLITARLLGATVATAETLTFLDAHSFSTGDYSNDSPSR

SEQ ID NO: 28856 - protein, 90 aa, Homo sapiens
  REGION 1..90: note = ENSP00000397112
MAHLKRLVKLHIKRHYHKKFWKLGAVIFFFIIVLVLMQREVSVQYSKEESRMERNMKNKNKMLDLMLEAVNNIKDAMPKMQIGAPVRQNI

SEQ ID NO: 28857 - protein, 57 aa, Homo sapiens
  REGION 1..57: note = ENSP00000413477
MAHLKRLVKLHIKRHYHKKFWKLGAVIFFFIIVLVLMQREVSVQYSKEESRMERNMK

SEQ ID NO: 28858 - protein, 25 aa, Homo sapiens
  REGION 1..25: note = ENSP00000413694
MAHLKRLVKLHIKRHYHKKFWKLGA

SEQ ID NO: 28859 - protein, 11 aa, Homo sapiens
  REGION 1..11: note = ENSP00000399880
MAHLKRLVKLH

SEQ ID NO: 28860 - protein, 940 aa, Homo sapiens
  REGION 1..940: note = ENSP00000259056
MNRIRKFFRGSGRVLAFIFVASVIWLLFDMAALRLSFSEINTRVIKEDIVRRERIGFRVQPDQGKIFYSSIKEMKPPLRGHGKGAWGKENVRKTEESVLKVEVDLDQTQRERKMQNALGRGKVVPLWHPAHLQTLPVTPNKQKTDGRGTKPEASSHQGTPKQTTAQGAPKTSFIAAKGTQVVKISVHMGRVSLKQEPRKSHSPSSDTSKLAAERDLNVTISLSTDRPKQRSQAVANERAHPASTAVPKSGEAMALNKTKTQSKEVNANKHKANTSLPFPKFTVNSNRLRKQSINETPLGSLSKDDGARGAHGKKLNFSESHLVIITKEEEQKADPKEVSNSKTKTIFPKVLGKSQSKHISRNRSEMSSSSLAPHRVPLSQTNHALTGGLEPAKINITAKAPSTEYNQSHIKALLPEDSGTHQVLRIDVTLSPRDPKAPGQFGRPVVVPHGKEKEAERRWKEGNFNVYLSDLIPVDRAIEDTRPAGCAEQLVHNNLPTTSVIMCFVDEVWSTLLRSVHSVINRSPPHLIKEILLVDDFSTKDYLKDNLDKYMSQFPKVRILRLKERHGLIRARLAGAQNATGDVLTFLDSHVECNVGWLEPLLERVYLSRKKVACPVIEVINDKDMSYMTVDNFQRGIFVWPMNFGWRTIPPDVIAKNRIKETDTIRCPVMAGGLFSIDKSYFFELGTYDPGLDVWGGENMELSFKVWMCGGEIEIIPCSRVGHIFRNDNPYSFPKDRMKTVERNLVRVAEVWLDEYKELFYGHGDHLIDQGLDVGNLTQQRELRKKLKCKSFKWYLENVFPDLRAPIVRASGVLINVALGKCISIENTTVILEDCDGSKELQQFNYTWLRLIKCGEWCIAPIPDKGAVRLHPCDNRNKGLKWLHKSTSVFHPELVNHIVFENNQQLLCLEGNFSQKILKVAACDPVKPYQKWKFEKYYEA

SEQ ID NO: 28861 - protein, 622 aa, Homo sapiens
  REGION 1..622: note = ENSP00000444171
MRLLRRRHMPLRLAMVGCAFVLFLFLLHRDVSSREEATEKPWLKSLVSRKDHVLDLMLEAMNNLRDSMPKLQIRAPEAQQTLFSINQSCLPGFYTPAELKPFWERPPQDPNAPGADGKAFQKSKWTPLETQEKEEGYKKHCFNAFASDRISLQRSLGPDTRPPECVDQKFRRCPPLATTSVIIVFHNEAWSTLLRTVYSVLHTTPAILLKEIILVDDASTEEHLKEKLEQYVKQLQVVRVVRQEERKGLITARLLGASVAQAEVLTFLDAHCECFHGWLEPLLARIAEDKTVVVSPDIVTIDLNTFEFAKPVQRGRVHSRGNFDWSLTFGWETLPPHEKQRRKDETYPIKSPTFAGGLFSISKSYFEHIGTYDNQMEIWGGENVEMSFRVWQCGGQLEIIPCSVVGHVFRTKSPHTFPKGTSVIARNQVRLAEVWMDSYKKIFYRRNLQAAKMAQEKSFGDISERLQLREQLHCHNFSWYLHNVYPEMFVPDLTPTFYGAIKNLGTNQCLDVGENNRGGKPLIMYSCHGLGGNQYFEYTTQRDLRHNIAKQLCLHVSKGALGLGSCHFTGKNSQVPKDEEWELAQDQLIRNSGSGTCLTSQDKKPAMAPCNPSDPHQLWLFV

SEQ ID NO: 28862 - protein, 622 aa, Homo sapiens; identical to SEQ ID NO: 28861
  REGION 1..622: note = ENSP00000348668

SEQ ID NO: 28863 - protein, 365 aa, Homo sapiens
  REGION 1..365: note = ENSP00000474670
MRLLRRRHMPLRLAMVGCAFVLFLFLLHRDVSSREEATEKPWLKSLVSRKDHVLDLMLEAMNNLRDSMPKLQIRAPEAQQTLFSINQSCLPGFYTPAELKPFWERPPQDPNAPGADGKAFQKSKWTPLETQEKEEGYKKHCFNAFASDRISLQRSLGPDTRPPECVDQKFRRCPPLATTSVIIVFHNEAWSTLLRTVYSVLHTTPAILLKEIILVDDASTEEHLKEKLEQYVKQLQVVRVVRQEERKGLITARLLGASVAQAEVLTFLDAHCECFHGWLEPLLARIAEDKTVVVSPDIVTIDLNTFEFAKPVQRGRVHSRGNFDWSLTFGWETLPPHEKQRRKDETYPIKCGSVGASWRSSPALS

SEQ ID NO: 28864 - protein, 137 aa, Homo sapiens
  REGION 1..137: note = ENSP00000474101
MRLLRRRHMPLRLAMVGCAFVLFLFLLHRDVSSREEATEKPWLKSLVSRKDHVLDLMLEAMNNLRDSMPKLQIRAPEAQQTLFSINQSCLPGFYTPAELKPFWERPPQDPNAPGADGKAFQKSKWTPLETQEKEEGY

SEQ ID NO: 28865 - protein, 123 aa, Homo sapiens
  REGION 1..123: note = ENSP00000474515
MRLLRRRHMPLRLAMVGCAFVLFLFLLHRDVSSREEATEKPWLKSLVSRKDHVLDLMLEAMNNLRDSMPKLQIRAPEAQQTLFSINQSCLPGFYTPAELKPFWERPPQDPNAPGADGKAFQKS

SEQ ID NO: 28866 - protein, 23 aa, Homo sapiens
  REGION 1..23: note = ENSP00000474483
MRLLRRRHMPLRLAMVGCAFVLF

SEQ ID NO: 28867 - protein, 23 aa, Homo sapiens
  REGION 1..23: note = ENSP00000474163
MRLLRRRHMPLRLAMVGCAFVLF

SEQ ID NO: 28868 - protein, 39 aa, Homo sapiens
  REGION 1..39: note = ENSP00000473981
MRLLRRRHMPLRLAMVGCAFVLFLFLLHRDVSSREEATE

SEQ ID NO: 28869 - protein, 55 aa, Homo sapiens
  REGION 1..55: note = ENSP00000473948
MRLLRRRHMPLRLAMVGCAFVLFLFLLHRDVSSREEATEKPWLKSLVSRKDHVLD

SEQ ID NO: 28870 - protein, 62 aa, Homo sapiens
  REGION 1..62: note = ENSP00000474052
MRLLRRRHMPLRLAMVGCAFVLFLFLLHRDVSSREEATEKPWLKSLVSRKDHVLDLMLEAMN

SEQ ID NO: 28871 - protein, 68 aa, Homo sapiens
  REGION 1..68: note = ENSP00000473836
MRLLRRRHMPLRLAMVGCAFVLFLFLLHRDVSSREEATEKPWLKSLVSRKDHVLDLMLEAMNNLRDSM

SEQ ID NO: 28872 - protein, 78 aa, Homo sapiens
  REGION 1..78: note = ENSP00000473918
MRLLRRRHMPLRLAMVGCAFVLFLFLLHRDVSSREEATEKPWLKSLVSRKDHVLDLMLEAMNNLRDSMPKLQIRAPEA

SEQ ID NO: 28873 - protein, 61 aa, Homo sapiens
  REGION 1..61: note = ENSP00000425590
MKRKQKRFLQMTLLFTVALIFLPNVGLWSLYKDKHLVKSAEPGEQQVSATQRKITQGLVRQ

SEQ ID NO: 28874 - protein, 601 aa, Homo sapiens
  REGION 1..601: note = ENSP00000423313
MKRKQKRFLQMTLLFTVALIFLPNVGLWSLYKDKHLVKSAEPGEQQTFPLGLGDGQFYSWTDGLRRKDWHDYESIQKEAMRSGKGEHGKPYPLTEEDHDDSAYRENGFNIFVSNNIALERSLPDIRHANCKHKMYLERLPNTSIIIPFHNEGWTSLLRTIHSIINRTPGSLIAEIILVDDFSEREHLKDKLEEYMARFSKVRIVRTKKREGLIRTRLLGASMARGEVLTFLDSHCEVNVNWLPPLLNQIALNHKTIVCPMIDVIDHNHFGYEAQAGDAMRGAFDWEMYYKRIPIPPELQRADPSDPFESPVMAGGLFAVDRKWFWELGGYDPGLEIWGGEQYEISFKVWMCGGEMFDVPCSRVGHIYRKYVPYKVPSGTSLARNLKRVAETWMDEFAEYIYQRRPEYRHLSTGDISAQKELRKQLKCKDFKWFMAAVAWDVPKYYPPVEPPPAAWGEIRNVAANLCVDSKHGATGTELRLDICVKDGSERTWSHEQLFTFGWREDIRPGEPLHTRKFCFDAISHNSPVTLYDCHGMKGNQLWGYRKDRTLFHPVSNSCMDCNPAEKKIFMARCDPLSETQQWIFEHINMTVLEKFNHHANS

SEQ ID NO: 28875 - protein, 584 aa, Homo sapiens
  REGION 1..584: note = ENSP00000423827
MRAKFRAGAGHQRNPSISADHGVHELVYQTFPLGLGDGQFYSWTDGLRRKDWHDYESIQKEAMRSGKGEHGKPYPLTEEDHDDSAYRENGFNIFVSNNIALERSLPDIRHANCKHKMYLERLPNTSIIIPFHNEGWTSLLRTIHSIINRTPGSLIAEIILVDDFSEREHLKDKLEEYMARFSKVRIVRTKKREGLIRTRLLGASMARGEVLTFLDSHCEVNVNWLPPLLNQIALNHKTIVCPMIDVIDHNHFGYEAQAGDAMRGAFDWEMYYKRIPIPPELQRADPSDPFESPVMAGGLFAVDRKWFWELGGYDPGLEIWGGEQYEISFKVWMCGGEMFDVPCSRVGHIYRKYVPYKVPSGTSLARNLKRVAETWMDEFAEYIYQRRPEYRHLSTGDISAQKELRKQLKCKDFKWFMAAVAWDVPKYYPPVEPPPAAWGEIRNVAANLCVDSKHGATGTELRLDICVKDGSERTWSHEQLFTFGWREDIRPGEPLHTRKFCFDAISHNSPVTLYDCHGMKGNQLWGYRKDRTLFHPVSNSCMDCNPAEKKIFMARCDPLSETQQWIFEHINMTVLEKFNHHANS

SEQ ID NO: 28876 - protein, 417 aa, Homo sapiens
  REGION 1..417: note = ENSP00000483822
EHLKDKLEEYMARFSKVRIVRTKKREGLIRTRLLGASMARGEVLTFLDSHCEVNVNWLPPLLNQIALNHKTIVCPMIDVIDHNHFGYEAQAGDAMRGAFDWEMYYKRIPIPPELQRADPSDPFESPVMAGGLFAVDRKWFWELGGYDPGLEIWGGEQYEISFKVWMCGGEMFDVPCSRVGHIYRKYVPYKVPSGTSLARNLKRVAETWMDEFAEYIYQRRPEYRHLSTGDISAQKELRKQLKCKDFKWFMAAVAWDVPKYYPPVEPPPAAWGEIRNVAANLCVDSKHGATGTELRLDICVKDGSERTWSHEQLFTFGWREDIRPGEPLHTRKFCFDAISHNSPVTLYDCHGMKGNQLWGYRKDRTLFHPVSNSCMDCNPAEKKIFMARCDPLSETQQWIFEHINMTVLEKFNHHANS

SEQ ID NO: 28877 - protein, 349 aa, Homo sapiens
  REGION 1..349: note = ENSP00000299727
MELAVGNLSEGNASWPEPPAPEPGPLFGIGVENFVTLVVFGLIFALGVLGNSLVITVLARSKPGKPRSTTNLFILNLSIADLAYLLFCIPFQATVYALPTWVLGAFICKFIHYFFTVSMLVSIFTLAAMSVDRYVAIVHSRRSSSLRVSRNALLGVGCIWALSIAMASPVAYHQGLFHPRASNQTFCWEQWPDPRHKKAYVVCTFVFGYLLPLLLICFCYAKVLNHLHKKLKNMSKKSEASKKKTAQTVLVVVVVFGISWLPHHIIHLWAEFGVFPLTPASFLFRITAHCLAYSNSSVNPIIYAFLSENFRKAYKQVFKCHIRKDSHLSDTKESKSRIDTPPSTNCTHV

SEQ ID NO: 28878 - protein, 238 aa, Homo sapiens
  REGION 1..238: note = ENSP00000305010
MLCCMRRTKQVEKNDDDQKIEQDGIKPEDKAHKAATKIQASFRGHITRKKLKGEKKDDVQAAEAEANKKDEAPVADGVEKKGEGTTTAEAAPATGSKPDEPGKAGETPSEEKKGEGDAATEQAAPQAPASSEEKAGSAETESATKASTDNSPSSKAEDAPAKEEPKQADVPAAVTAAAATTPAAEDAAAKATAQPPTETGESSQAEENIEAVDETKPKESARQDEGKEEEPEADQEHA

SEQ ID NO: 28879 - protein, 274 aa, Homo sapiens
  REGION 1..274: note = ENSP00000377372
MTKSCSELCHPALHFLPCLGGLRKNLQRAVRPSPYSLGFLTFWISRVEKNDDDQKIEQDGIKPEDKAHKAATKIQASFRGHITRKKLKGEKKDDVQAAEAEANKKDEAPVADGVEKKGEGTTTAEAAPATGSKPDEPGKAGETPSEEKKGEGDAATEQAAPQAPASSEEKAGSAETESATKASTDNSPSSKAEDAPAKEEPKQADVPAAVTAAAATTPAAEDAAAKATAQPPTETGESSQAEENIEAVDETKPKESARQDEGKEEEPEADQEHA

SEQ ID NO: 28880 - protein, 335 aa, Homo sapiens
  REGION 1..335: note = ENSP00000229239
MGKVKVGVNGFGRIGRLVTRAAFNSGKVDIVAINDPFIDLNYMVYMFQYDSTHGKFHGTVKAENGKLVINGNPITIFQERDPSKIKWGDAGAEYVVESTGVFTTMEKAGAHLQGGAKRVIISAPSADAPMFVMGVNHEKYDNSLKIISNASCTTNCLAPLAKVIHDNFGIVEGLMTTVHAITATQKTVDGPSGKLWRDGRGALQNIIPASTGAAKAVGKVIPELNGKLTGMAFRVPTANVSVVDLTCRLEKPAKYDDIKKVVKQASEGPLKGILGYTEHQVVSSDFNSDTHSSTFDAGAGIALNDHFVKLISWYDNEFGYSNRVVDLMAHMASKE

SEQ ID NO: 28881 - protein, 260 aa, Homo sapiens
  REGION 1..260: note = ENSP00000380065
MEEMRDPSKIKWGDAGAEYVVESTGVFTTMEKAGAHLQGGAKRVIISAPSADAPMFVMGVNHEKYDNSLKIISNASCTTNCLAPLAKVIHDNFGIVEGLMTTVHAITATQKTVDGPSGKLWRDGRGALQNIIPASTGAAKAVGKVIPELNGKLTGMAFRVPTANVSVVDLTCRLEKPAKYDDIKKVVKQASEGPLKGILGYTEHQVVSSDFNSDTHSSTFDAGAGIALNDHFVKLISWYDNEFGYSNRVVDLMAHMASKE

SEQ ID NO: 28882 - protein, 335 aa, Homo sapiens; identical to SEQ ID NO: 28880
  REGION 1..335: note = ENSP00000380070

SEQ ID NO: 28883 - protein, 335 aa, Homo sapiens; identical to SEQ ID NO: 28880
  REGION 1..335: note = ENSP00000380068

SEQ ID NO: 28884 - protein, 293 aa, Homo sapiens
  REGION 1..293: note = ENSP00000380067
MVYMFQYDSTHGKFHGTVKAENGKLVINGNPITIFQERDPSKIKWGDAGAEYVVESTGVFTTMEKAGAHLQGGAKRVIISAPSADAPMFVMGVNHEKYDNSLKIISNASCTTNCLAPLAKVIHDNFGIVEGLMTTVHAITATQKTVDGPSGKLWRDGRGALQNIIPASTGAAKAVGKVIPELNGKLTGMAFRVPTANVSVVDLTCRLEKPAKYDDIKKVVKQASEGPLKGILGYTEHQVVSSDFNSDTHSSTFDAGAGIALNDHFVKLISWYDNEFGYSNRVVDLMAHMASKE

SEQ ID NO: 28885 - protein, 293 aa, Homo sapiens; identical to SEQ ID NO: 28884
  REGION 1..293: note = ENSP00000478864

SEQ ID NO: 28886 - protein, 874 aa, Homo sapiens
  REGION 1..874: note = ENSP00000384593
MEKLAAGLAGLRWSMGAFPLDLIVSRCRLPTLACLGPGEYAEGVSERDILLIHSCRQWTTVTAHTLEEGHYVIGPKIDIPLQYPGKFKLLEQARDVREPVRYFSSVEEVASVFPDRIFVMEAITFSVKVVSGEFSEDSEVYNFTLHAGDELTLMGQAEILCAKTTKERSRFTTLLRKLGRAGALAGVGGGGPASAGAAGGTGGGGARPVKGKMPCLICMNHRTNESLSLPFQCQGRFSTRSPLELQMQEGEHTVRAIIERVRLPVNVLVPSRPPRNPYDLHPVREGHCYKLVSIISKTVVLGLALRREGPAPLHFLLLTDTPRFALPQGLLAGDPRVERLVRDSASYCRERFDPDEYSTAVREAPAELAEDCASPRRARLCLPAPRAPGLARAPGPLAPAPAGEGDQEYVSPDWAAAPEPAAPPAEIPYEELWAHQGPEGLVRPPPGLDLISFGAAGPPRREPEAPPPPVPPKSEAVKEECRLLNAPPVPPRGGNGSGRLSSSPPVPPRFPKLQPVHSPSSSLSYYSSGLQDGAGSRSGSGSPSPDTYSLYCYPCTWGDCKVGESSSRPAPGPLPSTTQPSQASRALTEPLSGRAASLLGADTPVKTYHSCPPLFKPSHPQKRFAPFGALNPFSGPAYPSGPSAALSSGPRTTSGPVATSGPAYSPGPASPGQAYSAAPPSSCAPSSSSSSEWQEPVLEPFDPFELGQGSSPEPELLRSQEPRAVGTPGPGPRLSPLGPSKAFEPEGLVLHQVPTPLSPAALQGPEAGGALFLTQGRLEGPPASPRDGATGFGVRDASSWQPPADLSALSLEEVSRSLRFIGLSEDVVSFFARERIDGSIFVQLSEDILADDFHLTKLQVKKIMQFIKGWRPKI

SEQ ID NO: 28887 - protein, 664 aa, Homo sapiens
  REGION 1..664: note = ENSP00000384581
MHRMPDPGKFKLLEQARDVREPVRYFSSVEEVASVFPDRIFVMEAITFSVKVVSGEFSEDSEVYNFTLHAGDELTLMGQAEILCAKTTKERSRFTTLLRKLGRAGALAGVGGGGPASAGAAGGTGGGGARPVKGKMPCLICMNHRTNESLSLPFQCQGRFSTRSPLELQMQEGEHTVRAIIERVRLPVNVLVPSRPPRNPYDLHPVREGHCYKLVSIISKTVVLGLALRREGPAPLHFLLLTDTPRFALPQGLLAGDPRVERLVRDSASYCRERFDPDEYSTAVREAPAELAEDCASPRRARLCLPAPRAPGLARAPGPLAPAPAGEGDQEYVSPDWAAAPEPAAPPAEIPYEELWAHQGPEGLVRPPPGLDLISFGAAGPPRREPEAPPPPVPPKSEAVKEECRLLNAPPVPPRGGNGSGRLSSSPPVPPRFPKLQPVHSPSSSLSYYSSGLQDGAGSRSGSGSPSPDTYSLYCYPCTWGDCKEPVLEPFDPFELGQGSSPEPELLRSQEPRAVGTPGPGPRLSPLGPSKAFEPEGLVLHQVPTPLSPAALQGPEAGGALFLTQGRLEGPPASPRDGATGFGVRDASSWQPPADLSALSLEEVSRSLRFIGLSEDVVSFFARERIDGSIFVQLSEDILADDFHLTKLQVKKIMQFIKGWRPKI

SEQ ID NO: 28888 - protein, 267 aa, Homo sapiens
  REGION 1..267: note = ENSP00000400579
MDPLTKVPCGSQIAQTILWKAKSSLSFGIQPLQTWPTKDPELESQVNLSVSEDLGCRRGDFSRKHYGSVELLISSDADGAIQRAGRFRVENGSSDENATALPGTWRRTDVHLENPEYHTRWYFKYFLGQVHQNYIGNDAEKSPFFLSVTLSDQNNQRVPQYRAILWRKTGTQKICLPYSPTKTLSVKSILSAMNLDKFEKGPREIFHPEIQKDLLVLEEQEGSVNFKFGVLFAKDGQLTDDEMFSNEIGSEPFQKFLNLLGDTITLK

SEQ ID NO: 28889 - protein, 139 aa, Homo sapiens
  REGION 1..139: note = ENSP00000411160
MDPLTKVPCGSQIAQTILWKAKSSLSFGIQPLQTWPTKDPELESQVNLSVSEDLGCRRGDFSRKHYGSVELLISSDADGAIQRAGRFRVENGSSDENATALPGTWRRTDVHLENPEYHTRWYFKYFLGQVHQNYIGNDA

SEQ ID NO: 28890 - protein, 88 aa, Homo sapiens
  REGION 1..88: note = ENSP00000397246
MDPLTKVPCGSQIAQTILWKAKSSLSFGIQPLQTWPTKDPELESQVNLLFPVMLMEPSKGLEDSEWKMALQMRMQLPCLVLGEEQTCT

SEQ ID NO: 28891 - protein, 48 aa, Homo sapiens
  REGION 1..48: note = ENSP00000389679
MDPLTKVPCGSQIAQTILWKAKSSLSFGIQPLQTWPTKDPELESQVNL

SEQ ID NO: 28892 - protein, 110 aa, Homo sapiens
  REGION 1..110: note = ENSP00000416473
MDPLTKVPCGSQIAQTILWKAKSSLSFGIQPLQTWPTKDPELESQVNLSVSEDLGCRRGDFSRKHYGSVELLISSDADGAIQRAGRFRVENGSSDENATALPGTWRRTDV

SEQ ID NO: 28893 - protein, 48 aa, Homo sapiens; identical to SEQ ID NO: 28891
  REGION 1..48: note = ENSP00000396319

SEQ ID NO: 28894 - protein, 167 aa, Homo sapiens
  REGION 1..167: note = ENSP00000411329
MKSSVSEDLGCRRGDFSRKHYGSVELLISSDADGAIQRAGRFRVENGSSDENATALPGTWRRTDVHLENPEYHTRWYFKYFLGQVHQNYIGNDAEKSPFFLSVTLSDQNNQRVPQYRAILWRKTGTQKICLPYSPTKTLSVKSILSAMNLDKFEKGPREIFHPEIQK

SEQ ID NO: 28895 - protein, 1013 aa, Homo sapiens
  REGION 1..1013: note = ENSP00000362485
MVVDFCRRFVARSLCIILMKHFCSSSVSEDLGCRRGDFSRKHYGSVELLISSDADGAIQRAGRFRVENGSSDENATALPGTWRRTDVHLENPEYHTRWYFKYFLGQVHQNYIGNDAEKSPFFLSVTLSDQNNQRVPQYRAILWRKTGTQKICLPYSPTKTLSVKSILSAMNLDKFEKGPREIFHPEIQKDLLVLEEQEGSVNFKFGVLFAKDGQLTDDEMFSNEIGSEPFQKFLNLLGDTITLKGWTGYRGGLDTKNDTTGIHSVYTVYQGHEIMFHVSTMLPYSKENKQQVERKRHIGNDIVTIVFQEGEESSPAFKPSMIRSHFTHIFALVRYNQQNDNYRLKIFSEESVPLFGPPLPTPPVFTDHQEFRDFLLVKLINGEKATLETPTFAQKRRRTLDMLIRSLHQDLMPDLHKNMLNRRSFSDVLPESPKSARKKEEARQAEFVRIGQALKLKSIVRGDAPSSLAASGICKKEPWEPQCFCSNFPHEAVCADPWGQALLVSTDAGVLLVDDDLPSVPVFDRTLPVKQMHVLETLDLLVLRADKGKDARLFVFRLSALQKGLEGKQAGKSRSDCRENKLEKTKGCHLYAINTHHSRELRIVVAIRNKLLLITRKHNKPSGVTSTSLLSPLSESPVEEFQYIREICLSDSPMVMTLVDGPAEESDNLICVAYRHQFDVVNESTGEAFRLHHVEANRVNFVAAIDVYEDGEAGLLLCYNYSCIYKKVCPFNGGSFLVQPSASDFQFCWNQAPYAIVCAFPYLLAFTTDSMEIRLVVNGNLVHTAVVPQLQLVASRSDIYFTATAAVNEVSSGGSSKGASARNSPQTPPGRDTPVFPSSLGEGEIQSKNLYKIPLRNLVGRSIERPLKSPLVSKVITPPTPISVGLAAIPVTHSLSLSRMEIKEIASRTRRELLGLSDEGGPKSEGAPKAKSKPRKRLEESQGGPKPGAVRSSSSDRIPSGSLESASTSEANPEGHSASSDQDPVADREGSPVSGSSPFQLTAFSDEDIIDLK

SEQ ID NO: 28896 - protein, 802 aa, Homo sapiens
  REGION 1..802: note = ENSP00000362484
MKHFCSSSVSEDLGCRRGDFSRKHYGSVELLISSDADGAIQRAGRFRVENGSSDENATALPGTWRRTDVHLENPEYHTRWYFKYFLGQVHQNYIGNDAEKSPFFLSVTLSDQNNQRVPQYRAILWRKTGTQKICLPYSPTKTLSVKSILSAMNLDKFEKGPREIFHPEIQKDLLVLEEQEGSVNFKFGVLFAKDGQLTDDEMFSNEIGSEPFQKFLNLLGDTITLKGWTGYRGGLDTKNDTTGIHSVYTVYQGHEIMFHVSTMLPYSKENKQQVERKRHIGNDIVTIVFQEGEESSPAFKPSMIRSHFTHIFALVRYNQQNDNYRLKIFSEESVPLFGPPLPTPPVFTDHQEFRDFLLVKLINGEKATLETPTFAQKRRRTLDMLIRSLHQDLMPDLHKNMLNRRSFSDVLPESPKSARKKEEARQAEFVRIGQALKLKSIVRGDAPSSLAASGICKKEPWEPQCFCSNFPHEAVCADPWGQALLVSTDAGVLLVDDDLPSVPVFDRTLPVKQMHVLETLDLLVLRADKGKDARLFVFRLSALQKGLEGKQAGKSRSDCRENKLEKTKGCHLYAINTHHSRELRIVVAIRNKLLLITRKHNKPSGVTSTSLLSPLSESPVEEFQYIREICLSDSPMVMTLVDGPAEESDNLICVAYRHQFDVVNESTGEAFRLHHVEANRVNFVAAIDVYEDGEAGLLLCYNYSCIYKKVCPFNGGSFLVQPSASDFQFCWNQAPYAIVCAFPYLLAFTTDSMEIRLVVNGNLVHTAVVPQLQLVASRVKFNQKICTRFHLETSWAEASNDL

SEQ ID NO: 28897 - protein, 81 aa, Homo sapiens
  REGION 1..81: note = ENSP00000474589
  VARIANT 1: note = Any amino acid
XMPDLHKNMLNRRSFSDVLPESPKSARKKEEARQAEFVRIGQALKLKSIVRGDAPSSLAASGICKKEMTFHQCPCLTELCQ

SEQ ID NO: 28898 - protein, 991 aa, Homo sapiens
  REGION 1..991: note = ENSP00000396205
MKSSVSEDLGCRRGDFSRKHYGSVELLISSDADGAIQRAGRFRVENGSSDENATALPGTWRRTDVHLENPEYHTRWYFKYFLGQVHQNYIGNDAEKSPFFLSVTLSDQNNQRVPQYRAILWRKTGTQKICLPYSPTKTLSVKSILSAMNLDKFEKGPREIFHPEIQKDLLVLEEQEGSVNFKFGVLFAKDGQLTDDEMFSNEIGSEPFQKFLNLLGDTITLKGWTGYRGGLDTKNDTTGIHSVYTVYQGHEIMFHVSTMLPYSKENKQQVERKRHIGNDIVTIVFQEGEESSPAFKPSMIRSHFTHIFALVRYNQQNDNYRLKIFSEESVPLFGPPLPTPPVFTDHQEFRDFLLVKLINGEKATLETPTFAQKRRRTLDMLIRSLHQDLMPDLHKNMLNRRSFSDVLPESPKSARKKEEARQAEFVRIGQALKLKSIVRGDAPSSLAASGICKKEPWEPQCFCSNFPHEAVCADPWGQALLVSTDAGVLLVDDDLPSVPVFDRTLPVKQMHVLETLDLLVLRADKGKDARLFVFRLSALQKGLEGKQAGKSRSDCRENKLEKTKGCHLYAINTHHSRELRIVVAIRNKLLLITRKHNKPSGVTSTSLLSPLSESPVEEFQYIREICLSDSPMVMTLVDGPAEESDNLICVAYRHQFDVVNESTGEAFRLHHVEANRVNFVAAIDVYEDGEAGLLLCYNYSCIYKKVCPFNGGSFLVQPSASDFQFCWNQAPYAIVCAFPYLLAFTTDSMEIRLVVNGNLVHTAVVPQLQLVASRSDIYFTATAAVNEVSSGGSSKGASARNSPQTPPGRDTPVFPSSLGEGEIQSKNLYKIPLRNLVGRSIERPLKSPLVSKVITPPTPISVGLAAIPVTHSLSLSRMEIKEIASRTRRELLGLSDEGGPKSEGAPKAKSKPRKRLEESQGGPKPGAVRSSSSDRIPSGSLESASTSEANPEGHSASSDQDPVADREGSPVSGSSPFQLTAFSDEDIIDLK

SEQ ID NO: 28899 - protein, 345 aa, Homo sapiens
  REGION 1..345: note = ENSP00000298743
MVAALLGGGGEARGGTVPGAWLCLMALLQLLGSAPRGSGLAHGRRLICWQALLQCQGEPECSYAYNQYAEACAPVLAQHGGGDAPGAAAAAFPASAASFSSRWRCPSHCISALIQLNHTRRGPALEDCDCAQDENCKSTKRAIEPCLPRTSGGGAGGPGAGGVMGCTEARRRCDRDSRCNLALSRYLTYCGKVFNGLRCTDECRTVIEDMLAMPKAALLNDCVCDGLERPICESVKENMARLCFGAELGNGPGSSGSDGGLDDYYDEDYDDEQRTGGAGGEQPLDDDDGVPHPPRPGSGAAASGGRGDLPYGPGRRSSGGGGRLAPRGAWTPLASILLLLLGPLF

SEQ ID NO: 28900 - protein, 423 aa, Homo sapiens
  REGION 1..423: note = ENSP00000379895
MLRVRCLRGGSRGAEAVHYIGSRLGRTLTGWVQRTFQSTQAATASSRNSCAADDKATEPLPKDCPVSSYNEWDPLEEVIVGRAENACVPPFTIEVKANTYEKYWPFYQKQGGHYFPKDHLKKAVAEIEEMCNILKTEGVTVRRPDPIDWSLKYKTPDFESTGLYSAMPRDILIVVGNEIIEAPMAWRSRFFEYRAYRSIIKDYFHRGAKWTTAPKPTMADELYNQDYPIHSVEDRHKLAAQGKFVTTEFEPCFDAADFIRAGRDIFAQRSQVTNYLGIEWMRRHLAPDYRVHIISFKDPNPMHIDATFNIIGPGIVLSNPDRPCHQIDLFKKAGWTIITPPTPIIPDDHPLWMSSKWLSMNVLMLDEKRVMVDANEVPIQKMFEKLGITTIKVNIRNANSLGGGFHCWTCDVRRRGTLQSYLD

SEQ ID NO: 28901 - protein, 391 aa, Homo sapiens
  REGION 1..391: note = ENSP00000454008
MLRVRCLRGGSRGAEAVHYIGSRLGRTLTGWVQRTFQSTQAATASSRNSCAADDKATEPLPKDCPVSSYNEWDPLEEVIVGRAENACVPPFTIEVKANTYEKYWPFYQKQGGHYFPKDHLKKAVAEIEEMCNILKTEGVTVRRPDPIDWSLKYKTPDFESTGLYSAMPRDILIVVGNEIIEAPMAWRSRFFEYRAYRSIIKDYFHRGAKWTTAPKPTMADELYNQDYPIHSVEDRHKLAAQGKFVTTEFEPCFDAADFIRAGRDIFAQRSQVTNYLGIEWMRRHLAPDYRVHIISFKDPNPMHIDATFNIIGPGIVLSNPDRPCHQIDLFKKAGWTIITPPTPIIPDDHPLWMSSKWLSMNVLMLDEKRVMVDANEVPIQKMFEKLGMYNK

SEQ ID NO: 28902 - protein, 167 aa, Homo sapiens
  REGION 1..167: note = ENSP00000453781
MLRVRCLRGGSRGAEAVHYIGSRANTYEKYWPFYQKQGGHYFPKDHLKKAVAEIEEMCNILKTEGVTVRRPDPIDWSLKYKTPDFESTGLYSAMPRDILIVVGNEIIEAPMAWRSRFFEYRAYRSIIKDYFHRGAKWTTAPKPTMADELYNQDYPIHSVEDRHKLAA

SEQ ID NO: 28903 - protein, 32 aa, Homo sapiens
  REGION 1..32: note = ENSP00000453151
MCNILKTEGVTVRRPDPIDWSLKYKTPDFEST

SEQ ID NO: 28904 - protein, 31 aa, Homo sapiens
  REGION 1..31: note = ENSP00000453860
MCNILKTEGVTVRRPDPIDWSLKYKTPDFES

SEQ ID NO: 28905 - protein, 15 aa, Homo sapiens
  REGION 1..15: note = ENSP00000453087
MCNILKTEGVTVRRP

SEQ ID NO: 28906 - protein, 96 aa, Homo sapiens
  REGION 1..96: note = ENSP00000452971
MLRVRCLRGGSRGAEAVHYIGSRLGRTLTGWVQRTFQSTQAATASSRNSCAADDKATEPLPKDCPVSSYNEWDPLEEVIVGRAENACVPPFTIEVK

SEQ ID NO: 28907 - protein, 329 aa, Homo sapiens
  REGION 1..329: note = ENSP00000484732
MELHILEHRLQVASVAKESIPLFTYGLIKLAFLSSKTRCKFFSLTETPEDYTIIVDEEGFLELPSSEHLSVADATWLALNVVSGGGSFSSSQPIGVTKIAKSVIAPLADQNISVFMLSTYQTDFILVRERDLPFVTHTLSSEFTILRVVNGETVAAENLGITNGFVKPKLVQRPVIHPLSSPSNRFCVTSLDPDTLPAVATLLMDVMFYSNGVKDPMATGDDCGHIRFFSFSLIEGYISLVMDVQTQQRFPSNLLFTSASGELWKMVRIGGQPLGFDECGIVAQISEPLAAADIPAYYISTFKFDHALVPEENINGVISALKVSQAEKH

SEQ ID NO: 28908 - protein, 329 aa, Homo sapiens
  REGION 1..329: note = ENSP00000384183
MELHILEHRVRVLSVARPGLWLYTHPLIKLLFLPRRSRCKFFSLTETPEDYTLMVDEEGFKELPPSEFLQVAEATWLVLNVSSHSGAAVQAAGVTKIARSVIAPLAEHHVSVLMLSTYQTDFILVREQDLSVVIHTLAQEFDIYREVGGEPVPVTRDDSSNGFPRTQHGPSPTVHPIQSPQNRFCVLTLDPETLPAIATTLIDVLFYSHSTPKEAASSSPEPSSITFFAFSLIEGYISIVMDAETQKKFPSDLLLTSSSGELWRMVRIGGQPLGFDECGIVAQIAGPLAAADISAYYISTFNFDHALVPEDGIGSVIEVLQRRQEGLAS

SEQ ID NO: 28909 - protein, 291 aa, Homo sapiens
  REGION 1..291: note = ENSP00000385868
MELHILEHRVRVLSVARPGLWLYTHPLIKLLFLPRRSRCKFFSLTETPEDYTLMVDEEGFKELPPSEFLQVAEATWLVLNVSSHSGAAVQAAGVTKIARSVIAPLAEHHVSVLMLSTYQTDFILVREQDLSVVIHTLAQEFDIYREVGGEPVPVTRDDSSNGFPRTQHGPSPTVHPIQSPQNRFCVLTLDPETLPAIATTLIDVLFYSHRFPSDLLLTSSSGELWRMVRIGGQPLGFDECGIVAQIAGPLAAADISAYYISTFNFDHALVPEDGIGSVIEVLQRRQEGLAS

SEQ ID NO: 28910 - protein, 42 aa, Homo sapiens
  REGION 1..42: note = ENSP00000411842
MELHILEHRVRVLSVARPGLWLYTHPLIKLLFLPRRSRAAPI

SEQ ID NO: 28911 - protein, 42 aa, Homo sapiens; identical to SEQ ID NO: 28910
  REGION 1..42: note = ENSP00000390869

SEQ ID NO: 28912 - protein, 74 aa, Homo sapiens
  REGION 1..74: note = ENSP00000416041
MELHILEHRVRVLSVARPGLWLYTHPLIKLLFLPRRSRCKFFSLTETPEDYTLMVDEEGFKDEETETQITHPRS

SEQ ID NO: 28913 - protein, 62 aa, Homo sapiens
  REGION 1..62: note = ENSP00000408419
MELHILEHRVRVLSVARPGLWLYTHPLIKLLFLPRRSRCAPGFGSADRGWGLCSRSGPGSED

SEQ ID NO: 28914 - protein, 62 aa, Homo sapiens
  REGION 1..62: note = ENSP00000407871
  VARIANT 1: note = Any amino acid
XELHILEHRVRVLSVARPGLWLYTHPLIKLLFLPRRSRCAPGFGSADRGWGLCSRSGPGSED

SEQ ID NO: 28915 - protein, 146 aa, Homo sapiens
  REGION 1..146: note = ENSP00000393218
MWRRQEEVLPKINLTSCGFPNTNLFPWEFGGGFEKFGNFSIQVPGMQMGQPVPETGPAILLDGYSGPAYSDTYSSAGDSVYTYFSAVAGQDGEVDAEELQRCLTQSGINGTYSPFSLETCRIMIAMLDRDHTGKMGFNAFKELWAA

SEQ ID NO: 28916 - protein, 87 aa, Homo sapiens
  REGION 1..87: note = ENSP00000412899
MQMGQPVPETGPAILLDGYSGPAYSDTYSSAGDSVYTYFSAVAGQDGEVDAEELQRCLTQSGINGTYSPFSLETCRIMIAMLDRKET

SEQ ID NO: 28917 - protein, 217 aa, Homo sapiens
  REGION 1..217: note = ENSP00000394842
MAYPGYGGGFGNFSIQVPGMQMGQPVPETGPAILLDGYSGPAYSDTYSSAGDSVYTYFSAVAGQDGEVDAEELQRCLTQSGINGTYSPFSLETCRIMIAMLDRDHTGKMGFNAFKELWAALNAWKENFMTVDQDGSGTVEHHELRQAIGLMGYRLSPQTLTTIVKRYSKNGRIFFDDYVACCVKLRALTDFFRKRDHLQQGSANFIYDDFLQGTMAI

SEQ ID NO: 28918 - protein, 132 aa, Homo sapiens
  REGION 1..132: note = ENSP00000403805
MQMGQPVPETGPAILLDGYSGPAYSDTYSSAGDSVYTYFSAVAGQDGEVDAEELQRCLTQSGINGTYSPFSLETCRIMIAMLDRDHTGKMGFNAFKELWAALNAWKENFMTVDQDGSGTVEHHELRQAIGLM

SEQ ID NO: 28919 - protein, 198 aa, Homo sapiens
  REGION 1..198: note = ENSP00000233612
MQMGQPVPETGPAILLDGYSGPAYSDTYSSAGDSVYTYFSAVAGQDGEVDAEELQRCLTQSGINGTYSPFSLETCRIMIAMLDRDHTGKMGFNAFKELWAALNAWKENFMTVDQDGSGTVEHHELRQAIGLMGYRLSPQTLTTIVKRYSKNGRIFFDDYVACCVKLRALTDFFRKRDHLQQGSANFIYDDFLQGTMAI

SEQ ID NO: 28920 - protein, 146 aa, Homo sapiens
  REGION 1..146: note = ENSP00000408620
  VARIANT 1: note = Any amino acid
XFSLETCRIMIAMLDRDHTGKMGFNAFKELWAALNAWKENFMTVDQDGSGTVEHHELRQAIGLMGYRLSPQTLTTIVKRYSKNGRIFFDDYVACCVKLRALTDFFRKRDHLQQGSANFIYDDCGGMNVINFEHLDTERPESVCKSD

SEQ ID NO: 28921 - protein, 233 aa, Homo sapiens
  REGION 1..233: note = ENSP00000444011
MEKGPVRAPAEKPRGARCSNGFPERDPPRPGPSRPAEKPPRPEAKSAQPADGWKGERPRSEEDNELNLPNLAAAYSSILSSLGENPQRQGLLKTPWRAASAMQFFTKGYQETISDVLNDAIFDEDHDEMVIVKDIDMFSMCEHHLVPFVGKVHIGYLPNKQVLGLSKLARIVEIYSRRLQVQERLTKQIAVAITEALRPAGVGVVVEATKSNKYNKGLSPLLSSCHLFVAILK

SEQ ID NO: 28922 - protein, 250 aa, Homo sapiens
  REGION 1..250: note = ENSP00000419045
MEKGPVRAPAEKPRGARCSNGFPERDPPRPGPSRPAEKPPRPEAKSAQPADGWKGERPRSEEDNELNLPNLAAAYSSILSSLGENPQRQGLLKTPWRAASAMQFFTKGYQETISDVLNDAIFDEDHDEMVIVKDIDMFSMCEHHLVPFVGKVHIGYLPNKQVLGLSKLARIVEIYSRRLQVQERLTKQIAVAITEALRPAGVGVVVEATHMCMVMRGVQKMNSKTVTSTMLGVFREDPKTREEFLTLIRS

SEQ ID NO: 28923 - protein, 213 aa, Homo sapiens
  REGION 1..213: note = ENSP00000445246
MEKGPVRAPAEKPRGARCSNGFPERDPPRPGPSRPAEKPPRPEAKSAQPADGWKGERPRSEEDNELNLPNLAAAYSSILSSLGENPQRQGLLKTPWRAASAMQFFTKGYQETISDVLNDAIFDEDHDEMVIVKDIDMFSMCEHHLVPFVGKVHIGYLPNKQVLGLSKLARIVEIYSRRLQVQERLTKQIAVAITEALRPAGVGVVVEATSAEP

SEQ ID NO: 28924 - protein, 250 aa, Homo sapiens; identical to SEQ ID NO: 28922
  REGION 1..250: note = ENSP00000477796

SEQ ID NO: 28925 - protein, 250 aa, Homo sapiens; identical to SEQ ID NO: 28922
  REGION 1..250: note = ENSP00000378890

SEQ ID NO: 28926 - protein, 149 aa, Homo sapiens
  REGION 1..149: note = ENSP00000338009
GGVRTGMPRAGMGASLRPGTGPHPDTGDRKQIYNILSTLGLRPSTTDCDIVRRACESVSTRAAHMCSAGLAGVINRMRESRSEDVMRITVGVDGSVYKLHPSFKERFHASVRRLTPSCEITFIESEEGSGRGAALVSAVACKKACMLGQ

SEQ ID NO: 28927 - protein, 465 aa, Homo sapiens [sequence omitted]

SEQ ID NO: 28928 - protein, 464 aa, Homo sapiens
  REGION 1..464: note = ENSP00000379142
MPRPRSQLPQPNSQVEQILAEFQLQEEDLKKVMRRMQKEMDRGLRLETHEEASVKMLPTYVRSTPEGSEVGDFLSLDLGGTNFRVMLVKVGEGEEGQWSVKTKHQMYSIPEDAMTGTAEMLFDYISECISDFLDKHQMKHKKLPLGFTFSFPVRHEDIDKGILLNWTKGFKASGAEGNNVVGLLRDAIKRRGDFEMDVVAMVNDTVATMISCYYEDHQCEVGMIVGTGCNACYMEEMQNVELVEGDEGRMCVNTEWGAFGDSGELDEFLLEYDRLVDESSANPGQQLYEKLIGGKYMGELVRLVLLRLVDENLLFHGEASEQLRTRGAFETRFVSQVESDTGDRKQIYNILSTLGLRPSTTDCDIVRRACESVSTRAAHMCSAGLAGVINRMRESRSEDVMRITVGVDGSVYKLHPSFKERFHASVRRLTPSCEITFIESEEGSGRGAALVSAVACKKACMLGQ

SEQ ID NO: 28929 - protein, 466 aa, Homo sapiens
  REGION 1..466: note = ENSP00000223366
MAMDVTRSQAQTALTLVEQILAEFQLQEEDLKKVMRRMQKEMDRGLRLETHEEASVKMLPTYVRSTPEGSEVGDFLSLDLGGTNFRVMLVKVGEGEEGQWSVKTKHQMYSIPEDAMTGTAEMLFDYISECISDFLDKHQMKHKKLPLGFTFSFPVRHEDIDKGILLNWTKGFKASGAEGNNVVGLLRDAIKRRGDFEMDVVAMVNDTVATMISCYYEDHQCEVGMIVGTGCNACYMEEMQNVELVEGDEGRMCVNTEWGAFGDSGELDEFLLEYDRLVDESSANPGQQLYEKLIGGKYMGELVRLVLLRLVDENLLFHGEASEQLRTRGAFETRFVSQVESDTGDRKQIYNILSTLGLRPSTTDCDIVRRACESVSTRAAHMCSAGLAGVINRMRESRSEDVMRITVGVDGSVYKLHPSFKERFHASVRRLTPSCEITFIESEEGSGRGAALVSAVACKKACMLGQ

SEQ ID NO: 28930 - protein, 448 aa, Homo sapiens
  REGION 1..448: note = ENSP00000402840
MLDDRARMEAAKKEKVEQILAEFQLQEEDLKKVMRRMQKEMDRGLRLETHEEASVKMLPTYVRSTPEGSEVGDFLSLDLGGTNFRVMLVKVGEGEEGQWSVKTKHQMYSIPEDAMTGTAEMMKHKKLPLGFTFSFPVRHEDIDKGILLNWTKGFKASGAEGNNVVGLLRDAIKRRGDFEMDVVAMVNDTVATMISCYYEDHQCEVGMIVGTGCNACYMEEMQNVELVEGDEGRMCVNTEWGAFGDSGELDEFLLEYDRLVDESSANPGQQLYEKLIGGKYMGELVRLVLLRLVDENLLFHGEASEQLRTRGAFETRFVSQVESDTGDRKQIYNILSTLGLRPSTTDCDIVRRACESVSTRAAHMCSAGLAGVINRMRESRSEDVMRITVGVDGSVYKLHPSFKERFHASVRRLTPSCEITFIESEEGSGRGAALVSAVACKKACMLGQ

SEQ ID NO: 28931 - protein, 464 aa, Homo sapiens; identical to SEQ ID NO: 28928
  REGION 1..464: note = ENSP00000482149

SEQ ID NO: 28932 - protein, 393 aa, Homo sapiens
  REGION 1..393: note = ENSP00000366185
MFLEEASQQEKLAKEWCFKPCEIRELSHHEFFMPGLVDTHIHASQYSFAGSSIDLPLLEWLTKYTFPAEHRFQNIDFAEEVYTRVVRRTLKNGTTTACYFATIHTDSSLLLADITDKFGQRAFVGKVCMDLNDTFPEYKETTEESIKETERFVSEMLQKNSHISENRDEVEAVKNLYPSYKNYTSVYDKNNLLTNKTVMAHGCYLSAEELNVFHERGASIAHCPNSNLSLSSGFLNVLEVLKHEVKIGLGTDVAGGYSYSMLDAIRRAVMVSNILLINKVNEKSLTLKEVFRLATLGGSQALGLDGEIGNFEVGKEFDAILINPKASDSPIDLFYGDFFGDISEAVIQKFLYLGDDRNIEEVYVGGKQVVPFSSSVKETIHLPASSPHPPPFP

SEQ ID NO: 28933 - protein, 454 aa, Homo sapiens
  REGION 1..454: note = ENSP00000351170
MCAAQMPPLAHIFRGTFVHSTWTCPMEVLRDHLLGVSDSGKIVFLEEASQQEKLAKEWCFKPCEIRELSHHEFFMPGLVDTHIHASQYSFAGSSIDLPLLEWLTKYTFPAEHRFQNIDFAEEVYTRVVRRTLKNGTTTACYFATIHTDSSLLLADITDKFGQRAFVGKVCMDLNDTFPEYKETTEESIKETERFVSEMLQKNYSRVKPIVTPRFSLSCSETLMGELGNIAKTRDLHIQSHISENRDEVEAVKNLYPSYKNYTSVYDKNNLLTNKTVMAHGCYLSAEELNVFHERGASIAHCPNSNLSLSSGFLNVLEVLKHEVKIGLGTDVAGGYSYSMLDAIRRAVMVSNILLINKVNEKSLTLKEVFRLATLGGSQALGLDGEIGNFEVGKEFDAILINPKASDSPIDLFYGDFFGDISEAVIQKFLYLGDDRNIEEVYVGGKQVVPFSSSV

SEQ ID NO: 28934 - protein, 454 aa, Homo sapiens; identical to SEQ ID NO: 28933
  REGION 1..454: note = ENSP00000436619

SEQ ID NO: 28935 - protein, 195 aa, Homo sapiens
  REGION 1..195: note = ENSP00000403897
MTLFQNTRRPLRNRSRKLRDCHSVTQAGVQWRDLSSLKPPPPVFKRFSCLSLPSSWDYRFVSEMLQKNYSRVKPIVTPRFSLSCSETLMGELGNIAKTRDLHIQSHISENRDEVEAVKNLYPSYKNYTSVYDKNNLLTNKTVMAHGCYLSAEELNVFHERGASIAHCPNSNLSLSSGFLNVLEVLKHEVKIGLGT

SEQ ID NO: 28936 - protein, 176 aa, Homo sapiens
  REGION 1..176: note = ENSP00000434682
  VARIANT 1: note = Any amino acid
XGCYLSAEELNVFHERGASIAHCPNSNLSLSSGFLNVLEVLKHEVKIGLGTDVAGGYSYSMLDAIRRAVMVSNILLINKVNEKSLTLKEVFRLATLGGSQALGLDGEIGNFEVGKEFDAILINPKASDSPIDLFYGDFFGDISEAVIQKFLYLGDDRNIEEVYVGGKQVVPFSSSV

SEQ ID NO: 28937 - protein, 179 aa, Homo sapiens
  REGION 1..179: note = ENSP00000400857
ERGASIAHCPNSNLSLSSGFLNVLEVLKHEVKIGLGTDVAGGYSYSMLDAIRRAVMVSNILLINKVNEKSLTLKEVFRLATLGGSQALGLDGEIGNFEVGKEFDAILINPKASDSPIDLFYGDFFGDISEAVIQKFLYLGDDRNIEEVYVGGKQVVPFSSSVKETIHLPASSPHPPPFP

SEQ ID NO: 28938 - protein, 471 aa, Homo sapiens
  REGION 1..471: note = ENSP00000238018
MCAAQMPPLAHIFRGTFVHSTWTCPMEVLRDHLLGVSDSGKIVFLEEASQQEKLAKEWCFKPCEIRELSHHEFFMPGLVDTHIHASQYSFAGSSIDLPLLEWLTKYTFPAEHRFQNIDFAEEVYTRVVRRTLKNGTTTACYFATIHTDSSLLLADITDKFGQRAFVGKVCMDLNDTFPEYKETTEESIKETERFVSEMLQKNYSRVKPIVTPRFSLSCSETLMGELGNIAKTRDLHIQSHISENRDEVEAVKNLYPSYKNYTSVYDKNNLLTNKTVMAHGCYLSAEELNVFHERGASIAHCPNSNLSLSSGFLNVLEVLKHEVKIGLGTDVAGGYSYSMLDAIRRAVMVSNILLINKVNEKSLTLKEVFRLATLGGSQALGLDGEIGNFEVGKEFDAILINPKASDSPIDLFYGDFFGDISEAVIQKFLYLGDDRNIEEVYVGGKQVVPFSSSVKETIHLPASSPHPPPFP

SEQ ID NO: 28939 - protein, 380 aa, Homo sapiens
  REGION 1..380: note = ENSP00000437972
MPGLVDTHIHASQYSFAGSSIDLPLLEWLTKYTFPAEHRFQNIDFAEEVYTRVVRRTLKNGTTTACYFATIHTDSSLLLADITDKFGQRAFVGKVCMDLNDTFPEYKETTEESIKETERFVSEMLQKNYSRVKPIVTPRFSLSCSETLMGELGNIAKTRDLHIQSHISENRDEVEAVKNLYPSYKNYTSVYDKNNLLTNKTVMAHGCYLSAEELNVFHERGASIAHCPNSNLSLSSGFLNVLEVLKHEVKIGLGTDVAGGYSYSMLDAIRRAVMVSNILLINKVNEKSLTLKEVFRLATLGGSQALGLDGEIGNFEVGKEFDAILINPKASDSPIDLFYGDFFGDISEAVIQKFLYLGDDRNIEEVYVGGKQVVPFSSSV

SEQ ID NO: 28940 - protein, 478 aa, Homo sapiens
  REGION 1..478: note = ENSP00000464145
MAHVPARTSPGPGPQLLLLLLPLFLLLLRDVAGSHRAPAWSALPAAADGLQGDRDLQRHPGDAAATLGPSAQDMVAVHMHRLYEKYSRQGARPGGGNTVRSFRARLEVVDQKAVYFFNLTSMQDSEMILTATFHFYSEPPRWPRALEVLCKPRAKNASGRPLPLGPPTRQHLLFRSLSQNTATQGLLRGAMALAPPPRGLWQAKDISPIVKAARRDGELLLSAQLDSEERDPGVPRPSPYAPYILVYANDLAISEPNSVAVTLQRYDPFPAGDPEPRAAPNNSADPRVRRAAQATGPLQDNELPGLDERPPRAHAQHFHKHQLWPSPFRALKPRPGRKDRRKKGQEVFMAASQVLDFDEKTMQKARRKQWDEPRVCSRRYLKVDFADIGWNEWIISPKSFDAYYCAGACEFPMPKIVRPSNHATIQSIVRAVGIIPGIPEPCCVPDKMNSLGVLFLDENRNVVLKVYPNMSVDTCACR

SEQ ID NO: 28941 - protein, 407 aa, Homo sapiens
  REGION 1..407: note = ENSP00000257868
MVLAAPLLLGFLLLALELRPRGEAAEGPAAAAAAAAAAAAAGVGGERSSRPAPSVAPEPDGCPVCVWRQHSRELRLESIKSQILSKLRLKEAPNISREVVKQLLPKAPPLQQILDLHDFQGDALQPEDFLEEDEYHATTETVISMAQETDPAVQTDGSPLCCHFHFSPKVMFTKVLKAQLWVYLRPVPRPATVYLQILRLKPLTGEGTAGGGGGGRRHIRIRSLKIELHSRSGHWQSIDFKQVLHSWFRQPQSNWGIEINAFDPSGTDLAVTSLGPGAEGLHPFMELRVLENTKRSRRNLGLDCDEHSSESRCCRYPLTVDFEAFGWDWIIAPKRYKANYCSGQCEYMFMQKYPHTHLVQQANPRGSAGPCCTPTKMSPINMLYFNDKQQIIYGKIPGMVVDRCGCS

SEQ ID NO: 28942 - protein, 380 aa, Homo sapiens
  REGION 1..380: note = ENSP00000448390
  VARIANT 1: note = Any amino acid
XAAAAAAAAAAAAAGVGGERSSRPAPSVAPEPDGCPVCVWRQHSRELRLESIKSQILSKLRLKEAPNISREVVKQLLPKAPPLQQILDLHDFQGDALQPEDFLEEDEYHATTETVISMAQETDPAVQTDGSPLCCHFHFSPKVMFTKVLKAQLWVYLRPVPRPATVYLQILRLKPLTGEGTAGGGGGGRRHIRIRSLKIELHSRSGHWQSIDFKQVLHSWFRQPQSNWGIEINAFDPSGTDLAVTSLGPGAEGLHPFMELRVLENTKRSRRNLGLDCDEHSSESRCCRYPLTVDFEAFGWDWIIAPKRYKANYCSGQCEYMFMQKYPHTHLVQQANPRGSAGPCCTPTKMSPINMLYFNDKQQIIYGKIPGMVVDRCGCS

SEQ ID NO: 28943 - protein, 623 aa, Homo sapiens
  REGION 1..623: note = ENSP00000365390
MLLFLWIETSSEYFNFDWVTFLGTGYWFFWSIFILSLARILTAYSSLLLLLGFLLLWERIELYLHLCHKILILLVILLCVILMFIICKFWKERWLVAGLSMQIFAPYVHLVSITVMVILFWPVAFYVACLEREVRMRRYRMTHSEKKRLKQCNVITRLRGLQVPVGLPFLLILLGLYLMPLGIYSPCIQEKENLGPKPTIFGHRGAPMLGPENTMMSFEKAVEHGAHGLETDIHLSYDHVPFLMHDFDLKRTTNIGEVQPESACENPAFFNWDFLSTLNAGKWFVKPELRPFYNMKPLSEADKERARNQSIPTLADLLTLAEKERKFVIFDLHRPPPKHPLRHTFVRQVVSVILASKIEQHLIFWLPAHDRQYVRSVAPGFQHVGRLVSIETLAKNNISIINVDYKKLFPNGLRDYKAANIHINVYTVNEPWLFSLAWCSRINSVTTDNIGLLSQLDHPHFFMTPKFYVFMWLLADIISVLFIVAIFCFHWRRETEKEKLFETSSTRTDTQSGNLHIAMKPPVRVVEGPWTLAALYPALPKSGKEHQGHFNFAAPSKKLLPIKNAVTPLKPGKHEIQPPMPTVVFELTQAPTRQATSEATFQTTLPTLKVDKPTMPSIEVPYP

SEQ ID NO: 28944 - protein, 520 aa, Homo sapiens
  REGION 1..520: note = ENSP00000320815
MLLFLWIETSSEYFNFDWVTFLGTGYWFFWSIFILSLARILTAYSSLLLLLGFLLLWERIELYLHLCHKILILLVILLCVILMFIICKFWKERWLVAGLSMQIFAPYVHLVSITVMVILFWPVAFYVACLEREVRMRRYRMTHSEKKRLKQCNVITRLRGLQVPVGLPFLLILLGLYLMPLGIYSPCIQEKENLGPKPTIFGHRGAPMLGPENTMMSFEKAVEHGAHGLETDIHLSYDHVPFLMHDFDLKRTTNIGEVQPESACENPAFFNWDFLSTLNAGKWFVKPELRPFYNMKPLSEADKERARNQSIPTLADLLTLAEKERKFVIFDLHRPPPKHPLRHTFVRQVVSVILASKIEQHLIFWLPAHDRQYVRSVAPGFQHVGRLVSIETLAKNNISIINVDYKKLFPNGLRDYKAANIHINVYTVNEPWLFSLAWCSRINSVTTDNIGLLSQLDHPHFFMTPKFYVFMWLLADIISVLFIVAIFCFHWRRETEKEKLFETSSTRTDTQSGSKNEEDR

SEQ ID NO: 28945 - protein, 467 aa, Homo sapiens
  REGION 1..467: note = ENSP00000434050
MSAVAQLWEDEWEVLLISLQGTAPFLHVGAVAAVTMLSWIVAGQFARAERTSSQVTILCTFFTVVFALYLAPLTISSPCIMEKKDLGPKPALIGHRGAPMLAPEHTLMSFRKALEQKLYGLQADITISLDGVPFLMHDTTLRRTTNVEEEFPELARRPASMLNWTTLQRLNAGQWFLKTDPFWTASSLSPSDHREAQNQSICSLAELLELAKGNATLLLNLRDPPREHPYRSSFINVTLEAVLHSGFPQHQVMWLPSRQRPLVRKVAPGFQQTSGSKEAVASLRRGHIQRLNLRYTQVSRQELRDYASWNLSVNLYTVNAPWLFSLLWCAGVPSVTSDNSHALSQVPSPLWIMPPDEYCLMWVTADLVSFTLIVGIFVLQKWRLGGIRSYNPEQIMLSAAVRRTSRDVSIMKEKLIFSEISDGVEVSDVLSVCSDNSYDTYANSTATPVGPRGGGSHTKTLIERSGR

SEQ ID NO: 28946 - protein, 135 aa, Homo sapiens
  REGION 1..135: note = ENSP00000437123
MVRHQPLQYYEPQLCLSCLTGIYGCRWKRYQRSHDDTTPWERLWFLLLTFTFGLTLTWLYFWWEVHNDYDEFNWYLYNRMGYWSDWPVPILVTTAAAFAYIAGLLVLALCHIAVGQQMNLHWLHKASSGLPLSPL

SEQ ID NO: 28947 - protein, 486 aa, Homo sapiens
  REGION 1..486: note = ENSP00000437049
MVRHQPLQYYEPQLCLSCLTGIYGCRWKRYQRSHDDTTPGTAPFLHVGAVAAVTMLSWIVAGQFARAERTSSQVTILCTFFTVVFALYLAPLTISSPCIMEKKDLGPKPALIGHRGAPMLAPEHTLMSFRKALEQKLYGLQADITISLDGVPFLMHDTTLRRTTNVEEEFPELARRPASMLNWTTLQRLNAGQWFLKTDPFWTASSLSPSDHREAQNQSICSLAELLELAKGNATLLLNLRDPPREHPYRSSFINVTLEAVLHSGFPQHQVMWLPSRQRPLVRKVAPGFQQTSGSKEAVASLRRGHIQRLNLRYTQVSRQELRDYASWNLSVNLYTVNAPWLFSLLWCAGVPSVTSDNSHALSQVPSPLWIMPPDEYCLMWVTADLVSFTLIVGIFVLQKWRLGGIRSYNPEQIMLSAAVRRTSRDVSIMKEKLIFSEISDGVEVSDVLSVCSDNSYDTYANSTATPVGPRGGGSHTKTLIERSGR

SEQ ID NO: 28948 - protein, 605 aa, Homo sapiens
  REGION 1..605: note = ENSP00000433214
MVRHQPLQYYEPQLCLSCLTGIYGCRWKRYQRSHDDTTPWERLWFLLLTFTFGLTLTWLYFWWEVHNDYDEFNWYLYNRMGYWSDWPVPILVTTAAAFAYIAGLLVLALCHIAVGQQMNLHWLHKIGLVVILASTVVAMSAVAQLWEDEWEVLLISLQGTAPFLHVGAVAAVTMLSWIVAGQFARAERTSSQVTILCTFFTVVFALYLAPLTISSPCIMEKKDLGPKPALIGHRGAPMLAPEHTLMSFRKALEQKLYGLQADITISLDGVPFLMHDTTLRRTTNVEEEFPELARRPASMLNWTTLQRLNAGQWFLKTDPFWTASSLSPSDHREAQNQSICSLAELLELAKGNATLLLNLRDPPREHPYRSSFINVTLEAVLHSGFPQHQVMWLPSRQRPLVRKVAPGFQQTSGSKEAVASLRRGHIQRLNLRYTQVSRQELRDYASWNLSVNLYTVNAPWLFSLLWCAGVPSVTSDNSHALSQVPSPLWIMPPDEYCLMWVTADLVSFTLIVGIFVLQKWRLGGIRSYNPEQIMLSAAVRRTSRDVSIMKEKLIFSEISDGVEVSDVLSVCSDNSYDTYANSTATPVGPRGGGSHTKTLIERSGR

SEQ ID NO: 28949 - protein, 605 aa, Homo sapiens; identical to SEQ ID NO: 28948
  REGION 1..605: note = ENSP00000337972

SEQ ID NO: 28950 - protein, 360 aa, Homo sapiens
  REGION 1..360: note = ENSP00000435196
MSFRKALEQKLYGLQADITISLDGVPFLMHDTTLRRTTNVEEEFPELARRPASMLNWTTLQRLNAGQWFLKTDPFWTASSLSPSDHREAQNQSICSLAELLELAKGNATLLLNLRDPPREHPYRSSFINVTLEAVLHSGFPQHQVMWLPSRQRPLVRKVAPGFQQTSGSKEAVASLRRGHIQRLNLRYTQVSRQELRDYASWNLSVNLYTVNAPWLFSLLWCAGVPSVTSDNSHALSQVPSPLWIMPPDEYCLMWVTADLVSFTLIVGIFVLQKWRLGGIRSYNPEQIMLSAAVRRTSRDVSIMKEKLIFSEISDGVEVSDVLSVCSDNSYDTYANSTATPVGPRGGGSHTKTLIERSGR

SEQ ID NO: 28951 - protein, 175 aa, Homo sapiens
  REGION 1..175: note = ENSP00000435728
AVASLRRGHIQRLNLRYTQVSRQELRDYASWNLSVNLYTVNAPWLFSLLWCAGVPSVTSDNSHALSQVPSPLWIMPPDEYCLMWVTADLVSFTLIVGIFVLQNYHLIRWRLGGIRSYNPEQIMLSAAVRRTSRDVSIMKEKLIFSEISDGVEVSDVLSVCSDNSYDTYANSTATP

SEQ ID NO: 28952 - protein, 73 aa, Homo sapiens
  REGION 1..73: note = ENSP00000433727
MVRHQPLQYYEPQLCLSCLTGIYGCRWKRYQRSHDDTTPWERLWFLLLTFTFGLTLTWLYFWWEVHNDYDEFN

SEQ ID NO: 28953 - protein, 135 aa, Homo sapiens; identical to SEQ ID NO: 28946
  REGION 1..135: note = ENSP00000396535

SEQ ID NO: 28954 - protein, 296 aa, Homo sapiens
  REGION 1..296: note = ENSP00000379497
MTLNNVTMRQGTVGMQPQQQRWSIPADGRHLMVQKEPHQYSHRNRHSATPEDHCRRSWSSDSTDSVISSESGNTYYRVVLIGEQGVGKSTLANIFAGVHDSMDSDCEVLGEDTYERTLMVDGESATIILLDMWENKGENEWLHDHCMQVGDAYLIVYSITDRASFEKASELRIQLRRARQTEDIPIILVGNKSDLVRCREVSVSEGRACAVVFDCKFIETSAAVQHNVKELFEGIVRQVRLRRDSKEKNERRLAYQKRKESMPRKARRFWGKIVAKNNKNMAFKLKSKSCHDLSVL

SEQ ID NO: 28955 - protein, 296 aa, Homo sapiens; identical to SEQ ID NO: 28954
  REGION 1..296: note = ENSP00000297596

SEQ ID NO: 28956 - protein, 93 aa, Homo sapiens
  REGION 1..93: note = ENSP00000428258
MTLNNVTMRQGTVGMQPQQQRWSIPADGRHLMVQKEPHQYSHRNRHSATPEDHCRRSWSSDSTDSVISSESGNTYYRVVLIGEQGVGKSTLAN

SEQ ID NO: 28957 - protein, 505 aa, Homo sapiens
  REGION 1..505: note = ENSP00000492432
MERRRITSAARRSYVSSGEMMVGGLAPGRRLGPGTRLSLARMPPPLPTRVDFSLAGALNAGFKETRASERAEMMELNDRFASYIEKVRFLEQQNKALAAELNQLRAKEPTKLADVYQAELRELRLRLDQLTANSARLEVERDNLAQDLATVRQKLQDETNLRLEAENNLAAYRQEADEATLARLDLERKIESLEEEIRFLRKIHEEEVRELQEQLARQQVHVELDVAKPDLTAALKEIRTQYEAMASSNMHEAEEWYRSKFADLTDAAARNAELLRQAKHEANDYRRQLQSLTCDLESLRGTNESLERQMREQEERHVREAASYQEALARLEEEGQSLKDEMARHLQEYQDLLNVKLALDIEIATYRKLLEGEENRITIPVQTFSNLQIRETSLDTKSVSEGHLKRNIVVKTVEMRDGEGTKQLRTSTSGVWSLALVRSFLGTALEPQDTTSGTALRTLALTQEWVKGNRNEKGGPRCSGREISASVLQALPCQPGGKVFHQPGG

SEQ ID NO: 28958 - protein, 432 aa, Homo sapiens
  REGION 1..432: note = ENSP00000466598
MERRRITSAARRSYVSSGEMMVGGLAPGRRLGPGTRLSLARMPPPLPTRVDFSLAGALNAGFKETRASERAEMMELNDRFASYIEKVRFLEQQNKALAAELNQLRAKEPTKLADVYQAELRELRLRLDQLTANSARLEVERDNLAQDLATVRQKLQDETNLRLEAENNLAAYRQEADEATLARLDLERKIESLEEEIRFLRKIHEEEVRELQEQLARQQVHVELDVAKPDLTAALKEIRTQYEAMASSNMHEAEEWYRSKFADLTDAAARNAELLRQAKHEANDYRRQLQSLTCDLESLRGTNESLERQMREQEERHVREAASYQEALARLEEEGQSLKDEMARHLQEYQDLLNVKLALDIEIATYRKLLEGEENRITIPVQTFSNLQIRETSLDTKSVSEGHLKRNIVVKTVEMRDGEVIKESKQEHKDVM

SEQ ID NO: 28959 - protein, 69 aa, Homo sapiens
  REGION 1..69: note = ENSP00000491042
  VARIANT 1: note = Any amino acid
XEIATYRKLLEGEENRITIPVQTFSNLQIRETSLDTKSVSEGHLKRNIVVKTVEMRDGEGTHPETSGII

SEQ ID NO: 28960 - protein, 15 aa, Homo sapiens
  REGION 1..15: note = ENSP00000491375
  VARIANT 1: note = Any amino acid
XRDGEGTHPETSGII

SEQ ID NO: 28961 - protein, 46 aa, Homo sapiens
  REGION 1..46: note = ENSP00000491243
  VARIANT 1: note = Any amino acid
XSNLQIRETSLDTKSVSEGHLKRNIVVKTVEMRDGEGTHPETSGII

SEQ ID NO: 28962 - protein, 34 aa, Homo sapiens
  REGION 1..34: note = ENSP00000492300
  VARIANT 1: note = Any amino acid
XKSVSEGHLKRNIVVKTVEMRDGEGTHPETSGII

SEQ ID NO: 28963 - protein, 41 aa, Homo sapiens
  REGION 1..41: note = ENSP00000491466
  VARIANT 1: note = Any amino acid
XRETSLDTKSVSEGHLKRNIVVKTVEMRDGEGTHPETSGII

SEQ ID NO: 28964 - protein, 67 aa, Homo sapiens
  REGION 1..67: note = ENSP00000492860
  VARIANT 1: note = Any amino acid
XKLALDIEIATYRKLLEGEENRITIPVQTFSNLQIRGGKSTKDGENHKKPAWTPSLCQKATSRGTSW

SEQ ID NO: 28965 - protein, 59 aa, Homo sapiens
  REGION 1..59: note = ENSP00000491735
VSEGHLKRNIVVKTVEMRDGEGTKQLRTSTSGVWSLALVRSFLGTALEPQDTTSGTALR

SEQ ID NO: 28966 - protein, 472 aa, Homo sapiens
  REGION 1..472: note = ENSP00000253408
MERRRITSAARRSYVSSGEMMVGGLAPGRRLGPGTRLSLARMPPPLPTRVDFSLAGALNAGFKETRASERAEMMELNDRFASYIEKVRFLEQQNKALAAELNQLRAKEPTKLADVYQAELRELRLRLDQLTANSARLEVERDNLAQDLATVRQKLQDETNLRLEAENNLAAYRQEADEATLARLDLERKIESLEEEIRFLRKIHEEEVRELQEQLARQQVHVELDVAKPDLTAALKEIRTQYEAMASSNMHEAEEWYRSKFADLTDAAARNAELLRQAKHEANDYRRQLQSLTCDLESLRGTNESLERQMREQEERHVREAASYQEALARLEEEGQSLKDEMARHLQEYQDLLNVKLALDIEIATYRKLLEGEENRITIPVQTFSNLQIRGGKSTKDGENHKVTRYLKSLTIRVIPIQAHQIVNGTPPARETSLDTKSVSEGHLKRNIVVKTVEMRDGEVIKESKQEHKDVM

SEQ ID NO: 28967 - protein, 124 aa, Homo sapiens
  REGION 1..124: note = ENSP00000467397
KLALDIEIATYRKLLEGEENRITIPVQTFSNLQIRETSLDTKSVSEGHLKRNIVVKTVEMRDGEVRRDLGPVRLWLAPGILKARPWRKAWGWHIEGSQQLPVAPQGILEESKETECNSVSSVPP

SEQ ID NO: 28968 - protein, 326 aa, Homo sapiens
  REGION 1..326: note = ENSP00000492832
YQAELRELRLRLDQLTANSARLEVERDNLAQDLATVRQKLQDETNLRLEAENNLAAYRQEADEATLARLDLERKIESLEEEIRFLRKIHEEEVRELQEQLARQQVHVELDVAKPDLTAALKEIRTQYEAMASSNMHEAEEWYRSKFADLTDAAARNAELLRQAKHEANDYRRQLQSLTCDLESLRGTNESLERQMREQEERHVREAASYQEALARLEEEGQSLKDEMARHLQEYQDLLNVKLALDIEIATYRKLLEGEENRITIPVQTFSNLQIRETSLDTKSVSEGHLKRNIVVKTVEMRDGEAAPASEPLGLLLLNPSKPLPHV

SEQ ID NO: 28969 - protein, 75 aa, Homo sapiens
  REGION 1..75: note = ENSP00000467530
  VARIANT 1: note = Any amino acid
XALDIEIATYRKLLEGEENRITIPVQTFSNLQIRGGKSTKDGENHKVTRYLKSLTIRVIPIQAHQIVNGTPPARG

SEQ ID NO: 28970 - protein, 431 aa, Homo sapiens
  REGION 1..431: note = ENSP00000403962
MERRRITSAARRSYVSSGEMMVGGLAPGRRLGPGTRLSLARMPPPLPTRVDFSLAGALNAGFKETRASERAEMMELNDRFASYIEKVRFLEQQNKALAAELNQLRAKEPTKLADVYQAELRELRLRLDQLTANSARLEVERDNLAQDLATVRQKLQDETNLRLEAENNLAAYRQEADEATLARLDLERKIESLEEEIRFLRKIHEEEVRELQEQLARQQVHVELDVAKPDLTAALKEIRTQYEAMASSNMHEAEEWYRSKFADLTDAAARNAELLRQAKHEANDYRRQLQSLTCDLESLRGTNESLERQMREQEERHVREAASYQEALARLEEEGQSLKDEMARHLQEYQDLLNVKLALDIEIATYRKLLEGEENRITIPVQTFSNLQIRGGKSTKDGENHKVTRYLKSLTIRVIPIQAHQIVNGTPPARG

SEQ ID NO: 28971 - protein, 438 aa, Homo sapiens
  REGION 1..438: note = ENSP00000491088
MERRRITSAARRSYVSSGEMMVGGLAPGRRLGPGTRLSLARMPPPLPTRVDFSLAGALNAGFKETRASERAEMMELNDRFASYIEKVRFLEQQNKALAAELNQLRAKEPTKLADVYQAELRELRLRLDQLTANSARLEVERDNLAQDLATVRQKLQDETNLRLEAENNLAAYRQEADEATLARLDLERKIESLEEEIRFLRKIHEEEVRELQEQLARQQVHVELDVAKPDLTAALKEIRTQYEAMASSNMHEAEEWYRSKFADLTDAAARNAELLRQAKHEANDYRRQLQSLTCDLESLRGTNESLERQMREQEERHVREAASYQEALARLEEEGQSLKDEMARHLQEYQDLLNVKLALDIEIATYRKLLEGEENRITIPVQTFSNLQIRGQYSRASWEGHWSPAPSSRACRLLQTGTEDQGKGIQLSLGAFVTLQRS

SEQ ID NO: 28972 - protein, 29 aa, Homo sapiens
  REGION 1..29: note = ENSP00000492156
  VARIANT 1: note = Any amino acid
XYQDLLNVKLALDIEIATYRKLLEGEENR

SEQ ID NO: 28973 - protein, 248 aa, Homo sapiens
  REGION 1..248: note = ENSP00000465320
MERRRITSAARRSYVSSGEMMVGGLAPGRRLGPGTRLSLARMPPPLPTRVDFSLAGALNAGFKETRASERAEMMELNDRFASYIEKVRFLEQQNKALAAELNQLRAKEPTKLADVYQAELRELRLRLDQLTANSARLEVERDNLAQDLATVRQKLQDETNLRLEAENNLAAYRQEADEATLARLDLERKIESLEEEIRFLRKIHEEEYQDLLNVKLALDIEIATYRKLLEGEENRITIPVQTFSNLQI

SEQ ID NO: 28974 - protein, 334 aa, Homo sapiens
  REGION 1..334: note = ENSP00000468500
MERRRITSAARRSYVSSGEMMVGGLAPGRRLGPGTRLSLARMPPPLPTRVDFSLAGALNAGFKETRASERAEMMELNDRFASYIEKVRFLEQQNKALAAELNQLRAKEPTKLADVYQAELRELRLRLDQLTANSARLEVERDNLAQDLATVRQKLQDETNLRLEAENNLAAYRQEADEATLARLDLERKIESLEEEIRFLRKIHEEEVRELQEQLARQQVHVELDVAKPDLTAALKEIRTQYEAMASSNMHEAEEWYRSKFADLTDAAARNAELLRQAKHEANDYRRQLQSLTCDLESLRGTEYQDLLNVKLALDIEIATYRKLLEGEENRITI

SEQ ID NO: 28975 - protein, 179 aa, Homo sapiens
  REGION 1..179: note = ENSP00000366189
MERRRITSAARRSYVSSGEMMVGGLAPGRRLGPGTRLSLARMPPPLPTRVDFSLAGALNAGFKETRASERAEMMELNDRFASYIEKVRFLEQQNKALAAELNQLRAKEPTKLADVYQAELRELRLRLDQLTANSARLEVERDNLAQDLATVRQKKQMKPPWPVWIWRGRLSRWRRRSGS

SEQ ID NO: 28976 - protein, 57 aa, Homo sapiens
  REGION 1..57: note = ENSP00000465565
MASSNMHEAEEWYRSKFADLTDAAARNAELLRQAKHEANDYRRQLQSLTCDLESLRG

SEQ ID NO: 28977 - protein, 261 aa, Homo sapiens
  REGION 1..261: note = ENSP00000465629
MERRRITSAARRSYVSSGEMMVGGLAPGRRLGPGTRLSLARMPPPLPTRVDFSLAGALNAGFKETRASERAEMMELNDRFASYIEKVRFLEQQNKALAAELNQLRAKEPTKLADVYQAELRELRLRLDQLTANSARLEVERDNLAQDLATVRQKLQDETNLRLEAENNLAAYRQEVRELQEQLARQQVHVELDVAKPDLTAALKEIRTQYEAMASSNMHEAEEWYRSKFADLTDAAARNAELLRQAKHEANDYRRQLQSLT

SEQ ID NO: 28978 - protein, 61 aa, Homo sapiens
  REGION 1..61: note = ENSP00000465208
MERRRITSAARRSYVSSGEMMVGGLAPGRRLGPGTRLSLARMPPPLPTRVDFSLAGALNAG

SEQ ID NO: 28979 - protein, 189 aa, Homo sapiens
  REGION 1..189: note = ENSP00000466163
MERRRITSAARRSYVSSGEMMVGGLAPGRRLGPGTRLSLARMPPPLPTRVDFSLAGALNAGFKETRASERAEMMELNDRFASYIEKVRFLEQQNKALAAELNQLRAKEPTKLADVYQAELRELRLRLDQLTANSARLEVERDNLAQDLATVRQKNVSPHSRLQDETNLRLEAENNLAAYRQEADEATLA

SEQ ID NO: 28980 - protein, 8 aa, Homo sapiens
  REGION 1..8: note = ENSP00000467106
MERRRITS

SEQ ID NO: 28981 - protein, 464 aa, Homo sapiens
  REGION 1..464: note = ENSP00000428518
MILANVFCLFFFLDETLRSLASPSSLQGPELHGWRPPVDCVRANELCAAESNCSSRYRTLRQCLAGRDRNTMLANKECQAALEVLQESPLYDCRCKRGMKKELQCLQIYWSIHLGLTEGEEFYEASPYEPVTSRLSDIFRLASIFSGTGADPVVSAKSNHCLDAAKACNLNDNCKKLRSSYISICNREISPTERCNRRKCHKALRQFFDRVPSEYTYRMLFCSCQDQACAERRRQTILPSCSYEDKEKPNCLDLRGVCRTDHLCRSRLADFHANCRASYQTVTSCPADNYQACLGSYAGMIGFDMTPNYVDSSPTGIVVSPWCSCRGSGNMEEECEKFLRDFTENPCLRNAIQAFGNGTDVNVSPKGPSFQATQAPRVEKTPSLPDDLSDSTSLGTSVITTCTSVQEQGLKANNSKELSMCFTELTTNIIPGSNKVIKPNSGPSRARPSAALTVLSVLMLKLAL

SEQ ID NO: 28982 - protein, 62 aa, Homo sapiens
  REGION 1..62: note = ENSP00000306654
MILANVFCLFFFLGPGPLLRRNGVQREKTCSYIQGRMMPEFSLGYEEGCPTESPWCALAKWV

SEQ ID NO: 28983 - protein, 464 aa, Homo sapiens; identical to SEQ ID NO: 28981
  REGION 1..464: note = ENSP00000429445

SEQ ID NO: 28984 - protein, 331 aa, Homo sapiens
  REGION 1..331: note = ENSP00000429206
MILANVFCLFFFLGTGADPVVSAKSNHCLDAAKACNLNDNCKKLRSSYISICNREISPTERCNRRKCHKALRQFFDRVPSEYTYRMLFCSCQDQACAERRRQTILPSCSYEDKEKPNCLDLRGVCRTDHLCRSRLADFHANCRASYQTVTSCPADNYQACLGSYAGMIGFDMTPNYVDSSPTGIVVSPWCSCRGSGNMEEECEKFLRDFTENPCLRNAIQAFGNGTDVNVSPKGPSFQATQAPRVEKTPSLPDDLSDSTSLGTSVITTCTSVQEQGLKANNSKELSMCFTELTTNIIPGSNKVIKPNSGPSRARPSAALTVLSVLMLKLAL

SEQ ID NO: 28985 - protein, 359 aa, Homo sapiens
  REGION 1..359: note = ENSP00000429979
MILANVFCLFFFLGEEFYEASPYEPVTSRLSDIFRLASIFSGTGADPVVSAKSNHCLDAAKACNLNDNCKKLRSSYISICNREISPTERCNRRKCHKALRQFFDRVPSEYTYRMLFCSCQDQACAERRRQTILPSCSYEDKEKPNCLDLRGVCRTDHLCRSRLADFHANCRASYQTVTSCPADNYQACLGSYAGMIGFDMTPNYVDSSPTGIVVSPWCSCRGSGNMEEECEKFLRDFTENPCLRNAIQAFGNGTDVNVSPKGPSFQATQAPRVEKTPSLPDDLSDSTSLGTSVITTCTSVQEQGLKANNSKELSMCFTELTTNIIPGSNKVIKPNSGPSRARPSAALTVLSVLMLKLAL

SEQ ID NO: 28986 - protein, 264 aa, Homo sapiens
  REGION 1..264: note = ENSP00000428721
MILANVFCLFFFLDETLRSLASPSSLQGPELHGWRPPVDCVRANELCAAESNCSSRYRTLRQCLAGRDRNTMLANKECQAALEVLQESPLYDCRCKRGMKKELQCLQIYWSIHLGLTEGEEFYEASPYEPVTSRLSDIFRLASIFSGTGADPVVSAKSNHCLDAAKACNLNDNCKKLRSSYISICNREISPTERCNRRKCHKALRQFFDRVPSEYTYRMLFCSCQDQACAERRRQTILPSCSYEDKEKPNCLDLRGVCRTDHLC

SEQ ID NO: 28987 - protein, 74 aa, Homo sapiens
  REGION 1..74: note = ENSP00000430622
MLANKECQAALEVLQESPLYDCRCKRGMKKELQCLQIYWSIHLGLTEGEEFYEASPYEPVTSRLSDIFRLASIF

SEQ ID NO: 28988 - protein, 345 aa, Homo sapiens
  REGION 1..345: note = ENSP00000361207
MLAARLVCLRTLPSRVFHPAFTKASPVVKNSITKNQWLLTPSREYATKTRIGIRRGRTGQELKEAALEPSMEKIFKIDQMGRWFVAGGAAVGLGALCYYGLGLSNEIGAIEKAVIWPQYVKDRIHSTYMYLAGSIGLTALSAIAISRTPVLMNFMMRGSWVTIGVTFAAMVGAGMLVRSIPYDQSPGPKHLAWLLHSGVMGAVVAPLTILGGPLLIRAAWYTAGIVGGLSTVAMCAPSEKFLNMGAPLGVGLGLVFVSSLGSMFLPPTTVAGATLYSVAMYGGLVLFSMFLLYDTQKVIKRAEVSPMYGVQKYDPINSMLSIYMDTLNIFMRVATMLATGGNRKK

SEQ ID NO: 28989 - protein, 638 aa, Homo sapiens
  REGION 1..638: note = ENSP00000230882
MDLWQLLLTLALAGSSDAFSGSEATAAILSRAPWSLQSVNPGLKTNSSKEPKFTKCRSPERETFSCHWTDEVHHGTKNLGPIQLFYTRRNTQEWTQEWKECPDYVSAGENSCYFNSSFTSIWIPYCIKLTSNGGTVDEKCFSVDEIVQPDPPIALNWTLLNVSLTGIHADIQVRWEAPRNADIQKGWMVLEYELQYKEVNETKWKMMDPILTTSVPVYSLKVDKEYEVRVRSKQRNSGNYGEFSEVLYVTLPQMSQFTCEEDFYFPWLLIIIFGIFGLTVMLFVFLFSKQQRIKMLILPPVPVPKIKGIDPDLLKEGKLEEVNTILAIHDSYKPEFHSDDSWVEFIELDIDEPDEKTEESDTDRLLSSDHEKSHSNLGVKDGDSGRTSCCEPDILETDFNANDIHEGTSEVAQPQRLKGEADLLCLDQKNQNNSPYHDACPATQQPSVIQAEKNKPQPLPTEGAESTHQAAHIQLSNPSSLSNIDFYAQVSDITPAGSVVLSPGQKNKAGMSQCDMHPEMVSLCQENFLMDNAYFCEADAKKCIPVAPHIKVESHIQPSLNQEDIYITTESLTTAAGRPGTGEHVPGSEMPVPDYTSIHIVQSPQGLILNATALPLPDKEFLSSCGYVSTDQLNKIMP

SEQ ID NO: 28990 - protein, 62 aa, Homo sapiens
  REGION 1..62: note = ENSP00000426739
MDLWQLLLTLALAGSSDAFSGSEATAAILSRAPWSLQSVNPGLKTRWGPCSHIKKMESYMQA

SEQ ID NO: 28991 - protein, 85 aa, Homo sapiens
  REGION 1..85: note = ENSP00000422333
MDLWQLLLTLALAGSSDAFSGSEATAAILSRAPWSLQSVNPGLKTRTLKNGLKNGKNALIMFLLGKTAVTLIHRLPPSGYLIVSS

SEQ ID NO: 28992 - protein, 638 aa, Homo sapiens; identical to SEQ ID NO: 28989
  REGION 1..638: note = ENSP00000478291

SEQ ID NO: 28993 - protein, 638 aa, Homo sapiens; identical to SEQ ID NO: 28989
  REGION 1..638: note = ENSP00000482373

SEQ ID NO: 28994 - protein, 616 aa, Homo sapiens
  REGION 1..616: note = ENSP00000350335
MDLWQLLLTLALAGSSDAFSGSEDSSKEPKFTKCRSPERETFSCHWTDEVHHGTKNLGPIQLFYTRRNTQEWTQEWKECPDYVSAGENSCYFNSSFTSIWIPYCIKLTSNGGTVDEKCFSVDEIVQPDPPIALNWTLLNVSLTGIHADIQVRWEAPRNADIQKGWMVLEYELQYKEVNETKWKMMDPILTTSVPVYSLKVDKEYEVRVRSKQRNSGNYGEFSEVLYVTLPQMSQFTCEEDFYFPWLLIIIFGIFGLTVMLFVFLFSKQQRIKMLILPPVPVPKIKGIDPDLLKEGKLEEVNTILAIHDSYKPEFHSDDSWVEFIELDIDEPDEKTEESDTDRLLSSDHEKSHSNLGVKDGDSGRTSCCEPDILETDFNANDIHEGTSEVAQPQRLKGEADLLCLDQKNQNNSPYHDACPATQQPSVIQAEKNKPQPLPTEGAESTHQAAHIQLSNPSSLSNIDFYAQVSDITPAGSVVLSPGQKNKAGMSQCDMHPEMVSLCQENFLMDNAYFCEADAKKCIPVAPHIKVESHIQPSLNQEDIYITTESLTTAAGRPGTGEHVPGSEMPVPDYTSIHIVQSPQGLILNATALPLPDKEFLSSCGYVSTDQLNKIMP

SEQ ID NO: 28995 - protein, 638 aa, Homo sapiens; identical to SEQ ID NO: 28989
  REGION 1..638: note = ENSP00000442206

SEQ ID NO: 28996 - protein, 638 aa, Homo sapiens; identical to SEQ ID NO: 28989
  REGION 1..638: note = ENSP00000478332

SEQ ID NO: 28997 - protein, 295 aa, Homo sapiens
  REGION 1..295: note = ENSP00000483926
MDLWQLLLTLALAGSSDAFSGSEATAAILSRAPWSLQSVNPGLKTNSSKEPKFTKCRSPERETFSCHWTDEVHHGTKNLGPIQLFYTRRNTQEWTQEWKECPDYVSAGENSCYFNSSFTSIWIPYCIKLTSNGGTVDEKCFSVDEIVQPDPPIALNWTLLNVSLTGIHADIQVRWEAPRNADIQKGWMVLEYELQYKEVNETKWKMMDPILTTSVPVYSLKVDKEYEVRVRSKQRNSGNYGEFSEVLYVTLPQMSQFTCEEDFYFPWLLIIIFGIFGLTVMLFVFLFSKQQRKEN

SEQ ID NO: 28998 - protein, 645 aa, Homo sapiens
  REGION 1..645: note = ENSP00000483403
MNWGPTGMDLWQLLLTLALAGSSDAFSGSEATAAILSRAPWSLQSVNPGLKTNSSKEPKFTKCRSPERETFSCHWTDEVHHGTKNLGPIQLFYTRRNTQEWTQEWKECPDYVSAGENSCYFNSSFTSIWIPYCIKLTSNGGTVDEKCFSVDEIVQPDPPIALNWTLLNVSLTGIHADIQVRWEAPRNADIQKGWMVLEYELQYKEVNETKWKMMDPILTTSVPVYSLKVDKEYEVRVRSKQRNSGNYGEFSEVLYVTLPQMSQFTCEEDFYFPWLLIIIFGIFGLTVMLFVFLFSKQQRIKMLILPPVPVPKIKGIDPDLLKEGKLEEVNTILAIHDSYKPEFHSDDSWVEFIELDIDEPDEKTEESDTDRLLSSDHEKSHSNLGVKDGDSGRTSCCEPDILETDFNANDIHEGTSEVAQPQRLKGEADLLCLDQKNQNNSPYHDACPATQQPSVIQAEKNKPQPLPTEGAESTHQAAHIQLSNPSSLSNIDFYAQVSDITPAGSVVLSPGQKNKAGMSQCDMHPEMVSLCQENFLMDNAYFCEADAKKCIPVAPHIKVESHIQPSLNQEDIYITTESLTTAAGRPGTGEHVPGSEMPVPDYTSIHIVQSPQGLILNATALPLPDKEFLSSCGYVSTDQLNKIMP

SEQ ID NO: 28999 - protein, 638 aa, Homo sapiens; identical to SEQ ID NO: 28989
  REGION 1..638: note = ENSP00000479846

SEQ ID NO: 29000 - protein, 315 aa, Homo sapiens
  REGION 1..315: note = ENSP00000359795
MPLKLRGKKKAKSKETAGLVEGEPTGAGGGSLSASRAPARRLVFHAQLAHGSATGRVEGFSSIQELYAQIAGAFEISPSEILYCTLNTPKIDMERLLGGQLGLEDFIFAHVKGIEKEVNVYKSEDSLGLTITDNGVGYAFIKRIKDGGVIDSVKTICVGDHIESINGENIVGWRHYDVAKKLKELKKEELFTMKLIEPKKAFEIELRSKAGKSSGEKIGCGRATLRLRSKGPATVEEMPSETKAKAIEKIDDVLELYMGIRDIDLATTMFEAGKDKVNPDEFAVALDETLGDFAFPDEFVFDVWGVIGDAKRRGL

SEQ ID NO: 29001 - protein, 466 aa, Homo sapiens
  REGION 1..466: note = ENSP00000467494
MTTSPILQLLLRLSLCGLLLQRAETGSKGQTAGELYQRWERYRRECQETLAAAEPPSGLACNGSFDMYVCWDYAAPNATARASCPWYLPWHHHVAAGFVLRQCGSDGQWGLWRDHTQCENPEKNEAFLDQRLILERLQVMYTVGYSLSLATLLLALLILSLFRRLHCTRNYIHINLFTSFMLRAAAILSRDRLLPRPGPYLGDQALALWNQALAACRTAQIVTQYCVGANYTWLLVEGVYLHSLLVLVGGSEEGHFRYYLLLGWGAPALFVIPWVIVRYLYENTQCWERNEVKAIWWIIRTPILMTILINFLIFIRILGILLSKLRTRQMRCRDYRLRLARSTLTLVPLLGVHEVVFAPVTEEQARGALRFAKLGFEIFLSSFQGFLVSVLYCFINKEVQSEIRRGWHHCRLRRSLGEEQRQLPERAFRALPSGSGPGEVPTSRGLSSGTLPGPGNEASRELESYC

SEQ ID NO: 29002 - protein, 419 aa, Homo sapiens
  REGION 1..419: note = ENSP00000263281
MTTSPILQLLLRLSLCGLLLQRAETGSKGQTAGELYQRWERYRRECQETLAAAEPPSGLACNGSFDMYVCWDYAAPNATARASCPWYLPWHHHVAAGFVLRQCGSDGQWGLWRDHTQCENPEKNEAFLDQRLILERLQVMYTVGYSLSLATLLLALLILSLFRRLHCTRNYIHINLFTSFMLRAAAILSRDRLLPRPGPYLGDQALALWNQALAACRTAQIVTQYCVGANYTWLLVEGVYLHSLLVLVGGSEEGHFRYYLLLGWGAPALFVIPWVIVRYLYENTQCWERNEVKAIWWIIRTPILMTILINFLIFIRILGILLSKLRTRQMRCRDYRLRLARSTLTLVPLLGVHEVVFAPVTEEQARGALRFAKLGFEIFLSSFQGFLVSVLYCFINKEVGRDPAAAPALWRQRGVRRRL

SEQ ID NO: 29003 - protein, 430 aa, Homo sapiens
  REGION 1..430: note = ENSP00000305321
MTTSPILQLLLRLSLCGLLLQRAETGSKGQTAGELYQRWERYRRECQETLAAAEPPSVAAGFVLRQCGSDGQWGLWRDHTQCENPEKNEAFLDQRLILERLQVMYTVGYSLSLATLLLALLILSLFRRLHCTRNYIHINLFTSFMLRAAAILSRDRLLPRPGPYLGDQALALWNQALAACRTAQIVTQYCVGANYTWLLVEGVYLHSLLVLVGGSEEGHFRYYLLLGWGAPALFVIPWVIVRYLYENTQCWERNEVKAIWWIIRTPILMTILINFLIFIRILGILLSKLRTRQMRCRDYRLRLARSTLTLVPLLGVHEVVFAPVTEEQARGALRFAKLGFEIFLSSFQGFLVSVLYCFINKEVQSEIRRGWHHCRLRRSLGEEQRQLPERAFRALPSGSGPGEVPTSRGLSSGTLPGPGNEASRELESYC

SEQ ID NO: 29004 - protein, 265 aa, Homo sapiens
  REGION 1..265: note = ENSP00000467342
MTTSPILQLLLRLSLCGLLLQRAETGSKGQTAGELYQRWERYRRECQETLAAAEPPSGLACNGSFDMYVCWDYAAPNATARASCPWYLPWHHHVAAGFVLRQCGSDGQWGLWRDHTQCENPEKNEAFLDQRLILERLQVMYTVGYSLSLATLLLALLILSLFRRLHCTRNYIHINLFTSFMLRAAAILSRDRLLPRPGPYLGDQALALWNQALAACRTAQIVTQYCVGANYTWLLVEGVYLHSLLVLVGGSEEGHFRYYLLLGWD

SEQ ID NO: 29005 - protein, 17 aa, Homo sapiens
  REGION 1..17: note = ENSP00000465385
MYVCWDYAAPNATARAS

SEQ ID NO: 29006 - protein, 382 aa, Homo sapiens
  REGION 1..382: note = ENSP00000282561
MGDWSALGKLLDKVQAYSTAGGKVWLSVLFIFRILLLGTAVESAWGDEQSAFRCNTQQPGCENVCYDKSFPISHVRFWVLQIIFVSVPTLLYLAHVFYVMRKEEKLNKKEEELKVAQTDGVNVDMHLKQIEIKKFKYGIEEHGKVKMRGGLLRTYIISILFKSIFEVAFLLIQWYIYGFSLSAVYTCKRDPCPHQVDCFLSRPTEKTIFIIFMLVVSLVSLALNIIELFYVFFKGVKDRVKGKSDPYHATSGALSPAKDCGSQKYAYFNGCSSPTAPLSPMSPPGYKLVTGDRNNSSCRNYNKQASEQNWANYSAEQNRMGQAGSTISNSHAQPFDFPDDNQNSKKLAAGHELQPLAIVDQRPSSRASSRASSRPRPDDLEI

SEQ ID NO: 29007 - protein, 283 aa, Homo sapiens
  REGION 1..283: note = ENSP00000363141
MNWTGLYTLLSGVNRHSTAIGRVWLSVIFIFRIMVLVVAAESVWGDEKSSFICNTLQPGCNSVCYDQFFPISHVRLWSLQLILVSTPALLVAMHVAHQQHIEKKMLRLEGHGDPLHLEEVKRHKVHISGTLWWTYVISVVFRLLFEAVFMYVFYLLYPGYAMVRLVKCDVYPCPNTVDCFVSRPTEKTVFTVFMLAASGICIILNVAEVVYLIIRACARRAQRRSNPPSRKGSGFGHRLSPEYKQNEINKLLSEQDGSLKDILRRSPGTGAGLAEKSDRCSAC

SEQ ID NO: 29008 - protein, 283 aa, Homo sapiens; identical to SEQ ID NO: 29007
  REGION 1..283: note = ENSP00000363134

SEQ ID NO: 29009 - protein, 84 aa, Homo sapiens
  REGION 1..84: note = ENSP00000407223
MNWTGLYTLLSGVNRHSTAIGRVWLSVIFIFRIMVLVVAAESVWGDEKSSFICNTLQPGCNSVCYDQFFPISHVRLWSLQLILV

SEQ ID NO: 29010 - protein, 283 aa, Homo sapiens; identical to SEQ ID NO: 29007
  REGION 1..283: note = ENSP00000354900

SEQ ID NO: 29011 - protein, 266 aa, Homo sapiens
  REGION 1..266: note = ENSP00000345868
MNWAFLQGLLSGVNKYSTVLSRIWLSVVFIFRVLVYVVAAEEVWDDEQKDFVCNTKQPGCPNVCYDEFFPVSHVRLWALQLILVTCPSLLVVMHVAYREERERKHHLKHGPNAPSLYDNLSKKRGGLWWTYLLSLIFKAAVDAGFLYIFHRLYKDYDMPRVVACSVEPCPHTVDCYISRPTEKKVFTYFMVTTAAICILLNLSEVFYLVGKRCMEIFGPRHRRPRCRECLPDTCPPYVLSQGGHPEDGNSVLMKAGSAPVDAGGYP

SEQ ID NO: 29012 - protein, 261 aa, Homo sapiens
  REGION 1..261: note = ENSP00000241124
MDWGTLHTFIGGVNKHSTSIGKVWITVIFIFRVMILVVAAQEVWGDEQEDFVCNTLQPGCKNVCYDHFFPVSHIRLWALQLIFVSTPALLVAMHVAYYRHETTRKFRRGEKRNDFKDIEDIKKQKVRIEGSLWWTYTSSIFFRIIFEAAFMYVFYFLYNGYHLPWVLKCGIDPCPNLVDCFISRPTEKTVFTIFMISASVICMLLNVAELCYLLLKVCFRRSKRAQTQKNHPNHALKESKQNEMNELISDSGQNAITGFPS

SEQ ID NO: 29013 - protein, 261 aa, Homo sapiens; identical to SEQ ID NO: 29012
  REGION 1..261: note = ENSP00000382939

SEQ ID NO: 29014 - protein, 261 aa, Homo sapiens; identical to SEQ ID NO: 29012
  REGION 1..261: note = ENSP00000382938

SEQ ID NO: 29015 - protein, 261 aa, Homo sapiens; identical to SEQ ID NO: 29012
  REGION 1..261: note = ENSP00000348521

SEQ ID NO: 29016 - protein, 261 aa, Homo sapiens; identical to SEQ ID NO: 29012
  REGION 1..261: note = ENSP00000489698

SEQ ID NO: 29017 - protein, 439 aa, Homo sapiens
  REGION 1..439: note = ENSP00000355675
MTNMSWSFLTRLLEEIHNHSTFVGKVWLTVLVVFRIVLTAVGGEAIYSDEQAKFTCNTRQPGCDNVCYDAFAPLSHVRFWVFQIVVISTPSVMYLGYAVHRLARASEQERRRALRRRPGPRRAPRAHLPPPHAGWPEPADLGEEEPMLGLGEEEEEEETGAAEGAGEEAEEAGAEEACTKAVGADGKAAGTPGPTGQHDGRRRIQREGLMRVYVAQLVARAAFEVAFLVGQYLLYGFEVRPFFPCSRQPCPHVVDCFVSRPTEKTVFLLVMYVVSCLCLLLNLCEMAHLGLGSAQDAVRGRRGPPASAPAPAPRPPPCAFPAAAAGLACPPDYSLVVRAAERARAHDQNLANLALQALRDGAAAGDRDRDSSPCVGLPAASRGPPRAGAPASRTGSATSAGTVGEQGRPGTHERPGAKPRAGSEKGSASSRDGKTTVWI

SEQ ID NO: 29018 - protein, 279 aa, Homo sapiens
  REGION 1..279: note = ENSP00000325775
MCGRFLRRLLAEESRRSTPVGRLLLPVLLGFRLVLLAASGPGVYGDEQSEFVCHTQQPGCKAACFDAFHPLSPLRFWVFQVILVAVPSALYMGFTLYHVIWHWELSGKGKEEETLIQGREGNTDVPGAGSLRLLWAYVAQLGARLVLEGAALGLQYHLYGFQMPSSFACRREPCLGSITCNLSRPSEKTIFLKTMFGVSGFCLLFTFLELVLLGLGRWWRTWKHKSSSSKYFLTSESTRRHKKATDSLPVVETKEQFQEAVPGRSLAQEKQRPVGPRDA

SEQ ID NO: 29019 - protein, 321 aa, Homo sapiens
  REGION 1..321: note = ENSP00000290374
MGEWTILERLLEAAVQQHSTMIGRILLTVVVIFRILIVAIVGETVYDDEQTMFVCNTLQPGCNQACYDRAFPISHIRYWVFQIIMVCTPSLCFITYSVHQSAKQRERRYSTVFLALDRDPPESIGGPGGTGGGGSGGGKREDKKLQNAIVNGVLQNTENTSKETEPDCLEVKELTPHPSGLRTASKSKLRRQEGISRFYIIQVVFRNALEIGFLVGQYFLYGFSVPGLYECNRYPCIKEVECYVSRPTEKTVFLVFMFAVSGICVVLNLAELNHLGWRKIKLAVRGAQAKRKSIYEIRNKDLPRVSVPNFGRTQSSDSAYV

SEQ ID NO: 29020 - protein, 542 aa, Homo sapiens
  REGION 1..542: note = ENSP00000265113
MTKSNGEEPKMGGRMERFQQGVRKRTLLAKKKVQNITKEDVKSYLFRNAFVLLTVTAVIVGTILGFTLRPYRMSYREVKYFSFPGELLMRMLQMLVLPLIISSLVTGMAALDSKASGKMGMRAVVYYMTTTIIAVVIGIIIVIIIHPGKGTKENMHREGKIVRVTAADAFLDLIRNMFPPNLVEACFKQFKTNYEKRSFKVPIQANETLVGAVINNVSEAMETLTRITEELVPVPGSVNGVNALGLVVFSMCFGFVIGNMKEQGQALREFFDSLNEAIMRLVAVIMWYAPVGILFLIAGKIVEMEDMGVIGGQLAMYTVTVIVGLLIHAVIVLPLLYFLVTRKNPWVFIGGLLQALITALGTSSSSATLPITFKCLEENNGVDKRVTRFVLPVGATINMDGTALYEALAAIFIAQVNNFELNFGQIITISITATAASIGAAGIPQAGLVTMVIVLTSVGLPTDDITLIIAVDWFLDRLRTTTNVLGDSLGAGIVEHLSRHELKNRDVEMGNSVIEENEMKKPYQLIAQDNETEKPIDSETKM

SEQ ID NO: 29021 - protein, 101 aa, Homo sapiens
  REGION 1..101: note = ENSP00000427203
MTKSNGEEPKMGGRMERFQQGVRKRTLLAKKKVQNITKEDVKSYLFRNAFVLLTVTAVIVGTILGFTLRPYRMSYREVKYFSFPGELLMRMLQMLVLPLII

SEQ ID NO: 29022 - protein, 106 aa, Homo sapiens
  REGION 1..106: note = ENSP00000424986
MTKSNGEEPKMGGRMERFQQGVRKRTLLAKKKVQNITKEDVKSYLFRNAFVLLTVTAVIVGTILGFTLRPYRMSYREVKYFSFPGELLMRMLQMLVLPLIISSLVT

SEQ ID NO: 29023 - protein, 106 aa, Homo sapiens; identical to SEQ ID NO: 29022
  REGION 1..106: note = ENSP00000420992

SEQ ID NO: 29024 - protein, 430 aa, Homo sapiens
  REGION 1..430: note = ENSP00000483657
MTKSNGEEPKMGGRMERFQQGVRKRTLLAKKKVQNITKEDVKSYLFRNAFVLLTVTAVIVGTILGFTLRPYRMSYREVKYFSFPGELLMRMLQMLVLPLIISSLVTGMAALDSKASGKMGMRAVVYYMTTTIIAVVIGIIIVIIIHPGKGTKENMHREGKIVRVTAADAFLDLIRYAPVGILFLIAGKIVEMEDMGVIGGQLAMYTVTVIVGLLIHAVIVLPLLYFLVTRKNPWVFIGGLLQALITALGTSSSSATLPITFKCLEENNGVDKRVTRFVLPVGATINMDGTALYEALAAIFIAQVNNFELNFGQIITISITATAASIGAAGIPQAGLVTMVIVLTSVGLPTDDITLIIAVDWFLDRLRTTTNVLGDSLGAGIVEHLSRHELKNRDVEMGNSVIEENEMKKPYQLIAQDNETEKPIDSETKM

SEQ ID NO: 29025 - protein, 497 aa, Homo sapiens
  REGION 1..497: note = ENSP00000371343
MTKSNGEEPKMGGRMERFQQGVRKRTLLAKKKVQNITKEDVKSYLFRNAFVLLTVTAVIVGTILGFTLRPYRMSYREVKYFSFPGELLMRMLQMLVLPLIISSLVTGMAALDSKASGKMGMRAVVYYMTTTIIAVVIGIIIVIIIHPGKGTKENMHREGKIVRVTAADAFLDLIRNMFPPNLVEACFKQFKTNYEKRSFKVPIQANETLVGAVINNVSEAMETLTRITEELVPVPGSVNGVNALGLVVFSMCFGFVIGNMKEQGQALREFFDSLNEAIMRLVAVIMWYAPVGILFLIAGKIVEMEDMGVIGGQLAMYTVTVIVGLLIHAVIVLPLLYFLVTRKNPWVFIGGLLQALITALGTSSSSATLPITFKCLEENNGVDKRVTRFVLPVGATINMDGTALYEALAAIFIAQVNNFELNFGQIITIRDRLRTTTNVLGDSLGAGIVEHLSRHELKNRDVEMGNSVIEENEMKKPYQLIAQDNETEKPIDSETKM

SEQ ID NO: 29026 - protein, 496 aa, Homo sapiens
  REGION 1..496: note = ENSP00000477672
MTKSNGEEPKMGGRMERFQQGVRKRTLLAKKKVQNITKEDVKSYLFRNAFVLLTVTAVIVGMAALDSKASGKMGMRAVVYYMTTTIIAVVIGIIIVIIIHPGKGTKENMHREGKIVRVTAADAFLDLIRNMFPPNLVEACFKQFKTNYEKRSFKVPIQANETLVGAVINNVSEAMETLTRITEELVPVPGSVNGVNALGLVVFSMCFGFVIGNMKEQGQALREFFDSLNEAIMRLVAVIMWYAPVGILFLIAGKIVEMEDMGVIGGQLAMYTVTVIVGLLIHAVIVLPLLYFLVTRKNPWVFIGGLLQALITALGTSSSSATLPITFKCLEENNGVDKRVTRFVLPVGATINMDGTALYEALAAIFIAQVNNFELNFGQIITISITATAASIGAAGIPQAGLVTMVIVLTSVGLPTDDITLIIAVDWFLDRLRTTTNVLGDSLGAGIVEHLSRHELKNRDVEMGNSVIEENEMKKPYQLIAQDNETEKPIDSETKM

SEQ ID NO: 29027 - protein, 542 aa, Homo sapiens; identical to SEQ ID NO: 29020
  REGION 1..542: note = ENSP00000265113

SEQ ID NO: 29028 - protein, 101 aa, Homo sapiens; identical to SEQ ID NO: 29021
  REGION 1..101: note = ENSP00000427203

SEQ ID NO: 29029 - protein, 106 aa, Homo sapiens; identical to SEQ ID NO: 29022
  REGION 1..106: note = ENSP00000424986

SEQ ID NO: 29030 - protein, 106 aa, Homo sapiens; identical to SEQ ID NO: 29022
  REGION 1..106: note = ENSP00000420992

SEQ ID NO: 29031 - protein, 430 aa, Homo sapiens; identical to SEQ ID NO: 29024
  REGION 1..430: note = ENSP00000483657

SEQ ID NO: 29032 - protein, 497 aa, Homo sapiens; identical to SEQ ID NO: 29025
  REGION 1..497: note = ENSP00000371343

SEQ ID NO: 29033 - protein, 496 aa, Homo sapiens; identical to SEQ ID NO: 29026
  REGION 1..496: note = ENSP00000477672

SEQ ID NO: 29034 - protein, 313 aa, Homo sapiens
  REGION 1..313: note = ENSP00000374537
MKSPPLLSPCLSWKRMAGIFFLPFISSGFAPRFKQEENFMLGRAHPSQPRFNWSHLTPLELKNRSVGLGTESTGRGKPHFTLEGHKFLIFGGSIHYFRVPREYWRDRLLKLKACGFNTVTTYVPWNLHEPERGKFDFSGNLDLEAFVLMAAEIGLWVILRPGRYICSEMDLGGLPSWLLQDPRLLLRTTNKSFIEAVEKYFDHLIPRVIPLQYRQAGPVIAVQVENEYGSFNKDKTYMPYLHKALLRRGIVELLLTSDGEKHVLSGHTKGVLAAINLQKLHQDTFNQLHKVQGASIDAGLLSDASQAATSSSL

SEQ ID NO: 29035 - protein, 653 aa, Homo sapiens
  REGION 1..653: note = ENSP00000396615
MKSPPLLSPCLSWKRMAGIFFLPFISSGFAPRFKQEENFMLGRAHPSQPRFNWSHLTPLELKNRSVGLGTESTGRGKPHFTLEGHKFLIFGGSIHYFRVPREYWRDRLLKLKACGFNTVTTYVPWNLHEPERGKFDFSGNLDLEAFVLMAAEIGLWVILRPGRYICSEMDLGGLPSWLLQDPRLLLRTTNKSFIEAVEKYFDHLIPRVIPLQYRQAGPVIAVQVENEYGSFNKDKTYMPYLHKALLRRGIVELLLTSDGEKHVLSGHTKGVLAAINLQKLHQDTFNQLHKVQRDKPLLIMEYWVGWFDRWGDKHHVKDAKEVEHAVSEFIKYEISFNVYMFHGGTNFGFMNGATYFGKHSGIVTSYDYDAVLTEAGDYTEKYLKLQKLFQSVSATPLPRVPKLPPKAVYPPVRPSLYLPLWDALSYLNEPVRSRQPVNMENLPINNGSGQSYGLVLYEKSICSGGRLRAHAHDVAQVFLDETMIGILNENNKDLHIPELRDCRYLRILVENQGRVNFSWQIQNEQKGITGSVSINNSSLEGFTIYSLEMKMSFFERLRSATWKPVPDSHQGPAFYCGTLKAGPSPKDTFLSLLNWNYGFVFINGRNLGRYWNIGPQKTLYLPGVWLHPEDNEVILFEKMMSGSDIKSTDKPTL

SEQ ID NO: 29036 - protein, 186 aa, Homo sapiens
  REGION 1..186: note = ENSP00000397929
  VARIANT 1: note = Any amino acid
XLKMQRVEHAVSEFIKYEISFNVYMFHGGTNFGFMNGATYFGKHSGIVTSYDYDAVLTEAGDYTEKYLKLQKLFQSVSATPLPRVPKLPPKAVYPPVRPSLYLPLWDALSYLNEPVRSRQPVNMENLPINNGSGQSYGLVLYEKSICSGGRLRAHAHDVAQVFLDETMIGILNENNKDLHIPELRE

SEQ ID NO: 29037 - protein, 1020 aa, Homo sapiens
  REGION 1..1020: note = ENSP00000370737
MQSCARAWGLRLGRGVGGGRRLAGGSGPCWAPRSRDSSSGGGDSAAAGASRLLERLLPRHDDFARRHIGPGDKDQREMLQTLGLASIDELIEKTVPANIRLKRPLKMEDPVCENEILATLHAISSKNQIWRSYIGMGYYNCSVPQTILRNLLENSGWITQYTPYQPEVSQGRLESLLNYQTMVCDITGLDMANASLLDEGTAAAEALQLCYRHNKRRKFLVDPRCHPQTIAVVQTRAKYTGVLTELKLPCEMDFSGKDVSGVLFQYPDTEGKVEDFTELVERAHQSGSLACCATDLLALCILRPPGEFGVDIALGSSQRFGVPLGYGGPHAAFFAVRESLVRMMPGRMVGVTRDATGKEVYRLALQTREQHIRRDKATSNICTAQALLANMAAMFAIYHGSHGLEHIARRVHNATLILSEGLKRAGHQLQHDLFFDTLKIQCGCSVKEVLGRAAQRQINFRLFEDGTLGISLDETVNEKDLDDLLWIFGCESSAELVAESMGEECRGIPGSVFKRTSPFLTHQVFNSYHSETNIVRYMKKLENKDISLVHSMIPLGSCTMKLNSSSELAPITWKEFANIHPFVPLDQAQGYQQLFRELEKDLCELTGYDQVCFQPNSGAQGEYAGLATIRAYLNQKGEGHRTVCLIPKSAHGTNPASAHMAGMKIQPVEVDKYGNIDAVHLKAMVDKHKENLAAIMITYPSTNGVFEENISDVCDLIHQHGGQVYLDGANMNAQVGICRPGDFGSDVSHLNLHKTFCIPHGGGGPGMGPIGVKKHLAPFLPNHPVISLKRNEDACPVGTVSAAPWGSSSILPISWAYIKMMGGKGLKQATETAILNANYMAKRLETHYRILFRGARGYVGHEFILDTRPFKKSANIEAVDVAKRLQDYGFHAPTMSWPVAGTLMVEPTESEDKAELDRFCDAMISIRQEIADIEEGRIDPRVNPLKMSPHSLTCVTSSHWDRPYSREVAAFPLPFVKPENKFWPTIARIDDIYGDQHLVCTCPPMEVYESPFSEQKRASS

SEQ ID NO: 29038 - protein, 64 aa, Homo sapiens
  REGION 1..64: note = ENSP00000491487
  VARIANT 1: note = Any amino acid
XSLTCVTSSHWDRPYSREVAAFPLTESRSVAQAGVQWHDPGFTPFSYLSLPLGLQAPATMPGPS

SEQ ID NO: 29039 - protein, 254 aa, Homo sapiens
  REGION 1..254: note = ENSP00000491312
MGPIGVKKHLAPFLPNHPVISLKRNEDACPVGTVSAAPWGSSSILPISWAYIKMMGGKGLKQATETAILNANYMAKRLETHYRILFRGARGYVGHEFILDTRPFKKSANIEAVDVAKRLQDYGFHAPTMSWPVAGTLMVEPTESEDKAELDRFCDAMISIRQEIADIEEGRIDPRVNPLKMSPHSLTCVTSSHWDRPYSREVAAFPLPFVKPENKFWPTIARIDDIYGDQHLVCTCPPMEVYESPFSEQKRASS

SEQ ID NO: 29040 - protein, 420 aa, Homo sapiens
  REGION 1..420: note = ENSP00000491369
MKARRPNRDPFLLVFASGAQGEYAGLATIRAYLNQKGEGHRTVCLIPKSAHGTNPASAHMAGMKIQPVEVDKYGNIDAVHLKAMVDKHKENLAAIMITYPSTNGVFEENISDVCDLIHQHGGQVYLDGANMNAQVGICRPGDFGSDVSHLNLHKTFCIPHGGGGPGMGPIGVKKHLAPFLPNHPVISLKRNEDACPVGTVSAAPWGSSSILPISWAYIKMMGGKGLKQATETAILNANYMAKRLETHYRILFRGARGYVGHEFILDTRPFKKSANIEAVDVAKRLQDYGFHAPTMSWPVAGTLMVEPTESEDKAELDRFCDAMISIRQEIADIEEGRIDPRVNPLKMSPHSLTCVTSSHWDRPYSREVAAFPLPFVKPENKFWPTIARIDDIYGDQHLVCTCPPMEVYESPFSEQKRASS

SEQ ID NO: 29041 - protein, 388 aa, Homo sapiens
  REGION 1..388: note = ENSP00000491932
MKARRPNRDPFLLVFASGAQGEYAGLATIRAYLNQKGEGHRTVCLIPKSAHGTNPASAHMAGMKIQPVEVDKYGNIDAVHLKAMVDKHKENLAAIMITYPSTNGVFEENISDVCDLIHQHGGQVYLDGANMNAQVGICRPGDFGSDVSHLNLHKTFCIPHGGGGPGMGPIGVKKHLAPFLPNHPVISLKRNEDACPVGTVSAAPWGSSSILPISWAYIKMMGGKGLKQATETAILNANYMAKRLETHYRILFRGARGFHAPTMSWPVAGTLMVEPTESEDKAELDRFCDAMISIRQEIADIEEGRIDPRVNPLKMSPHSLTCVTSSHWDRPYSREVAAFPLPFVKPENKFWPTIARIDDIYGDQHLVCTCPPMEVYESPFSEQKRASS

SEQ ID NO: 29042 - protein, 106 aa, Homo sapiens
  REGION 1..106: note = ENSP00000491895
MKARRPNRDPFLLVFASGAQGEYAGLATIRAYLNQKGEGHRTVCLIPKSAHGTNPASAHMAGMKIQPVEVDKYGNIDAVHLKAMVLVFSLADGRGRDGECWWGSGT

SEQ ID NO: 29043 - protein, 103 aa, Homo sapiens
  REGION 1..103: note = ENSP00000491209
  VARIANT 1: note = Any amino acid
XGVLTELKLPCEMDFSGKDVSGVLFQYPDTEGKVEDFTELVERAHQSGRCHWERSVSSCSSNQGATHSERQGYQQHLYSSGPLGEYGCHVCNLPWFPWAGAYC

SEQ ID NO: 29044 - protein, 164 aa, Homo sapiens
  REGION 1..164: note = ENSP00000491101
MDFSGKDVSGVLFQYPDTEGKVEDFTELVERAHQSGSLACCATDLLALCILRPPGEFGVDIALGSSQRFGVPLGYGGPHAAFFAVRESLVRMMPGRMVGVTRDATGKEVYRLALQTREQHIRRDKATSNICTAQALLANMAAMFAIYHGSHGLEHIARRVHNAT

SEQ ID NO: 29045 - protein, 140 aa, Homo sapiens
  REGION 1..140: note = ENSP00000491161
MGWRPGRGAPHFLGENEILATLHAISSKNQIWRSYIGMGYYNCSVPQTILRNLLENSGWITQYTPYQPEVSQGRLESLLNYQTMVCDITGLDMANASLLDEGTAAAEALQLCYRHNKRRKFLVDPRCHPQTIAVVQTRAK

SEQ ID NO: 29046 - protein, 55 aa, Homo sapiens
  REGION 1..55: note = ENSP00000491392
MGYYNCSVPQTILRNLLENSGWITQYTPYQPEVSQGRLESLLNYQTMVCDITGLD

SEQ ID NO: 29047 - protein, 551 aa, Homo sapiens
  REGION 1..551: note = ENSP00000335196
MARGAEGGRGDAGWGLRGALAAVALLSALNAAGTVFALCQWRGLSSALRALEAQRGREQREDSALRSFLAELSRAPRGASAPPQDPASSARNKRSHSGEPAPHIRAESHDMLMMMTYSMVPIRVMVDLCNSTKGICLTGPSGPPGPPGAGGLPGHNGLDGQPGPQGPKGEKGANGKRGKMGIPGAAGNPGERGEKGDHGELGLQGNEGPPGQKGEKGDKGDVSNDVLLAGAKGDQGPPGPPGPPGPPGPPGPPGSRRAKGPRQPSMFNGQCPGETCAIPNDDTLVGKADEKASEHHSPQAESMITSIGNPVQVLKVTETFGTWIRESANKSDDRIWVTEHFSGIMVKEFKDQPSLLNGSYTFIHLPYYFHGCGHVVYNNSLYYHKGGSNTLVRFEFGQETSQTLKLENALYFDRKYLFANSKTYFNLAVDEKGLWIIYASSVDGSSILVAQLDERTFSVVQHVNTTYPKSKAGNAFIARGILYVTDTKDMRVTFAFDLLGGKQINANFDLRTSQSVLAMLAYNMRDQHLYSWEDGHLMLYPVQFLSTTLNQ

SEQ ID NO: 29048 - protein, 151 aa, Homo sapiens
  REGION 1..151: note = ENSP00000484633
  VARIANT 1: note = Any amino acid
XCQWRGLSSALRALEAQRGREQREDSALRSFLAELSRAPRGASAPPQDPASSARNKRSHSGEPAPHIRAESHDMLMMMTYSMVPIRVMVDLCNSTKGICLTGPSGPPGPPGAGGLPGHNGLDGQPGPQGPKGEKGANGKRGKMGIFGNSSN

SEQ ID NO: 29049 - protein, 427 aa, Homo sapiens
  REGION 1..427: note = ENSP00000379681
MVDLCNSTKGICLTGPSGPPGPPGAGGLPGHNGLDGQPGPQGPKGEKGANGKRGKMGIPGAAGNPGERGEKGDHGELGLQGNEGPPGQKGEKGDKGDVSNDVLLAGAKGDQGPPGPPGPPGPPGPPGPPGSRRAKGPRQPSMFNGQCPGETCAIPNDDTLVGKADEKASEHHSPQAESMITSIGNPVQVLKVTETFGTWIRESANKSDDRIWVTEHFSGIMVKEFKDQPSLLNGSYTFIHLPYYFHGCGHVVYNNSLYYHKGGSNTLVRFEFGQETSQTLKLENALYFDRKYLFANSKTYFNLAVDEKGLWIIYASSVDGSSILVAQLDERTFSVVQHVNTTYPKSKAGNAFIARGILYVTDTKDMRVTFAFDLLGGKQINANFDLRTSQSVLAMLAYNMRDQHLYSWEDGHLMLYPVQFLSTTLNQ

SEQ ID NO: 29050 - protein, 165 aa, Homo sapiens
  REGION 1..165: note = ENSP00000453433
MTLSPLQIRVMVDLCNSTKGICLTGPSGPPGPPGAGGLPGHNGLDGQPGPQGPKGEKGANGKRGKMGIPGAAGNPGERGEKGDHGELGLQGNEGPPGQKGEKGDKGDVSNDVLLAGAKGDQGPPGPPGPPGPPGPPGPPGSRRAKGPRQPSMFNGQCPGETCAIP

SEQ ID NO: 29051 - protein, 427 aa, Homo sapiens; identical to SEQ ID NO: 29049
  REGION 1..427: note = ENSP00000479249

SEQ ID NO: 29052 - protein, 175 aa, Homo sapiens
  REGION 1..175: note = ENSP00000436671
MSPSLGFPAQMNHQKGPSPSFGVQPCGPHDSARGGMIPHPQSRGPFPTCQLKSELDMLVGKCREEPLEGDMSSPNSTGIQDPLLGMLDGREDLEREEKREPESVYETDCRWDGCSQEFDSQEQLVHHINSEHIHGERKEFVCHWGGCSRELRPFKAQYMLVVHMRRHTGEKPHKC

SEQ ID NO: 29053 - protein, 1106 aa, Homo sapiens
  REGION 1..1106: note = ENSP00000228682
MFNSMTPPPISSYGEPCCLRPLPSQGAPSVGTEGLSGPPFCHQANLMSGPHSYGPARETNSCTEGPLFSSPRSAVKLTKKRALSISPLSDASLDLQTVIRTSPSSLVAFINSRCTSPGGSYGHLSIGTMSPSLGFPAQMNHQKGPSPSFGVQPCGPHDSARGGMIPHPQSRGPFPTCQLKSELDMLVGKCREEPLEGDMSSPNSTGIQDPLLGMLDGREDLEREEKREPESVYETDCRWDGCSQEFDSQEQLVHHINSEHIHGERKEFVCHWGGCSRELRPFKAQYMLVVHMRRHTGEKPHKCTFEGCRKSYSRLENLKTHLRSHTGEKPYMCEHEGCSKAFSNASDRAKHQNRTHSNEKPYVCKLPGCTKRYTDPSSLRKHVKTVHGPDAHVTKRHRGDGPLPRAPSISTVEPKREREGGPIREESRLTVPEGAMKPQPSPGAQSSCSSDHSPAGSAANTDSGVEMTGNAGGSTEDLSSLDEGPCIAGTGLSTLRRLENLRLDQLHQLRPIGTRGLKLPSLSHTGTTVSRRVGPPVSLERRSSSSSSISSAYTVSRRSSLASPFPPGSPPENGASSLPGLMPAQHYLLRARYASARGGGTSPTAASSLDRIGGLPMPPWRSRAEYPGYNPNAGVTRRASDPAQAADRPAPARVQRFKSLGCVHTPPTVAGGGQNFDPYLPTSVYSPQPPSITENAAMDARGLQEEPEVGTSMVGSGLNPYMDFPPTDTLGYGGPEGAAAEPYGARGPGSLPLGPGPPTNYGPNPCPQQASYPDPTQETWGEFPSHSGLYPGPKALGGTYSQCPRLEHYGQVQVKPEQGCPVGSDSTGLAPCLNAHPSEGPPHPQPLFSHYPQPSPPQYLQSGPYTQPPPDYLPSEPRPCLDFDSPTHSTGQLKAQLVCNYVQSQQELLWEGGGREDAPAQEPSYQSPKFLGGSQVSPSRAKAPVNTYGPGFGPNLPNHKSGSYPTPSPCHENFVVGANRASHRAAAPPRLLPPLPTCYGPLKVGGTNPSCGHPEVGRLGGGPALYPPPEGQVCNPLDSLDLDNTQLDFVAILDEPQGLSPPPSHDQRGSSGHTPPPSGPPNMAVGNMSVLLRSLPGETEFLNSSA

SEQ ID NO: 29054 - protein, 129 aa, Homo sapiens
  REGION 1..129: note = ENSP00000434421
MFNSMTPPPISSYGEPCCLRPLPSQGAPSVGTEGLSGPPFCHQANLMSGPHSYGPARETNSCTEGPLFSSPRSAVKLTKKRALSISPLSDASLDLQTVIRTSPSSLVAFINSRCTSPGGSYGHLSIGTM

SEQ ID NO: 29055 - protein, 1065 aa, Homo sapiens
  REGION 1..1065: note = ENSP00000434408
MFNSMTPPPISSYGEPCCLRPLPSQGAPSVGTEVKLTKKRALSISPLSDASLDLQTVIRTSPSSLVAFINSRCTSPGGSYGHLSIGTMSPSLGFPAQMNHQKGPSPSFGVQPCGPHDSARGGMIPHPQSRGPFPTCQLKSELDMLVGKCREEPLEGDMSSPNSTGIQDPLLGMLDGREDLEREEKREPESVYETDCRWDGCSQEFDSQEQLVHHINSEHIHGERKEFVCHWGGCSRELRPFKAQYMLVVHMRRHTGEKPHKCTFEGCRKSYSRLENLKTHLRSHTGEKPYMCEHEGCSKAFSNASDRAKHQNRTHSNEKPYVCKLPGCTKRYTDPSSLRKHVKTVHGPDAHVTKRHRGDGPLPRAPSISTVEPKREREGGPIREESRLTVPEGAMKPQPSPGAQSSCSSDHSPAGSAANTDSGVEMTGNAGGSTEDLSSLDEGPCIAGTGLSTLRRLENLRLDQLHQLRPIGTRGLKLPSLSHTGTTVSRRVGPPVSLERRSSSSSSISSAYTVSRRSSLASPFPPGSPPENGASSLPGLMPAQHYLLRARYASARGGGTSPTAASSLDRIGGLPMPPWRSRAEYPGYNPNAGVTRRASDPAQAADRPAPARVQRFKSLGCVHTPPTVAGGGQNFDPYLPTSVYSPQPPSITENAAMDARGLQEEPEVGTSMVGSGLNPYMDFPPTDTLGYGGPEGAAAEPYGARGPGSLPLGPGPPTNYGPNPCPQQASYPDPTQETWGEFPSHSGLYPGPKALGGTYSQCPRLEHYGQVQVKPEQGCPVGSDSTGLAPCLNAHPSEGPPHPQPLFSHYPQPSPPQYLQSGPYTQPPPDYLPSEPRPCLDFDSPTHSTGQLKAQLVCNYVQSQQELLWEGGGREDAPAQEPSYQSPKFLGGSQVSPSRAKAPVNTYGPGFGPNLPNHKSGSYPTPSPCHENFVVGANRASHRAAAPPRLLPPLPTCYGPLKVGGTNPSCGHPEVGRLGGGPALYPPPEGQVCNPLDSLDLDNTQLDFVAILDEPQGLSPPPSHDQRGSSGHTPPPSGPPNMAVGNMSVLLRSLPGETEFLNSSA

SEQ ID NO: 29056 - protein, 978 aa, Homo sapiens
  REGION 1..978: note = ENSP00000437607
MSPSLGFPAQMNHQKGPSPSFGVQPCGPHDSARGGMIPHPQSRGPFPTCQLKSELDMLVGKCREEPLEGDMSSPNSTGIQDPLLGMLDGREDLEREEKREPESVYETDCRWDGCSQEFDSQEQLVHHINSEHIHGERKEFVCHWGGCSRELRPFKAQYMLVVHMRRHTGEKPHKCTFEGCRKSYSRLENLKTHLRSHTGEKPYMCEHEGCSKAFSNASDRAKHQNRTHSNEKPYVCKLPGCTKRYTDPSSLRKHVKTVHGPDAHVTKRHRGDGPLPRAPSISTVEPKREREGGPIREESRLTVPEGAMKPQPSPGAQSSCSSDHSPAGSAANTDSGVEMTGNAGGSTEDLSSLDEGPCIAGTGLSTLRRLENLRLDQLHQLRPIGTRGLKLPSLSHTGTTVSRRVGPPVSLERRSSSSSSISSAYTVSRRSSLASPFPPGSPPENGASSLPGLMPAQHYLLRARYASARGGGTSPTAASSLDRIGGLPMPPWRSRAEYPGYNPNAGVTRRASDPAQAADRPAPARVQRFKSLGCVHTPPTVAGGGQNFDPYLPTSVYSPQPPSITENAAMDARGLQEEPEVGTSMVGSGLNPYMDFPPTDTLGYGGPEGAAAEPYGARGPGSLPLGPGPPTNYGPNPCPQQASYPDPTQETWGEFPSHSGLYPGPKALGGTYSQCPRLEHYGQVQVKPEQGCPVGSDSTGLAPCLNAHPSEGPPHPQPLFSHYPQPSPPQYLQSGPYTQPPPDYLPSEPRPCLDFDSPTHSTGQLKAQLVCNYVQSQQELLWEGGGREDAPAQEPSYQSPKFLGGSQVSPSRAKAPVNTYGPGFGPNLPNHKSGSYPTPSPCHENFVVGANRASHRAAAPPRLLPPLPTCYGPLKVGGTNPSCGHPEVGRLGGGPALYPPPEGQVCNPLDSLDLDNTQLDFVAILDEPQGLSPPPSHDQRGSSGHTPPPSGPPNMAVGNMSVLLRSLPGETEFLNSSA

SEQ ID NO: 29057 - protein, 1065 aa, Homo sapiens; identical to SEQ ID NO: 29055
  REGION 1..1065: note = ENSP00000441006

SEQ ID NO: 29058 - protein, 82 aa, Homo sapiens
  REGION 1..82: note = ENSP00000398992
METSASATASEKQEAKSGILEAAGFPDPGKKASPLVVAAAAAAAVAAQGVPQHLLPPFHAPLPIDMRHQEGRYHYEPHSVHG

SEQ ID NO: 29059 - protein, 67 aa, Homo sapiens
  REGION 1..67: note = ENSP00000400593
METSASATASEKQEAKSGILEAAGFPDPGKKASPLVVAAAAAAAVAAQGAQPSPSPTPSTPWPTSRF

SEQ ID NO: 29060 - protein, 67 aa, Homo sapiens; identical to SEQ ID NO: 29059
  REGION 1..67: note = ENSP00000403715

SEQ ID NO: 29061 - protein, 67 aa, Homo sapiens; identical to SEQ ID NO: 29059
  REGION 1..67: note = ENSP00000397488

SEQ ID NO: 29062 - protein, 67 aa, Homo sapiens; identical to SEQ ID NO: 29059
  REGION 1..67: note = ENSP00000344473

SEQ ID NO: 29063 - protein, 1586 aa, Homo sapiens
  REGION 1..1586: note = ENSP00000390436
METSASATASEKQEAKSGILEAAGFPDPGKKASPLVVAAAAAAAVAAQGVPQHLLPPFHAPLPIDMRHQEGRYHYEPHSVHGVHGPPALSGSPVISDISLIRLSPHPAGPGESPFNAPHPYVNPHMEHYLRSVHSSPTLSMISAARGLSPADVAQEHLKERGLFGLPAPGTTPSDYYHQMTLVAGHPAPYGDLLMQSGGAASAPHLHDYLNPVDVSRFSSPRVTPRLSRKRALSISPLSDASLDLQRMIRTSPNSLVAYINNSRSSSAASGSYGHLSAGALSPAFTFPHPINPVAYQQILSQQRGLGSAFGHTPPLIQPSPTFLAQQPMALTSINATPTQLSSSSNCLSDTNQNKQSSESAVSSTVNPVAIHKRSKVKTEPEGLRPASPLALTQGQVSGHGSCGCALPLSQEQLADLKEDLDRDDCKQEAEVVIYETNCHWEDCTKEYDTQEQLVHHINNEHIHGEKKEFVCRWQACTREQKPFKAQYMLVVHMRRHTGEKPHKCTFEGCSKAYSRLENLKTHLRSHTGEKPYVCEHEGCNKAFSNASDRAKHQNRTHSNEKPYICKIPGCTKRYTDPSSLRKHVKTVHGPDAHVTKKQRNDVHLRTPLLKENGDSEAGTEPGGPESTEASSTSQAVEDCLHVRAIKTESSGLCQSSPGAQSSCSSEPSPLGSAPNNDSGVEMPGTGPGSLGDLTALDDTPPGADTSALAAPSAGGLQLRKHMTTMHRFEQLKKEKLKSLKDSCSWAGPTPHTRNTKLPPLPGSGSILENFSGSGGGGPAGLLPNPRLSELSASEVTMLSQLQERRDSSTSTVSSAYTVSRRSSGISPYFSSRRSSEASPLGAGRPHNASSADSYDPISTDASRRSSEASQCSGGSGLLNLTPAQQYSLRAKYAAATGGPPPTPLPGLERMSLRTRLALLDAPERTLPAGCPRPLGPRRGSDGPTYGHGHAGAAPAFPHEAPGGGARRASDPVRRPDALSLPRVQRFHSTHNVNPGPLPPCADRRGLRLQSHPSTDGGLARGAYSPRPPSISENVAMEAVAAGVDGAGPEADLGLPEDDLVLPDDVVQYIKAHASGALDEGTGQVYPTESTGFSDNPRLPSPGLHGQRRMVAADSNVGPSAPMLGGCQLGFGAPSSLNKNNMPVQWNEVSSGTVDALASQVKPPPFPQGNLAVVQQKPAFGQYPGYSPQGLQASPGGLDSTQPHLQPRSGAPSQGIPRVNYMQQLRQPVAGSQCPGMTTTMSPHACYGQVHPQLSPSTISGALNQFPQSCSNMPAKPGHLGHPQQTEVAPDPTTMGNRHRELGVPDSALAGVPPPHPVQSYPQQSHHLAASMSQEGYHQVPSLLPARQPGFMEPQTGPMGVATAGFGLVQPRPPLEPSPTGRHRGVRAVQQQLAYARATGHAMAAMPSSQETAEAVPKGAMGNMGSVPPQPPPQDAGGAPDHSMLYYYGQIHMYEQDGGLENLGSCQVMRSQPPQPQACQDSIQPQPLPSPGVNQVSSTVDSQLLEAPQIDFDAIMDDGDHSSLFSGALSPSLLHSLSQNSSRLTTPRNSLTLPSIPAGISNMAVGDMSSMLTSLAEESKFLNMMT

SEQ ID NO: 29064 - protein, 67 aa, Homo sapiens; identical to SEQ ID NO: 29059
  REGION 1..67: note = ENSP00000415773

SEQ ID NO: 29065 - protein, 176 aa, Homo sapiens
  REGION 1..176: note = ENSP00000441454
ASEKQEAKSGILEAAGFPDPGKKASPLVVAAAAAAAVAAQGVPQHLLPPFHAPLPIDMRHQEGRYHYEPHSVHGVHGVPFLQPAGDAPPEPQAGAVHLPTLRRQPGPAADDPHLTQLASGLHQQLPKQLGGQRFLRASVSGCPQPSLHLPPPHQPRGLPADSEPAEGSGVSLWTHT

SEQ ID NO: 29066 - protein, 56 aa, Homo sapiens
  REGION 1..56: note = ENSP00000402383
ASEKQEAKSGILEAAGFPDPGKKASPLVVAAAAAAAVAAQGGPLPSAAALSSLTSP

SEQ ID NO: 29067 - protein, 1586 aa, Homo sapiens; identical to SEQ ID NO: 29063
  REGION 1..1586: note = ENSP00000354586

SEQ ID NO: 29068 - protein, 1580 aa, Homo sapiens
  REGION 1..1580: note = ENSP00000379258
MEAQSHSSTTTEKKKVENSIVKCSTRTDVSEKAVASSTTSNEDESPGQTYHRERRNAITMQPQNVQGLSKVSEEPSTSSDERASLIKKEIHGSLPHVAEPSVPYRGTVFAMDPRNGYMEPHYHPPHLFPAFHPPVPIDARHHEGRYHYDPSPIPPLHMTSALSSSPTYPDLPFIRISPHRNPTAASESPFSPPHPYINPYMDYIRSLHSSPSLSMISATRGLSPTDAPHAGVSPAEYYHQMALLTGQRSPYADIIPSAATAGTGAIHMEYLHAMDSTRFSSPRLSARPSRKRTLSISPLSDHSFDLQTMIRTSPNSLVTILNNSRSSSSASGSYGHLSASAISPALSFTYSSAPVSLHMHQQILSRQQSLGSAFGHSPPLIHPAPTFPTQRPIPGIPTVLNPVQVSSGPSESSQNKPTSESAVSSTGDPMHNKRSKIKPDEDLPSPGARGQQEQPEGTTLVKEEGDKDESKQEPEVIYETNCHWEGCAREFDTQEQLVHHINNDHIHGEKKEFVCRWLDCSREQKPFKAQYMLVVHMRRHTGEKPHKCTFEGCTKAYSRLENLKTHLRSHTGEKPYVCEHEGCNKAFSNASDRAKHQNRTHSNEKPYVCKIPGCTKRYTDPSSLRKHVKTVHGPEAHVTKKQRGDIHPRPPPPRDSGSHSQSRSPGRPTQGALGEQQDLSNTTSKREECLQVKTVKAEKPMTSQPSPGGQSSCSSQQSPISNYSNSGLELPLTDGGSIGDLSAIDETPIMDSTISTATTALALQARRNPAGTKWMEHVKLERLKQVNGMFPRLNPILPPKAPAVSPLIGNGTQSNNTCSLGGPMTLLPGRSDLSGVDVTMLNMLNRRDSSASTISSAYLSSRRSSGISPCFSSRRSSEASQAEGRPQNVSVADSYDPISTDASRRSSEASQSDGLPSLLSLTPAQQYRLKAKYAAATGGPPPTPLPNMERMSLKTRLALLGDALEPGVALPPVHAPRRCSDGGAHGYGRRHLQPHDAPGHGVRRASDPVRTGSEGLALPRVPRFSSLSSCNPPAMATSAEKRSLVLQNYTRPEGGQSRNFHSSPCPPSITENVTLESLTMDADANLNDEDFLPDDVVQYLNSQNQAGYEQHFPSALPDDSKVPHGPGDFDAPGLPDSHAGQQFHALEQPCPEGSKTDLPIQWNEVSSGSADLSSSKLKCGPRPAVPQTRAFGFCNGMVVHPQNPLRSGPAGGYQTLGENSNPYGGPEHLMLHNSPGSGTSGNAFHEQPCKAPQYGNCLNRQPVAPGALDGACGAGIQASKLKSTPMQGSGGQLNFGLPVAPNESAGSMVNGMQNQDPVGQGYLAHQLLGDSMQHPGAGRPGQQMLGQISATSHINIYQGPESCLPGAHGMGSQPSSLAVVRGYQPCASFGGSRRQAMPRDSLALQSGQLSDTSQTCRVNGIKMEMKGQPHPLCSNLQNYSGQFYDQTVGFSQQDTKAGSFSISDASCLLQGTSAKNSELLSPGANQVTSTVDSLDSHDLEGVQIDFDAIIDDGDHSSLMSGALSPSIIQNLSHSSSRLTTPRASLPFPALSMSTTNMAIGDMSSLLTSLAEESKFLAVMQ

SEQ ID NO: 29069 - protein, 180 aa, Homo sapiens
  REGION 1..180: note = ENSP00000406135
MEAQSHSSTTTEKKKVENSIVKCSTRTDVSEKAVASSTTSNEDESPGQTYHRERRNAITMQPQNVQGLSKVSEEPSTSSDERASLIKKEIHGSLPHVAEPSVPYRGTVFAMDPRNGYMEPHYHPPHLFPAFHPPVPIDARHHEGRYHYDPSPIPPLHMTSALSSSPTYPDLPFIRISPHR

SEQ ID NO: 29070 - protein, 96 aa, Homo sapiens
  REGION 1..96: note = ENSP00000407963
MEAQSHSSTTTEKKKVENSIVKCSTRTDVSEKAVASSTTSNGNHLEAQARGWTRRIGCIRAVHPCCCTNDSATDPLGWATLKGGSSKECVQTHTFT

SEQ ID NO: 29071 - protein, 266 aa, Homo sapiens
  REGION 1..266: note = ENSP00000266659
MRVTLATIAWMVSFVSNYSHTANILPDIENEDFIKDCVRIHNKFRSEVKPTASDMLYMTWDPALAQIAKAWASNCQFSHNTRLKPPHKLHPNFTSLGENIWTGSVPIFSVSSAITNWYDEIQDYDFKTRICKKVCGHYTQVVWADSYKVGCAVQFCPKVSGFDALSNGAHFICNYGPGGNYPTWPYKRGATCSACPNNDKCLDNLCVNRQRDQVKRYYSVVYPGWPIYPRNRYTSLFLIVNSVILILSVIITILVQHKYPNLVLLD

SEQ ID NO: 29072 - protein, 148 aa, Homo sapiens
  REGION 1..148: note = ENSP00000440595
MRVTLATIAWMVSFVSNYSHTANILPDIENEDFIKDCVRIHNKFRSEVKPTASDMLYMTWDPALAQIAKAWASNCQFSHNTRLKPPHKLHPNFTSLGENIWTGSVPIFSVSSAITNWYDEIQDYDFKTRICKKVCGHYTQRELPNLAI

SEQ ID NO: 29073 - protein, 238 aa, Homo sapiens
  REGION 1..238: note = ENSP00000391144
MRVTLATIAWMVSFVSNYSHTANILPDIENEDFIKDCVRIHNKFRSEVKPTASDMLYMTWDPALAQIAKAWASNCQFSHNTRLKPPHKLHPNFTSLGENIWTGSVPIFSVSSAITNWYDEIQDYDFKTRICKKVCGHYTQVSQERGRDPNPKRGFLNLARENPGLFGQIVTKLAAQFNFALKFLALTLFPMEHILYATTDQEGITQLGHIREEPPAVPAPIMTSVWTISVLTDSETKS

SEQ ID NO: 29074 - protein, 89 aa, Homo sapiens
  REGION 1..89: note = ENSP00000448008
MTKSRTMTSRLGYAKKSVATTLRLFGQIVTKLAAQFNFALKFLALTLFPMEHILYATTDQEGITQLGHIREEPPAVPAPIMTSVWTISV

SEQ ID NO: 29075 - protein, 128 aa, Homo sapiens
  REGION 1..128: note = ENSP00000367195
MGKSASKQFHNEVLKAHNEYRQKHGVPPLKLCKNLNREAQQYSEALASTRILKHSPESSRGQCGENLAWASYDQTGHFTAMVWKNTKKMGVGKASASDGSSFVVARYFPAGNVVNEGFFEENVLPPKK

SEQ ID NO: 29076 - protein, 154 aa, Homo sapiens
  REGION 1..154: note = ENSP00000367196
MGKSASKQFHNEVLKAHNEYRQKHGVPPLKLCKNLNREAQQYSEALASTRILKHSPESSRGQCGENLAWASYDQTGKEVADRWYSEIKNYNFQQPGFTSGTGHFTAMVWKNTKKMGVGKASASDGSSFVVARYFPAGNVVNEGFFEENVLPPKK

SEQ ID NO: 29077 - protein, 72 aa, Homo sapiens
  REGION 1..72: note = ENSP00000478768
MVRNPALPDLAVSLVRRKPGHFTAMVWKNTKKMGVGKASASDGSSFVVARYFPAGNVVNEGFFEENVLPPKK

SEQ ID NO: 29078 - protein, 62 aa, Homo sapiens
  REGION 1..62: note = ENSP00000379857
MGKSASKQFHNEVLKAHNEYRQKHGVPPLKLCKNLNREAQQTLHGHGMEEHQEDGRGEGVRK

SEQ ID NO: 29079 - protein, 620 aa, Homo sapiens
  REGION 1..620: note = ENSP00000309653
MAEARTSLSAHCRGPLATGLHPDLDLPGRSLATPAPSCYLLGSEPSSGLGLQPETHLPEGSLKRCCVLGLPPTSPASSSPCASSDVTSIIRSSQTSLVTCVNGLRSPPLTGDLGGPSKRARPGPASTDSHEGSLQLEACRKASFLKQEPADEFSELFGPHQQGLPPPYPLSQLPPGPSLGGLGLGLAGRVVAGRQACRWVDCCAAYEQQEELVRHIEKSHIDQRKGEDFTCFWAGCVRRYKPFNARYKLLIHMRVHSGEKPNKCMFEGCSKAFSRLENLKIHLRSHTGEKPYLCQHPGCQKAFSNSSDRAKHQRTHLDTKPYACQIPGCSKRYTDPSSLRKHVKAHSAKEQQVRKKLHAGPDTEADVLTECLVLQQLHTSTQLAASDGKGGCGLGQELLPGVYPGSITPHNGLASGLLPPAHDVPSRHHPLDATTSSHHHLSPLPMAESTRDGLGPGLLSPIVSPLKGLGPPPLPPSSQSHSPGGQPFPTLPSKPSYPPFQSPPPPPLPSPQGYQGSFHSIQSCFPYGDCYRMAEPAAGGDGLVGETHGFNPLRPNGYHSLSTPLPATGYEALAEASCPTALPQQPSEDVVSSGPEDCGFFPNGAFDHCLGHIPSIYTDT

SEQ ID NO: 29080 - protein, 795 aa, Homo sapiens
  REGION 1..795: note = ENSP00000486112
MHCEVAEAHSDKRPKEAPGAPGPDRGPASLGAHMAFRVTVSGGGCGDRGPRDLLARPPAPPPRAHDLLRPRSPRDYGPSKAAAAGKVNGSYGHRTPGSEKSLLDLDLAEGPGPTCCQGLFLPAGSPPPRAHPQACERLLHFPHPDRSPRPQATYVNGSLPTTQHIKQESLPDYQAMAEARTSLSAHCRGPLATGLHPDLDLPGRSLATPAPSCYLLGSEPSSGLGLQPETHLPEGSLKRCCVLGLPPTSPASSSPCASSDVTSIIRSSQTSLVTCVNGLRSPPLTGDLGGPSKRARPGPASTDSHEGSLQLEACRKASFLKQEPADEFSELFGPHQQGLPPPYPLSQLPPGPSLGGLGLGLAGRVVAGRQACRWVDCCAAYEQQEELVRHIEKSHIDQRKGEDFTCFWAGCVRRYKPFNARYKLLIHMRVHSGEKPNKCMFEGCSKAFSRLENLKIHLRSHTGEKPYLCQHPGCQKAFSNSSDRAKHQRTHLDTKPYACQIPGCSKRYTDPSSLRKHVKAHSAKEQQVRKKLHAGPDTEADVLTECLVLQQLHTSTQLAASDGKGGCGLGQELLPGVYPGSITPHNGLASGLLPPAHDVPSRHHPLDATTSSHHHLSPLPMAESTRDGLGPGLLSPIVSPLKGLGPPPLPPSSQSHSPGGQPFPTLPSKPSYPPFQSPPPPPLPSPQGYQGSFHSIQSCFPYGDCYRMAEPAAGGDGLVGETHGFNPLRPNGYHSLSTPLPATGYEALAEASCPTALPQQPSEDVVSSGPEDCGFFPNGAFDHCLGHIPSIYTDT

SEQ ID NO: 29081 - protein, 775 aa, Homo sapiens
  REGION 1..775: note = ENSP00000325494
MMVQRLGLISPPASQVSTACNQISPSLQRAMNAANLNIPPSDTRSLISRESLASTTLSLTESQSASSMKQEWSQGYRALPSLSNHGSQNGLDLGDLLSLPPGTSMSSNSVSNSLPSYLFGTESSHSPYPSPRHSSTRSHSARSKKRALSLSPLSDGIGIDFNTIIRTSPTSLVAYINGSRASPANLSPQPEVYGHFLGVRGSCIPQPRPVPGSQKGVLVAPGGLALPAYGEDGALEHERMQQLEHGGLQPGLVNHMVVQHGLPGPDSQSAGLFKTERLEEFPGSTVDLPPAPPLPPLPPPPGPPPPYHAHAHLHHPELGPHAQQLALPQATLDDDGEMDGIGGKHCCRWIDCSALYDQQEELVRHIEKVHIDQRKGEDFTCFWAGCPRRYKPFNARYKLLIHMRVHSGEKPNKCTFEGCEKAFSRLENLKIHLRSHTGEKPYLCQHPGCQKAFSNSSDRAKHQRTHLDTKPYACQIPGCTKRYTDPSSLRKHVKAHSSKEQQARKKLRSSTELHPDLLTDCLTVQSLQPATSPRDAAAEGTVGRSPGPGPDLYSAPIFSSNYSSRSGTAAGAVPPPHPVSHPSPGHNVQGSPHNPSSQLPPLTAVDAGAERFAPSAPSPHHISPRRVPAPSSILQRTQPPYTQQPSGSHLKSYQPETNSSFQPNGIHVHGFYGQLQKFCPPHYPDSQRIVPPVSSCSVVPSFEDCLVPTSMGQASFDVFHRAFSTHSGITVYDLPSSSSSLFGESLRSGAEDATFLQISTVDRCPSQLSSVYTEG

SEQ ID NO: 29082 - protein, 930 aa, Homo sapiens
  REGION 1..930: note = ENSP00000371398
MNGRSCSMSLHRTSGTPQGPRMVSGHHIPAIRAHSGTPGPSPCGSTSSPTMASLANNLHLKMPSGGGMAPQNNVAESRIHLPALSPRRQMLTNGKPRFQVTQAGGMSGSHTLKPKQQEFGSPFPPNPGKGALGFGPQCKSIGKGSCNNLVVTSSPMMVQRLGLISPPASQVSTACNQISPSLQRAMNAANLNIPPSDTRSLISRESLASTTLSLTESQSASSMKQEWSQGYRALPSLSNHGSQNGLDLGDLLSLPPGTSMSSNSVSNSLPSYLFGTESSHSPYPSPRHSSTRSHSARSKKRALSLSPLSDGIGIDFNTIIRTSPTSLVAYINGSRASPANLSPQPEVYGHFLGVRGSCIPQPRPVPGSQKGVLVAPGGLALPAYGEDGALEHERMQQLEHGGLQPGLVNHMVVQHGLPGPDSQSAGLFKTERLEEFPGSTVDLPPAPPLPPLPPPPGPPPPYHAHAHLHHPELGPHAQQLALPQATLDDDGEMDGIGGKHCCRWIDCSALYDQQEELVRHIEKVHIDQRKGEDFTCFWAGCPRRYKPFNARYKLLIHMRVHSGEKPNKCTFEGCEKAFSRLENLKIHLRSHTGEKPYLCQHPGCQKAFSNSSDRAKHQRTHLDTKPYACQIPGCTKRYTDPSSLRKHVKAHSSKEQQARKKLRSSTELHPDLLTDCLTVQSLQPATSPRDAAAEGTVGRSPGPGPDLYSAPIFSSNYSSRSGTAAGAVPPPHPVSHPSPGHNVQGSPHNPSSQLPPLTAVDAGAERFAPSAPSPHHISPRRVPAPSSILQRTQPPYTQQPSGSHLKSYQPETNSSFQPNGIHVHGFYGQLQKFCPPHYPDSQRIVPPVSSCSVVPSFEDCLVPTSMGQASFDVFHRAFSTHSGITVYDLPSSSSSLFGESLRSGAEDATFLQISTVDRCPSQLSSVYTEG

SEQ ID NO: 29083 - protein, 89 aa, Homo sapiens
  REGION 1..89: note = ENSP00000418671
MMVQRLGLISPPASQVSTACNQISPSLQRAMNAANLNIPPSDTRSLISRESLASTTLSLTESQSASSMKQEWSQGYRALPSLSNHGSQN

SEQ ID NO: 29084 - protein, 89 aa, Homo sapiens; identical to SEQ ID NO: 29083
  REGION 1..89: note = ENSP00000418995

SEQ ID NO: 29085 - protein, 89 aa, Homo sapiens; identical to SEQ ID NO: 29083
  REGION 1..89: note = ENSP00000418005

SEQ ID NO: 29086 - protein, 244 aa, Homo sapiens
  REGION 1..244: note = ENSP00000417883
MNGRSCSMSLHRTSGTPQGPRMVSGHHIPAIRAHSGTPGPSPCGSTSSPTMASLANNLHLKMPSGGGMAPQNNVAESRIHLPALSPRRQMLTNGKPRFQVTQAGGMSGSHTLKPKQQEFGSPFPPNPGKGALGFGPQCKSIGKGSCNNLVVTSSPMMVQRLGLISPPASQVSTACNQISPSLQRAMNAANLNIPPSDTRSLISRESLASTTLSLTESQSASSMKQEWSQGYRALPSLSNHGSQN

SEQ ID NO: 29087 - protein, 142 aa, Homo sapiens
  REGION 1..142: note = ENSP00000419914
MNGRSCSMSLHRTSGTPQGPRMVSGHHIPAIRAHSGTPGPSPCGSTSSPTMASLANNLHLKMPSGGGMAPQNNVAESRIHLPALSPRRQMLTNGKPRFQVTQAGGMSGSHTLKPKQQEFGSPFPPNPGKGPLFRVSLWRPRP

SEQ ID NO: 29088 - protein, 244 aa, Homo sapiens; identical to SEQ ID NO: 29086
  REGION 1..244: note = ENSP00000417794

SEQ ID NO: 29089 - protein, 373 aa, Homo sapiens
  REGION 1..373: note = ENSP00000458242
MYTVGYSFSLISLFLALTLLLFLRKLHCTRNYIHMNLFASFILRTLAVLVKDVVFYNSYSKRPDNENGWMSYLSEMSTSCRSVQVLLHYFVGANYLWLLVEGLYLHTLLEPTVLPERRLWPRYLLLGWAFPVLFVVPWGFARAHLENTGCWTTNGNKKIWWIIRGPMMLCVTVNFFIFLKILKLLISKLKAHQMCFRDYKYRLAKSTLVLIPLLGVHEILFSFITDDQVEGFAKLIRLFIQLTLSSFHGFLVALQYGFANGEVKAELRKYWVRFLLARHSGCRACVLGKDFRFLGKCPKKLSEGDGAEKLRKLQPSLNSGRLLHLAMRGLGELGAQPQQDHARWPRGSSLSECSEGDVTMANTMEEILEESEI

SEQ ID NO: 29090 - protein, 553 aa, Homo sapiens
  REGION 1..553: note = ENSP00000262441
MKLGSSRAGPGRGSAGLLPGVHELPMGIPAPWGTSPLSFHRKCSLWAPGRPFLTLVLLVSIKQVTGSLLEETTRKWAQYKQACLRDLLKEPSGIFCNGTFDQYVCWPHSSPGNVSVPCPSYLPWWSEESSGRAYRHCLAQGTWQTIENATDIWQDDSECSENHSFKQNVDRYALLSTLQLMYTVGYSFSLISLFLALTLLLFLRKLHCTRNYIHMNLFASFILRTLAVLVKDVVFYNSYSKRPDNENGWMSYLSEMSTSCRSVQVLLHYFVGANYLWLLVEGLYLHTLLEPTVLPERRLWPRYLLLGWAFPVLFVVPWGFARAHLENTGCWTTNGNKKIWWIIRGPMMLCVTVNFFIFLKILKLLISKLKAHQMCFRDYKYRLAKSTLVLIPLLGVHEILFSFITDDQVEGFAKLIRLFIQLTLSSFHGFLVALQYGFANGEVKAELRKYWVRFLLARHSGCRACVLGKDFRFLGKCPKKLSEGDGAEKLRKLQPSLNSGRLLHLAMRGLGELGAQPQQDHARWPRGSSLSECSEGDVTMANTMEEILEESEI

SEQ ID NO: 29091 - protein, 93 aa, Homo sapiens
  REGION 1..93: note = ENSP00000404471
MKLGSSRAGPGRGSAGLLPGVHELPMGIPAPWGTSPLSFHRKCSLWAPGRPFLTLVLLVSIKQVTGSLLEETTRKWAQYKQACLRDLLKEPSG

SEQ ID NO: 29092 - protein, 118 aa, Homo sapiens
  REGION 1..118: note = ENSP00000303605
MYTVGYSFSLISLFLALTLLLFLRKLHCTRNYIHMNLFASFILRTLAVLVKDVVFYNSYSKRPDNENGWMSYLSEMSTSCRSVQVLLHYFVGANYLWLLVEGLYLHTLLEPTVLPERR

SEQ ID NO: 29093 - protein, 449 aa, Homo sapiens
  REGION 1..449: note = ENSP00000274576
MYSFNTLRLYLWETIVFFSLAASKEAEAARSAPKPMSPSDFLDKLMGRTSGYDARIRPNFKGPPVNVSCNIFINSFGSIAETTMDYRVNIFLRQQWNDPRLAYNEYPDDSLDLDPSMLDSIWKPDLFFANEKGAHFHEITTDNKLLRISRNGNVLYSIRITLTLACPMDLKNFPMDVQTCIMQLESFGYTMNDLIFEWQEQGAVQVADGLTLPQFILKEEKDLRYCTKHYNTGKFTCIEARFHLERQMGYYLIQMYIPSLLIVILSWISFWINMDAAPARVGLGITTVLTMTTQSSGSRASLPKVSYVKAIDIWMAVCLLFVFSALLEYAAVNFVSRQHKELLRFRRKRRHHKEDEAGEGRFNFSAYGMGPACLQAKDGISVKGANNSNTTNPPPAPSKSPEEMRKLFIQRAKKIDKISRIGFPMAFLIFNMFYWIIYKIVRREDVHNQ

SEQ ID NO: 29094 - protein, 37 aa, Homo sapiens
  REGION 1..37: note = ENSP00000430595
MYSFNTLRLYLWETIVFFRSPSERELQHFHQQLWFHC

SEQ ID NO: 29095 - protein, 457 aa, Homo sapiens
  REGION 1..457: note = ENSP00000411593
MYSFNTLRLYLWETIVFFSLAASKEAEAARSAPKPMSPSDFLDKLMGRTSGYDARIRPNFKGPPVNVSCNIFINSFGSIAETTMDYRVNIFLRQQWNDPRLAYNEYPDDSLDLDPSMLDSIWKPDLFFANEKGAHFHEITTDNKLLRISRNGNVLYSIRITLTLACPMDLKNFPMDVQTCIMQLESFGYTMNDLIFEWQEQGAVQVADGLTLPQFILKEEKDLRYCTKHYNTGKFTCIEARFHLERQMGYYLIQMYIPSLLIVILSWISFWINMDAAPARVGLGITTVLTMTTQSSGSRASLPKVSYVKAIDIWMAVCLLFVFSALLEYAAVNFVSRQHKELLRFRRKRRHHKSPMLNLFQEDEAGEGRFNFSAYGMGPACLQAKDGISVKGANNSNTTNPPPAPSKSPEEMRKLFIQRAKKIDKISRIGFPMAFLIFNMFYWIIYKIVRREDVHNQ

SEQ ID NO: 29096 - protein, 558 aa, Homo sapiens
  REGION 1..558: note = ENSP00000277865
MYRYLGEALLLSRAGPAALGSASADSAALLGWARGQPAAAPQPGLALAARRHYSEAVADREDDPNFFKMVEGFFDRGASIVEDKLVEDLRTRESEEQKRNRVRGILRIIKPCNHVLSLSFPIRRDDGSWEVIEGYRAQHSQHRTPCKGGIRYSTDVSVDEVKALASLMTYKCAVVDVPFGGAKAGVKINPKNYTDNELEKITRRFTMELAKKGFIGPGIDVPAPDMSTGEREMSWIADTYASTIGHYDINAHACVTGKPISQGGIHGRISATGRGVFHGIENFINEASYMSILGMTPGFGDKTFVVQGFGNVGLHSMRYLHRFGAKCIAVGESDGSIWNPDGIDPKELEDFKLQHGSILGFPKAKPYEGSILEADCDILIPAASEKQLTKSNAPRVKAKIIAEGANGPTTPEADKIFLERNIMVIPDLYLNAGGVTVSYFEWLKNLNHVSYGRLTFKYERDSNYHLLMSVQESLERKFGKHGGTIPIVPTAEFQDRISGASEKDIVHSGLAYTMERSARQIMRTAMKYNLGLDLRTAAYVNAIEKVFKVYNEAGVTFT

SEQ ID NO: 29097 - protein, 373 aa, Homo sapiens
  REGION 1..373: note = ENSP00000356537
MTTSASSHLNKGIKQVYMSLPQGEKVQAMYIWIDGTGEGLRCKTRTLDSEPKCVEELPEWNFDGSSTLQSEGSNSDMYLVPAAMFRDPFRKDPNKLVLCEVFKYNRRPAETNLRHTCKRIMDMVSNQHPWFGMEQEYTLMGTDGHPFGWPSNGFPGPQGPYYCGVGADRAYGRDIVEAHYRACLYAGVKIAGTNAEVMPAQWEFQIGPCEGISMGDHLWVARFILHRVCEDFGVIATFDPKPIPGNWNGAGCHTNFSTKAMREENGLKYIEEAIEKLSKRHQYHIRAYDPKGGLDNARRLTGFHETSNINDFSAGVANRSASIRIPRTVGQEKKGYFEDRRPSANCDPFSVTEALIRTCLLNETGDEPFQYKN

SEQ ID NO: 29098 - protein, 373 aa, Homo sapiens; identical to SEQ ID NO: 29097
  REGION 1..373: note = ENSP00000344958

SEQ ID NO: 29099 - protein, 373 aa, Homo sapiens; identical to SEQ ID NO: 29097
  REGION 1..373: note = ENSP00000307900

SEQ ID NO: 29100 - protein, 373 aa, Homo sapiens; identical to SEQ ID NO: 29097
  REGION 1..373: note = ENSP00000398320

SEQ ID NO: 29101 - protein, 329 aa, Homo sapiens
  REGION 1..329: note = ENSP00000373575
MIRNSDYKNFVCCAVCNKIIPPAPFGKTFKRIHEYKPLKTRFYTHKDILDIGANILKKEEQFQEDILREHIAKAEAEVWAQANERQKQAVEKALEEANDRHKIEIQILKEEHQKDLQEVTAKTKTEMYQNMDDEMKREHLAAEQRMVHRIQRIMMECHREKVEAVEKARAEERHIAQEAIQAQKSKAVEEIVNTGVTVIKDEKTSVARLMREKEHEMSILYGIAQRQRQEEVQEVLQEAEKTHQATLGNMMDKLANTQGELLSIAKQLGIMTNWKDFLEEELQETRMAFQKYINYTFPKLSPGHADFILPERKKTPSNLVIKENKTTLD

SEQ ID NO: 29102 - protein, 199 aa, Homo sapiens
  REGION 1..199: note = ENSP00000477323
MDDEMKREHLAAEQRMVHRIQRIMMECHREKVEAVEKARAEERHIAQEAIQAQKSKAVEEIVNTGVTVIKDEKTSVARLMREKEHEMSILYGIAQRQRQEEVQEVLQEAEKTHQATLGNMMDKLANTQGELLSIAKQLGIMTNWKDFLEEELQETRMAFQKYINYTFPKLSPGHADFILPERKKTPSNLVIKENKTTLD

SEQ ID NO: 29103 - protein, 698 aa, Homo sapiens
  REGION 1..698: note = ENSP00000385834
MRLAVGALLVCAVLGLCLAVPDKTVRWCAVSEHEATKCQSFRDHMKSVIPSDGPSVACVKKASYLDCIRAIAANEADAVTLDAGLVYDAYLAPNNLKPVVAEFYGSKEDPQTFYYAVAVVKKDSGFQMNQLRGKKSCHTGLGRSAGWNIPIGLLYCDLPEPRKPLEKAVANFFSGSCAPCADGTDFPQLCQLCPGCGCSTLNQYFGYSGAFKCLKDGAGDVAFVKHSTIFENLANKADRDQYELLCLDNTRKPVDEYKDCHLAQVPSHTVVARSMGGKEDLIWELLNQAQEHFGKDKSKEFQLFSSPHGKDLLFKDSAHGFLKVPPRMDAKMYLGYEYVTAIRNLREGTCPEAPTDECKPVKWCALSHHERLKCDEWSVNSVGKIECVSAETTEDCIAKIMNGEADAMSLDGGFVYIAGKCGLVPVLAENYNKSDNCEDTPEAGYFAIAVVKKSASDLTWDNLKGKKSCHTAVGRTAGWNIPMGLLYNKINHCRFDEFFSEGCAPGSKKDSSLCKLCMGSGLNLCEPNNKEGYYGYTGAFRCLVEKGDVAFVKHQTVPQNTGGKNPDPWAKNLNEKDYELLCLDGTRKPVEEYANCHLARAPNHAVVTRKDKEACVHKILRQQQHLFGSNVTDCSGNFCLFRSETKDLLFRDDTVCLAKLHDRNTYEKYLGEEYVKAVGNLRKCSTSSLLEACTFRRP

SEQ ID NO: 29104 - protein, 75 aa, Homo sapiens
  REGION 1..75: note = ENSP00000417468
MKSVIPSDGPSVACVKKASYLDCIRAIAANEADAVTLDAGLVYDAYLAPNNLKPVVAEFYGSKEDPQTFYYAVAV

SEQ ID NO: 29105 - protein, 115 aa, Homo sapiens
  REGION 1..115: note = ENSP00000401505
MRLAVGALLVCAVLGLCLAVPDKTVRWCAVSEHEATKCQSFRDHMKSVIPSDGPSVACVKKASYLDCIRAIAVSRCCLKESGRKPYFLCFQSLWNNSLLTGKRSGCCDTGCRFGV

SEQ ID NO: 29106 - protein, 120 aa, Homo sapiens
  REGION 1..120: note = ENSP00000418396
MRLAVGALLVCAVLGLCLAVPDKTVRWCAVSEHEATKCQSFRDHMKSVIPSDGPSVACVKKASYLDCIRAIAANEADAVTLDAGLVYDAYLAPNNLKPVVAEFYGSKEDFLLCCCCGEEG

SEQ ID NO: 29107 - protein, 134 aa, Homo sapiens
  REGION 1..134: note = ENSP00000419338
MNQLRGKKSCHTGLGRSAGWNIPIGLLYCDLPEPRKPLEKAVANFFSGSCAPCADGTDFPQLCQLCPGCGCSTLNQYFGYSGAFKCLKDGAGDVAFVKHSTIFENLANKADRDQYELLCLDNTRKPVDEYKDCH

SEQ ID NO: 29108 - protein, 102 aa, Homo sapiens
  REGION 1..102: note = ENSP00000418716
MRLAVGALLVCAVLGLCLAVPDKTVRWCAVSEHEATKCQSFRDHMKSVIPSDGPFSYRRGPKYGRQGGLDLGASQPGPGTFWQRQIKRIPTIQLSSWEGPAV

SEQ ID NO: 29109 - protein, 143 aa, Homo sapiens
  REGION 1..143: note = ENSP00000419714
  VARIANT 1: note = Any amino acid
XYFAIAVVKKSASDLTWDNLKGKKSCHTAVGRTAGWNIPMGLLYNKINHCRFDEFFSEGCAPGSKKDSSLCKLCMGSGLNLCEPNNKEGYYGYTGAFRCLVEKGDVAFVKHQTVPQNTGETIQKRRGKGAEMGYRPVSHRKKP

SEQ ID NO: 29110 - protein, 698 aa, Homo sapiens; identical to SEQ ID NO: 29103
  REGION 1..698: note = ENSP00000385834

SEQ ID NO: 29111 - protein, 75 aa, Homo sapiens; identical to SEQ ID NO: 29104
  REGION 1..75: note = ENSP00000417468

SEQ ID NO: 29112 - protein, 115 aa, Homo sapiens; identical to SEQ ID NO: 29105
  REGION 1..115: note = ENSP00000401505

SEQ ID NO: 29113 - protein, 120 aa, Homo sapiens; identical to SEQ ID NO: 29106
  REGION 1..120: note = ENSP00000418396

SEQ ID NO: 29114 - protein, 134 aa, Homo sapiens; identical to SEQ ID NO: 29107
  REGION 1..134: note = ENSP00000419338

SEQ ID NO: 29115 - protein, 102 aa, Homo sapiens; identical to SEQ ID NO: 29108
  REGION 1..102: note = ENSP00000418716

SEQ ID NO: 29116 - protein, 143 aa, Homo sapiens; identical to SEQ ID NO: 29109
  REGION 1..143: note = ENSP00000419714
  VARIANT 1: note = Any amino acid

SEQ ID NO: 29117 - protein, 381 aa, Homo sapiens
  REGION 1..381: note = ENSP00000275364
MSGVVRTLSRCLLPAEAGGARERRAGSGARDAEREARRRSRDIDALLARERRAVRRLVKILLLGAGESGKSTFLKQMRIIHGREFDQKALLEFRDTIFDNILKGSRVLVDARDKLGIPWQYSENEKHGMFLMAFENKAGLPVEPATFQLYVPALSALWRDSGIREAFSRRSEFQLGESVKYFLDNLDRIGQLNYFPSKQDILLARKATKGIVEHDFVIKKIPFKMVDVGGQRSQRQKWFQCFDGITSILFMVSSSEYDQVLMEDRRTNRLVESMNIFETIVNNKLFFNVSIILFLNKMDLLVEKVKTVSIKKHFPDFRGDPHRLEDVQRYLVQCFDRKRRNRSKPLFHHFTTAIDTENVRFVFHAVKDTILQENLKDIMLQ

SEQ ID NO: 29118 - protein, 322 aa, Homo sapiens
  REGION 1..322: note = ENSP00000385935
MKRRMFPRPCLARMPGSRGSGSTPDGNRKCCRFEHLLIAHPGSRGSRVLVDARDKLGIPWQYSENEKHGMFLMAFENKAGLPVEPATFQLYVPALSALWRDSGIREAFSRRSEFQLGESVKYFLDNLDRIGQLNYFPSKQDILLARKATKGIVEHDFVIKKIPFKMVDVGGQRSQRQKWFQCFDGITSILFMVSSSEYDQVLMEDRRTNRLVESMNIFETIVNNKLFFNVSIILFLNKMDLLVEKVKTVSIKKHFPDFRGDPHRLEDVQRYLVQCFDRKRRNRSKPLFHHFTTAIDTENVRFVFHAVKDTILQENLKDIMLQ

SEQ ID NO: 29119 - protein, 305 aa, Homo sapiens
  REGION 1..305: note = ENSP00000386054
MAPRAGLGAGPLLLRSRADWVCGGWEAALSAPPPFCTAWVERTGLVHFLREGGHGACFPLALLHPGSVVSFQMIYPLIVLPLCASWHWGLIRKGIVLFWGESVKYFLDNLDRIGQLNYFPSKQDILLARKATKGIVEHDFVIKKIPFKMVDVGGQRSQRQKWFQCFDGITSILFMVSSSEYDQVLMEDRRTNRLVESMNIFETIVNNKLFFNVSIILFLNKMDLLVEKVKTVSIKKHFPDFRGDPHRLEDVQRYLVQCFDRKRRNRSKPLFHHFTTAIDTENVRFVFHAVKDTILQENLKDIMLQ

SEQ ID NO: 29120 - protein, 77 aa, Homo sapiens
  REGION 1..77: note = ENSP00000391462
MKRRMFPRPCLARMPGSRGSRVLVDARDKLGIPWQYSENEKHGMFLMAFENKAGLPVEPATFQLYVPALSALWRDSG

SEQ ID NO: 29121 - protein, 458 aa, Homo sapiens
  REGION 1..458: note = ENSP00000334051
MGLCYSLRPLLFGGPGDDPCAASEPPVEDAQPAPAPALAPVRAAARDTARTLLPRGGEGSPACARPKADKPKEKRQRTEQLSAEEREAAKEREAVKEARKVSRGIDRMLRDQKRDLQQTHRLLLLGAGESGKSTIVKQMRILHVNGFNPEEKKQKILDIRKNVKDAIVTIVSAMSTIIPPVPLANPENQFRSDYIKSIAPITDFEYSQEFFDHVKKLWDDEGVKACFERSNEYQLIDCAQYFLERIDSVSLVDYTPTDQDLLRCRVLTSGIFETRFQVDKVNFHMFDVGGQRDERRKWIQCFNDVTAIIYVAACSSYNMVIREDNNTNRLRESLDLFESIWNNRWLRTISIILFLNKQDMLAEKVLAGKSKIEDYFPEYANYTVPEDATPDAGEDPKVTRAKFFIRDLFLRISTATGDGKHYCYPHFTCAVDTENIRRVFNDCRDIIQRMHLKQYELL

SEQ ID NO: 29122 - protein, 381 aa, Homo sapiens
  REGION 1..381: note = ENSP00000439023
MGCLGGNSKTTEDQGVDEKERREANKKIEKQLQKERLAYKATHRLLLLGAGESGKSTIVKQMRILHVNGFNPEEKKQKILDIRKNVKDAIVTIVSAMSTIIPPVPLANPENQFRSDYIKSIAPITDFEYSQEFFDHVKKLWDDEGVKACFERSNEYQLIDCAQYFLERIDSVSLVDYTPTDQDLLRCRVLTSGIFETRFQVDKVNFHMFDVGGQRDERRKWIQCFNDVTAIIYVAACSSYNMVIREDNNTNRLRESLDLFESIWNNRWLRTISIILFLNKQDMLAEKVLAGKSKIEDYFPEYANYTVPEDATPDAGEDPKVTRAKFFIRDLFLRISTATGDGKHYCYPHFTCAVDTENIRRVFNDCRDIIQRMHLKQYELL

SEQ ID NO: 29123 - protein, 381 aa, Homo sapiens; identical to SEQ ID NO: 29122
  REGION 1..381: note = ENSP00000269162

SEQ ID NO: 29124 - protein, 381 aa, Homo sapiens; identical to SEQ ID NO: 29122
  REGION 1..381: note = ENSP00000408489

SEQ ID NO: 29125 - protein, 179 aa, Homo sapiens
  REGION 1..179: note = ENSP00000467345
MRILHVNGFNPEEKKQKILDIRKNVKDAIVTIVSAMSTIIPPVPLANPENQFRSDYIKSIAPITDFEYSQEFFDHVKKLWDDEGVKACFERSNEYQLIDCAQYFLERIDSVSLVDYTPTDQDLLRCRVLTSGIFETRFQVDKVNFHMFDVGGQRDERRKWIQCFNDVTAIIYVAACSSY

SEQ ID NO: 29126 - protein, 145 aa, Homo sapiens
  REGION 1..145: note = ENSP00000467709
MSTIIPPVPLANPENQFRSDYIKSIAPITDFEYSQEFFDHVKKLWDDEGVKACFERSNEYQLIDCAQYFLERIDSVSLVDYTPTDQDLLRCRVLTSGIFETRFQVDKVNFHMFDVGGQRDERRKWIQCFNDVTAIIYVAACSSYN

SEQ ID NO: 29127 - protein, 174 aa, Homo sapiens
  REGION 1..174: note = ENSP00000473600
MFDVGGQRDERRKWIQCFNDVTAIIYVAACSSYNMVIREDNNTNRLRESLDLFESIWNNRWLRTISIILFLNKQDMLAEKVLAGKSKIEDYFPEYANYTVPEDATPDAGEDPKVTRAKFFIRDLFLRISTATGDGKHYCYPHFTCAVDTENIRRVFNDCRDIIQRMHLKQYELL

SEQ ID NO: 29128 - protein, 54 aa, Homo sapiens
  REGION 1..54: note = ENSP00000466709
  VARIANT 1: note = Any amino acid
XTNKICWQKKSWQGNQKLKTISQNMQIILFLKTEHQGEAPPLADSQGHLPSRGC

SEQ ID NO: 29129 - protein, 354 aa, Homo sapiens
  REGION 1..354: note = ENSP00000262493
MGCTLSAEERAALERSKAIEKNLKEDGISAAKDVKLLLLGAGESGKSTIVKQMKIIHEDGFSGEDVKQYKPVVYSNTIQSLAAIVRAMDTLGIEYGDKERKADAKMVCDVVSRMEDTEPFSAELLSAMMRLWGDSGIQECFNRSREYQLNDSAKYYLDSLDRIGAADYQPTEQDILRTRVKTTGIVETHFTFKNLHFRLFDVGGQRSERKKWIHCFEDVTAIIFCVALSGYDQVLHEDETTNRMHESLMLFDSICNNKFFIDTSIILFLNKKDLFGEKIKKSPLTICFPEYTGPNTYEDAAAYIQAQFESKNRSPNKEIYCHMTCATDTNNIQVVFDAVTDIIIANNLRGCGLY

SEQ ID NO: 29130 - protein, 54 aa, Homo sapiens
  REGION 1..54: note = ENSP00000492271
MGCTLSAEERAALERSKAIEKNLKEDGISAAKDVKLLLLGAGESGKSTIVKQMK

SEQ ID NO: 29131 - protein, 354 aa, Homo sapiens; identical to SEQ ID NO: 29129
  REGION 1..354: note = ENSP00000491223

SEQ ID NO: 29132 - protein, 354 aa, Homo sapiens
  REGION 1..354: note = ENSP00000262494
MGCTLSAEERAALERSKAIEKNLKEDGISAAKDVKLLLLGAGESGKSTIVKQMKIIHEDGFSGEDVKQYKPVVYSNTIQSLAAIVRAMDTLGIEYGDKERKADAKMVCDVVSRMEDTEPFSAELLSAMMRLWGDSGIQECFNRSREYQLNDSAKYYLDSLDRIGAADYQPTEQDILRTRVKTTGIVETHFTFKNLHFRLFDVGGQRSERKKWIHCFEDVTAIIFCVALSGYDQVLHEDETTNRMHESLKLFDSICNNKWFTDTSIILFLNKKDIFEEKIKKSPLTICFPEYTGPSAFTEAVAYIQAQYESKNKSAHKEIYTHVTCATDTNNIQFVFDAVTDVIIAKNLRGCGLY

SEQ ID NO: 29133 - protein, 84 aa, Homo sapiens
  REGION 1..84: note = ENSP00000477740
MGCTLSAEERAALERSKAIEKNLKEDGISAAKDVKLLLLGAGESGKSTIVKQMKYPLSFYSVPSTILSVVTEQDTQNLCPPGVF

SEQ ID NO: 29134 - protein, 104 aa, Homo sapiens
  REGION 1..104: note = ENSP00000492694
MGCTLSAEERAALERSKAIEKNLKEDGISAAKDVKLLLLGAGESGKSTIVKQMKIIHEDGFSGEDVKQYKPVVYSNTIQSLAAIVRAMDTLGIEYGDKERKVGP

SEQ ID NO: 29135 - protein, 146 aa, Homo sapiens
  REGION 1..146: note = ENSP00000492677
MGCTLSAEERAALERSKAIEKNLKEDGISAAKDVKLLLLGAGESGKSTIVKQMKIIHEDGFSGEDVKQYKPVVYSNTIQSLAAIVRAMDTLGIEYGDKERKLPGQPGSDWGRRLPAHRAGHPPNQGQNHWHRRNPLHIQEPPLQAV

SEQ ID NO: 29136 - protein, 61 aa, Homo sapiens
  REGION 1..61: note = ENSP00000491999
ALERSKAIEKNLKEDGISAAKDVKLLLLGAGESGKSTIVKQMKQYVLSVWKLLRFCVHLEV

SEQ ID NO: 29137 - protein, 76 aa, Homo sapiens
  REGION 1..76: note = ENSP00000491391
  VARIANT 1: note = Any amino acid
XSLAAIVRAMDTLGIEYGDKERKADAKMVCDVVSRMEDTEPFSAELLSAMMRLWGDSGIQECFNRSREYQLNDSAK

SEQ ID NO: 29138 - protein, 195 aa, Homo sapiens
  REGION 1..195: note = ENSP00000457238
SRMEDTEPFSAELLSAMMRLWGDSGIQECFNRSREYQLNDSAKYYLDSLDRIGAADYQPTEQDILRTRVKTTGIVETHFTFKNLHFRLFDVGGQRSERKKWIHCFEDVTAIIFCVALSGYDQVLHEDETTNRMHESLMLFDSICNNKFFIDTSIILFLNKKDLFGEKIKKSPLTICFPEYTDCFTDSLLLTLISW

SEQ ID NO: 29139 - protein, 196 aa, Homo sapiens
  REGION 1..196: note = ENSP00000491137
  VARIANT 1: note = Any amino acid
XLDRIGAADYQPTEQDILRTRVKTTGIVETHFTFKNLHFRLFDVGGQRSERKKWIHCFEDVTAIIFCVALSGYDQVLHEDETTNRMHESLMLFDSICNNKFFIDTSIILFLNKKDLFGEKIKKSPLTICFPEYTGPNTYEDAAAYIQAQFESKNRSPNKEIYCHMTCATDTNNIQVVFDAVTDIIIANNLRGCGLY

SEQ ID NO: 29140 - protein, 69 aa, Homo sapiens
  REGION 1..69: note = ENSP00000491143
  VARIANT 1: note = Any amino acid
XGQRSERKKWIHCFEDVTAIIFCVALSGYDQVLHEDETTAPIPMKTQPPTSKHNLKAKTAHPTKKYIVT

SEQ ID NO: 29141 - protein, 142 aa, Homo sapiens
  REGION 1..142: note = ENSP00000491875
IHCFEDVTAIIFCVALSGYDQVLHEDETTNRMHESLMLFDSICNNKFFIDTSIILFLNKKDLFGEKIKKSPLTICFPEYTGPNTYEDAAAYIQAQFESKNRSPNKEIYCHMTCATDTNNIQVVFDAVTDIIIANNLRGCGLY

SEQ ID NO: 29142 - protein, 109 aa, Homo sapiens
  REGION 1..109: note = ENSP00000454971
QVLHEDETTNRMHESLMLFDSICNNKFFIDTSIILFLNKKDLFGEKIKKSPLTICFPEYTGPNTYEDAAAYIQAQFESKNRSPNKEIYCHMTCATDTNNIQTASRTLCC

SEQ ID NO: 29143 - protein, 340 aa, Homo sapiens [sequence omitted]

SEQ ID NO: 29144 - protein, 232 aa, Homo sapiens
  REGION 1..232: note = ENSP00000442002
MGEMEQLRQEAEQLKKQIADARKACADVTLAELVSGLEVVGRVQMRTRRTLRGHLAKIYAMHWATDSKLLVSASQDGKLIVWDSYTTNKVHAIPLRSSWVMTCAYAPSGNFVACGGLDNMCSIYNLKSREGNVKVSRELSAHTGYLSCCRFLDDNNIVTSSGDTTALWDIETGQQKTVFVGHTGDCMSLAVSPDFNLFISGACDASAKLWDVREGTCRQTFTGHESDINAIC

SEQ ID NO: 29145 - protein, 232 aa, Homo sapiens
  REGION 1..232: note = ENSP00000439753
MGEMEQLRQEAEQLKKQIADARKACADVTLAELVSGLEVVGRVQMRTRRTLRGHLAKIYAMHWATDSKLLVSASQDGKLIVWDSYTTNKVHAIPLRSSWVMTCAYAPSGNFVACGGLDNMCSIYNLKSREGNVKVSRELSAHTGYLSCCRFLDDNNIVTSSGDTTCALWDIETGQQKTVFVGHTGDCMSLAVSPDFNLFISGACDASAKLWDVREGTCRQTFTGHESDINAI

SEQ ID NO: 29146 - protein, 339 aa, Homo sapiens
  REGION 1..339: note = ENSP00000414734
MGEMEQLRQEAEQLKKQIADARKACADVTLAELVSGLEVVGRVQMRTRRTLRGHLAKIYAMHWATDSKLLVSASQDGKLIVWDSYTTNKVHAIPLRSSWVMTCAYAPSGNFVACGGLDNMCSIYNLKSREGNVKVSRELSAHTGYLSCCRFLDDNNIVTSSGDTTALWDIETGQQKTVFVGHTGDCMSLAVSPDFNLFISGACDASAKLWDVREGTCRQTFTGHESDINAICFFPNGEAICTGSDDASCRLFDLRADQELICFSHESIICGITSVAFSLSGRLLFAGYDDFNCNVWDSMKSERVGILSGHDNRVSCLGVTADGMAVATGSWDSFLKIWN

SEQ ID NO: 29147 - protein, 36 aa, Homo sapiens
  REGION 1..36: note = ENSP00000444325
MGEMEQLRQEAEQLKKQIADARKACADVTLAERDLL

SEQ ID NO: 29148 - protein, 264 aa, Homo sapiens
  REGION 1..264: note = ENSP00000445967
MGEMEQLRQEAEQLKKQIADARKACADVTLAELVSGLEVVGRVQMRTRRTLRGHLAKIYAMHWATDSKLLVSASQDGKLIVWDSYTTNKVHAIPLRSSWVMTCAYAPSGNFVACGGLDNMCSIYNLKSREGNVKVSRELSAHTGYLSCCRFLDDNNIVTSSGDTTCAKLWDVREGTCRQTFTGHESDINAICFFPNGEAICTGSDDASCRLFDLRADQELICFSHESIICGITSVAFSLSGRLLFAGYDDFNCNVWDSMKSERV

SEQ ID NO: 29149 - protein, 73 aa, Homo sapiens
  REGION 1..73: note = ENSP00000248564
MPALHIEDLPEKEKLKMEVEQLRKEVKLQRQQVSKCSEEIKNYIEERSGEDPLVKGIPEDKNPFKEKGSCVIS

SEQ ID NO: 29150 - protein, 72 aa, Homo sapiens
  REGION 1..72: note = ENSP00000360021
MSSKTASTNNIAQARRTVQQLRLEASIERIKVSKASADLMSYCEEHARSDPLLIGIPTSENPFKDKKTCIIL

SEQ ID NO: 29151 - protein, 67 aa, Homo sapiens
  REGION 1..67: note = ENSP00000248150
MEEWDVPQMKKEVESLKYQLAFQREMASKTIPELLKWIEDGIPKDPFLNPDLMKNNPWVEKGKCTIL

SEQ ID NO: 29152 - protein, 102 aa, Homo sapiens
  REGION 1..102: note = ENSP00000451279
MQGKLQPPMEREARDGVPSGKVFLKDLSSTPMASNNTASIAQARKLVEQLKMEANIDRIKVSKAAADLMAYCEAHAKEDPLLTPVPASENPFREKKFFCAIL

SEQ ID NO: 29153 - protein, 37 aa, Homo sapiens
  REGION 1..37: note = ENSP00000450904
MQGKLQPPMEREARDGVPSGKARSASEPQALGTEECF

SEQ ID NO: 29154 - protein, 110 aa, Homo sapiens
  REGION 1..110: note = ENSP00000450758
MVYLQAKTRIPEHRKVTQLIKCWSPDLNPVFLKDLSSTPMASNNTASIAQARKLVEQLKMEANIDRIKVSKAAADLMAYCEAHAKEDPLLTPVPASENPFREKKFFCAIL

SEQ ID NO: 29155 - protein, 52 aa, Homo sapiens
  REGION 1..52: note = ENSP00000450586
MASNNTASIAQARKLVEQLKMEANIDRIKSALCWSVLRRRHIIASFVCRCSL

SEQ ID NO: 29156 - protein, 71 aa, Homo sapiens
  REGION 1..71: note = ENSP00000334448
MASNNTASIAQARKLVEQLKMEANIDRIKVSKAAADLMAYCEAHAKEDPLLTPVPASENPFREKKFFCAIL

SEQ ID NO: 29157 - protein, 71 aa, Homo sapiens; identical to SEQ ID NO: 29156
  REGION 1..71: note = ENSP00000451102

SEQ ID NO: 29158 - protein, 71 aa, Homo sapiens; identical to SEQ ID NO: 29156
  REGION 1..71: note = ENSP00000451231

SEQ ID NO: 29159 - protein, 71 aa, Homo sapiens; identical to SEQ ID NO: 29156
  REGION 1..71: note = ENSP00000452014

SEQ ID NO: 29160 - protein, 71 aa, Homo sapiens; identical to SEQ ID NO: 29156
  REGION 1..71: note = ENSP00000451576

SEQ ID NO: 29161 - protein, 61 aa, Homo sapiens
  REGION 1..61: note = ENSP00000451536
MTVPLNGVIRQHKTDKPDQVFLKDLSSTPMASNNTASIAQARKLVEQLKMEANIDRIKEVH

SEQ ID NO: 29162 - protein, 71 aa, Homo sapiens; identical to SEQ ID NO: 29156
  REGION 1..71: note = ENSP00000484021

SEQ ID NO: 29163 - protein, 134 aa, Homo sapiens
  REGION 1..134: note = ENSP00000419734
MTCHKRYKIQKKVREHHRKLRKEAKKRGHKKPRKDPGVPNSAPFKEALLREAELRKQRLEELKQQQKLDRQKELEKKRKLETNPDIKPSNVEPMEKEFGLCKTENKAKSGKQNSKKLYCQELKKVIEASDVVLE

SEQ ID NO: 29164 - protein, 549 aa, Homo sapiens
  REGION 1..549: note = ENSP00000395772
MKRPKLKKASKRMTCHKRYKIQKKVREHHRKLRKEAKKRGHKKPRKDPGVPNSAPFKEALLREAELRKQRLEELKQQQKLDRQKELEKKRKLETNPDIKPSNVEPMEKEFGLCKTENKAKSGKQNSKKLYCQELKKVIEASDVVLEVLDARDPLGCRCPQVEEAIVQSGQKKLVLILNKSDLVPKENLESWLNYLKKELPTVVFRASTKPKDKGKITKRVKAKKNAAPFRSEVCFGKEGLWKLLGGFQETCSKAIRVGVIGFPNVGKSSIINSLKQEQMCNVGVSMGLTRSMQVVPLDKQITIIDSPSFIVSPLNSSSALALRSPASIEVVKPMEAASAILSQADARQVVLKYTVPGYRNSLEFFTVLAQRRGMHQKGGIPNVEGAAKLLWSEWTGASLAYYCHPPTSWTPPPYFNESIVVDMKSGFNLEELEKNNAQSIRAIKGPHLANSILFQSSGLTNGIIEEKDIHEELPKRKERKQEEREDDKDSDQETVDEEVDENSSGMFAAEETGEALSEETTAGEQSTRSFILDKIIEEDDAYDFSTDYV

SEQ ID NO: 29165 - protein, 537 aa, Homo sapiens
  REGION 1..537: note = ENSP00000378278
MTCHKRYKIQKKVREHHRKLRKEAKKRGHKKPRKDPGVPNSAPFKEALLREAELRKQRLEELKQQQKLDRQKELEKKRKLETNPDIKPSNVEPMEKEFGLCKTENKAKSGKQNSKKLYCQELKKVIEASDVVLEVLDARDPLGCRCPQVEEAIVQSGQKKLVLILNKSDLVPKENLESWLNYLKKELPTVVFRASTKPKDKGKITKRVKAKKNAAPFRSEVCFGKEGLWKLLGGFQETCSKAIRVGVIGFPNVGKSSIINSLKQEQMCNVGVSMGLTRSMQVVPLDKQITIIDSPSFIVSPLNSSSALALRSPASIEVVKPMEAASAILSQADARQVVLKYTVPGYRNSLEFFTVLAQRRGMHQKGGIPNVEGAAKLLWSEWTGASLAYYCHPPTSWTPPPYFNESIVVDMKSGFNLEELEKNNAQSIRAIKGPHLANSILFQSSGLTNGIIEEKDIHEELPKRKERKQEEREDDKDSDQETVDEEVDENSSGMFAAEETGEALSEETTAGEQSTRSFILDKIIEEDDAYDFSTDYV

SEQ ID NO: 29166 - protein, 138 aa, Homo sapiens
  REGION 1..138: note = ENSP00000420345
MKRPKLKKASKRMTCHKRYKIQKKVREHHRKLRKEAKKRGHKKPRKDPGVPNSAPFKEALLREAELRKQRLEELKQQQKLDRQKELEKKRKLETNPDIKPSNVEPMEKEFGLCKTENKAKSGKQNSKKLYCQELKKVS

SEQ ID NO: 29167 - protein, 96 aa, Homo sapiens
  REGION 1..96: note = ENSP00000419895
MTCHKRYKIQKKVREHHRKLRKEAKKRGHKKPRKDPGVPNSAPFKEALLREAELRKQRLEELKQQQKLDRQKELEKKRKLETNPDIKPSNVEPMEK

SEQ ID NO: 29168 - protein, 167 aa, Homo sapiens
  REGION 1..167: note = ENSP00000359634
MATEVHNLQELRRSASLATKVFIQRDYSDGTICQFQTKFPPELDSRIERQLFEETVKTLNGFYAEAEKIGGSSYLEGCLACATAYFIFLCMETHYEKVLKKISRYIQEQNEKIFAPRGLLLTDPVERGMRVIEISIYEDRCSSGSSSSGSSSGSGSSSGGGGGAGAR

SEQ ID NO: 29169 - protein, 166 aa, Homo sapiens
  REGION 1..166: note = ENSP00000471396
SPQVHNLQELRRSASLATKVFIQRDYSDGTICQFQTKFPPELDSRIERQLFEETVKTLNGFYAEAEKIGGSSYLEGCLACATAYFIFLCMETHYEKVLKKISRYIQEQNEKIFAPRGLLLTDPVERGMRVIEISIYEDRCSSGSSSSGSSSGSGSSSGGGGGAGAR

SEQ ID NO: 29170 - protein, 413 aa, Homo sapiens
  REGION 1..413: note = ENSP00000359539
MAPPSVFAEVPQAQPVLVFKLTADFREDPDPRKVNLGVGAYRTDDCHPWVLPVVKKVEQKIANDNSLNHEYLPILGLAEFRSCASRLALGDDSPALKEKRVGGVQSLGGTGALRIGADFLARWYNGTNNKNTPVYVSSPTWENHNAVFSAAGFKDIRSYRYWDAEKRGLDLQGFLNDLENAPEFSIVVLHACAHNPTGIDPTPEQWKQIASVMKHRFLFPFFDSAYQGFASGNLERDAWAIRYFVSEGFEFFCAQSFSKNFGLYNERVGNLTVVGKEPESILQVLSQMEKIVRITWSNPPAQGARIVASTLSNPELFEEWTGNVKTMADRILTMRSELRARLEALKTPGTWNHITDQIGMFSFTGLNPKQVEYLVNEKHIYLLPSGRINVSGLTTKNLDYVATSIHEAVTKIQ

SEQ ID NO: 29171 - protein, 370 aa, Homo sapiens
  REGION 1..370: note = ENSP00000357215
MNVTPEVKSRGMKFAEEQLLKHGWTQGKGLGRKENGITQALRVTLKQDTHGVGHDPAKEFTNHWWNELFNKTAANLVVETGQDGVQIRSLSKETTRYNHPKPNLLYQKFVKMATLTSGGEKPNKDLESCSDDDNQGSKSPKILTDEMLLQACEGRTAHKAARLGITMKAKLARLEAQEQAFLARLKGQDPGAPQLQSESKPPKKKKKKRRQKEEEEATASERNDADEKHPEHAEQNIRKSKKKKRRHQEGKVSDEREGTTKGNEKEDAAGTSGLGELNSREQTNQSLRKGKKKKRWHHEEEKMGVLEEGGKGKEAAGSVRTEEVESRAYADPCSRRKKRQQQEEEDLNLEDRGEETFRWWNQGSREQSMQ

SEQ ID NO: 29172 - protein, 375 aa, Homo sapiens
  REGION 1..375: note = ENSP00000396441
MFPRSGPSNDEVKSRGMKFAEEQLLKHGWTQGKGLGRKENGITQALRVTLKQDTHGVGHDPAKEFTNHWWNELFNKTAANLVVETGQDGVQIRSLSKETTRYNHPKPNLLYQKFVKMATLTSGGEKPNKDLESCSDDDNQGSKSPKILTDEMLLQACEGRTAHKAARLGITMKAKLARLEAQEQAFLARLKGQDPGAPQLQSESKPPKKKKKKRRQKEEEEATASERNDADEKHPEHAEQNIRKSKKKKRRHQEGKVSDEREGTTKGNEKEDAAGTSGLGELNSREQTNQSLRKGKKKKRWHHEEEKMGVLEEGGKGKEAAGSVRTEEVESRAYADPCSRRKKRQQQEEEDLNLEDRGEETFRWWNQGSREQSMQ

SEQ ID NO: 29173 - protein, 264 aa, Homo sapiens
  REGION 1..264: note = ENSP00000412620
MNVTPEVKSRGMKFAEEQLLKHGWTQGKGLGRKENGITQALRVTLKQDTHGVGHDPAKEFTNHWWNELFNKTAANLVVETGQMATLTSGGEKPNKDLESCSDDDNQGSKSPKILTDEMLLQACEGRTAHKAARLGITMKAKLARLEAQEQAFLARLKGQDPGAPQLQSESKPPKKKKKKRRQKEEEEATASERNDADEKHPEHAEQNIRKSKKKKRRHQEGKVSDEREGTTKGNEKEDAAGTSGLGELNSREQTNQSLRKGKKK

SEQ ID NO: 29174 - protein, 119 aa, Homo sapiens
  REGION 1..119: note = ENSP00000436243
MNVTPEVKSRGMKFAEEQLLKHGWTQGKGLGRKENGITQALRVTLKQDTHGVGHDPAKEFTNHWWNELFNKTAANLVVETGQDGVQIRSLSKETTRYNHPKPNLLYQKFVKTAQTLSRN

SEQ ID NO: 29175 - protein, 143 aa, Homo sapiens
  REGION 1..143: note = ENSP00000436907
MNVTPEVKSRGMKFAEEQLLKHGWTQGKGLGRKENGITQALRVTLKQDTHGVGHDPAKEFTNHWWNELFNKTAANLVVETGQDGVQIRSLSKETTRYNHPKPNLLYQKFVKWDPVTSLAVAYLDCPDPQQELRSSGSVDPAIC

SEQ ID NO: 29176 - protein, 134 aa, Homo sapiens
  REGION 1..134: note = ENSP00000488396
MSALRPLLLLLLPLCPGPGPGPGSEAKVTRSCAETRQVLGARGYSLNLIPPALISGEHLRVCPQEYTCCSSETEQRLIRETEATFRGLVEDSGSFLVHTLAARHRKFDDNPDPGGCPSLCAGPGDWKKCGQRSA

SEQ ID NO: 29177 - protein, 579 aa, Homo sapiens
  REGION 1..579: note = ENSP00000292377
MSALRPLLLLLLPLCPGPGPGPGSEAKVTRSCAETRQVLGARGYSLNLIPPALISGEHLRVCPQEYTCCSSETEQRLIRETEATFRGLVEDSGSFLVHTLAARHRKFDEFFLEMLSVAQHSLTQLFSHSYGRLYAQHALIFNGLFSRLRDFYGESGEGLDDTLADFWAQLLERVFPLLHPQYSFPPDYLLCLSRLASSTDGSLQPFGDSPRRLRLQITRTLVAARAFVQGLETGRNVVSEALKVPVSEGCSQALMRLIGCPLCRGVPSLMPCQGFCLNVVRGCLSSRGLEPDWGNYLDGLLILADKLQGPFSFELTAESIGVKISEGLMYLQENSAKVSAQVFQECGPPDPVPARNRRAPPPREEAGRLWSMVTEEERPTTAAGTNLHRLVWELRERLARMRGFWARLSLTVCGDSRMAADASLEAAPCWTGAGRGRYLPPVVGGSPAEQVNNPELKVDASGPDVPTRRRRLQLRAATARMKTAALGHDLDGQDADEDASGSGGGQQYADDWMAGAVAPPARPPRPPYPPRRDGSGGKGGGGSARYNQGRSRSGGASIGFHTQTILILSLSALALLGPR

SEQ ID NO: 29178 - protein, 555 aa, Homo sapiens
  REGION 1..555: note = ENSP00000366246
MPSWIGAVILPLLGLLLSLPAGADVKARSCGEVRQAYGAKGFSLADIPYQEIAGEHLRICPQEYTCCTTEMEDKLSQQSKLEFENLVEETSHFVRTTFVSRHKKFDEFFRELLENAEKSLNDMFVRTYGMLYMQNSEVFQDLFTELKRYYTGGNVNLEEMLNDFWARLLERMFQLINPQYHFSEDYLECVSKYTDQLKPFGDVPRKLKIQVTRAFIAARTFVQGLTVGREVANRVSKVSPTPGCIRALMKMLYCPYCRGLPTVRPCNNYCLNVMKGCLANQADLDTEWNLFIDAMLLVAERLEGPFNIESVMDPIDVKISEAIMNMQENSMQVSAKVFQGCGQPKPAPALRSARSAPENFNTRFRPYNPEERPTTAAGTSLDRLVTDIKEKLKLSKKVWSALPYTICKDESVTAGTSNEEECWNGHSKARYLPEIMNDGLTNQINNPEVDVDITRPDTFIRQQIMALRVMTNKLKNAYNGNDVNFQDTSDESSGSGSGSGCMDDVCPTEFEFVTTEAPAVDPDRREVDSSAAQRGHSLLSWSLTCIVLALQRLCR

SEQ ID NO: 29179 - protein, 263 aa, Homo sapiens
  REGION 1..263: note = ENSP00000477667
DAMLLVAERLEGPFNIESVMDPIDVKISEAIMNMQENSMQVSAKVFQGCGQPKPAPALRSARSAPENFNTRFRPYNPEERPTTAAGTSLDRLVTDIKEKLKLSKKVWSALPYTICKDESVTAGTSNEEECWNGHSKARYLPEIMNDGLTNQINNPEVDVDITRPDTFIRQQIMALRVMTNKLKNAYNGNDVNFQDTSDESSGSGSGSGCMDDVCPTEFEFVTTEAPAVDPDRREVDSSAAQRGHSLLSWSLTCIVLALQRLCR

SEQ ID NO: 29180 - protein, 672 aa, Homo sapiens
  REGION 1..672: note = ENSP00000368305
MTPSQVAFEIRGTLLPGEVFAICGSCDALGNWNPQNAVALLPENDTGESMLWKATIVLSRGVSVQYRYFKGYFLEPKTIGGPCQVIVHKWETHLQPRSITPLESEIIIDDGQFGIHNGVETLDSGWLTCQTEIRLRLHYSEKPPVSITKKKLKKSRFRVKLTLEGLEEDDDDRVSPTVLHKMSNSLEISLISDNEFKCRHSQPECGYGLQPDRWTEYSIQTMEPDNLELIFDFFEEDLSEHVVQGDALPGHVGTACLLSSTIAESGKSAGILTLPIMSRNSRKTIGKVRVDYIIIKPLPGYSCDMKSSFSKYWKPRIPLDVGHRGAGNSTTTAQLAKVQENTIASLRNAASHGAAFVEFDVHLSKDFVPVVYHDLTCCLTMKKKFDADPVELFEIPVKELTFDQLQLLKLTHVTALKSKDRKESVVQEENSFSENQPFPSLKMVLESLPEDVGFNIEIKWICQQRDGMWDGNLSTYFDMNLFLDIILKTVLENSGKRRIVFSSFDADICTMVRQKQNKYPILFLTQGKSEIYPELMDLRSRTTPIAMSFAQFENLLGINVHTEDLLRNPSYIQEAKAKGLVIFCWGDDTNDPENRRKLKELGVNGLIYDRIYDWMPEQPNIFQVEQLERLKQELPELKSCLCPTVSRFVPSSLCGESDIHVDANGIDNVENA

SEQ ID NO: 29181 - protein, 264 aa, Homo sapiens
  REGION 1..264: note = ENSP00000396720
  VARIANT 1: note = Any amino acid
XCDMKSSFSKYWKPRIPLDVGHRGAGNSTTTAQLAKVQENTIASLRNAASHGAAFVEFDVHLSKDFVPVVYHDLTCCLTMKKNLWFRRKIPFQKISHFLLLRWVRQKQNKYPILFLTQGKSEIYPELMDLRSRTTPIAMSFAQFENLLGINVHTEDLLRNPSYIQEAKAKGLVIFCWGDDTNDPENRRKLKELGVNGLIYDRIYDWMPEQPNIFQVEQLERLKQELPELKSCLCPTVSRFVPSSLCGESDIHVDANGIDNVENA

SEQ ID NO: 29182 - protein, 62 aa, Homo sapiens
  REGION 1..62: note = ENSP00000487616
  VARIANT 1: note = Any amino acid
XENTIASLRNAASHGAAFVEFDVHLSKDFVPVVYHDLTCCLTMKKLSSALQLSASCIFLPEI

SEQ ID NO: 29183 - protein, 101 aa, Homo sapiens
  REGION 1..101: note = ENSP00000488635
MTPSQVAFEIRGTLLPGEVFAICGSCDALGNWNPQNAVALLPENDTGESMLWKATIVLSRGVSVQYRYFKGYFLEPKKAKLLLTMDNLESTMVLKLWILDG

SEQ ID NO: 29184 - protein, 736 aa, Homo sapiens
  REGION 1..736: note = ENSP00000312771
MATEGMILTNHDHQIRVGVLTVSDSCFRNLAEDRSGINLKDLVQDPSLLGGTISAYKIVPDEIEEIKETLIDWCDEKELNLILTTGGTGFAPRDVTPEATKEVIEREAPGMALAMLMGSLNVTPLGMLSRPVCGIRGKTLIINLPGSKKGSQECFQFILPALPHAIDLLRDAIVKVKEVHDELEDLPSPPPPLSPPPTTSPHKQTEDKGVQCEEEEEEKKDSGVASTEDSSSSHITAAAIAAKIPDSIISRGVQVLPRDTASLSTTPSESPRAQATSRLSTASCPTPKVQSRCSSKENILRASHSAVDITKVARRHRMSPFPLTSMDKAFITVLEMTPVLGTEIINYRDGMGRVLAQDVYAKDNLPPFPASVKDGYAVRAADGPGDRFIIGESQAGEQPTQTVMPGQVMRVTTGAPIPCGADAVVQVEDTELIRESDDGTEELEVRILVQARPGQDIRPIGHDIKRGECVLAKGTHMGPSEIGLLATVGVTEVEVNKFPVVAVMSTGNELLNPEDDLLPGKIRDSNRSTLLATIQEHGYPTINLGIVGDNPDDLLNALNEGISRADVIITSGGVSMGEKDYLKQVLDIDLHAQIHFGRVFMKPGLPTTFATLDIDGVRKIIFALPGNPVSAVVTCNLFVVPALRKMQGILDPRPTIIKARLSCDVKLDPRPEYHRCILTWHHQEPLPWAQSTGNQMSSRLMSMRSANGLLMLPPKTEQYVELHKGEVVDVMVIGRL

SEQ ID NO: 29185 - protein, 769 aa, Homo sapiens
  REGION 1..769: note = ENSP00000417901
MATEGMILTNHDHQIRVGVLTVSDSCFRNLAEDRSGINLKDLVQDPSLLGGTISAYKIVPDEIEEIKETLIDWCDEKELNLILTTGGTGFAPRDVTPEATKEVIEREAPGMALAMLMGSLNVTPLGMLSRPVCGIRGKTLIINLPGSKKGSQECFQFILPALPHAIDLLRDAIVKVKEVHDELEDLPSPPPPLSPPPTTSPHKQTEDKGVQCEEEEEEKKDSGVASTEDSSSSHITAAAIAAKKHPFYTSPAVVMAHGEQPIPGLINYSHHSTDERIPDSIISRGVQVLPRDTASLSTTPSESPRAQATSRLSTASCPTPKVQSRCSSKENILRASHSAVDITKVARRHRMSPFPLTSMDKAFITVLEMTPVLGTEIINYRDGMGRVLAQDVYAKDNLPPFPASVKDGYAVRAADGPGDRFIIGESQAGEQPTQTVMPGQVMRVTTGAPIPCGADAVVQVEDTELIRESDDGTEELEVRILVQARPGQDIRPIGHDIKRGECVLAKGTHMGPSEIGLLATVGVTEVEVNKFPVVAVMSTGNELLNPEDDLLPGKIRDSNRSTLLATIQEHGYPTINLGIVGDNPDDLLNALNEGISRADVIITSGGVSMGEKDYLKQVLDIDLHAQIHFGRVFMKPGLPTTFATLDIDGVRKIIFALPGNPVSAVVTCNLFVVPALRKMQGILDPRPTIIKARLSCDVKLDPRPEYHRCILTWHHQEPLPWAQSTGNQMSSRLMSMRSANGLLMLPPKTEQYVELHKGEVVDVMVIGRL

SEQ ID NO: 29186 - protein, 380 aa, Homo sapiens
  REGION 1..380: note = ENSP00000452220
MATEGMILTNHDHQIRVGVLTVSDSCFRNLAEDRSGINLKDLVQDPSLLGGTISAYKIVPDEIEEIKKFPTFPFCGLQKGATKEVIEREAPGMALAMLMGSLNVTPLGMLSRPVCGIRGKTLIINLPGSKKGSQECFQFILPALPHAIDLLRDAIVKVKEVHDELEDLPSPPPPLSPPPTTSPHKQTEDKGVQCEEEEEEKKDSGVASTEDSSSSHITAAAIAAKKHPFYTSPAVVMAHGEQPIPGLINYSHHSTDERIPDSIISRGVQVLPRDTASLSTTPSESPRAQATSRLSTASCPTPKVQSRCSSKENILRASHSAVDITKVARRHRMSPFPLTSMDKAFITVLEMTPVLGTEIINYRGTIIFDHCPFFSSFFSK

SEQ ID NO: 29187 - protein, 782 aa, Homo sapiens
  REGION 1..782: note = ENSP00000438404
MATEGMILTNHDHQIRVGVLTVSDSCFRNLAEDRSGINLKDLVQDPSLLGGTISAYKIVPDEIEEIKETLIDWCDEKELNLILTTGGTGFAPRDVTPEKFPTFPFCGLQKGATKEVIEREAPGMALAMLMGSLNVTPLGMLSRPVCGIRGKTLIINLPGSKKGSQECFQFILPALPHAIDLLRDAIVKVKEVHDELEDLPSPPPPLSPPPTTSPHKQTEDKGVQCEEEEEEKKDSGVASTEDSSSSHITAAAIAAKIPDSIISRGVQVLPRDTASLSTTPSESPRAQATSRLSTASCPTPKQIRRPDESKGVASRVGSLKARLPSCSSTYSVSEVQSRCSSKENILRASHSAVDITKVARRHRMSPFPLTSMDKAFITVLEMTPVLGTEIINYRDGMGRVLAQDVYAKDNLPPFPASVKDGYAVRAADGPGDRFIIGESQAGEQPTQTVMPGQVMRVTTGAPIPCGADAVVQVEDTELIRESDDGTEELEVRILVQARPGQDIRPIGHDIKRGECVLAKGTHMGPSEIGLLATVGVTEVEVNKFPVVAVMSTGNELLNPEDDLLPGKIRDSNRSTLLATIQEHGYPTINLGIVGDNPDDLLNALNEGISRADVIITSGGVSMGEKDYLKQVLDIDLHAQIHFGRVFMKPGLPTTFATLDIDGVRKIIFALPGNPVSAVVTCNLFVVPALRKMQGILDPRPTIIKARLSCDVKLDPRPEYHRCILTWHHQEPLPWAQSTGNQMSSRLMSMRSANGLLMLPPKTEQYVELHKGEVVDVMVIGRL

SEQ ID NO: 29188 - protein, 49 aa, Homo sapiens
  REGION 1..49: note = ENSP00000451935
MATEGMILTNHDHQIRVGVLTVSDSCFRNLAEDRSGINLKDLVQDPSLG

SEQ ID NO: 29189 - protein, 50 aa, Homo sapiens
  REGION 1..50: note = ENSP00000451056
MATEGMILTNHDHQIRVGVLTVSDSCFRNLAEDRSGINLKDLVQDPSLKP

SEQ ID NO: 29190 - protein, 49 aa, Homo sapiens; identical to SEQ ID NO: 29188
  REGION 1..49: note = ENSP00000451790

SEQ ID NO: 29191 - protein, 39 aa, Homo sapiens
  REGION 1..39: note = ENSP00000451725
MATEGMILTNHDHQIRVGVLTVGMEFHRVSQDGLDLLTL

SEQ ID NO: 29192 - protein, 280 aa, Homo sapiens
  REGION 1..280: note = ENSP00000450706
ETLIDWCDEKELNLILTTGGTGFAPRDVTPEATKEVIEREAPGMALAMLMGSLNVTPLGMLSRPVCGIRGKTLIINLPGSKKGSQECFQFILPALPHAIDLLRDAIVKVKEVHDELEDLPSPPPPLSPPPTTSPHKQTEDKGVQCEEEEEEKKDSGVASTEDSSSSHITAAAIAAKIPDSIISRGVQVLPRDTASLSTTPSESPRAQATSRLSTASCPTPKQIRRPDESKGVASRVGSLKVQSRCSSKENILRASHSAVDITKVARRHRMSPFPLTSMDK

SEQ ID NO: 29193 - protein, 201 aa, Homo sapiens
  REGION 1..201: note = ENSP00000452009
HMGPSEIGLLATVGVTEVEVNKFPVVAVMSTGNELLNPEDDLLPGKIRDSNRSTLLATIQEHGYPTINLGIVGDNPDDLLNALNEGISRADVIITSGGVSMGEKDYLKQVLDIDLHAQIHFGRVFMKPGLPTTFATLDIDGVRKIIFALPGNPVSAVVTCNLFVVPALRKMQGILDPRPTIIKARVMLSNDQKPKWKPGNS

SEQ ID NO: 29194 - protein, 60 aa, Homo sapiens
  REGION 1..60: note = ENSP00000450442
  VARIANT 1: note = Any amino acid
XLLMLPPKTEHAKRRLTGWRLCLASRTIPCRASREVSRPNSLTAQYSWAVTGHLLFEETN

SEQ ID NO: 29195 - protein, 560 aa, Homo sapiens
  REGION 1..560: note = ENSP00000258733
MECLYYFLGFLLLAARLPLDAAKRFHDVLGNERPSAYMREHNQLNGWSSDENDWNEKLYPVWKRGDMRWKNSWKGGRVQAVLTSDSPALVGSNITFAVNLIFPRCQKEDANGNIVYEKNCRNEAGLSADPYVYNWTAWSEDSDGENGTGQSHHNVFPDGKPFPHHPGWRRWNFIYVFHTLGQYFQKLGRCSVRVSVNTANVTLGPQLMEVTVYRRHGRAYVPIAQVKDVYVVTDQIPVFVTMFQKNDRNSSDETFLKDLPIMFDVLIHDPSHFLNYSTINYKWSFGDNTGLFVSTNHTVNHTYVLNGTFSLNLTVKAAAPGPCPPPPPPPRPSKPTPSLGPAGDNPLELSRIPDENCQINRYGHFQATITIVEGILEVNIIQMTDVLMPVPWPESSLIDFVVTCQGSIPTEVCTIISDPTCEITQNTVCSPVDVDEMCLLTVRRTFNGSGTYCVNLTLGDDTSLALTSTLISVPDRDPASPLRMANSALISVGCLAIFVTVISLLVYKKHKEYNPIENSPGNVVRSKGLSVFLNRAKAVFFPGNQEKDPLLKNQEFKGVS

SEQ ID NO: 29196 - protein, 572 aa, Homo sapiens
  REGION 1..572: note = ENSP00000371420
MECLYYFLGFLLLAARLPLDAAKRFHDVLGNERPSAYMREHNQLNGWSSDENDWNEKLYPVWKRGDMRWKNSWKGGRVQAVLTSDSPALVGSNITFAVNLIFPRCQKEDANGNIVYEKNCRNEAGLSADPYVYNWTAWSEDSDGENGTGQSHHNVFPDGKPFPHHPGWRRWNFIYVFHTLGQYFQKLGRCSVRVSVNTANVTLGPQLMEVTVYRRHGRAYVPIAQVKDVYVVTDQIPVFVTMFQKNDRNSSDETFLKDLPIMFDVLIHDPSHFLNYSTINYKWSFGDNTGLFVSTNHTVNHTYVLNGTFSLNLTVKAAAPGPCPPPPPPPRPSKPTPSLATTLKSYDSNTPGPAGDNPLELSRIPDENCQINRYGHFQATITIVEGILEVNIIQMTDVLMPVPWPESSLIDFVVTCQGSIPTEVCTIISDPTCEITQNTVCSPVDVDEMCLLTVRRTFNGSGTYCVNLTLGDDTSLALTSTLISVPDRDPASPLRMANSALISVGCLAIFVTVISLLVYKKHKEYNPIENSPGNVVRSKGLSVFLNRAKAVFFPGNQEKDPLLKNQEFKGVS

SEQ ID NO: 29197 - protein, 206 aa, Homo sapiens
  REGION 1..206: note = ENSP00000386476
MECLYYFLGFLLLAARLPLDAAKRFHDVLGNERPSAYMREHNQLNGWSSDENDWNEKLYPVWKRGDMRWKNSWKGGRVQAVLTSDSPALVGSNITFAVNLIFPRCQKEDANGNIVYEKNCRNEAGLSADPYVYNWTAWSEDSDGENGTGQSHHNVFPDGKPFPHHPGWRRWNFIYVFHTLGWLLQTPKLLLYLSLKFQPSLFLLYN

SEQ ID NO: 29198 - protein, 600 aa, Homo sapiens
  REGION 1..600: note = ENSP00000361483
MAALAPVGSPASRGPRLAAGLRLLPMLGLLQLLAEPGLGRVHHLALKDDVRHKVHLNTFGFFKDGYMVVNVSSLSLNEPEDKDVTIGFSLDRTKNDGFSSYLDEDVNYCILKKQSVSVTLLILDISRSEVRVKSPPEAGTQLPKIIFSRDEKVLGQSQEPNVNPASAGNQTQKTQDGGKSKRSTVDSKAMGEKSFSVHNNGGAVSFQFFFNISTDDQEGLYSLYFHKCLGKELPSDKFTFSLDIEITEKNPDSYLSAGEIPLPKLYISMAFFFFLSGTIWIHILRKRRNDVFKIHWLMAALPFTKSLSLVFHAIDYHYISSQGFPIEGWAVVYYITHLLKGALLFITIALIGTGWAFIKHILSDKDKKIFMIVIPLQVLANVAYIIIESTEEGTTEYGLWKDSLFLVDLLCCGAILFPVVWSIRHLQEASATDGKGDSMGPLQQRANLRAGSRIESHHFAQADLELLASSCPPASVSQRAGITAAINLAKLKLFRHYYVLIVCYIYFTRIIAFLLKLAVPFQWKWLYQLLDETATLVFFVLTGYKFRPASDNPYLQLSQEEEDLEMESVVTTSGVMESMKKVKKVTNGSVEPQGEWEGAV

SEQ ID NO: 29199 - protein, 552 aa, Homo sapiens
  REGION 1..552: note = ENSP00000336988
MAALAPVGSPASRGPRLAAGLRLLPMLGLLQLLAEPGLGRVHHLALKDDVRHKVHLNTFGFFKDGYMVVNVSSLSLNEPEDKDVTIGFSLDRTKNDGFSSYLDEDVNYCILKKQSVSVTLLILDISRSEVRVKSPPEAGTQLPKIIFSRDEKVLGQSQEPNVNPASAGNQTQKTQDGGKSKRSTVDSKAMGEKSFSVHNNGGAVSFQFFFNISTDDQEGLYSLYFHKCLGKELPSDKFTFSLDIEITEKNPDSYLSAGEIPLPKLYISMAFFFFLSGTIWIHILRKRRNDVFKIHWLMAALPFTKSLSLVFHAIDYHYISSQGFPIEGWAVVYYITHLLKGALLFITIALIGTGWAFIKHILSDKDKKIFMIVIPLQVLANVAYIIIESTEEGTTEYGLWKDSLFLVDLLCCGAILFPVVWSIRHLQEASATDGKAAINLAKLKLFRHYYVLIVCYIYFTRIIAFLLKLAVPFQWKWLYQLLDETATLVFFVLTGYKFRPASDNPYLQLSQEEEDLEMESVVTTSGVMESMKKVKKVTNGSVEPQGEWEGAV

SEQ ID NO: 29200 - protein, 128 aa, Homo sapiens
  REGION 1..128: note = ENSP00000475772
MAALAPVGSPASRGPRLAAGLRLLPMLGLLQLLAEPGLGRVHHLALKDDVRHKVHLNTFGFFKDGYMVVNVSSLSLNEPEDKDVTIGFSLDRTKNDGFSSYLDEDVNYCILKKQSVSVTLLILDISRR

SEQ ID NO: 29201 - protein, 571 aa, Homo sapiens
  REGION 1..571: note = ENSP00000361487
MAALAPVGSPASRGPRLAAGLRLLPMLGLLQLLAEPGLGRVHHLALKDDVRHKVHLNTFGFFKDGYMVVNVSSLSLNEPEDKDVTIGFSLDRTKNDGFSSYLDEDVNYCILKKQSVSVTLLILDISRSEVRVKSPPEAGTQLPKIIFSRDEKVLGQSQEPNVNPASAGNQTQKTQDGGKSKRSTVDSKAMGEKSFSVHNNGGAVSFQFFFNISTDDQEGLYSLYFHKCLGKELPSDKFTFSLDIEITEKNPDSYLSAGEIPLPKLYISMAFFFFLSGTIWIHILRKRRNDVFKIHWLMAALPFTKSLSLVFHAIDYHYISSQGFPIEGWAVVYYITHLLKGALLFITIALIGTGWAFIKHILSDKDKKIFMIVIPLQVLANVAYIIIESTEEGTTEYGLWKDSLFLVDLLCCGAILFPVVWSIRHLQEASATDGKGDSMGPLQQRANLRAGSRIAAINLAKLKLFRHYYVLIVCYIYFTRIIAFLLKLAVPFQWKWLYQLLDETATLVFFVLTGYKFRPASDNPYLQLSQEEEDLEMESVVTTSGVMESMKKVKKVTNGSVEPQGEWEGAV

SEQ ID NO: 29202 - protein, 600 aa, Homo sapiens; identical to SEQ ID NO: 29198
  REGION 1..600: note = ENSP00000483750

SEQ ID NO: 29203 - protein, 494 aa, Homo sapiens
  REGION 1..494: note = ENSP00000432696
MEEPQPPRPPASMALLGSQHSGAPSAAGPPGGTSSAATAAVLSFSTVATAALGNLSDASGGGTAAAPGGGGLGGSGAAREAGAAVRRPLGPEAAPLLSHGAAVAAQALVLLLIFLLSSLGNCAVMGVIVKHRQLRTVTNAFILSLSLSDLLTALLCLPAAFLDLFTPPGGSAPAAAAGPWRGFCAASRFFSSCFGIVSTLSVALISLDRYCAIVRPPREKIGRRRALQLLAGAWLTALGFSLPWELLGAPRELAAAQSFHGCLYRTSPDPAQLGAAFSVGLVVACYLLPFLLMCFCHYHICKTVRLSDVRVRPVNTYARVLRFFSEVRTATTVLIMIVFVICCWGPYCFLVLLAAARQAQTMQAPSLLSVVAVWLTWANGAINPVIYAIRNPNISMLLGRNREEGYRTRNVDAFLPSQGPGLQARSRSRLRNRYANRLGACNRMSSSNPASGVAGDVAMWARKNPVVLFCREGPPEPVTAVTKQPKSEAGDTSL

SEQ ID NO: 29204 - protein, 494 aa, Homo sapiens; identical to SEQ ID NO: 29203
  REGION 1..494: note = ENSP00000378548

SEQ ID NO: 29205 - protein, 609 aa, Homo sapiens
  REGION 1..609: note = ENSP00000367125
MSDERRLPGSAVGWLVCGGLSLLANAWGILSVGAKQKKWKPLEFLLCTLAATHMLNVAVPIATYSVVQLRRQRPDFEWNEGLCKVFVSTFYTLTLATCFSVTSLSYHRMWMVCWPVNYRLSNAKKQAVHTVMGIWMVSFILSALPAVGWHDTSERFYTHGCRFIVAEIGLGFGVCFLLLVGGSVAMGVICTAIALFQTLAVQVGRQADRRAFTVPTIVVEDAQGKRRSSIDGSEPAKTSLQTTGLVTTIVFIYDCLMGFPVLVVSFSSLRADASAPWMALCVLWCSVAQALLLPVFLWACDRYRADLKAVREKCMALMANDEESDDETSLEGGISPDLVLERSLDYGYGGDFVALDRMAKYEISALEGGLPQLYPLRPLQEDKMQYLQVPPTRRFSHDDADVWAAVPLPAFLPRWGSGEDLAALAHLVLPAGPERRRASLLAFAEDAPPSRARRRSAESLLSLRPSALDSGPRGARDSPPGSPRRRPGPGPRSASASLLPDAFALTAFECEPQALRRPPGPFPAAPAAPDGADPGEAPTPPSSAQRSPGPRPSAHSHAGSLRPGLSASWGEPGGLRAAGGGGSTSSFLSSPSESSGYATLHSDSLGSAS

SEQ ID NO: 29206 - protein, 529 aa, Homo sapiens
  REGION 1..529: note = ENSP00000356812
MSLNSSLSCRKELSNLTEEEGGEGGVIITQFIAIIVITIFVCLGNLVIVVTLYKKSYLLTLSNKFVFSLTLSNFLLSVLVLPFVVTSSIRREWIFGVVWCNFSALLYLLISSASMLTLGVIAIDRYYAVLYPMVYPMKITGNRAVMALVYIWLHSLIGCLPPLFGWSSVEFDEFKWMCVAAWHREPGYTAFWQIWCALFPFLVMLVCYGFIFRVARVKARKVHCGTVVIVEEDAQRTGRKNSSTSTSSSGSRRNAFQGVVYSANQCKALITILVVLGAFMVTWGPYMVVIASEALWGKSSVSPSLETWATWLSFASAVCHPLIYGLWNKTVRKELLGMCFGDRYYREPFVQRQRTSRLFSISNRITDLGLSPHLTALMAGGQPLGHSSSTGDTGFSCSQDSGTDMMLLEDYTSDDNPPSHCTCPPKRRSSVTFEDEVEQIKEAAKNSILHVKAEVHKSLDSYAASLAKAIEAEAKINLFGEEALPGVLVTARTVPGGGFGGRRGSRTLVSQRLQLQSIEEGDVLAAEQR

SEQ ID NO: 29207 - protein, 397 aa, Homo sapiens
  REGION 1..397: note = ENSP00000356810
MVYPMKITGNRAVMALVYIWLHSLIGCLPPLFGWSSVEFDEFKWMCVAAWHREPGYTAFWQIWCALFPFLVMLVCYGFIFRVARVKARKVHCGTVVIVEEDAQRTGRKNSSTSTSSSGSRRNAFQGVVYSANQCKALITILVVLGAFMVTWGPYMVVIASEALWGKSSVSPSLETWATWLSFASAVCHPLIYGLWNKTVRKELLGMCFGDRYYREPFVQRQRTSRLFSISNRITDLGLSPHLTALMAGGQPLGHSSSTGDTGFSCSQDSGTDMMLLEDYTSDDNPPSHCTCPPKRRSSVTFEDEVEQIKEAAKNSILHVKAEVHKSLDSYAASLAKAIEAEAKINLFGEEALPGVLVTARTVPGGGFGGRRGSRTLVSQRLQLQSIEEGDVLAAEQR

SEQ ID NO: 29208 - protein, 529 aa, Homo sapiens; identical to SEQ ID NO: 29206
  REGION 1..529: note = ENSP00000356809

SEQ ID NO: 29209 - protein, 415 aa, Homo sapiens
  REGION 1..415: note = ENSP00000444348
MLVPVGWMNESYYAVLYPMVYPMKITGNRAVMALVYIWLHSLIGCLPPLFGWSSVEFDEFKWMCVAAWHREPGYTAFWQIWCALFPFLVMLVCYGFIFRVARVKARKVHCGTVVIVEEDAQRTGRKNSSTSTSSSGSRRNAFQGVVYSANQCKALITILVVLGAFMVTWGPYMVVIASEALWGKSSVSPSLETWATWLSFASAVCHPLIYGLWNKTVRKELLGMCFGDRYYREPFVQRQRTSRLFSISNRITDLGLSPHLTALMAGGQPLGHSSSTGDTGFSCSQDSGTDMMLLEDYTSDDNPPSHCTCPPKRRSSVTFEDEVEQIKEAAKNSILHVKAEVHKSLDSYAASLAKAIEAEAKINLFGEEALPGVLVTARTVPGGGFGGRRGSRTLVSQRLQLQSIEEGDVLAAEQR

SEQ ID NO: 29210 - protein, 546 aa, Homo sapiens
  REGION 1..546: note = ENSP00000271357
MKVVQHALPTPRRGALTMSLNSSLSCRKELSNLTEEEGGEGGVIITQFIAIIVITIFVCLGNLVIVVTLYKKSYLLTLSNKFVFSLTLSNFLLSVLVLPFVVTSSIRREWIFGVVWCNFSALLYLLISSASMLTLGVIAIDRYYAVLYPMVYPMKITGNRAVMALVYIWLHSLIGCLPPLFGWSSVEFDEFKWMCVAAWHREPGYTAFWQIWCALFPFLVMLVCYGFIFRVARVKARKVHCGTVVIVEEDAQRTGRKNSSTSTSSSGSRRNAFQGVVYSANQCKALITILVVLGAFMVTWGPYMVVIASEALWGKSSVSPSLETWATWLSFASAVCHPLIYGLWNKTVRKELLGMCFGDRYYREPFVQRQRTSRLFSISNRITDLGLSPHLTALMAGGQPLGHSSSTGDTGFSCSQDSGTDMMLLEDYTSDDNPPSHCTCPPKRRSSVTFEDEVEQIKEAAKNSILHVKAEVHKSLDSYAASLAKAIEAEAKINLFGEEALPGVLVTARTVPGGGFGGRRGSRTLVSQRLQLQSIEEGDVLAAEQR

SEQ ID NO: 29211 - protein, 451 aa, Homo sapiens
  REGION 1..451: note = ENSP00000437576
MGGRRCVPGTLPMRAAPPGAKRLHVPLRAKGVGRSGHAPRLESVRTSYYAVLYPMVYPMKITGNRAVMALVYIWLHSLIGCLPPLFGWSSVEFDEFKWMCVAAWHREPGYTAFWQIWCALFPFLVMLVCYGFIFRVARVKARKVHCGTVVIVEEDAQRTGRKNSSTSTSSSGSRRNAFQGVVYSANQCKALITILVVLGAFMVTWGPYMVVIASEALWGKSSVSPSLETWATWLSFASAVCHPLIYGLWNKTVRKELLGMCFGDRYYREPFVQRQRTSRLFSISNRITDLGLSPHLTALMAGGQPLGHSSSTGDTGFSCSQDSGTDMMLLEDYTSDDNPPSHCTCPPKRRSSVTFEDEVEQIKEAAKNSILHVKAEVHKSLDSYAASLAKAIEAEAKINLFGEEALPGVLVTARTVPGGGFGGRRGSRTLVSQRLQLQSIEEGDVLAAEQR

SEQ ID NO: 29212 - protein, 549 aa, Homo sapiens
  REGION 1..549: note = ENSP00000441039
MSARGVVQHALPTPRRGALTMSLNSSLSCRKELSNLTEEEGGEGGVIITQFIAIIVITIFVCLGNLVIVVTLYKKSYLLTLSNKFVFSLTLSNFLLSVLVLPFVVTSSIRREWIFGVVWCNFSALLYLLISSASMLTLGVIAIDRYYAVLYPMVYPMKITGNRAVMALVYIWLHSLIGCLPPLFGWSSVEFDEFKWMCVAAWHREPGYTAFWQIWCALFPFLVMLVCYGFIFRVARVKARKVHCGTVVIVEEDAQRTGRKNSSTSTSSSGSRRNAFQGVVYSANQCKALITILVVLGAFMVTWGPYMVVIASEALWGKSSVSPSLETWATWLSFASAVCHPLIYGLWNKTVRKELLGMCFGDRYYREPFVQRQRTSRLFSISNRITDLGLSPHLTALMAGGQPLGHSSSTGDTGFSCSQDSGTDMMLLEDYTSDDNPPSHCTCPPKRRSSVTFEDEVEQIKEAAKNSILHVKAEVHKSLDSYAASLAKAIEAEAKINLFGEEALPGVLVTARTVPGGGFGGRRGSRTLVSQRLQLQSIEEGDVLAAEQR

SEQ ID NO: 29213 - protein, 433 aa, Homo sapiens
  REGION 1..433: note = ENSP00000302676
MCFSPILEINMQSESNITVRDDIDDINTNMYQPLSYPLSFQVSLTGFLMLEIVLGLGSNLTVLVLYCMKSNLINSVSNIITMNLHVLDVIICVGCIPLTIVILLLSLESNTALICCFHEACVSFASVSTAINVFAITLDRYDISVKPANRILTMGRAVMLMISIWIFSFFSFLIPFIEVNFFSLQSGNTWENKTLLCVSTNEYYTELGMYYHLLVQIPIFFFTVVVMLITYTKILQALNIRIGTRFSTGQKKKARKKKTISLTTQHEATDMSQSSGGRNVVFGVRTSVSVIIALRRAVKRHRERRERQKRVFRMSLLIISTFLLCWTPISVLNTTILCLGPSDLLVKLRLCFLVMAYGTTIFHPLLYAFTRQKFQKVLKSKMKKRVVSIVEADPLPNNAVIHNSWIDPKRNKKITFEDSEIREKCLVPQVVTD

SEQ ID NO: 29214 - protein, 433 aa, Homo sapiens; identical to SEQ ID NO: 29213
  REGION 1..433: note = ENSP00000492841

SEQ ID NO: 29215 - protein, 381 aa, Homo sapiens
  REGION 1..381: note = ENSP00000367384
MRSHTITMTTTSVSSWPYSSHRMRFITNHSDQPPQNFSATPNVTTCPMDEKLLSTVLTTSYSVIFIVGLVGNIIALYVFLGIHRKRNSIQIYLLNVAIADLLLIFCLPFRIMYHINQNKWTLGVILCKVVGTLFYMNMYISIILLGFISLDRYIKINRSIQQRKAITTKQSIYVCCIVWMLALGGFLTMIILTLKKGGHNSTMCFHYRDKHNAKGEAIFNFILVVMFWLIFLLIILSYIKIGKNLLRISKRRSKFPNSGKYATTARNSFIVLIIFTICFVPYHAFRFIYISSQLNVSSCYWKEIVHKTNEIMLVLSSFNSCLDPVMYFLMSSNIRKIMCQLLFRRFQGEPSRSESTSEFKPGYSLHDTSVAVKIQSSSKST

SEQ ID NO: 29216 - protein, 381 aa, Homo sapiens; identical to SEQ ID NO: 29215
  REGION 1..381: note = ENSP00000367378

SEQ ID NO: 29217 - protein, 334 aa, Homo sapiens
  REGION 1..334: note = ENSP00000480296
MDEKLLSTVLTTSYSVIFIVGLVGNIIALYVFLGIHRKRNSIQIYLLNVAIADLLLIFCLPFRIMYHINQNKWTLGVILCKVVGTLFYMNMYISIILLGFISLDRYIKINRSIQQRKAITTKQSIYVCCIVWMLALGGFLTMIILTLKKGGHNSTMCFHYRDKHNAKGEAIFNFILVVMFWLIFLLIILSYIKIGKNLLRISKRRSKFPNSGKYATTARNSFIVLIIFTICFVPYHAFRFIYISSQLNVSSCYWKEIVHKTNEIMLVLSSFNSCLDPVMYFLMSSNIRKIMCQLLFRRFQGEPSRSESTSEFKPGYSLHDTSVAVKIQSSSKST

SEQ ID NO: 29218 - protein, 613 aa, Homo sapiens
  REGION 1..613: note = ENSP00000306449
MRAPGALLARMSRLLLLLLLKVSASSALGVAPASRNETCLGESCAPTVIQRRGRDAWGPGNSARDVLRARAPREEQGAAFLAGPSWDLPAAPGRDPAAGRGAEASAAGPPGPPTRPPGPWRWKGARGQEPSETLGRGNPTALQLFLQISEEEEKGPRGAGISGRSQEQSVKTVPGASDLFYWPRRAGKLQGSHHKPLSKTANGLAGHEGWTIALPGRALAQNGSLGEGIHEPGGPRRGNSTNRRVRLKNPFYPLTQESYGAYAVMCLSVVIFGTGIIGNLAVMCIVCHNYYMRSISNSLLANLAFWDFLIIFFCLPLVIFHELTKKWLLEDFSCKIVPYIEVASLGVTTFTLCALCIDRFRAATNVQMYYEMIENCSSTTAKLAVIWVGALLLALPEVVLRQLSKEDLGFSGRAPAERCIIKISPDLPDTIYVLALTYDSARLWWYFGCYFCLPTLFTITCSLVTARKIRKAEKACTRGNKRQIQLESQMNCTVVALTILYGFCIIPENICNIVTAYMATGVSQQTMDLLNIISQFLLFFKSCVTPVLLFCLCKPFSRAFMECCCCCCEECIQKSSTVTSDDNDNEYTTELELSPFSTIRREMSTFASVGTHC

SEQ ID NO: 29219 - protein, 481 aa, Homo sapiens
  REGION 1..481: note = ENSP00000356251
MRWLWPLAVSLAVILAVGLSRVSGGAPLHLGRHRAETQEQQSRSKRGTEDEEAKGVQQYVPEEWAEYPRPIHPAGLQPTKPLVATSPNPGKDGGTPDSGQELRGNLTGAPGQRLQIQNPLYPVTESSYSAYAIMLLALVVFAVGIVGNLSVMCIVWHSYYLKSAWNSILASLALWDFLVLFFCLPIVIFNEITKQRLLGDVSCRAVPFMEVSSLGVTTFSLCALGIDRFHVATSTLPKVRPIERCQSILAKLAVIWVGSMTLAVPELLLWQLAQEPAPTMGTLDSCIMKPSASLPESLYSLVMTYQNARMWWYFGCYFCLPILFTVTCQLVTWRVRGPPGRKSECRASKHEQCESQLNSTVVGLTVVYAFCTLPENVCNIVVAYLSTELTRQTLDLLGLINQFSTFFKGAITPVLLLCICRPLGQAFLDCCCCCCCEECGGASEASAANGSDNKLKTEVSSSIYFHKPRESPPLLPLGTPC

SEQ ID NO: 29220 - protein, 419 aa, Homo sapiens
  REGION 1..419: note = ENSP00000229955
MVFSAVLTAFHTGTSNTTFVVYENTYMNITLPPPFQHPDLSPLLRYSFETMAPTGLSSLTVNSTAVPTTPAAFKSLNLPLQITLSAIMIFILFVSFLGNLVVCLMVYQKAAMRSAINILLASLAFADMLLAVLNMPFALVTILTTRWIFGKFFCRVSAMFFWLFVIEGVAILLIISIDRFLIIVQRQDKLNPYRAKVLIAVSWATSFCVAFPLAVGNPDLQIPSRAPQCVFGYTTNPGYQAYVILISLISFFIPFLVILYSFMGILNTLRHNALRIHSYPEGICLSQASKLGLMSLQRPFQMSIDMGFKTRAFTTILILFAVFIVCWAPFTTYSLVATFSKHFYYQHNFFEISTWLLWLCYLKSALNPLIYYWRIKKFHDACLDMMPKSFKFLPQLPGHTKRRIRPSAVYVCGEHRTVV

SEQ ID NO: 29221 - protein, 396 aa, Homo sapiens
  REGION 1..396: note = ENSP00000267015
MWNSSDANFSCYHESVLGYRYVAVSWGVVVAVTGTVGNVLTLLALAIQPKLRTRFNLLIANLTLADLLYCTLLQPFSVDTYLHLHWRTGATFCRVFGLLLFASNSVSILTLCLIALGRYLLIAHPKLFPQVFSAKGIVLALVSTWVVGVASFAPLWPIYILVPVVCTCSFDRIRGRPYTTILMGIYFVLGLSSVGIFYCLIHRQVKRAAQALDQYKLRQASIHSNHVARTDEAMPGRFQELDSRLASGGPSEGISSEPVSAATTQTLEGDSSEVGDQINSKRAKQMAEKSPPEASAKAQPIKGARRAPDSSSEFGKVTRMCFAVFLCFALSYIPFLLLNILDARVQAPRVVHMLAANLTWLNGCINPVLYAAMNRQFRQAYGSILKRGPRSFHRLH

SEQ ID NO: 29222 - protein, 396 aa, Homo sapiens; identical to SEQ ID NO: 29221
  REGION 1..396: note = ENSP00000450310

SEQ ID NO: 29223 - protein, 838 aa, Homo sapiens
  REGION 1..838: note = ENSP00000339057
MTGAEIEPSAQAKPEKKAGEEVIAGPERENDVPLVVRPKVRTQATTGARPKTETKSVPAARPKTEAQAMSGARPKTEVQVMGGARPKTEAQGITGARPKTDARAVGGARSKTDAKAIPGARPKDEAQAWAQSEFGTEAVSQAEGVSQTNAVAWPLATAESGSVTKSKGLSMDRELVNVDAETFPGTQGQKGIQPWFGPGEETNMGSWCYSRPRAREEASNESGFWSADETSTASSFWTGEETSVRSWPREESNTRSRHRAKHQTNPRSRPRSKQEAYVDSWSGSEDEASNPFSFWVGENTNNLFRPRVREEANIRSKLRTNREDCFESESEDEFYKQSWVLPGEEANSRFRHRDKEDPNTALKLRAQKDVDSDRVKQEPRFEEEVIIGSWFWAEKEASLEGGASAICESEPGTEEGAIGGSAYWAEEKSSLGAVAREEAKPESEEEAIFGSWFWDRDEACFDLNPCPVYKVSDRFRDAAEELNASSRPQTWDEVTVEFKPGLFHGVGFRSTSPFGIPEEASEMLEAKPKNLELSPEGEEQESLLQPDQPSPEFTFQYDPSYRSVREIREHLRARESAESESWSCSCIQCELKIGSEEFEEFLLLMDKIRDPFIHEISKIAMGMRSASQFTRDFIRDSGVVSLIETLLNYPSSRVRTSFLENMIHMAPPYPNLNMIETFICQVCEETLAHSVDSLEQLTGIRMLRHLTMTIDYHTLIANYMSGFLSLLTTANARTKFHVLKMLLNLSENPAVAKKLFSAKALSIFVGLFNIEETNDNIQIVIKMFQNISNIIKSGKMSLIDDDFSLEPLISAFREFEELAKQLQAQIDNQNDPEVGQQS

SEQ ID NO: 29224 - protein, 838 aa, Homo sapiens; identical to SEQ ID NO: 29223
  REGION 1..838: note = ENSP00000437872

SEQ ID NO: 29225 - protein, 838 aa, Homo sapiens; identical to SEQ ID NO: 29223
  REGION 1..838: note = ENSP00000437394

SEQ ID NO: 29226 - protein, 126 aa, Homo sapiens
  REGION 1..126: note = ENSP00000340595
MYPTRGVGYETILKEQKGQSMFVENKAFSMDEPVAAKRPVSPYSGYNGQLLTSVYQPTEMALMHKVPSEGAYDIILPRATANSQVMGSANSTLRAEDMYSAQSHQAATPPKDGKNSQVFRNPYVWD

SEQ ID NO: 29227 - protein, 150 aa, Homo sapiens
  REGION 1..150: note = ENSP00000462147
MRGRGSQQQQPTRRQGQKLPSPSPAGKYESAQPGGTQPEPGLGARMAIHKALVMCLGLPLFLFPGAWAQGHVPPGCSQGLNPLYYNLCDRSGAWGIVLEAVAGAGIVTTFVLTIILVASLPFVQDTKKRSLLGTQLRGRCHHTAGTMGSC

SEQ ID NO: 29228 - protein, 145 aa, Homo sapiens
  REGION 1..145: note = ENSP00000463813
MAIHKALVMCLGLPLFLFPGAWAQGHVPPGCSQGLNPLYYNLCDRSGAWGIVLEAVAGAGIVTTFVLTIILVASLPFVQDTKKRSLLGTQVFFLLGTLGLFCLVFACVVKPDFSTCASRRFLFGVLFAICFSCLAAHVFALNFLA

SEQ ID NO: 29229 - protein, 153 aa, Homo sapiens
  REGION 1..153: note = ENSP00000462440
MQAPAHPRRKQGALPGDRPARERATQRAWLSLGPRERQALRPGPGPAIPARTGPGPAPRAASLPPPPAPRLGLELAPNAALERGRRRVPGTQPEPGLGARMAIHKALVMCLGLPLFLFPGAWAQGHVPPGCSQGLNPLYYNLCDRSGAWGIVL

SEQ ID NO: 29230 - protein, 355 aa, Homo sapiens
  REGION 1..355: note = ENSP00000463090
  VARIANT 1: note = Any amino acid
XNLCDRSGAWGIVLEAVAGAGIVTTFVLTIILVASLPFVQDTKKRSLLGTQVFFLLGTLGLFCLVFACVVKPDFSTCASRRFLFGVLFAICFSCLAAHVFALNFLARKNHGPRGWVIFTVALLLTLVEVIINTEWLIITLVRGSGEGGPQGNSSAGWAVASPCAIANMDFVMALIYVMLLLLGAFLGAWPALCGRYKRWRKHGVFVLLTTATSVAIWVVWIVMYTYGNKQHNSPTWDDPTLAIALAANAWAFVLFYVIPEVSQDDDQSSSLERCPVVSPTALWCYPRPQQPVPLSLAYFSRAKLGEQSLQSRIAALTVAPDLSVLPVEVHEQNVISLQWKGSRELCGPHAALGLA

SEQ ID NO: 29231 - protein, 453 aa, Homo sapiens
  REGION 1..453: note = ENSP00000376405
MGTQPEPGLGARMAIHKALVMCLGLPLFLFPGAWAQGHVPPGCSQGLNPLYYNLCDRSGAWGIVLEAVAGAGIVTTFVLTIILVASLPFVQDTKKRSLLGTQVFFLLGTLGLFCLVFACVVKPDFSTCASRRFLFGVLFAICFSCLAAHVFALNFLARKNHGPRGWVIFTVALLLTLVEVIINTEWLIITLVRGSGEGGPQGNSSAGWAVASPCAIANMDFVMALIYVMLLLLGAFLGAWPALCGRYKRWRKHGVFVLLTTATSVAIWVVWIVMYTYGNKQHNSPTWDDPTLAIALAANAWAFVLFYVIPEVSQVTKSSPEQSYQGDMYPTRGVGYETILKEQKGQSMFVENKAFSMDEPVAAKRPVSPYSGYNGQLLTSVYQPTEMALMHKVPSEGAYDIILPRATANSQVMGSANSTLRAEDMYSAQSHQAATPPKDGKNSQVFRNPYVWD

SEQ ID NO: 29232 - protein, 462 aa, Homo sapiens
  REGION 1..462: note = ENSP00000376404
  VARIANT 1: note = Any amino acid
XKYESAQPGGTQPEPGLGARMAIHKALVMCLGLPLFLFPGAWAQGHVPPGCSQGLNPLYYNLCDRSGAWGIVLEAVAGAGIVTTFVLTIILVASLPFVQDTKKRSLLGTQVFFLLGTLGLFCLVFACVVKPDFSTCASRRFLFGVLFAICFSCLAAHVFALNFLARKNHGPRGWVIFTVALLLTLVEVIINTEWLIITLVRGSGEGGPQGNSSAGWAVASPCAIANMDFVMALIYVMLLLLGAFLGAWPALCGRYKRWRKHGVFVLLTTATSVAIWVVWIVMYTYGNKQHNSPTWDDPTLAIALAANAWAFVLFYVIPEVSQVTKSSPEQSYQGDMYPTRGVGYETILKEQKGQSMFVENKAFSMDEPVAAKRPVSPYSGYNGQLLTSVYQPTEMALMHKVPSEGAYDIILPRATANSQVMGSANSTLRAEDMYSAQSHQAATPPKDGKNSQAQSPQSKTRW

SEQ ID NO: 29233 - protein, 486 aa, Homo sapiens
  REGION 1..486: note = ENSP00000376403
MRGRGSQQQQPTRRQGQKLPSPSPAGKYESAQPGGTQPEPGLGARMAIHKALVMCLGLPLFLFPGAWAQGHVPPGCSQGLNPLYYNLCDRSGAWGIVLEAVAGAGIVTTFVLTIILVASLPFVQDTKKRSLLGTQVFFLLGTLGLFCLVFACVVKPDFSTCASRRFLFGVLFAICFSCLAAHVFALNFLARKNHGPRGWVIFTVALLLTLVEVIINTEWLIITLVRGSGEGGPQGNSSAGWAVASPCAIANMDFVMALIYVMLLLLGAFLGAWPALCGRYKRWRKHGVFVLLTTATSVAIWVVWIVMYTYGNKQHNSPTWDDPTLAIALAANAWAFVLFYVIPEVSQVTKSSPEQSYQGDMYPTRGVGYETILKEQKGQSMFVENKAFSMDEPVAAKRPVSPYSGYNGQLLTSVYQPTEMALMHKVPSEGAYDIILPRATANSQVMGSANSTLRAEDMYSAQSHQAATPPKDGKNSQVFRNPYVWD

SEQ ID NO: 29234 - protein, 684 aa, Homo sapiens
  REGION 1..684: note = ENSP00000385510
MEENLISMREDHSFHVRYRMEASCLELALEGERLCKSGDCRAGVSFFEAAVQVGTEDLKTLSAIYSQLGNAYFYLHDYAKALEYHHHDLTLARTIGDQLGEAKASGNLGNTLKVLGNFDEAIVCCQRHLDISRELNDKVGEARALYNLGNVYHAKGKSFGCPGPQDVGEFPEEVRDALQAAVDFYEENLSLVTALGDRAAQGRAFGNLGNTHYLLGNFRDAVIAHEQRLLIAKEFGDKAAERRAYSNLGNAYIFLGEFETASEYYKKTLLLARQLKDRAVEAQSCYSLGNTYTLLQDYEKAIDYHLKHLAIAQELNDRIGEGRACWSLGNAYTALGNHDQAMHFAEKHLEISREVGDKSGELTARLNLSDLQMVLGLSYSTNNSIMSENTEIDSSLNGVRPKLGRRHSMENMELMKLTPEKVQNWNSEILAKQKPLIAKPSAKLLFVNRLKGKKYKTNSSTKVLQDASNSIDHRIPNSQRKISADTIGDEGFFDLLSRFQSNRMDDQRCCLQEKNCHTASTTTSSTPPKMMLKTSSVPVVSPNTDEFLDLLASSQSRRLDDQRASFSNLPGLRLTQNSQSVLSHLMTNDNKEADEDFFDILVKCQGSRLDDQRCAPPPATTKGPTVPDEDFFSLILRSQGKRMDEQRVLLQRDQNRDTDFGLKDFLQNNALLEFKNSGKKSADH

SEQ ID NO: 29235 - protein, 213 aa, Homo sapiens
  REGION 1..213: note = ENSP00000408664
MEENLISMREDHSFHVRYRMEASCLELALEGERLCKSGDCRAGVSFFEAAVQVGTEDLKTLSAIYSQLGNAYFYLHDYAKALEYHHHDLTLARTIGDQLGEAKASGNLGNTLKVLGNFDEAIVCCQRHLDISRELNDKVGEARALYNLGNVYHAKGKSFGCPGPQDVGEFPEEVRDALQAAVDFYEENLSLVTALGDRAAQGRAFGNLGNTHY

SEQ ID NO: 29236 - protein, 75 aa, Homo sapiens
  REGION 1..75: note = ENSP00000401948
MEENLISMREDHSFHVRYRMEASCLELALEGERLCKSGDCRAGVSFFEAAVQVGTEDLKTLSAIYSQLGNAYFYL

SEQ ID NO: 29237 - protein, 52 aa, Homo sapiens
  REGION 1..52: note = ENSP00000392138
MEENLISMREDHSFHVRYRMEASCLELALEGERLCKSGDCRAGVSFFEAAVQ

SEQ ID NO: 29238 - protein, 217 aa, Homo sapiens
  REGION 1..217: note = ENSP00000390629
  VARIANT 1: note = Any amino acid
XMELMKLTPEKVQNWNSEILAKQKPLIAKPSAKLLFVNRLKGKKYKTNSSTKVLQDASNSIDHRIPNSQRKISADTIGDEGFFDLLSRFQSNRMDDQRCCLQEKNCHTASTTTSSTPPKMMLKTSSVPVVSPNTDEFLDLLASSQSRRLDDQRASFSNLPGLRLTQNSQSVLSHLMTNDNKEADEDFFDILVKCQVCLYIFFVLHTAQIPLKTLVVL

SEQ ID NO: 29239 - protein, 684 aa, Homo sapiens; identical to SEQ ID NO: 29234
  REGION 1..684: note = ENSP00000264126

SEQ ID NO: 29240 - protein, 78 aa, Homo sapiens
  REGION 1..78: note = ENSP00000450991
  MOD_RES 40: note = Selenocysteine
MAFIAKSFYDLSAISLDGEKVDFNTFRGRAVLIENVASLXGTTTRDFTQLNELQCRFPRRLVVLGFPCNQFGHQNCSG

SEQ ID NO: 29241 - protein, 190 aa, Homo sapiens
  REGION 1..190: note = ENSP00000374265
  MOD_RES 40: note = Selenocysteine
MAFIAKSFYDLSAISLDGEKVDFNTFRGRAVLIENVASLXGTTTRDFTQLNELQCRFPRRLVVLGFPCNQFGHQENCQNEEILNSLKYVRPGGGYQPTFTLVQKCEVNGQNEHPVFAYLKDKLPYPYDDPFSLMTDPKLIIWSPVRRSDVAWNFEKFLIGPEGEPFRRYSRTFPTINIEPDIKRLLKVAI

SEQ ID NO: 29242 - protein, 134 aa, Homo sapiens
  REGION 1..134: note = ENSP00000451721
FIAKSFYDLSAISLDGEKENCQNEEILNSLKYVRPGGGYQPTFTLVQKCEVNGQNEHPVFAYLKDKLPYPYDDPFSLMTDPKLIIWSPVRRSDVAWNFEKFLIGPEGEPFRRYSRTFPTINIEPDIKRLLKVAI

SEQ ID NO: 29243 - protein, 78 aa, Homo sapiens
  REGION 1..78: note = ENSP00000451844
  MOD_RES 40: note = Selenocysteine
MAFIAKSFYDLSAISLDGEKVDFNTFRGRAVLIENVASLXGTTTRDFTQLNELQCRFPRRLVVLGFPCNQFGHQERQK

SEQ ID NO: 29244 - protein, 189 aa, Homo sapiens
  REGION 1..189: note = ENSP00000478082
MAFIAKSFYDLSAISLDGEKVDFNTFRGRAVLIENVASLGTTTRDFTQLNELQCRFPRRLVVLGFPCNQFGHQENCQNEEILNSLKYVRPGGGYQPTFTLVQKCEVNGQNEHPVFAYLKDKLPYPYDDPFSLMTDPKLIIWSPVRRSDVAWNFEKFLIGPEGEPFRRYSRTFPTINIEPDIKRLLKVAI

SEQ ID NO: 29245 - protein, 447 aa, Homo sapiens
  REGION 1..447: note = ENSP00000426120
MTRRQQVLQAKRSIQQTFQAQLMPWKSMFHGREVKPVGPDLELSEAENGVEEKKKACRSPTAQSPTPSVEADSPDQKKIISLWSKSSFDGASLASDKNDCKTESKNDPKTERKKSSSSSQYKANMHFHKLFLSVPTEEPLKQSFTCALQKEILYQGKLFVSENWICFHSKVFGKDTKISIPAFSVTLIKKTKTALLVPNALIIATVTDRYIFVSLLSRDSTYKLLKSVCGHLENTSVGNSPNPSSAENSFRADRPSSLPLDFNDEFSDLDGVVQQRRQDMEGYSSSGSQTPESENSRDFHATESQTVLNVSKGEAKPTRADAHVNRVPEGKAKSLPVQGLSETVGILHKVKSQKCPMLHHILIFYAIVVCALIISTFYMRYRINTLEEQLGLLTSIVDTHNTEQAAPSGLRSQVQFNVEVLCQELTANIVKLEKIQNNLQKLLENGD

SEQ ID NO: 29246 - protein, 288 aa, Homo sapiens
  REGION 1..288: note = ENSP00000424985
MVKKRLPSSDTVFRFETPGSPRKANVEASRSSTDSPSSVFLSSEAENGVEEKKKACRSPTAQSPTPSVEADSPDQKKIISLWSKSSFDGASLASDKNDCKTESKNDPKTERKKSSSSSQYKANMHFHKLFLSVPTEEPLKQSFTCALQKEILYQGKLFVSENWICFHSKVFGKDTKISIPAFSVTLIKKTKTALLVPNALIIATVTDRYIFVSLLSRDSTYKLLKSVCGHLENTSVGNSPNPSSAENSFRADRPSSLPLDFNDEFSDLDGVVQQRRQDMEGYSSSGSQ

SEQ ID NO: 29247 - protein, 432 aa, Homo sapiens
  REGION 1..432: note = ENSP00000285689
MTELQQDVEDTKPAKVLGKRESKLGSAHSEAENGVEEKKKACRSPTAQSPTPSVEADSPDQKKIISLWSKSSFDGASLASDKNDCKTESKNDPKTERKKSSSSSQYKANMHFHKLFLSVPTEEPLKQSFTCALQKEILYQGKLFVSENWICFHSKVFGKDTKISIPAFSVTLIKKTKTALLVPNALIIATVTDRYIFVSLLSRDSTYKLLKSVCGHLENTSVGNSPNPSSAENSFRADRPSSLPLDFNDEFSDLDGVVQQRRQDMEGYSSSGSQTPESENSRDFHATESQTVLNVSKGEAKPTRADAHVNRVPEGKAKSLPVQGLSETVGILHKVKSQKCPMLHHILIFYAIVVCALIISTFYMRYRINTLEEQLGLLTSIVDTHNTEQAAPSGLRSQVQFNVEVLCQELTANIVKLEKIQNNLQKLLENGD

SEQ ID NO: 29248 - protein, 410 aa, Homo sapiens
  REGION 1..410: note = ENSP00000426143
MTELQQDVEDTKPAKVLGKRESKLGSAHSEAENGVEEKKKACRSPTAQSPTPSVEADSPDQKKIISLCPYLLSKSMLHSGPRYKANMHFHKLFLSVPTEEPLKQSFTCALQKEILYQGKLFVSENWICFHSKVFGKDTKISIPAFSVTLIKKTKTALLVPNALIIATVTDRYIFVSLLSRDSTYKLLKSVCGHLENTSVGNSPNPSSAENSFRADRPSSLPLDFNDEFSDLDGVVQQRRQDMEGYSSSGSQTPESENSRVDFHATESQTVLNVSKGEAKPTRADAHVNRVPEGKAKSLPVQGLSETVGILHKVKSQKCPMLHHILIFYAIVVCALIISTFYMRYRINTLEEQLGLLTSIVDTHNTEQAAPSGLRSQVQFNVEVLCQELTANIVKLEKIQNNLQKLLENGD

SEQ ID NO: 29249 - protein, 87 aa, Homo sapiens
  REGION 1..87: note = ENSP00000423236
MTELQQDVEDTKPAKVLGKRESKLGSAHSEAENGVEEKKKACRSPTAQSPTPSVEADSPDQKKIISLCTRPICTFTSCFLVSQRRNH

SEQ ID NO: 29250 - protein, 87 aa, Homo sapiens
  REGION 1..87: note = ENSP00000421494
MTELQQDVEDTKPAKVLGKRESKLGSAHSEAENGVEEKKKACRSPTAQSPTPSVEADSPDQKKIISLCPYLLSKSMLHSGPRVKIQF

SEQ ID NO: 29251 - protein, 323 aa, Homo sapiens
  REGION 1..323: note = ENSP00000427596
MHFHKLFLSVPTEEPLKQSFTCALQKEILYQGKLFVSENWICFHSKVFGKDTKISIPAFSVTLIKKTKTALLVPNALIIATVTDRYIFVSLLSRDSTYKLLKSVCGHLENTSVGNSPNPSSAENSFRADRPSSLPLDFNDEFSDLDGVVQQRRQDMEGYSSSGSQTPESENSRDFHATESQTVLNVSKGEAKPTRADAHVNRVPEGKAKSLPVQGLSETVGILHKVKSQKCPMLHHILIFYAIVVCALIISTFYMRYRINTLEEQLGLLTSIVDTHNTEQAAPSGLRSQVQFNVEVLCQELTANIVKLEKIQNNLQKLLENGD

SEQ ID NO: 29252 - protein, 416 aa, Homo sapiens
  REGION 1..416: note = ENSP00000426088
MSKVKRFPFFFSSEAENGVEEKKKACRSPTAQSPTPSVEADSPDQKKIISLWSKSSFDGASLASDKNDCKTESKNDPKTERKKSSSSSQYKANMHFHKLFLSVPTEEPLKQSFTCALQKEILYQGKLFVSENWICFHSKVFGKDTKISIPAFSVTLIKKTKTALLVPNALIIATVTDRYIFVSLLSRDSTYKLLKSVCGHLENTSVGNSPNPSSAENSFRADRPSSLPLDFNDEFSDLDGVVQQRRQDMEGYSSSGSQTPESENSRDFHATESQTVLNVSKGEAKPTRADAHVNRVPEGKAKSLPVQGLSETVGILHKVKSQKCPMLHHILIFYAIVVCALIISTFYMRYRINTLEEQLGLLTSIVDTHNTEQAAPSGLRSQVQFNVEVLCQELTANIVKLEKIQNNLQKLLENGD

SEQ ID NO: 29253 - protein, 440 aa, Homo sapiens
  REGION 1..440: note = ENSP00000441876
MWKTQSLRKCSGRGRANLAQPTQRLRMVWRRKRKPAGRQQPNPLPHLWRRTPQTRRKSLAYAHIFSPNLCFIQDQESKSSFDGASLASDKNDCKTESKNDPKTERKKSSSSSQYKANMHFHKLFLSVPTEEPLKQSFTCALQKEILYQGKLFVSENWICFHSKVFGKDTKISIPAFSVTLIKKTKTALLVPNALIIATVTDRYIFVSLLSRDSTYKLLKSVCGHLENTSVGNSPNPSSAENSFRADRPSSLPLDFNDEFSDLDGVVQQRRQDMEGYSSSGSQTPESENSRDFHATESQTVLNVSKGEAKPTRADAHVNRVPEGKAKSLPVQGLSETVGILHKVKSQKCPMLHHILIFYAIVVCALIISTFYMRYRINTLEEQLGLLTSIVDTHNTEQAAPSGLRSQVQFNVEVLCQELTANIVKLEKIQNNLQKLLENGD

SEQ ID NO: 29254 - protein, 328 aa, Homo sapiens
  REGION 1..328: note = ENSP00000444049
MYKANMHFHKLFLSVPTEEPLKQSFTCALQKEILYQGKLFVSENWICFHSKVFGKDTKISIPAFSVTLIKKTKTALLVPNALIIATVTDRYIFVSLLSRDSTYKLLKSVCGHLENTSVGNSPNPSSAENSFRADRPSSLPLDFNDEFSDLDGVVQQRRQDMEGYSSSGSQTPESENSRDFHATESQTVLNVSKGEAKPTRADAHVNRVPEGKAKSLPVQGLSETVGILHKVKSQKCPMLHHILIFYAIVVCALIISTFYMRYRINTLEEQLGLLTSIVDTHNTEQAAPSGLRSQVQFNVEVLCQELTANIVKLEKIQNNLQKLLENGD

SEQ ID NO: 29255 - protein, 86 aa, Homo sapiens
  REGION 1..86: note = ENSP00000409784
MLRRLDKIRFRGHKRDDFLDLAESPNASDTECSDEIPLKVPRTSPRDSEELRDPAGPGTLIMATGVQDFNRTEFDRLNEIKGHLEI

SEQ ID NO: 29256 - protein, 33 aa, Homo sapiens
  REGION 1..33: note = ENSP00000408042
MLRRLDKIRFRGHKRDDFLDLAESPNASDTECS

SEQ ID NO: 29257 - protein, 578 aa, Homo sapiens
  REGION 1..578: note = ENSP00000385689
MLRRLDKIRFRGHKRDDFLDLAESPNASDTECSDEIPLKVPRTSPRDSEELRDPAGPGTLIMATGVQDFNRTEFDRLNEIKGHLEIALLEKHFLQEELRKLREETNAEMLRQELDRERQRRMELEQKVQEVLKARTEEQMAQQPPKGQAQASNGAERRSQGLSSRLQKWFYERFGEYVEDFRFQPEENTVETEEPLSARRLTENMRRLKRGAKPVTNFVKNLSALSDWYSVYTSAIAFTVYMNAVWHGWAIPLFLFLAILRLSLNYLIARGWRIQWSIVPEVSEPVEPPKEDLTVSEKFQLVLDVAQKAQNLFGKMADILEKIKNLFMWVQPEITQKLYVALWAAFLASCFFPYRLVGLAVGLYAGIKFFLIDFIFKRCPRLRAKYDTPYIIWRSLPTDPQLKERSSAAVSRRLQTTSSRSYVPSAPAGLGKEEDAGRFHSTKKGNFHEIFNLTENERPLAVCENGWRCCLINRDRKMPTDYIRNGVLYVTENYLCFESSKSGSSKRNKVIKLVDITDIQKYKVLSVLPGSGMGIAVSTPSTQKPLVFGAMVHRDEAFETILSQYIKITSAAASGGDS

SEQ ID NO: 29258 - protein, 223 aa, Homo sapiens
  REGION 1..223: note = ENSP00000397501
  VARIANT 1: note = Any amino acid
XEDFRFQPEENTVETEEPLSARRLTENMRRLKRGAKPVTNFVKNLSALSDWYSVYTSAIAFTVYMNAVWHGWAIPLFLFLAILRLSLNYLIARGWRIQWSIVPEVSEPVEPPKEDLTVSEKFQLVLDVAQKAQNLFGKMADILEKIKNLFMWVQPEITQKLYVALWAAFLASCFFPYRLVGLAVVLTRDLSLEGQRLPAPSKDGPSWDLGSLELSCPSWVGHH

SEQ ID NO: 29259 - protein, 101 aa, Homo sapiens
  REGION 1..101: note = ENSP00000385851
MPTDYIRNGVLYVTENYLCFESSKSGSSKRNKVIKLVDITDIQKYKVLSVLPGSGMGIAVSTPSTQKPLVFGAMVHRDEAFETILSQYIKITSAAASGGDS

SEQ ID NO: 29260 - protein, 578 aa, Homo sapiens; identical to SEQ ID NO: 29257
  REGION 1..578: note = ENSP00000354313

SEQ ID NO: 29261 - protein, 536 aa, Homo sapiens
  REGION 1..536: note = ENSP00000385189
MNASLESLYSACSMQSDTVPLLQNGQHARSQPRASGPPRSIQPQVSPRQRVQRSQPVHILAVRRLQEEDQQFRTSSLPAIPNPFPELCGPGSPPVLTPGSLPPSQAAAKQDVKVFSEDGTSKVVEILADMTARDLCQLLVYKSHCVDDNSWTLVEHHPHLGLERCLEDHELVVQVESTMASESKFLFRKNYAKYEFFKNPMNFFPEQMVTWCQQSNGSQTQLLQNFLNSSSCPEIQGFLHVKELGKKSWKKLYVCLRRSGLYCSTKGTSKEPRHLQLLADLEDSNIFSLIAGRKQYNAPTDHGLCIKPNKVRNETKELRLLCAEDEQTRTCWMTAFRLLKYGMLLYQNYRIPQQRKALLSPFSTPVRSVSENSLVAMDFSGQTGRVIENPAEAQSAALEEGHAWRKRSTRMNILGSQSPLHPSTLSTVIHRTQHWFHGRISREESHRIIKQQGLVDGLFLLRDSQSNPKAFVLTLCHHQKIKNFQILPCEDDGQTFFSLDDGNTKFSDLIQLVDFYQLNKGVLPCKLKHHCIRVAL

SEQ ID NO: 29262 - protein, 588 aa, Homo sapiens
  REGION 1..588: note = ENSP00000385544
MQAAGPLFRSKDKVEQTPRSQQDPAGPGLPAQSDRLANHQEDDVDLEALVNDMNASLESLYSACSMQSDTVPLLQNGQHARSQPRASGPPRSIQPQVSPRQRVQRSQPVHILAVRRLQEEDQQFRTSSLPAIPNPFPELCGPGSPPVLTPGSLPPSQAAAKQDVKVFSEDGTSKVVEILADMTARDLCQLLVYKSHCVDDNSWTLVEHHPHLGLERCLEDHELVVQVESTMASESKFLFRKNYAKYEFFKNPMNFFPEQMVTWCQQSNGSQTQLLQNFLNSSSCPEIQGFLHVKELGKKSWKKLYVCLRRSGLYCSTKGTSKEPRHLQLLADLEDSNIFSLIAGRKQYNAPTDHGLCIKPNKVRNETKELRLLCAEDEQTRTCWMTAFRLLKYGMLLYQNYRIPQQRKALLSPFSTPVRSVSENSLVAMDFSGQTGRVIENPAEAQSAALEEGHAWRKRSTRMNILGSQSPLHPSTLSTVIHRTQHWFHGRISREESHRIIKQQGLVDGLFLLRDSQSNPKAFVLTLCHHQKIKNFQILPCEDDGQTFFSLDDGNTKFSDLIQLVDFYQLNKGVLPCKLKHHCIRVAL

SEQ ID NO: 29263 - protein, 536 aa, Homo sapiens; identical to SEQ ID NO: 29261
  REGION 1..536: note = ENSP00000385366

SEQ ID NO: 29264 - protein, 548 aa, Homo sapiens
  REGION 1..548: note = ENSP00000349818
MALAGCPDSFLHHPYYQDKVEQTPRSQQDPAGPGLPAQSDRLANHQEDDVDLEALVNDMNASLESLYSACSMQSDTVPLLQNGQHARSQPRASGPPRSIQPQVSPRQRVQRSQPVHILAVRRLQEEDQQFRTSSLPAIPNPFPELCGPGSPPVLTPGSLPPSQAAAKQDVKVFSEDGTSKVVEILADMTARDLCQLLVYKSHCVDDNSWTLVEHHPHLGLERCLEDHELVVQVESTMASESKFLFRKNYAKYEFFKNPMNFFPEQMVTWCQQSNGSQTQLLQEPRHLQLLADLEDSNIFSLIAGRKQYNAPTDHGLCIKPNKVRNETKELRLLCAEDEQTRTCWMTAFRLLKYGMLLYQNYRIPQQRKALLSPFSTPVRSVSENSLVAMDFSGQTGRVIENPAEAQSAALEEGHAWRKRSTRMNILGSQSPLHPSTLSTVIHRTQHWFHGRISREESHRIIKQQGLVDGLFLLRDSQSNPKAFVLTLCHHQKIKNFQILPCEDDGQTFFSLDDGNTKFSDLIQLVDFYQLNKGVLPCKLKHHCIRVAL

SEQ ID NO: 29265 - protein, 536 aa, Homo sapiens; identical to SEQ ID NO: 29261
  REGION 1..536: note = ENSP00000385046

SEQ ID NO: 29266 - protein, 594 aa, Homo sapiens
  REGION 1..594: note = ENSP00000385770
MALAGCPDSFLHHPYYQDKVEQTPRSQQDPAGPGLPAQSDRLANHQEDDVDLEALVNDMNASLESLYSACSMQSDTVPLLQNGQHARSQPRASGPPRSIQPQVSPRQRVQRSQPVHILAVRRLQEEDQQFRTSSLPAIPNPFPELCGPGSPPVLTPGSLPPSQAAAKQDVKVFSEDGTSKVVEILADMTARDLCQLLVYKSHCVDDNSWTLVEHHPHLGLERCLEDHELVVQVESTMASESKFLFRKNYAKYEFFKNPMNFFPEQMVTWCQQSNGSQTQLLQNFLNSSSCPEIQGFLHVKELGKKSWKKLYVCLRRSGLYCSTKGTSKEPRHLQLLADLEDSNIFSLIAGRKQYNAPTDHGLCIKPNKVRNETKELRLLCAEDEQTRTCWMTAFRLLKYGMLLYQNYRIPQQRKALLSPFSTPVRSVSENSLVAMDFSGQTGRVIENPAEAQSAALEEGHAWRKRSTRMNILGSQSPLHPSTLSTVIHRTQHWFHGRISREESHRIIKQQGLVDGLFLLRDSQSNPKAFVLTLCHHQKIKNFQILPCEDDGQTFFSLDDGNTKFSDLIQLVDFYQLNKGVLPCKLKHHCIRVAL

SEQ ID NO: 29267 - protein, 536 aa, Homo sapiens; identical to SEQ ID NO: 29261
  REGION 1..536: note = ENSP00000385748

SEQ ID NO: 29268 - protein, 108 aa, Homo sapiens
  REGION 1..108: note = ENSP00000410920
LADMTARDLCQLLVYKSHCVDDNSWTLVEHHPHLGLERCLEDHELVVQVESTMASESKFLFRKNYAKYEFFKNPMNFFPEQMVTWCQQSNGSQTQLLQVLGHNRSLLK

SEQ ID NO: 29269 - protein, 114 aa, Homo sapiens
  REGION 1..114: note = ENSP00000413023
MQAAGPLFRSKDKVEQTPRSQQDPAGPGLPAQSDRLANHQEDDVDLEALVNDMNASLESLYSACSMQSDTVPLLQNGQHARSQPRASGPPRSIQPQVSPRQRVQRSQPVHILAV

SEQ ID NO: 29270 - protein, 594 aa, Homo sapiens; identical to SEQ ID NO: 29266
  REGION 1..594: note = ENSP00000381793

SEQ ID NO: 29271 - protein, 536 aa, Homo sapiens; identical to SEQ ID NO: 29261
  REGION 1..536: note = ENSP00000338543

SEQ ID NO: 29272 - protein, 536 aa, Homo sapiens; identical to SEQ ID NO: 29261
  REGION 1..536: note = ENSP00000381790

SEQ ID NO: 29273 - protein, 540 aa, Homo sapiens
  REGION 1..540: note = ENSP00000263915
MTTSLQDGQSAASRAAARDSPLAAQVCGAAQGRGDAHDLAPAPWLHARALLPLPDGTRGCAADRRKKKDLDVPEMPSIPNPFPELCCSPFTSVLSADLFPKANSRKKQVIKVYSEDETSRALDVPSDITARDVCQLLILKNHYIDDHSWTLFEHLPHIGVERTIEDHELVIEVLSNWGIEEENKLYFRKNYAKYEFFKNPMYFFPEHMVSFATETNGEISPTQILQMFLSSSTYPEIHGFLHAKEQGKKSWKKIYFFLRRSGLYFSTKGTSKEPRHLQFFSEFGNSDIYVSLAGKKKHGAPTNYGFCFKPNKAGGPRDLKMLCAEEEQSRTCWVTAIRLLKYGMQLYQNYMHPYQGRSGCSSQSISPMRSISENSLVAMDFSGQKSRVIENPTEALSVAVEEGLAWRKKGCLRLGTHGSPTASSQSSATNMAIHRSQPWFHHKISRDEAQRLIIQQGLVDGVFLVRDSQSNPKTFVLSMSHGQKIKHFQIIPVEDDGEMFHTLDDGHTRFTDLIQLVEFYQLNKGVLPCKLKHYCARIAL

SEQ ID NO: 29274 - protein, 415 aa, Homo sapiens
  REGION 1..415: note = ENSP00000416786
MGRAPRAGRLPGIRRWPPRRKKKDLDVPEMPSIPNPFPELCCSPFTSVLSADLFPKANSRKKQVIKVYSEDETSRALDVPSDITARDVCQLLILKNHYIDDHSWTLFEHLPHIGVERTIEDHELVIEVLSNWGIEEENKLYFRKNYAKYEFFKNPMYFFPEHMVSFATETNGEISPTQILQMFLSSSTYPEIHGFLHAKEQGKKSWKKIYFFLRRSGLYFSTKGTSKEPRHLQFFSEFGNSDIYVSLAGKKKHGAPTNYGFCFKPNKAGGPRDLKMLCAEEEQSRTCWVTAIRLLKYGMQLYQNYMHPYQGRSGCSSQSISPMRSISENSLVAMDFSGQKSRVIENPTEALSVAVEEGLAWRKKGCLRLGTHGSPTASSQSSATNMAIHRSQPWFHHKISRDEAQRLIIQQGLVD

SEQ ID NO: 29275 - protein, 155 aa, Homo sapiens
  REGION 1..155: note = ENSP00000401702
MFSYCRRKKKDLDVPEMPSIPNPFPELCCSPFTSVLSADLFPKANSRKKQVIKVYSEDETSRALDVPSDITARDVCQLLILKNHYIDDHSWTLFEHLPHIGVERTIEDHELVIEVLSNWGIEEENKLYFRKNYAKYEFFKNPMYFFPEHMVSFAT

SEQ ID NO: 29276 - protein, 118 aa, Homo sapiens
  REGION 1..118: note = ENSP00000463416
MELDLSPPHLSSSPEDLCPAPGTPPGTPRPPDTPLPEEVKRSQPLLIPTTGRKLREEERRATSLPSIPNPFPELCSPPSQSPILGGPSSARGLLPRDASRPHSCAIPGAQVVKVYSED

SEQ ID NO: 29277 - protein, 532 aa, Homo sapiens
  REGION 1..532: note = ENSP00000310771
MELDLSPPHLSSSPEDLCPAPGTPPGTPRPPDTPLPEEVKRSQPLLIPTTGRKLREEERRATSLPSIPNPFPELCSPPSQSPILGGPSSARGLLPRDASRPHVVKVYSEDGACRSVEVAAGATARHVCEMLVQRAHALSDETWGLVECHPHLALERGLEDHESVVEVQAAWPVGGDSRFVFRKNFAKYELFKSSPHSLFPEKMVSSCLDAHTGISHEDLIQNFLNAGSFPEIQGFLQLRGSGRKLWKRFFCFLRRSGLYYSTKGTSKDPRHLQYVADVNESNVYVVTQGRKLYGMPTDFGFCVKPNKLRNGHKGLRIFCSEDEQSRTCWLAAFRLFKYGVQLYKNYQQAQSRHLHPSCLGSPPLRSASDNTLVAMDFSGHAGRVIENPREALSVALEEAQAWRKKTNHRLSLPMPASGTSLSAAIHRTQLWFHGRISREESQRLIGQQGLVDGLFLVRESQRNPQGFVLSLCHLQKVKHYLILPSEEEGRLYFSMDDGQTRFTDLLQLVEFHQLNRGILPCLLRHCCTRVAL

SEQ ID NO: 29278 - protein, 52 aa, Homo sapiens
  REGION 1..52: note = ENSP00000463126
MELDLSPPHLSSSPEDLCPAPGTPPGTPRPPDTPLPEEVCGGGSRCHSSPRV

SEQ ID NO: 29279 - protein, 532 aa, Homo sapiens; identical to SEQ ID NO: 29277
  REGION 1..532: note = ENSP00000377761

SEQ ID NO: 29280 - protein, 555 aa, Homo sapiens
  REGION 1..555: note = ENSP00000403459
MGKWRPGQGHTTGSVKPLSCSDAMELDLSPPHLSSSPEDLCPAPGTPPGTPRPPDTPLPEEVKRSQPLLIPTTGRKLREEERRATSLPSIPNPFPELCSPPSQSPILGGPSSARGLLPRDASRPHVVKVYSEDGACRSVEVAAGATARHVCEMLVQRAHALSDETWGLVECHPHLALERGLEDHESVVEVQAAWPVGGDSRFVFRKNFAKYELFKSSPHSLFPEKMVSSCLDAHTGISHEDLIQNFLNAGSFPEIQGFLQLRGSGRKLWKRFFCFLRRSGLYYSTKGTSKDPRHLQYVADVNESNVYVVTQGRKLYGMPTDFGFCVKPNKLRNGHKGLRIFCSEDEQSRTCWLAAFRLFKYGVQLYKNYQQAQSRHLHPSCLGSPPLRSASDNTLVAMDFSGHAGRVIENPREALSVALEEAQAWRKKTNHRLSLPMPASGTSLSAAIHRTQLWFHGRISREESQRLIGQQGLVDGLFLVRESQRNPQGFVLSLCHLQKVKHYLILPSEEEGRLYFSMDDGQTRFTDLLQLVEFHQLNRGILPCLLRHCCTRVAL

SEQ ID NO: 29281 - protein, 532 aa, Homo sapiens; identical to SEQ ID NO: 29277
  REGION 1..532: note = ENSP00000377759

SEQ ID NO: 29282 - protein, 447 aa, Homo sapiens
  REGION 1..447: note = ENSP00000377754
MELDLSPPHLSSSPEDLCPAPGTPPGTPRPPDTPLPEEVKRSQPLLIPTTGRKLREEERRATSLPSIPNPFPELCSPPSQSPILGGPSSARGLLPRDASRPHVVKVYSEDGACRSVEVAAGATARHVCEMLVQRAHALSDETWGLVECHPHLALERGLEDHESVVEVQAAWPVGGDSRFVFRKNFAKYELFKSSPHSLFPEKMVSSCLDAHTGISHEDLIQNFLNAGSFPEIQGFLQLRGSGRKLWKRFFCFLRRSGLYYSTKGTSKDPRHLQYVADVNESNVYVVTQGRKLYGMPTDFGFCVKPNKLRNGHKGLRIFCSEDEQSRTCWLAAFRLFKYGVQLYKNYQQAQSRHLHPSCLGSPPLRSASDNTLVAMDFSGHAGRVIENPREALSVALEEAQAWRKKTNHRLSLPMPASGTSLSAACSWSGRVSGTPRALSSLCATCRK

SEQ ID NO: 29283 - protein, 79 aa, Homo sapiens
  REGION 1..79: note = ENSP00000487278
MGNSYAGQLKTTRFEEVLHNSIEASLRSNNLVPRPIFSQLYLEAEQQLAALEGGSRVDNEEEEEEGEGGLETNGPPNPF

SEQ ID NO: 29284 - protein, 1949 aa, Homo sapiens
  REGION 1..1949: note = ENSP00000370896
MGNSYAGQLKTTRFEEVLHNSIEASLRSNNLVPRPIFSQLYLEAEQQLAALEGGSRVDNEEEEEEGEGGLETNGPPNPFQLHPLPEGCCTTDGFCQAGKDLRLVSISNEPMDVPAGFLLVGVKSPSLPDHLLVCAVDKRFLPDDNGHNALLGFSGNCVGCGKKGFCYFTEFSNHINLKLTTQPKKQKHLKYYLVRNAQGTLTKGPLICWKGSEFRSRQIPASTCSSSLFPALESTAAFPSEPVPGTNPSILMGAQQAGPASDHPSLNAAMGPAVFNGKDSPKCQQLAKNNLLALPRPSALGILSNSGPPKKRHKGWSPESPSAPDGGCPQGGGNRAKYESAGMSCVPQVGLVGPASVTFPVVASGEPVSVPDNLLKICKAKPVIFKGHGNFPYLCGNLNDVVVSPLLYTCYQNSQSVSRAYEQYGASAIQPISEEMQLLLTVYYLVQLAADQVPLMEDLEQIFLRSWRESHLTEIRQYQQAPPQPFPPAPSAAAPVTSAQLPWLASLAASSCNDSVHVIECAYSLAEGLSEMFRLLVEGKLAKTNYVVIICACRSAAIDSCIAVTGKYQARILSESLLTPAEYQKEVNYELVTGKVDSLGAFFSTLCPEGDIDILLDKFHQENQGHISSSLAASSVTKAASLDVSGTPVCTSYNLEPHSIRPFQLAVAQKLLSHVCSIADSSTQNLDLGSFEKVDFLICIPPSEVTYQQTLLHVWHSGVLLELGLKKEHMTKQRVEQYVLKLDTEAQTKFKAFLQNSFQNPHTLFVLIHDHAHWDLVSSTVHNLYSQSDPSVGLVDRLLNCREVKEAPNIVTLHVTSFPYALQTQHTLISPYNEIHWPASCSNGVDLYHENKKYFGLSEFIESTLSGHSLPLLRYDSSFEAMVTALGKRFPRLHSAVIRTFVLVQHYAAALMAVSGLPQMKNYTSVETLEITQNLLNSPKQCPCGHGLMVLLRVPCSPLAVVAYERLAHVRARLALEEHFEIILGSPSSGVTVGKHFVKQLRMWQKIEDVEWRPQTYLELEGLPCILIFSGMDPHGESLPRSLRYCDLRLINSSCLVRTALEQELGLAAYFVSNEVPLEKGARNEALESDAEKLSSTDNEDEELGTEGSTSEKRSPMKRERSRSHDSASSSLSSKASGSALGGESSAQPTALPQGEHARSPQPRGPAEEGRAPGEKQRPRASQGPPSAISRHSPGPTPQPDCSLRTGQRSVQVSVTSSCSQLSSSSGSSSSSVAPAAGTWVLQASQCSLTKACRQPPIVFLPKLVYDMVVSTDSSGLPKAASLLPSPSVMWASSFRPLLSKTMTSTEQSLYYRQWTVPRPSHMDYGNRAEGRVDGFHPRRLLLSGPPQIGKTGAYLQFLSVLSRMLVRLTEVDVYDEEEININLREESDWHYLQLSDPWPDLELFKKLPFDYIIHDPKYEDASLICSHYQGIKSEDRGMSRKPEDLYVRRQTARMRLSKYAAYNTYHHCEQCHQYMGFHPRYQLYESTLHAFAFSYSMLGEEIQLHFIIPKSKEHHFVFSQPGGQLESMRLPLVTDKSHEYIKSPTFTPTTGRHEHGLFNLYHAMDGASHLHVLVVKEYEMAIYKKYWPNHIMLVLPSIFNSAGVGAAHFLIKELSYHNLELERNRQEELGIKPQDIWPFIVISDDSCVMWNVVDVNSAGERSREFSWSERNVSLKHIMQHIEAAPDIMHYALLGLRKWSSKTRASEVQEPFSRCHVHNFIILNVDLTQNVQYNQNRFLCDDVDFNLRVHSAGLLLCRFNRFSVMKKQIVVGGHRSFHITSKVSDNSAAVVPAQYICAPDSKHTFLAAPAQLLLEKFLQHHSHLFFPLSLKNHDHPVLSVDCYLNLGSQISVCYVSSRPHSLNISCSDLLFSGLLLYLCDSFVGASFLKKFHFLKGATLCVICQDRSSLRQTVVRLELEDEWQFRLRDEFQTANAREDRPLFFLTGRHI

SEQ ID NO: 29285 - protein, 409 aa, Homo sapiens
  REGION 1..409: note = ENSP00000263834
MGNSYAGQLKTTRFEEVLHNSIEASLRSNNLVPRPIFSQLYLEAEQQLAALEGGSRVDNEEEEEEGEGGLETNGPPNPFQLHPLPEGCCTTDGFCQAGKDLRLVSISNEPMDVPAGFLLVGVKSPSLPDHLLVCAVDKRFLPDDNGHNALLGFSGNCVGCGKKGFCYFTEFSNHINLKLTTQPKKQKHLKYYLVRNAQGTLTKGPLICWKGSEFRSRQIPASTCSSSLFPALESTAAFPSEPVPGTNPSILMGAQQAGPASDHPSLNAAMGPAVFNGKDSPKCQQLAKNNLLALPRPSALGILSNSGPPKKRHKGWSPESPSAPDGGCPQGGGNRAKYESAGMSCVPQVGLVGPASVTFPVVASGEPVSVPDNLLKICKAKPVIFKVFVNGATQMVALGPAEPASPRSL

SEQ ID NO: 29286 - protein, 253 aa, Homo sapiens
  REGION 1..253: note = ENSP00000374475
MDVPAGFLLVGVKSPSLPDHLLVCAVDKRFLPDDNGHNALLGFSGNCVGCGKKGFCYFTEFSNHINLKLTTQPKKQKHLKYYLVRNAQGTLTKGPLICWKGSEFRSRQIPASTCSSSLFPALESTAAFPSEPVPGTNPSILMGAQQAGPASDHPSLNAAMGPAVFNGKDSPKCQQLAKNNLLALPRPSALGSSACPGRPGDPALLWAKARGGMGAAGLGPLSLLESDVASMRVRPGPQVPPESVGLGPGPGAL

SEQ ID NO: 29287 - protein, 457 aa, Homo sapiens
  REGION 1..457: note = ENSP00000370892
MGNSYAGQLKTTRFEEVLHNSIEASLRSNNLVPRPIFSQLYLEAEQQLAALEGGSRVDNEEEEEEGEGGLETNGPPNPFQLHPLPEGCCTTDGFCQAGKDLRLVSISNEPMDVPAGFLLVGVKSPSLPDHLLVCAVDKRFLPDDNGHNALLGFSGNCVGCGKKGFCYFTEFSNHINLKLTTQPKKQKHLKYYLVRNAQGTLTKGPLICWKGSEFRSRQIPASTCSSSLFPALESTAAFPSEPVPGTNPSILMGAQQAGPASDHPSLNAAMGPAVFNGKDSPKCQQLAKNNLLALPRPSALGILSNSGPPKKRHKGWSPESPSAPDGGCPQGGGNRAKYESAGMSCVPQVGLVGPASVTFPVVASGEPVSVPDNLLKICKAKPVIFKGHGNFPYLCGNLNDVVVSPLLYTCYQNSQSVSRAYEQYGASAIQPISEEMQLLLTVYYLVQLAHQIRNPDV

SEQ ID NO: 29288 - protein, 541 aa, Homo sapiens
  REGION 1..541: note = ENSP00000403886
MYGTVSCAQDWVPSRCCSSAGHGNFPYLCGNLNDVVVSPLLYTCYQNSQSVSRAYEQYGASAIQPISEEMQLLLTVYYLVQLAADQVPLMEDLEQIFLRSWRESHLTEIRQYQQAPPQPFPPAPSAAAPVTSAQLPWLASLAASSCNDSVHVIECAYSLAEGLSEMFRLLVEGKLAKTNYVVIICACRSAAIDSCIAVTGKYQARILSESLLTPAEYQKEVNYELVTGKVDSLGAFFSTLCPEGDIDILLDKFHQENQGHISSSLAASSVTKAASLDVSGTPVCTSYNLEPHSIRPFQLAVAQKLLSHVCSIADSSTQNLDLGSFEKVDFLICIPPSEVTYQQTLLHVWHSGVLLELGLKKEHMTKQRVEQYVLKLDTEAQTKFKAFLQNSFQNPHTLFVLIHDHAHWDLVSSTVHNLYSQSDPSVGLVDRLLNCREVKEAPNIVTLHVTSFPYALQTQHTLISPYNEIHWPASCSNGVDLYHENKKYFGLSEFIESTLSGHSLPLLRYDSSFEAMVTALGKRFPRLHSAVIRTFVLVQHY

SEQ ID NO: 29289 - protein, 947 aa, Homo sapiens
  REGION 1..947: note = ENSP00000379429
MWQKIEDVEWRPQTYLELEGLPCILIFSGMDPHGESLPRSLRYCDLRLINSSCLVRTALEQELGLAAYFVSNEVPLEKGARNEALESDAEKLSSTDNEDEELGTEGSTSEKRSPMKRERSRSHDSASSSLSSKASGSALGGESSAQPTALPQGEHARSPQPRGPAEEGRAPGEKQRPRASQGPPSAISRHSPGPTPQPDCSLRTGQRSVQVSVTSSCSQLSSSSGSSSSSVAPAAGTWVLQASQCSLTKACRQPPIVFLPKLVYDMVVSTDSSGLPKAASLLPSPSVMWASSFRPLLSKTMTSTEQSLYYRQWTVPRPSHMDYGNRAEGRVDGFHPRRLLLSGPPQIGKTGAYLQFLSVLSRMLVRLTEVDVYDEEEININLREESDWHYLQLSDPWPDLELFKKLPFDYIIHDPKYEDASLICSHYQGIKSEDRGMSRKPEDLYVRRQTARMRLSKYAAYNTYHHCEQCHQYMGFHPRYQLYESTLHAFAFSYSMLGEEIQLHFIIPKSKEHHFVFSQPGGQLESMRLPLVTDKSHEYIKSPTFTPTTGRHEHGLFNLYHAMDGASHLHVLVVKEYEMAIYKKYWPNHIMLVLPSIFNSAGVGAAHFLIKELSYHNLELERNRQEELGIKPQDIWPFIVISDDSCVMWNVVDVNSAGERSREFSWSERNVSLKHIMQHIEAAPDIMHYALLGLRKWSSKTRASEVQEPFSRCHVHNFIILNVDLTQNVQYNQNRFLCDDVDFNLRVHSAGLLLCRFNRFSVMKKQIVVGGHRSFHITSKVSDNSAAVVPAQYICAPDSKHTFLAAPAQLLLEKFLQHHSHLFFPLSLKNHDHPVLSVDCYLNLGSQISVCYVSSRPHSLNISCSDLLFSGLLLYLCDSFVGASFLKKFHFLKGATLCVICQDRSSLRQTVVRLELEDEWQFRLRDEFQTANAREDRPLFFLTGRHI

SEQ ID NO: 29290 - protein, 1949 aa, Homo sapiens; identical to SEQ ID NO: 29284
  REGION 1..1949: note = ENSP00000234142

SEQ ID NO: 29291 - protein, 1814 aa, Homo sapiens
  REGION 1..1814: note = ENSP00000269218
MGNSYAGQLKSARFEEALHNSIEASLRCSSVVPRPIFSQLYLDPDQHPFSSADVKPKVEDLDKDLVNRYTQNGSLDFSNNLTVNEMEDDEDDEEMSDSNSPPIPYSQKPAPEGSCTTDGFCQAGKDLRLVSLCMEQIDIPAGFLLVGAKSPNLPEHILVCAVDKRFLPDDHGKNALLGFSGNCIGCGERGFRYFTEFSNHINLKLTTQPKKQKHLKYYLVRSSQGVLSKGPLICWKECRSRQSSASCHSIKPSSSVSSTVTPENGTTNGYKSGFTQTDAANGNSSHGGKGSASSSTPAHTGNYSLSPRPSYASGDQATMFISGPPKKRHRGWYPGSPLPQPGLVVPVPTVRPLSRTEPLLSAPVPQTPLTGILQPRPIPAGETVIVPENLLSNSGVRPVILIGYGTLPYFYGNVGDIVVSPLLVNCYKIPQLENKDLEKLGLTGSQFLSVENMILLTIQYLVRLGQHQSRALAESMLTTSEFLKEISYELITGKVSFLASHFKTTSLGDDLDKLLEKMQQRRGDSVVTPFDGDLNECVSPQEAAAMIPTQNLDLDNETFHIYQPQLTVARKLLSQVCAIADSGSQSLDLGHFSKVDFIIIVPRSEVLVQQTLQRIRQSGVLVDLGLEENGTAHQRAEKYVVRLDNEIQTKFEVFMRRVKQNPYTLFVLVHDNSHVELTSVISGSLSHSEPSHGLADRVINCREVLEAFNLLVLQVSSFPYTLQTQQSRISSSNEVHWIQLDTGEDVGCEEKLYFGLSEYSKSLQWGITSPLLRCDETFEKMVNTLLERYPRLHSMVVRCYLLIQQYSEALMALTTMASLRDHSTPETLSIMDDLISSPGKNKSGRGHMLIIRVPSVQLAMLAKERLQEVRDKLGLQYRFEIILGNPATELSVATHFVARLKSWRGNEPEEWIPRTYQDLDGLPCIVILTGKDPLGETFPRSLKYCDLRLIDSSYLTRTALEQEVGLACCYVSKEVIRGPTVALDLSGKEQERAAVSENDSDELLIDLERPQSNSSAVTGTSGSIMENGVSSSSTADKSQKQSLTPSFQSPATSLGLDEGVSASSAGAGAGETLKQECDSLGPQMASSTTSKPSSSSSGPRTLPWPGQPIRGCRGPQAALPPVVILSKAAYSLLGSQKSGKLPSSSSLLPHADVAWVSSLRPLLNKDMSSEEQSLYYRQWTLARQHHADYSNQLDPASGTRNFHPRRLLLTGPPQVGKTGSYLQFLRILFRMLIRLLEVDVYDEEEINTDHNESSEVSQSEGEPWPDIESFSKMPFDVSVHDPKYSLMSLVYTEKLAGVKQEVIKESKVEEPRKRETVSIMLTKYAAYNTFHHCEQCRQYMDFTSASQMSDSTLHAFTFSSSMLGEEVQLYFIIPKSKESHFVFSKQGKHLESMRLPLVSDKNLNAVKSPIFTPSSGRHEHGLLNLFHAMEGISHLHLLVVKEYEMPLYRKYWPNHIMLVLPGMFNNAGVGAARFLIKELSYHNLELERNRLEELGIKRQCVWPFIVMMDDSCVLWNIHSVQEPSSQPMEVGVSSKNVSLKTVLQHIEATPKIVHYAILGIQKWSSKLTSQSLKAPFSRCHVHDFILLNTDLTQNVQYDFNRYFCEDADFNLRTNSSGLLICRFNNFSLMKKHVQVGGQRDFIIKPKIMVSESLAPILPLQYICAPDSEHTLLAAPAQFLLEKFLQHASYKLFPKAIHNFRSPVLAIDCYLNIGPEVAICYISSRPHSSNVNCEGVFFSGLLLYLCDSFVGADLKKFKFLKGATLCVICQDRSSLRQTIVRLELEDEWQFRLRDEFQTANSSDDKPLYFLTGRHV

SEQ ID NO: 29292 - protein, 1923 aa, Homo sapiens
  REGION 1..1923: note = ENSP00000464162
MGNSYAGQLKSARFEEALHNSIEASLRCSSVVPRPIFSQLYLDPDQHPFSSADVKPKVEDLDKDLVNRYTQNGSLDFSNNLTVNEMEDDEDDEEMSDSNSPPIPYSQKPAPEGSCTTDGFCQAGKDLRLVSLCMEQIDIPAGFLLVGAKSPNLPEHILVCAVDKRFLPDDHGKNALLGFSGNCIGCGERGFRYFTEFSNHINLKLTTQPKKQKHLKYYLVRSSQGVLSKGPLICWKECRSRQSSASCHSIKPSSSVSSTVTPENGTTNGYKSGFTQTDAANGNSSHGGKGSASSSTPAHTGNYSLSPRPSYASGDQATMFISGPPKKRHRGWYPGSPLPQPGLVVPVPTVRPLSRTEPLLSAPVPQTPLTGILQPRPIPAGETVIVPENLLSNSGVRPVILIGYGTLPYFYGNVGDIVVSPLLVNCYKIPQLENKDLEKLGLTGSQFLSVENMILLTIQYLVRLGPDQVPLREEFEQIMLKAMQEFTLRERALQIGAQCVPVSPGQLPWLARLIASVSQDLVHVVVTQNSLAEGISETLRTLSEMRHYQRLPDYVVVICASKIRGNEFCVVVLGQHQSRALAESMLTTSEFLKEISYELITGKVSFLASHFKTTSLGDDLDKLLEKMQQRRGDSVVTPFDGDLNECVSPQEAAAMIPTQNLDLDNETFHIYQPQLTVARKLLSQVCAIADSGSQSLDLGHFSKVDFIIIVPRSEVLVQQTLQRIRQSGVLVDLGLEENGTAHQRAEKYVVRLDNEIQTKFEVFMRRVKQNPYTLFVLVHDNSHVELTSVISGSLSHSEPSHGLADRVINCREVLEAFNLLVLQVSSFPYTLQTQQSRISSSNEVHWIQLDTGEDVGCEEKLYFGLSEYSKSLQWGITSPLLRCDETFEKMVNTLLERYPRLHSMVVRCYLLIQQYSEALMALTTMASLRDHSTPETLSIMDDLISSPGKNKSGRGHMLIIRVPSVQLAMLAKERLQEVRDKLGLQYRFEIILGNPATELSVATHFVARLKSWRGNEPEEWIPRTYQDLDGLPCIVILTGKDPLGETFPRSLKYCDLRLIDSSYLTRTALEQEVGLACCYVSKEVIRGPTVALDLSGKEQERAAVSENDSDELLIDLERPQSNSSAVTGTSGSIMENGVSSSSTADKSQKQSLTPSFQSPATSLGLDEGVSASSAGAGAGETLKQECDSLGPQMASSTTSKPSSSSSGPRTLPWPGQPIRGCRGPQAALPPVVILSKAAYSLLGSQKSGKLPSSSSLLPHADVAWVSSLRPLLNKDMSSEEQSLYYRQWTLARQHHADYSNQLDPASGTRNFHPRRLLLTGPPQVGKTGSYLQFLRILFRMLIRLLEVDVYDEEEINTDHNESSEVSQSEGEPWPDIESFSKMPFDVSVHDPKYSLMSLVYTEKLAGVKQEVIKESKVEEPRKRETVSIMLTKYAAYNTFHHCEQCRQYMDFTSASQMSDSTLHAFTFSSSMLGEEVQLYFIIPKSKESHFVFSKQGKHLESMRLPLVSDKNLNAVKSPIFTPSSGRHEHGLLNLFHAMEGISHLHLLVVKEYEMPLYRKYWPNHIMLVLPGMFNNAGVGAARFLIKELSYHNLELERNRLEELGIKRQCVWPFIVMMDDSCVLWNIHSVQEPSSQPMEVGVSSKNVSLKTVLQHIEATPKIVHYAILGIQKWSSKLTSQSLKAPFSRCHVHDFILLNTDLTQNVQYDFNRYFCEDADFNLRTNSSGLLICRFNNFSLMKKHVQVGGQRDFIIKPKIMVSESLAPILPLQYICAPDSEHTLLAAPAQFLLEKFLQHASYKLFPKAIHNFRSPVLAIDCYLNIGPEVAICYISSRPHSSNVNCEGVFFSGLLLYLCDSFVGADLKKFKFLKGATLCVICQDRSSLRQTIVRLELEDEWQFRLRDEFQTANSSDDKPLYFLTGRHV

SEQ ID NO: 29293 - protein, 200 aa, Homo sapiens
  REGION 1..200: note = ENSP00000463926
  VARIANT 1: note = Any amino acid
XKLTTQPKKQKHLKYYLVRSSQGVLSKGPLICWKECRSRQSSASCHSIKPSSSVSSTVTPENGTTNGYKSGFTQTDSPILSPANSAINLSGAQDLTRNNNVVKPLALSLQVVGKTFAADAANGNSSHGGKGSASSSTPAHTGNYSLSPRPSYASGDQATMFISGPPKKRHRGWYPGSPLPQPGLVVPVPTVRPLSRTEPL

SEQ ID NO: 29294 - protein, 175 aa, Homo sapiens
  REGION 1..175: note = ENSP00000463976
LPWLARLIASVSQDLVHVVVTQNSLAEGISETLRTLSEMRHYQRLPDYVVVICASKIRGNEFCVVVLGQHQSRALAESMLTTSEFLKEISYELITGKVSFLASHFKTTSLGDDLDKLLEKMQQRRGDSVVTPFDGDLNECVSPQEAAAMIPTQNLGNVISDQEEEVSPWDRHCKN

SEQ ID NO: 29295 - protein, 190 aa, Homo sapiens
  REGION 1..190: note = ENSP00000462152
  VARIANT 1: note = Any amino acid
XRQCVWPFIVMMDDSCVLWNIHSVQEPSSQPMEVGVSSKNVSLKTVLQHIEATPKIVHYAILGIQKWSSKLTSQSLKAPFSRCHVHDFILLNTDLTQNVQYDFNRYFCEDADFNLRTNSSGLLICRFNNFSLMKKHVQVGGQRDFIIKPKIMPSITSGVLCWPLTATLTLDQRWPYAISAPDPTPAMSTV

SEQ ID NO: 29296 - protein, 1923 aa, Homo sapiens; identical to SEQ ID NO: 29292
  REGION 1..1923: note = ENSP00000412060

SEQ ID NO: 29297 - protein, 93 aa, Homo sapiens
  REGION 1..93: note = ENSP00000387521
MTQEYDNKRPVLVLQNEALYPQRRSYTSEDEAWKSFLENPLTAATKAMMSINGDEDSAAALGLLYDYYKVPRERRSSTAKPEVEHPEPDHSKR

SEQ ID NO: 29298 - protein, 229 aa, Homo sapiens
  REGION 1..229: note = ENSP00000420654
MRKWTKKGNCKRPVLVLQNEALYPQRRSYTSEDEAWKSFLENPLTAATKAMMSINGDEDSAAALGLLYDYYKVPRERRSSTAKPEVEHPEPDHSKRNSIPIVTEQPLISAGENRVQVLKNVPFNIVLPHGNQLGIDKRGHLTAPDTTVTVSIATMPTHSIKTETQPHGFAVGIPPAVYHPEPTERVVVFDRNLNTDQFSSGAQAPNAQRRTPDSTFSETFKEGVQEEQL

SEQ ID NO: 29299 - protein, 618 aa, Homo sapiens
  REGION 1..618: note = ENSP00000324693
MTQEYDNKRPVLVLQNEALYPQRRSYTSEDEAWKSFLENPLTAATKAMMSINGDEDSAAALGLLYDYYKVPRERRSSTAKPEVEHPEPDHSKRNSIPIVTEQPLISAGENRVQVLKNVPFNIVLPHGNQLGIDKRGHLTAPDTTVTVSIATMPTHSIKTETQPHGFAVGIPPAVYHPEPTERVVVFDRNLNTDQFSSGAQAPNAQRRTPDSTFSETFKEGVQEVFFPSDLSLRMPGMNSEDYVFDSVSGNNFEYTLEASKSLRQKPGDSTMTYLNKGQFYPITLKEVSSSEGIHHPISKVRSVIMVVFAEDKSREDQLRHWKYWHSRQHTAKQRCIDIADYKESFNTISNIEEIAYNAISFTWDINDEAKVFISVNCLSTDFSSQKGVKGLPLNIQVDTYSYNNRSNKPVHRAYCQIKVFCDKGAERKIRDEERKQSKRKVSDVKVPLLPSHKRMDITVFKPFIDLDTQPVLFIPDVHFANLQRGTHVLPIASEELEGEGSVLKRGPYGTEDDFAVPPSTKLARIEEPKRVLLYVRKESEEVFDALMLKTPSLKGLMEAISDKYDVPHDKIGKIFKKCKKGILVNMDDNIVKHYSNEDTFQLQIEEAGGSYKLTLTEI

SEQ ID NO: 29300 - protein, 511 aa, Homo sapiens
  REGION 1..511: note = ENSP00000418275
MTQEYDNKRPVLVLQNEALYPQRRSYTSEDEAWKSFLENPLTAATKAMMSINGDEDSAAALGLLYDYYKVPRERRSSTAKPEVEHPEPDHSKRNSIPIVTEQPLISAGENRVQVLKNVPFNIVLPHGNQLGIDKRGHLTAPDTTVTVSIATMPTHSIKTETQPHGFAVGIPPAVYHPEPTERVVVFDRNLNTDQFSSGAQAPNAQRRTPDSTFSETFKEGVQEVFFPSDLSLRMPGMNSEDYVFDSVSGNNFEYTLEASKSLRQKPGDSTMTYLNKGQFYPITLKEVSSSEGIHHPISKVRSVIMVVFAEDKSREDQLRHWKYWHSRQHTAKQRCIDIADYKESFNTISNIEEIAYNAISFTWDINDEAKVFISVNCLSTDFSSQKGVKGLPLNIQVDTYSYNNRSNKPVHRAYCQIKVFCDKGAERKIRDEERKQSKRKGKCPDPSSQFLMLKCHCFPLTSEWISQFSNPSLISILSLSSSFLTCTLPTCSGALMSFPLPLKNWRVKALS

SEQ ID NO: 29301 - protein, 72 aa, Homo sapiens
  REGION 1..72: note = ENSP00000419831
MLKTPSLKGLMEAISDKYDVPHDKIGKIFKKCKKGILVNMDDNIVKHYSNEDTFQLQIEEAGGSYKLTLTEI

SEQ ID NO: 29302 - protein, 429 aa, Homo sapiens
  REGION 1..429: note = ENSP00000384209
MASLWESPQQCIILSPLSGWWFSIGISILTSSALVLKPQMLKGELQTRPSQRPSRKAFRRNNFEYTLEASKSLRQKPGDSTMTYLNKGQFYPITLKEVSSSEGIHHPISKVRSVIMVVFAEDKSREDQLRHWKYWHSRQHTAKQRCIDIADYKESFNTISNIEEIAYNAISFTWDINDEAKVFISVNCLSTDFSSQKGVKGLPLNIQVDTYSYNNRSNKPVHRAYCQIKVFCDKGAERKIRDEERKQSKRKVSDVKVPLLPSHKRMDITVFKPFIDLDTQPVLFIPDVHFANLQRGTHVLPIASEELEGEGSVLKRGPYGTEDDFAVPPSTKLARIEEPKRVLLYVRKESEEVFDALMLKTPSLKGLMEAISDKYDVPHDKIGKIFKKCKKGILVNMDDNIVKHYSNEDTFQLQIEEAGGSYKLTLTEI

SEQ ID NO: 29303 - protein, 906 aa, Homo sapiens
  REGION 1..906: note = ENSP00000285900
MQHIFAFFCTGFLGAVVGANFPNNIQIGGLFPNQQSQEHAAFRFALSQLTEPPKLLPQIDIVNISDSFEMTYRFCSQFSKGVYAIFGFYERRTVNMLTSFCGALHVCFITPSFPVDTSNQFVLQLRPELQDALISIIDHYKWQKFVYIYDADRGLSVLQKVLDTAAEKNWQVTAVNILTTTEEGYRMLFQDLEKKKERLVVVDCESERLNAILGQIIKLEKNGIGYHYILANLGFMDIDLNKFKESGANVTGFQLVNYTDTIPAKIMQQWKNSDARDHTRVDWKRPKYTSALTYDGVKVMAEAFQSLRRQRIDISRRGNAGDCLANPAVPWGQGIDIQRALQQVRFEGLTGNVQFNEKGRRTNYTLHVIEMKHDGIRKIGYWNEDDKFVPAATDAQAGGDNSSVQNRTYIVTTILEDPYVMLKKNANQFEGNDRYEGYCVELAAEIAKHVGYSYRLEIVSDGKYGARDPDTKAWNGMVGELVYGRADVAVAPLTITLVREEVIDFSKPFMSLGISIMIKKPQKSKPGVFSFLDPLAYEIWMCIVFAYIGVSVVLFLVSRFSPYEWHSEEFEEGRDQTTSDQSNEFGIFNSLWFSLGAFMQQGCDISPRSLSGRIVGGVWWFFTLIIISSYTANLAAFLTVERMVSPIESAEDLAKQTEIAYGTLEAGSTKEFFRRSKIAVFEKMWTYMKSAEPSVFVRTTEEGMIRVRKSKGKYAYLLESTMNEYIEQRKPCDTMKVGGNLDSKGYGIATPKGSALRNPVNLAVLKLNEQGLLDKLKNKWWYDKGECGSGGGDSKDKTSALSLSNVAGVFYILIGGLGLAMLVALIEFCYKSRSESKRMKGFCLIPQQSINEAIRTSTLPRNSGAGASSGGSGENGRVVSHDFPKSMQSIPCMSHSSGMPLGATGL

SEQ ID NO: 29304 - protein, 826 aa, Homo sapiens
  REGION 1..826: note = ENSP00000427920
MQHIFAFFCTGFLGAVVGANFPNNIQIGGLFPNQQSQEHAAFRFALSQLTEPPKLLPQIDIVNISDSFEMTYRCLSVLQKVLDTAAEKNWQVTAVNILTTTEEGYRMLFQDLEKKKERLVVVDCESERLNAILGQIIKLEKNGIGYHYILANLGFMDIDLNKFKESGANVTGFQLVNYTDTIPAKIMQQWKNSDARDHTRVDWKRPKYTSALTYDGVKVMAEAFQSLRRQRIDISRRGNAGDCLANPAVPWGQGIDIQRALQQVRFEGLTGNVQFNEKGRRTNYTLHVIEMKHDGIRKIGYWNEDDKFVPAATDAQAGGDNSSVQNRTYIVTTILEDPYVMLKKNANQFEGNDRYEGYCVELAAEIAKHVGYSYRLEIVSDGKYGARDPDTKAWNGMVGELVYGRADVAVAPLTITLVREEVIDFSKPFMSLGISIMIKKPQKSKPGVFSFLDPLAYEIWMCIVFAYIGVSVVLFLVSRFSPYEWHSEEFEEGRDQTTSDQSNEFGIFNSLWFSLGAFMQQGCDISPRSLSGRIVGGVWWFFTLIIISSYTANLAAFLTVERMVSPIESAEDLAKQTEIAYGTLEAGSTKEFFRRSKIAVFEKMWTYMKSAEPSVFVRTTEEGMIRVRKSKGKYAYLLESTMNEYIEQRKPCDTMKVGGNLDSKGYGIATPKGSALRNPVNLAVLKLNEQGLLDKLKNKWWYDKGECGSGGGDSKDKTSALSLSNVAGVFYILIGGLGLAMLVALIEFCYKSRSESKRMKGFCLIPQQSINEAIRTSTLPRNSGAGASSGGSGENGRVVSHDFPKSMQSIPCMSHSSGMPLGATGL

SEQ ID NO: 29305 - protein, 906 aa, Homo sapiens
  REGION 1..906: note = ENSP00000339343
MQHIFAFFCTGFLGAVVGANFPNNIQIGGLFPNQQSQEHAAFRFALSQLTEPPKLLPQIDIVNISDSFEMTYRFCSQFSKGVYAIFGFYERRTVNMLTSFCGALHVCFITPSFPVDTSNQFVLQLRPELQDALISIIDHYKWQKFVYIYDADRGLSVLQKVLDTAAEKNWQVTAVNILTTTEEGYRMLFQDLEKKKERLVVVDCESERLNAILGQIIKLEKNGIGYHYILANLGFMDIDLNKFKESGANVTGFQLVNYTDTIPAKIMQQWKNSDARDHTRVDWKRPKYTSALTYDGVKVMAEAFQSLRRQRIDISRRGNAGDCLANPAVPWGQGIDIQRALQQVRFEGLTGNVQFNEKGRRTNYTLHVIEMKHDGIRKIGYWNEDDKFVPAATDAQAGGDNSSVQNRTYIVTTILEDPYVMLKKNANQFEGNDRYEGYCVELAAEIAKHVGYSYRLEIVSDGKYGARDPDTKAWNGMVGELVYGRADVAVAPLTITLVREEVIDFSKPFMSLGISIMIKKPQKSKPGVFSFLDPLAYEIWMCIVFAYIGVSVVLFLVSRFSPYEWHSEEFEEGRDQTTSDQSNEFGIFNSLWFSLGAFMQQGCDISPRSLSGRIVGGVWWFFTLIIISSYTANLAAFLTVERMVSPIESAEDLAKQTEIAYGTLEAGSTKEFFRRSKIAVFEKMWTYMKSAEPSVFVRTTEEGMIRVRKSKGKYAYLLESTMNEYIEQRKPCDTMKVGGNLDSKGYGIATPKGSALRGPVNLAVLKLSEQGVLDKLKSKWWYDKGECGSKDSGSKDKTSALSLSNVAGVFYILIGGLGLAMLVALIEFCYKSRSESKRMKGFCLIPQQSINEAIRTSTLPRNSGAGASSGGSGENGRVVSHDFPKSMQSIPCMSHSSGMPLGATGL

SEQ ID NO: 29306 - protein, 837 aa, Homo sapiens
  REGION 1..837: note = ENSP00000427864
MTYRFCSQFSKGVYAIFGFYERRTVNMLTSFCGALHVCFITPSFPVDTSNQFVLQLRPELQDALISIIDHYKWQKFVYIYDADRGLSVLQKVLDTAAEKNWQVTAVNILTTTEEGYRMLFQDLEKKKERLVVVDCESERLNAILGQIIKLEKNGIGYHYILANLGFMDIDLNKFKESGANVTGFQLVNYTDTIPAKIMQQWKNSDARDHTRVDWKRPKYTSALTYDGVKVMAEAFQSLRRQRIDISRRGNAGDCLANPAVPWGQGIDIQRALQQVRFEGLTGNVQFNEKGRRTNYTLHVIEMKHDGIRKIGYWNEDDKFVPAATDAQAGGDNSSVQNRTYIVTTILEDPYVMLKKNANQFEGNDRYEGYCVELAAEIAKHVGYSYRLEIVSDGKYGARDPDTKAWNGMVGELVYGRADVAVAPLTITLVREEVIDFSKPFMSLGISIMIKKPQKSKPGVFSFLDPLAYEIWMCIVFAYIGVSVVLFLVSRFSPYEWHSEEFEEGRDQTTSDQSNEFGIFNSLWFSLGAFMQQGCDISPRSLSGRIVGGVWWFFTLIIISSYTANLAAFLTVERMVSPIESAEDLAKQTEIAYGTLEAGSTKEFFRRSKIAVFEKMWTYMKSAEPSVFVRTTEEGMIRVRKSKGKYAYLLESTMNEYIEQRKPCDTMKVGGNLDSKGYGIATPKGSALRNPVNLAVLKLNEQGLLDKLKNKWWYDKGECGSGGGDSKDKTSALSLSNVAGVFYILIGGLGLAMLVALIEFCYKSRSESKRMKGFCLIPQQSINEAIRTSTLPRNSGAGASSGGSGENGRVVSHDFPKSMQSIPCMSHSSGMPLGATGL

SEQ ID NO: 29307 - protein, 916 aa, Homo sapiens
  REGION 1..916: note = ENSP00000415569
MCCSTHLFQPLQLAGGLEWPWSNLLCFLTPVKLHPEVWGLFPNQQSQEHAAFRFALSQLTEPPKLLPQIDIVNISDSFEMTYRFCSQFSKGVYAIFGFYERRTVNMLTSFCGALHVCFITPSFPVDTSNQFVLQLRPELQDALISIIDHYKWQKFVYIYDADRGLSVLQKVLDTAAEKNWQVTAVNILTTTEEGYRMLFQDLEKKKERLVVVDCESERLNAILGQIIKLEKNGIGYHYILANLGFMDIDLNKFKESGANVTGFQLVNYTDTIPAKIMQQWKNSDARDHTRVDWKRPKYTSALTYDGVKVMAEAFQSLRRQRIDISRRGNAGDCLANPAVPWGQGIDIQRALQQVRFEGLTGNVQFNEKGRRTNYTLHVIEMKHDGIRKIGYWNEDDKFVPAATDAQAGGDNSSVQNRTYIVTTILEDPYVMLKKNANQFEGNDRYEGYCVELAAEIAKHVGYSYRLEIVSDGKYGARDPDTKAWNGMVGELVYGRADVAVAPLTITLVREEVIDFSKPFMSLGISIMIKKPQKSKPGVFSFLDPLAYEIWMCIVFAYIGVSVVLFLVSRFSPYEWHSEEFEEGRDQTTSDQSNEFGIFNSLWFSLGAFMQQGCDISPRSLSGRIVGGVWWFFTLIIISSYTANLAAFLTVERMVSPIESAEDLAKQTEIAYGTLEAGSTKEFFRRSKIAVFEKMWTYMKSAEPSVFVRTTEEGMIRVRKSKGKYAYLLESTMNEYIEQRKPCDTMKVGGNLDSKGYGIATPKGSALRGPVNLAVLKLSEQGVLDKLKSKWWYDKGECGSKDSGSKDKTSALSLSNVAGVFYILIGGLGLAMLVALIEFCYKSRSESKRMKGFCLIPQQSINEAIRTSTLPRNSGAGASSGGSGENGRVVSHDFPKSMQSIPCMSHSSGMPLGATGL

SEQ ID NO: 29308 - protein, 916 aa, Homo sapiens
  REGION 1..916: note = ENSP00000428994
MCCSTHLFQPLQLAGGLEWPWSNLLCFLTPVKLHPEVWGLFPNQQSQEHAAFRFALSQLTEPPKLLPQIDIVNISDSFEMTYRFCSQFSKGVYAIFGFYERRTVNMLTSFCGALHVCFITPSFPVDTSNQFVLQLRPELQDALISIIDHYKWQKFVYIYDADRGLSVLQKVLDTAAEKNWQVTAVNILTTTEEGYRMLFQDLEKKKERLVVVDCESERLNAILGQIIKLEKNGIGYHYILANLGFMDIDLNKFKESGANVTGFQLVNYTDTIPAKIMQQWKNSDARDHTRVDWKRPKYTSALTYDGVKVMAEAFQSLRRQRIDISRRGNAGDCLANPAVPWGQGIDIQRALQQVRFEGLTGNVQFNEKGRRTNYTLHVIEMKHDGIRKIGYWNEDDKFVPAATDAQAGGDNSSVQNRTYIVTTILEDPYVMLKKNANQFEGNDRYEGYCVELAAEIAKHVGYSYRLEIVSDGKYGARDPDTKAWNGMVGELVYGRADVAVAPLTITLVREEVIDFSKPFMSLGISIMIKKPQKSKPGVFSFLDPLAYEIWMCIVFAYIGVSVVLFLVSRFSPYEWHSEEFEEGRDQTTSDQSNEFGIFNSLWFSLGAFMQQGCDISPRSLSGRIVGGVWWFFTLIIISSYTANLAAFLTVERMVSPIESAEDLAKQTEIAYGTLEAGSTKEFFRRSKIAVFEKMWTYMKSAEPSVFVRTTEEGMIRVRKSKGKYAYLLESTMNEYIEQRKPCDTMKVGGNLDSKGYGIATPKGSALRNPVNLAVLKLNEQGLLDKLKNKWWYDKGECGSGGGDSKDKTSALSLSNVAGVFYILIGGLGLAMLVALIEFCYKSRSESKRMKGFCLIPQQSINEAIRTSTLPRNSGAGASSGGSGENGRVVSHDFPKSMQSIPCMSHSSGMPLGATGL

SEQ ID NO: 29309 - protein, 144 aa, Homo sapiens
  REGION 1..144: note = ENSP00000479607
MARQKKMGQSVLRAVFFLVLGLLGHSHGGFPNTISIGGLFMRNTVQEHSAFRFAVQLYNTNQNTTEKPFHLNYHVDHLDSSNSFSVTNACPAERDYLPWPGSIRENNWTALPCCKDHGLLHLKCSPGGARQNWAYCIWGVTGEL

SEQ ID NO: 29310 - protein, 144 aa, Homo sapiens; identical to SEQ ID NO: 29309
  REGION 1..144: note = ENSP00000478758

SEQ ID NO: 29311 - protein, 894 aa, Homo sapiens
  REGION 1..894: note = ENSP00000446440
MARQKKMGQSVLRAVFFLVLGLLGHSHGGFPNTISIGGLFMRNTVQEHSAFRFAVQLYNTNQNTTEKPFHLNYHVDHLDSSNSFSVTNAFCSQFSRGVYAIFGFYDQMSMNTLTSFCGALHTSFVTPSFPTDADVQFVIQMRPALKGAILSLLGHYKWEKFVYLYDTERGFSILQAIMEAAVQNNWQVTARSVGNIKDVQEFRRIIEEMDRRQEKRYLIDCEVERINTILEQVVILGKHSRGYHYMLANLGFTDILLERVMHGGANITGFQIVNNENPMVQQFIQRWVRLDEREFPEAKNAPLKYTSALTHDAILVIAEAFRYLRRQRVDVSRRGSAGDCLANPAVPWSQGIDIERALKMVQVQGMTGNIQFDTYGRRTNYTIDVYEMKVSGSRKAGYWNEYERFVPFSDQQISNDSASSENRTIVVTTILESPYVMYKKNHEQLEGNERYEGYCVDLAYEIAKHVRIKYKLSIVGDGKYGARDPETKIWNGMVGELVYGRADIAVAPLTITLVREEVIDFSKPFMSLGISIMIKKPQKSKPGVFSFLDPLAYEIWMCIVFAYIGVSVVLFLVSRFSPYEWHLEDNNEEPRDPQSPPDPPNEFGIFNSLWFSLGAFMQQGCDISPRSLSGRIVGGVWWFFTLIIISSYTANLAAFLTVERMVSPIESAEDLAKQTEIAYGTLDSGSTKEFFRRSKIAVYEKMWSYMKSAEPSVFTKTTADGVARVRKSKGKFAFLLESTMNEYIEQRKPCDTMKVGGNLDSKGYGVATPKGSALRNAVNLAVLKLNEQGLLDKLKNKWWYDKGECGSGGGDSKDKTSALSLSNVAGVFYILVGGLGLAMMVALIEFCYKSRAESKRMKLTKNTQNFKPAPATNTQNYATYREGYNVYGTESVKI

SEQ ID NO: 29312 - protein, 894 aa, Homo sapiens
  REGION 1..894: note = ENSP00000478489
MARQKKMGQSVLRAVFFLVLGLLGHSHGGFPNTISIGGLFMRNTVQEHSAFRFAVQLYNTNQNTTEKPFHLNYHVDHLDSSNSFSVTNAFCSQFSRGVYAIFGFYDQMSMNTLTSFCGALHTSFVTPSFPTDADVQFVIQMRPALKGAILSLLGHYKWEKFVYLYDTERGFSILQAIMEAAVQNNWQVTARSVGNIKDVQEFRRIIEEMDRRQEKRYLIDCEVERINTILEQVVILGKHSRGYHYMLANLGFTDILLERVMHGGANITGFQIVNNENPMVQQFIQRWVRLDEREFPEAKNAPLKYTSALTHDAILVIAEAFRYLRRQRVDVSRRGSAGDCLANPAVPWSQGIDIERALKMVQVQGMTGNIQFDTYGRRTNYTIDVYEMKVSGSRKAGYWNEYERFVPFSDQQISNDSASSENRTIVVTTILESPYVMYKKNHEQLEGNERYEGYCVDLAYEIAKHVRIKYKLSIVGDGKYGARDPETKIWNGMVGELVYGRADIAVAPLTITLVREEVIDFSKPFMSLGISIMIKKPQKSKPGVFSFLDPLAYEIWMCIVFAYIGVSVVLFLVSRFSPYEWHLEDNNEEPRDPQSPPDPPNEFGIFNSLWFSLGAFMQQGCDISPRSLSGRIVGGVWWFFTLIIISSYTANLAAFLTVERMVSPIESAEDLAKQTEIAYGTLDSGSTKEFFRRSKIAVYEKMWSYMKSAEPSVFTKTTADGVARVRKSKGKFAFLLESTMNEYIEQRKPCDTMKVGGNLDSKGYGVATPKGSALRTPVNLAVLKLSEQGILDKLKNKWWYDKGECGAKDSGSKDKTSALSLSNVAGVFYILVGGLGLAMMVALIEFCYKSRAESKRMKLTKNTQNFKPAPATNTQNYATYREGYNVYGTESVKI

SEQ ID NO: 29313 - protein, 894 aa, Homo sapiens; identical to SEQ ID NO: 29311
  REGION 1..894: note = ENSP00000481554

SEQ ID NO: 29314 - protein, 824 aa, Homo sapiens
  REGION 1..824: note = ENSP00000481875
MARQKKMGQSVLRAVFFLVLGLLGHSHGGFPNTISIGGLFMRNTVQEHSAFRFAVQLYNTNQNTTEKPFHLNYHVDHLDSSNSFSVTNAFCSQFSRGVYAIFGFYDQMSMNTLTSFCGALHTSFVTPSFPTDADVQFVIQMRPALKGAILSLLGHYKWEKFVYLYDTERGFSILQAIMEAAVQNNWQVTARSVGNIKDVQEFRRIIEEMDRRQEKRYLIDCEVERINTILEQVVILGKHSRGYHYMLANLGFTDILLERVMHGGANITGFQIVNNENPMVQQFIQRWVRLDEREFPEAKNAPLKYTSALTHDAILVIAEAFRYLRRQRVDVSRRGSAGDCLANPAVPWSQGIDIERALKMVQVQGMTGNIQFDTYGRRTNYTIDVYEMKVSGSRKAGYWNEYERFVPFSDQQISNDSASSENRTIVVTTILESPYVMYKKNHEQLEGNERYEGYCVDLAYEIAKHVRIKYKLSIVGDGKYGARDPETKIWNGMVGELVYGRADIAVAPLTITLVREEVIDFSKPFMSLGISIMIKKPQKSKPGVFSFLDPLAYEIWMCIVFAYIGVSVVLFLVSRFSPYEWHLEDNNEEPRDPQSPPDPPNEFGIFNSLWFSLGAFMQQGCDISPRSLSGRIVGGVWWFFTLIIISSYTANLAAFLTVERMVSPIESAEDLAKQTEIAYGTLDSGSTKEFFRRSKIAVYEKMWSYMKSAEPSVFTKTTADGVARVRKSKGKFAFLLESTMNEYIEQRKPCDTMKVGGNLDSKGYGVATPKGSALRNAVNLAVLKLNEQGLLDKLKNKWWYDKGECGSGGGDSKNACKPCSIETQ

SEQ ID NO: 29315 - protein, 1009 aa, Homo sapiens
  REGION 1..1009: note = ENSP00000330148
MEALTLWLLPWICQCVSVRADSIIHIGAIFEENAAKDDRVFQLAVSDLSLNDDILQSEKITYSIKVIEANNPFQAVQEACDLMTQGILALVTSTGCASANALQSLTDAMHIPHLFVQRNPGGSPRTACHLNPSPDGEAYTLASRPPVRLNDVMLRLVTELRWQKFVMFYDSEYDIRGLQSFLDQASRLGLDVSLQKVDKNISHVFTSLFTTMKTEELNRYRDTLRRAILLLSPQGAHSFINEAVETNLASKDSHWVFVNEEISDPEILDLVHSALGRMTVVRQIFPSAKDNQKCTRNNHRISSLLCDPQEGYLQMLQISNLYLYDSVLMLANAFHRKLEDRKWHSMASLNCIRKSTKPWNGGRSMLDTIKKGHITGLTGVMEFREDSSNPYVQFEILGTTYSETFGKDMRKLATWDSEKGLNGSLQERPMGSRLQGLTLKVVTVLEEPFVMVAENILGQPKRYKGFSIDVLDALAKALGFKYEIYQAPDGRYGHQLHNTSWNGMIGELISKRADLAISAITITPERESVVDFSKRYMDYSVGILIKKPEEKISIFSLFAPFDFAVWACIAAAIPVVGVLIFVLNRIQAVRAQSAAQPRPSASATLHSAIWIVYGAFVQQGGESSVNSMAMRIVMGSWWLFTLIVCSSYTANLAAFLTVSRMDNPIRTFQDLSKQVEMSYGTVRDSAVYEYFRAKGTNPLEQDSTFAELWRTISKNGGADNCVSSPSEGIRKAKKGNYAFLWDVAVVEYAALTDDDCSVTVIGNSISSKGYGIALQHGSPYRDLFSQRILELQDTGDLDVLKQKWWPHMGRCDLTSHASAQADGKSLKLHSFAGVFCILAIGLLLACLVAALELWWNSNRCHQETPKEDKEVNLEQVHRRMNSLMDEDIAHKQISPASIELSALEMGGLAPTQTLEPTREYQNTQLSVSTFLPEQSSHGTSRTLSSGPSSNLPLPLSSSATMPSMQCKHRSPNGGLFRQSPVKTPIPMSFQPVPGGVLPEALDTSHGTSI

SEQ ID NO: 29316 - protein, 755 aa, Homo sapiens
  REGION 1..755: note = ENSP00000433064
MEALTLWLLPWICQCVSVRADSIIHIGAIFEENAAKDDRVFQLAVSDLSLNDDILQSEKITYSIKVIEANNPFQAVQEACDLMTQGILALVTSTGCASANALQSLTDAMHIPHLFVQRNPGGSPRTACHLNPSPDGEAYTLASRPPVRLNDVMLRLVTELRWQKFVMFYDSEYDIRGLQSFLDQASRLGLDVSLQKVDKNISHVFTSLFTTMKTEELNRYRDTLRRAILLLSPQGAHSFINEAVETNLASKDSHWVFVNEEISDPEILDLVHSALGRMTVVRQIFPSAKDNQKCTRNNHRISSLLCDPQEGYLQMLQISNLYLYDSVLMLANAFHRKLEDRKWHSMASLNCIRKSTKPWNGGRSMLDTIKKGHITGLTGVMEFREDSSNPYVQFEILGTTYSETFGKDMRKLATWDSEKGLNGSLQERPMGSRLQGLTLKVVTVLEEPFVMVAENILGQPKRYKGFSIDVLDALAKALGFKYEIYQAPDGRYGHQLHNTSWNGMIGELISKRADLAISAITITPERESVVDFSKRYMDYSVGILIKKPEEKISIFSLFAPFDFAVWACIAAAIPVVGVLIFVLNRIQAVRAQSAAQPRPSASATLHSAIWIVYGAFVQQGGESSVNSMAMRIVMGSWWLFTLIVCSSYTANLAAFLTVSRMDNPIRTFQDLSKQVEMSYGTVRDSAVYEYFRAKGTNPLEQDSTFAELWRTISKNGGADNCVSSPSEGIRKDPGAAGHRGPGCAEAEVVAAHGPL

SEQ ID NO: 29317 - protein, 1007 aa, Homo sapiens
  REGION 1..1007: note = ENSP00000282020
MEVFPFLLVLSVWWSRTWDSANADSIIHIGAIFDESAKKDDEVFRTAVGDLNQNEEILQTEKITFSVTFVDGNNPFQAVQEACELMNQGILALVSSIGCTSAGSLQSLADAMHIPHLFIQRSTAGTPRSGCGLTRSNRNDDYTLSVRPPVYLHDVILRVVTEYAWQKFIIFYDSEYDIRGIQEFLDKVSQQGMDVALQKVENNINKMITTLFDTMRIEELNRYRDTLRRAILVMNPATAKSFITEVVETNLVAFDCHWIIINEEINDVDVQELVRRSIGRLTIIRQTFPVPQNISQRCFRGNHRISSTLCDPKDPFAQNMEISNLYIYDTVLLLANAFHKKLEDRKWHSMASLSCIRKNSKPWQGGRSMLETIKKGGVSGLTGELEFGENGGNPNVHFEILGTNYGEELGRGVRKLGCWNPVTGLNGSLTDKKLENNMRGVVLRVVTVLEEPFVMVSENVLGKPKKYQGFSIDVLDALSNYLGFNYEIYVAPDHKYGSPQEDGTWNGLVGELVFKRADIGISALTITPDRENVVDFTTRYMDYSVGVLLRRAEKTVDMFACLAPFDLSLWACIAGTVLLVGLLVYLLNWLNPPRLQMGSMTSTTLYNSMWFVYGSFVQQGGEVPYTTLATRMMMGAWWLFALIVISSYTANLAAFLTITRIESSIQSLQDLSKQTEIPYGTVLDSAVYEHVRMKGLNPFERDSMYSQMWRMINRSNGSENNVLESQAGIQKVKYGNYAFVWDAAVLEYVAINDPDCSFYTIGNTVADRGYGIALQHGSPYRDVFSQRILELQQNGDMDILKHKWWPKNGQCDLYSSVDTKQKGGALDIKSFAGVFCILAAGIVLSCFIAMLETWWNKRKGSRVPSKEDDKEIDLEHLHRRVNSLCTDDDSPHKQFSTSSIDLTPLDIDTLPTRQALEQISDFRNTHITTTTFIPEQIQTLSRTLSAKAASGFTFGNVPEHRTGPFRHRAPNGGFFRSPIKTMSSIPYQPTPTLGLNLGNDPDRGTSI

SEQ ID NO: 29318 - protein, 912 aa, Homo sapiens
  REGION 1..912: note = ENSP00000421257
MEVFPFLLVLSVWWSRTWDSANADSIIHIGAIFDESAKKDDEVFRTAVGDLNQNEEILQTEKITFSVTFVDGNNPFQAVQEDIRGIQEFLDKVSQQGMDVALQKVENNINKMITTLFDTMRIEELNRYRDTLRRAILVMNPATAKSFITEVVETNLVAFDCHWIIINEEINDVDVQELVRRSIGRLTIIRQTFPVPQNISQRCFRGNHRISSTLCDPKDPFAQNMEISNLYIYDTVLLLANAFHKKLEDRKWHSMASLSCIRKNSKPWQGGRSMLETIKKGGVSGLTGELEFGENGGNPNVHFEILGTNYGEELGRGVRKLGCWNPVTGLNGSLTDKKLENNMRGVVLRVVTVLEEPFVMVSENVLGKPKKYQGFSIDVLDALSNYLGFNYEIYVAPDHKYGSPQEDGTWNGLVGELVFKRADIGISALTITPDRENVVDFTTRYMDYSVGVLLRRAEKTVDMFACLAPFDLSLWACIAGTVLLVGLLVYLLNWLNPPRLQMGSMTSTTLYNSMWFVYGSFVQQGGEVPYTTLATRMMMGAWWLFALIVISSYTANLAAFLTITRIESSIQSLQDLSKQTEIPYGTVLDSAVYEHVRMKGLNPFERDSMYSQMWRMINRSNGSENNVLESQAGIQKVKYGNYAFVWDAAVLEYVAINDPDCSFYTIGNTVADRGYGIALQHGSPYRDVFSQRILELQQNGDMDILKHKWWPKNGQCDLYSSVDTKQKGGALDIKSFAGVFCILAAGIVLSCFIAMLETWWNKRKGSRVPSKEDDKEIDLEHLHRRVNSLCTDDDSPHKQFSTSSIDLTPLDIDTLPTRQALEQISDFRNTHITTTTFIPEQIQTLSRTLSAKAASGFTFGNVPEHRTGPFRHRAPNGGFFRSPIKTMSSIPYQPTPTLGLNLGNDPDRGTSI

SEQ ID NO: 29319 - protein, 163 aa, Homo sapiens
  REGION 1..163: note = ENSP00000422845
MNQGILALVSSIGCTSAGSLQSLADAMHIPHLFIQRSTAGTPRSGCGLTRSNRNDDYTLSVRPPVYLHDVILRVVTEYAWQKFIIFYDSEYDIRGIQEFLDKVSQQGMDVALQKVENNINKMITTLFDTMRIEELNRYRDTLRRAILVMNPATAKSFITEMSF

SEQ ID NO: 29320 - protein, 73 aa, Homo sapiens
  REGION 1..73: note = ENSP00000423331
MEISNLYIYDTVLLLANAFHKKLEDRKWHSMASLSCIRKNSKPWQGGRSMLETIKKGGVSGLTGELEFGENGG

SEQ ID NO: 29321 - protein, 62 aa, Homo sapiens
  REGION 1..62: note = ENSP00000425794
GGVSGLTGELEFGENGGNPNVHFEILGTNYGEELGRGVRKNERIRPQGSTGKIWPQVNFIFK

SEQ ID NO: 29322 - protein, 126 aa, Homo sapiens
  REGION 1..126: note = ENSP00000490775
  VARIANT 1: note = Any amino acid
XGDMDILKHKWWPKNGQCDLYSSVDTKQKGGALDIKSFAGVFCILAAGIVLSCFIAMLETWWNKRKGSRVPSKEASSLQNETTISERRNAWPLRPCLKLGSNTWRSQASSHSLHQSSQMGGPLDDP

SEQ ID NO: 29323 - protein, 926 aa, Homo sapiens
  REGION 1..926: note = ENSP00000483084
ACELMNQGILALVSSIGCTSAGSLQSLADAMHIPHLFIQRSTAGTPRSGCGLTRSNRNDDYTLSVRPPVYLHDVILRVVTEYAWQKFIIFYDSEYDIRGIQEFLDKVSQQGMDVALQKVENNINKMITTLFDTMRIEELNRYRDTLRRAILVMNPATAKSFITEVVETNLVAFDCHWIIINEEINDVDVQELVRRSIGRLTIIRQTFPVPQNISQRCFRGNHRISSTLCDPKDPFAQNMEISNLYIYDTVLLLANAFHKKLEDRKWHSMASLSCIRKNSKPWQGGRSMLETIKKGGVSGLTGELEFGENGGNPNVHFEILGTNYGEELGRGVRKLGCWNPVTGLNGSLTDKKLENNMRGVVLRVVTVLEEPFVMVSENVLGKPKKYQGFSIDVLDALSNYLGFNYEIYVAPDHKYGSPQEDGTWNGLVGELVFKRADIGISALTITPDRENVVDFTTRYMDYSVGVLLRRAEKTVDMFACLAPFDLSLWACIAGTVLLVGLLVYLLNWLNPPRLQMGSMTSTTLYNSMWFVYGSFVQQGGEVPYTTLATRMMMGAWWLFALIVISSYTANLAAFLTITRIESSIQSLQDLSKQTEIPYGTVLDSAVYEHVRMKGLNPFERDSMYSQMWRMINRSNGSENNVLESQAGIQKVKYGNYAFVWDAAVLEYVAINDPDCSFYTIGNTVADRGYGIALQHGSPYRDVFSQRILELQQNGDMDILKHKWWPKNGQCDLYSSVDTKQKGGALDIKSFAGVFCILAAGIVLSCFIAMLETWWNKRKGSRVPSKEDDKEIDLEHLHRRVNSLCTDDDSPHKQFSTSSIDLTPLDIDTLPTRQALEQISDFRNTHITTTTFIPEQIQTLSRTLSAKAASGFTFGNVPEHRTGPFRHRAPNGGFFRSPIKTMSSIPYQPTPTLGLNLGNDPDRGTSI

SEQ ID NO: 29324 - protein, 1020 aa, Homo sapiens
  REGION 1..1020: note = ENSP00000397887
MSCLGIFIPKKHRARFDEVVSQGLLGKLCRARRAQGAQRLRRSRSEERPERLLVSTRASAPPRRPDEPPPRRASLLVGGLAGPGGARRTVRVYKGNKSFGFTLRGHGPVWIESVLPGSPADNAALKSGDRILFLNGLDMRNCSHDKVVSMLQGSGAMPTLVVEEGLVPFASDSDSLDSPNPSSALTSLQWVAEILPSSIRVQGRTFSQQLEHLLTPPERYGVCRALESFFQHRNIDTLIVDVYPVLDTPAKQVLWQFIYQLLTYEEQELCQEKIACFLGYTAMTEPEPELDLESEPTPEPQPRSSLRASSMCRRSLRSQGLEAGLSCGPSECPEMPLPLIPGERQAGDGTSLPETPNPKMMSAVYAELESRLNSSFKGKMGTVSKSRASPPGPSPAVTTGPRTLSGVSWPSERLLPSPCYHPLCSGGLASPSSSESHPYASLDSSRAPSPQPGPGPICPDSPPSPDPTRPPSRRKLFTFSHPVRSRDTDRFLDVLSEQLGPRVTIVDDFLTPENDYEEMSFHDDQGSFVTNERSSASDCISSSEEGSSLTYSSISDHIPPPPLSPPPPPPLPFHDAKPSSRSSDGSRGPAQALAKPLTQLSHPVPPPPPPPLPPPVPCAPPMLSRGLGHRRSETSHMSVKRLRWEQVENSEGTIWGQLGEDSDYDKLSDMVKYLDLELHFGTQKPAKPVPGPEPFRKKEVVEILSHKKAYNTSILLAHLKLSPAELRQVLMSMEPRRLEPAHLAQLLLFAPDADEEQRYQAFREAPGRLSEPDQFVLQMLSVPEYKTRLRSLHFQATLQEKTEEIRGSLECLRQASLELKNSRKLAKILEFVLAMGNYLNDGQPKTNKTTGFKINFLTELNSTKTVDGKSTFLHILAKSLSQHFPELLGFAQDLPTVPLAAKVNQRALTSDLADLHGTISEIQDACQSISPSSEDKFAMVMSSFLETAQPALRALDGLQREAMEELGKALAFFGEDSKATTSEAFFGIFAEFMSKFERALSDLQAGEGLRSSGMVSPLAW

SEQ ID NO: 29325 - protein, 1027 aa, Homo sapiens
  REGION 1..1027: note = ENSP00000408364
MGKDQGFSRHFRIFIPKKHRARFDEVVSQGLLGKLCRARRAQGAQRLRRSRSEERPERLLVSTRASAPPRRPDEPPPRRASLLVGGLAGPGGARRTVRVYKGNKSFGFTLRGHGPVWIESVLPGSPADNAALKSGDRILFLNGLDMRNCSHDKVVSMLQGSGAMPTLVVEEGLVPFASDSDSLDSPNPSSALTSLQWVAEILPSSIRVQGRTFSQQLEHLLTPPERYGVCRALESFFQHRNIDTLIVDVYPVLDTPAKQVLWQFIYQLLTYEEQELCQEKIACFLGYTAMTEPEPELDLESEPTPEPQPRSSLRASSMCRRSLRSQGLEAGLSCGPSECPEMPLPLIPGERQAGDGTSLPETPNPKMMSAVYAELESRLNSSFKGKMGTVSKSRASPPGPSPAVTTGPRTLSGVSWPSERLLPSPCYHPLCSGGLASPSSSESHPYASLDSSRAPSPQPGPGPICPDSPPSPDPTRPPSRRKLFTFSHPVRSRDTDRFLDVLSEQLGPRVTIVDDFLTPENDYEEMSFHDDQGSFVTNERSSASDCISSSEEGSSLTYSSISDHIPPPPLSPPPPPPLPFHDAKPSSRSSDGSRGPAQALAKPLTQLSHPVPPPPPPPLPPPVPCAPPMLSRGLGHRRSETSHMSVKRLRWEQVENSEGTIWGQLGEDSDYDKLSDMVKYLDLELHFGTQKPAKPVPGPEPFRKKEVVEILSHKKAYNTSILLAHLKLSPAELRQVLMSMEPRRLEPAHLAQLLLFAPDADEEQRYQAFREAPGRLSEPDQFVLQMLSVPEYKTRLRSLHFQATLQEKTEEIRGSLECLRQASLELKNSRKLAKILEFVLAMGNYLNDGQPKTNKTTGFKINFLTELNSTKTVDGKSTFLHILAKSLSQHFPELLGFAQDLPTVPLAAKVNQRALTSDLADLHGTISEIQDACQSISPSSEDKFAMVMSSFLETAQPALRALDGLQREAMEELGKALAFFGEDSKATTSEAFFGIFAEFMSKFERALSDLQAGEGLRSSGMVSPLAW

SEQ ID NO: 29326 - protein, 1211 aa, Homo sapiens
  REGION 1..1211: note = ENSP00000397351
MATTATPATNQGWPEDFGFRLGGSGPCFVLEVAKGSSAHAGGLRPGDQILEVEGLAVGGLSRERLVRLARRCPRVPPSLGVLPAPDGGPGPGSGPAAPTTVLRAPRCGRGLALGRELLRLAGRKRPDAVHRERRRKAQEFSRKVDEILGDQPTAKEQVFAALKQFAAEQRVDDLVWTLTLALPREACGPLLDNLRIFIPKKHRARFDEVVSQGLLGKLCRARRAQGAQRLRRSRSEERPERLLVSTRASAPPRRPDEPPPRRASLLVGGLAGPGGARRTVRVYKGNKSFGFTLRGHGPVWIESVLPGSPADNAALKSGDRILFLNGLDMRNCSHDKVVSMLQGSGAMPTLVVEEGLVPFASDSDSLDSPNPSSALTSLQWVAEILPSSIRVQGRTFSQQLEHLLTPPERYGVCRALESFFQHRNIDTLIVDVYPVLDTPAKQVLWQFIYQLLTYEEQELCQEKIACFLGYTAMTAEPEPELDLESEPTPEPQPRSSLRASSMCRRSLRSQGLEAGLSCGPSECPEMPLPLIPGERQAGDGTSLPETPNPKMMSAVYAELESRLNSSFKGKMGTVSKSRASPPGPSPAVTTGPRTLSGVSWPSERLLPSPCYHPLCSGGLASPSSSESHPYASLDSSRAPSPQPGPGPICPDSPPSPDPTRPPSRRKLFTFSHPVRSRDTDRFLDVLSEQLGPRVTIVDDFLTPENDYEEMSFHDDQGSFVTNERSSASDCISSSEEGSSLTYSSISDHIPPPPLSPPPPPPLPFHDAKPSSRSSDGSRGPAQALAKPLTQLSHPVPPPPPPPLPPPVPCAPPMLSRGLGHRRSETSHMSVKRLRWEQVENSEGTIWGQLGEDSDYDKLSDMVKYLDLELHFGTQKPAKPVPGPEPFRKKEVVEILSHKKAYNTSILLAHLKLSPAELRQVLMSMEPRRLEPAHLAQLLLFAPDADEEQRYQAFREAPGRLSEPDQFVLQMLSVPEYKTRLRSLHFQATLQEKTEEIRGSLECLRQASLELKNSRKLAKILEFVLAMGNYLNDGQPKTNKTTGFKINFLTELNSTKTVDGKSTFLHILAKSLSQHFPELLGFAQDLPTVPLAAKVNQRALTSDLADLHGTISEIQDACQSISPSSEDKFAMVMSSFLETAQPALRALDGLQREAMEELGKALAFFGEDSKATTSEAFFGIFAEFMSKFERALSDLQAGEGLRSSGMVSPLAW

SEQ ID NO: 29327 - protein, 949 aa, Homo sapiens
  REGION 1..949: note = ENSP00000327687
MEHGTLLAQPGLWTRDTSWALLYFLCYILPQTAPQVLRIGGIFETVENEPVNVEELAFKFAVTSINRNRTLMPNTTLTYDIQRINLFDSFEASRRACDQLALGVAALFGPSHSSSVSAVQSICNALEVPHIQTRWKHPSVDNKDLFYINLYPDYAAISRAILDLVLYYNWKTVTVVYEDSTGLIRLQELIKAPSRYNIKIKIRQLPSGNKDAKPLLKEMKKGKEFYVIFDCSHETAAEILKQILFMGMMTEYYHYFFTTLDLFALDLELYRYSGVNMTGFRLLNIDNPHVSSIIEKWSMERLQAPPRPETGLLDGMMTTEAALMYDAVYMVAIASHRASQLTVSSLQCHRHKPWRLGPRFMNLIKEARWDGLTGHITFNKTNGLRKDFDLDIISLKEEGTEKAAGEVSKHLYKVWKKIGIWNSNSGLNMTDSNKDKSSNITDSLANRTLIVTTILEEPYVMYRKSDKPLYGNDRFEGYCLDLLKELSNILGFIYDVKLVPDGKYGAQNDKGEWNGMVKELIDHRADLAVAPLTITYVREKVIDFSKPFMTLGISILYRKPNGTNPGVFSFLNPLSPDIWMYVLLACLGVSCVLFVIARFTPYEWYNPHPCNPDSDVVENNFTLLNSFWFGVGALMQQGSELMPKALSTRIVGGIWWFFTLIIISSYTANLAAFLTVERMESPIDSADDLAKQTKIEYGAVRDGSTMTFFKKSKISTYEKMWAFMSSRQQTALVRNSDEGIQRVLTTDYALLMESTSIEYVTQRNCNLTQIGGLIDSKGYGVGTPIGSPYRDKITIAILQLQEEGKLHMMKEKWWRGNGCPEEDNKEASALGVENIGGIFIVLAAGLVLSVFVAIGEFIYKSRKNNDIEQKGKSSRIRFYFRNKVRFHGRKKQSLGVEKCLSFNAIMEELGISLKNQKKIKKKSRTKGKSSFTSILTCHQRRTQRKETVA

SEQ ID NO: 29328 - protein, 905 aa, Homo sapiens
  REGION 1..905: note = ENSP00000373777
MEHGTLLAQPGLWTRDTSWALLYFLCYILPQTAPQVLRIGGIFETVENEPVNVEELAFKFAVTSINRNRTLMPNTTLTYDIQRINLFDSFEASRRACDQLALGVAALFGPSHSSSVSAVQSICNALEVPHIQTRWKHPSVDNKDLFYINLYPDYAAISRAILDLVLYYNWKTVTVVYEDSTGLIRLQELIKAPSRYNIKIKIRQLPSGNKDAKPLLKEMKKGKEFYVIFDCSHETAAEILKQILFMGMMTEYYHYFFTTLDLFALDLELYRYSGVNMTGFRLLNIDNPHVSSIIEKWSMERLQAPPRPETGLLDGMMTTEAALMYDAVYMVAIASHRASQLTVSSLQCHRHKPWRLGPRFMNLIKEARWDGLTGHITFNKTNGLRKDFDLDIISLKEEGTEKIGIWNSNSGLNMTDSNKDKSSNITDSLANRTLIVTTILEEPYVMYRKSDKPLYGNDRFEGYCLDLLKELSNILGFIYDVKLVPDGKYGAQNDKGEWNGMVKELIDHRADLAVAPLTITYVREKVIDFSKPFMTLGISILYRKPNGTNPGVFSFLNPLSPDIWMYVLLACLGVSCVLFVIARFTPYEWYNPHPCNPDSDVVENNFTLLNSFWFGVGALMQQGSELMPKALSTRIVGGIWWFFTLIIISSYTANLAAFLTVERMESPIDSADDLAKQTKIEYGAVRDGSTMTFFKKSKISTYEKMWAFMSSRQQTALVRNSDEGIQRVLTTDYALLMESTSIEYVTQRNCNLTQIGGLIDSKGYGVGTPIGSPYRDKITIAILQLQEEGKLHMMKEKWWRGNGCPEEDNKEASALGVENIGGIFIVLAAGLVLSVFVAIGEFIYKSRKNNDIEQCLSFNAIMEELGISLKNQKKIKKKSRTKGKSSFTSILTCHQRRTQRKETVA

SEQ ID NO: 29329 - protein, 920 aa, Homo sapiens
  REGION 1..920: note = ENSP00000382797
MEHGTLLAQPGLWTRDTSWALLYFLCYILPQTAPQVLRIGGIFETVENEPVNVEELAFKFAVTSINRNRTLMPNTTLTYDIQRINLFDSFEASRRACDQLALGVAALFGPSHSSSVSAVQSICNALEVPHIQTRWKHPSVDNKDLFYINLYPDYAAISRAILDLVLYYNWKTVTVVYEDSTGLIRLQELIKAPSRYNIKIKIRQLPSGNKDAKPLLKEMKKGKEFYVIFDCSHETAAEILKQILFMGMMTEYYHYFFTTLDLFALDLELYRYSGVNMTGFRLLNIDNPHVSSIIEKWSMERLQAPPRPETGLLDGMMTTEAALMYDAVYMVAIASHRASQLTVSSLQCHRHKPWRLGPRFMNLIKEARWDGLTGHITFNKTNGLRKDFDLDIISLKEEGTEKAAGEVSKHLYKVWKKIGIWNSNSGLNMTDSNKDKSSNITDSLANRTLIVTTILEEPYVMYRKSDKPLYGNDRFEGYCLDLLKELSNILGFIYDVKLVPDGKYGAQNDKGEWNGMVKELIDHRADLAVAPLTITYVREKVIDFSKPFMTLGISILYRKPNGTNPGVFSFLNPLSPDIWMYVLLACLGVSCVLFVIARFTPYEWYNPHPCNPDSDVVENNFTLLNSFWFGVGALMQQGSELMPKALSTRIVGGIWWFFTLIIISSYTANLAAFLTVERMESPIDSADDLAKQTKIEYGAVRDGSTMTFFKKSKISTYEKMWAFMSSRQQTALVRNSDEGIQRVLTTDYALLMESTSIEYVTQRNCNLTQIGGLIDSKGYGVGTPIGSPYRDKITIAILQLQEEGKLHMMKEKWWRGNGCPEEDNKEASALGVENIGGIFIVLAAGLVLSVFVAIGEFIYKSRKNNDIEQCLSFNAIMEELGISLKNQKKIKKKSRTKGKSSFTSILTCHQRRTQRKETVA

SEQ ID NO: 29330 - protein, 934 aa, Homo sapiens
  REGION 1..934: note = ENSP00000382798
MEHGTLLAQPGLWTRDTSWALLYFLCYILPQTAPQVLRIGGIFETVENEPVNVEELAFKFAVTSINRNRTLMPNTTLTYDIQRINLFDSFEASRRACDQLALGVAALFGPSHSSSVSAVQSICNALEVPHIQTRWKHPSVDNKDLFYINLYPDYAAISRAILDLVLYYNWKTVTVVYEDSTGLIRLQELIKAPSRYNIKIKIRQLPSGNKDAKPLLKEMKKGKEFYVIFDCSHETAAEILKQILFMGMMTEYYHYFFTTLDLFALDLELYRYSGVNMTGFRLLNIDNPHVSSIIEKWSMERLQAPPRPETGLLDGMMTTEAALMYDAVYMVAIASHRASQLTVSSLQCHRHKPWRLGPRFMNLIKEARWDGLTGHITFNKTNGLRKDFDLDIISLKEEGTEKIGIWNSNSGLNMTDSNKDKSSNITDSLANRTLIVTTILEEPYVMYRKSDKPLYGNDRFEGYCLDLLKELSNILGFIYDVKLVPDGKYGAQNDKGEWNGMVKELIDHRADLAVAPLTITYVREKVIDFSKPFMTLGISILYRKPNGTNPGVFSFLNPLSPDIWMYVLLACLGVSCVLFVIARFTPYEWYNPHPCNPDSDVVENNFTLLNSFWFGVGALMQQGSELMPKALSTRIVGGIWWFFTLIIISSYTANLAAFLTVERMESPIDSADDLAKQTKIEYGAVRDGSTMTFFKKSKISTYEKMWAFMSSRQQTALVRNSDEGIQRVLTTDYALLMESTSIEYVTQRNCNLTQIGGLIDSKGYGVGTPIGSPYRDKITIAILQLQEEGKLHMMKEKWWRGNGCPEEDNKEASALGVENIGGIFIVLAAGLVLSVFVAIGEFIYKSRKNNDIEQKGKSSRIRFYFRNKVRFHGRKKQSLGVEKCLSFNAIMEELGISLKNQKKIKKKSRTKGKSSFTSILTCHQRRTQRKETVA

SEQ ID NO: 29331 - protein, 871 aa, Homo sapiens
  REGION 1..871: note = ENSP00000373776
MEHGTLLAQPGLWTRDTSWALLYFLCYILPQTAPQVLRIGGIFETVENEPVNVEELAFKFAVTSINRNRTLMPNTTLTYDIQRINLFDSFEASRRACDQLALGVAALFGPSHSSSVSAVQSICNALEVPHIQTRWKHPSVDNKDLFYINLYPDYAAISRAILDLVLYYNWKTVTVVYEDSTGLIRLQELIKAPSRYNIKIKIRQLPSGNKDAKPLLKEMKKGKEFYVIFDCSHETAAEILKQILFMGMMTEYYHYFFTTLDLFALDLELYRYSGVNMTGFRLLNIDNPHVSSIIEKWSMERLQAPPRPETGLLDGMMTTEAALMYDAVYMVAIASHRASQLTVSSLQCHRHKPWRLGPRFMNLIKEARWDGLTGHITFNKTNGLRKDFDLDIISLKEEGTEKAAGEVSKHLYKVWKKIGIWNSNSGLNMTDSNKDKSSNITDSLANRTLIVTTILEEPYVMYRKSDKPLYGNDRFEGYCLDLLKELSNILGFIYDVKLVPDGKYGAQNDKGEWNGMVKELIDHRADLAVAPLTITYVREKVIDFSKPFMTLGISILYRKPNGTNPGVFSFLNPLSPDIWMYVLLACLGVSCVLFVIARFTPYEWYNPHPCNPDSDVVENNFTLLNSFWFGVGALMQQGSELMPKALSTRIVGGIWWFFTLIIISSYTANLAAFLTVERMESPIDSADDLAKQTKIEYGAVRDGSTMTFFKKSKISTYEKMWAFMSSRQQTALVRNSDEGIQRVLTTDYALLMESTSIEYVTQRNCNLTQIGGLIDSKGYGVGTPIGSPYRDKITIAILQLQEEGKLHMMKEKWWRGNGCPEEDNKEASALGVENIGGIFIVLAAGLVLSVFVAIGEFIYKSRKNNDIEQHY

SEQ ID NO: 29332 - protein, 918 aa, Homo sapiens
  REGION 1..918: note = ENSP00000382791
MEHGTLLAQPGLWTRDTSWALLYFLCYILPQTAPQVLRIGGIFETVENEPVNVEELAFKFAVTSINRNRTLMPNTTLTYDIQRINLFDSFEASRRACDQLALGVAALFGPSHSSSVSAVQSICNALEVPHIQTRWKHPSVDNKDLFYINLYPDYAAISRAILDLVLYYNWKTVTVVYEDSTGLIRLQELIKAPSRYNIKIKIRQLPSGNKDAKPLLKEMKKGKEFYVIFDCSHETAAEILKQILFMGMMTEYYHYFFTTLDLFALDLELYRYSGVNMTGFRLLNIDNPHVSSIIEKWSMERLQAPPRPETGLLDGMMTTEAALMYDAVYMVAIASHRASQLTVSSLQCHRHKPWRLGPRFMNLIKEARWDGLTGHITFNKTNGLRKDFDLDIISLKEEGTEKAAGEVSKHLYKVWKKIGIWNSNSGLNMTDSNKDKSSNITDSLANRTLIVTTILEEPYVMYRKSDKPLYGNDRFEGYCLDLLKELSNILGFIYDVKLVPDGKYGAQNDKGEWNGMVKELIDHRADLAVAPLTITYVREKVIDFSKPFMTLGISILYRKPNGTNPGVFSFLNPLSPDIWMYVLLACLGVSCVLFVIARFTPYEWYNPHPCNPDSDVVENNFTLLNSFWFGVGALMQQGSELMPKALSTRIVGGIWWFFTLIIISSYTANLAAFLTVERMESPIDSADDLAKQTKIEYGAVRDGSTMTFFKKSKISTYEKMWAFMSSRQQTALVRNSDEGIQRVLTTDYALLMESTSIEYVTQRNCNLTQIGGLIDSKGYGVGTPIGSPYRDKITIAILQLQEEGKLHMMKEKWWRGNGCPEEDNKEASALGVENIGGIFIVLAAGLVLSVFVAIGEFIYKSRKNNDIEQAFCFFYGLQCKQTHPTNSTSGTTLSTDLECGKLIREERGIRKQSSVHTV

SEQ ID NO: 29333 - protein, 903 aa, Homo sapiens
  REGION 1..903: note = ENSP00000382793
MEHGTLLAQPGLWTRDTSWALLYFLCYILPQTAPQVLRIGGIFETVENEPVNVEELAFKFAVTSINRNRTLMPNTTLTYDIQRINLFDSFEASRRACDQLALGVAALFGPSHSSSVSAVQSICNALEVPHIQTRWKHPSVDNKDLFYINLYPDYAAISRAILDLVLYYNWKTVTVVYEDSTGLIRLQELIKAPSRYNIKIKIRQLPSGNKDAKPLLKEMKKGKEFYVIFDCSHETAAEILKQILFMGMMTEYYHYFFTTLDLFALDLELYRYSGVNMTGFRLLNIDNPHVSSIIEKWSMERLQAPPRPETGLLDGMMTTEAALMYDAVYMVAIASHRASQLTVSSLQCHRHKPWRLGPRFMNLIKEARWDGLTGHITFNKTNGLRKDFDLDIISLKEEGTEKIGIWNSNSGLNMTDSNKDKSSNITDSLANRTLIVTTILEEPYVMYRKSDKPLYGNDRFEGYCLDLLKELSNILGFIYDVKLVPDGKYGAQNDKGEWNGMVKELIDHRADLAVAPLTITYVREKVIDFSKPFMTLGISILYRKPNGTNPGVFSFLNPLSPDIWMYVLLACLGVSCVLFVIARFTPYEWYNPHPCNPDSDVVENNFTLLNSFWFGVGALMQQGSELMPKALSTRIVGGIWWFFTLIIISSYTANLAAFLTVERMESPIDSADDLAKQTKIEYGAVRDGSTMTFFKKSKISTYEKMWAFMSSRQQTALVRNSDEGIQRVLTTDYALLMESTSIEYVTQRNCNLTQIGGLIDSKGYGVGTPIGSPYRDKITIAILQLQEEGKLHMMKEKWWRGNGCPEEDNKEASALGVENIGGIFIVLAAGLVLSVFVAIGEFIYKSRKNNDIEQAFCFFYGLQCKQTHPTNSTSGTTLSTDLECGKLIREERGIRKQSSVHTV

SEQ ID NO: 29334 - protein, 908 aa, Homo sapiens
  REGION 1..908: note = ENSP00000397026
MKIIFPILSNPVFRRTVKLLLCLLWIGYSQGTTHVLRFGGIFEYVESGPMGAEELAFRFAVNTINRNRTLLPNTTLTYDTQKINLYDSFEASKKACDQLSLGVAAIFGPSHSSSANAVQSICNALGVPHIQTRWKHQVSDNKDSFYVSLYPDFSSLSRAILDLVQFFKWKTVTVVYDDSTGLIRLQELIKAPSRYNLRLKIRQLPADTKDAKPLLKEMKRGKEFHVIFDCSHEMAAGILKQALAMGMMTEYYHYIFTTLDLFALDVEPYRYSGVNMTGFRILNTENTQVSSIIEKWSMERLQAPPKPDSGLLDGFMTTDAALMYDAVHVVSVAVQQFPQMTVSSLQCNRHKPWRFGTRFMSLIKEAHWEGLTGRITFNKTNGLRTDFDLDVISLKEEGLEKIGTWDPASGLNMTESQKGKPANITDSLSNRSLIVTTILEEPYVLFKKSDKPLYGNDRFEGYCIDLLRELSTILGFTYEIRLVEDGKYGAQDDANGQWNGMVRELIDHKADLAVAPLAITYVREKVIDFSKPFMTLGISILYRKPNGTNPGVFSFLNPLSPDIWMYILLAYLGVSCVLFVIARFSPYEWYNPHPCNPDSDVVENNFTLLNSFWFGVGALMQQGSELMPKALSTRIVGGIWWFFTLIIISSYTANLAAFLTVERMESPIDSADDLAKQTKIEYGAVEDGATMTFFKKSKISTYDKMWAFMSSRRQSVLVKSNEEGIQRVLTSDYAFLMESTTIEFVTQRNCNLTQIGGLIDSKGYGVGTPMGSPYRDKITIAILQLQEEGKLHMMKEKWWRGNGCPEEESKEASALGVQNIGGIFIVLAAGLVLSVFVAVGEFLYKSKKNAQLEKRSFCSAMVEELRMSLKCQRRLKHKPQAPVIVKTEEVINMHTFNDRRLPGKETMA

SEQ ID NO: 29335 - protein, 869 aa, Homo sapiens
  REGION 1..869: note = ENSP00000405596
MKIIFPILSNPVFRRTVKLLLCLLWIGYSQGTTHVLRFGGIFEYVESGPMGAEELAFRFAVNTINRNRTLLPNTTLTYDTQKINLYDSFEASKKACDQLSLGVAAIFGPSHSSSANAVQSICNALGVPHIQTRWKHQVSDNKDSFYVSLYPDFSSLSRAILDLVQFFKWKTVTVVYDDSTGLIRLQELIKAPSRYNLRLKIRQLPADTKDAKPLLKEMKRGKEFHVIFDCSHEMAAGILKQALAMGMMTEYYHYIFTTLDLFALDVEPYRYSGVNMTGFRILNTENTQVSSIIEKWSMERLQAPPKPDSGLLDGFMTTDAALMYDAVHVVSVAVQQFPQMTVSSLQCNRHKPWRFGTRFMSLIKEAHWEGLTGRITFNKTNGLRTDFDLDVISLKEEGLEKIGTWDPASGLNMTESQKGKPANITDSLSNRSLIVTTILEEPYVLFKKSDKPLYGNDRFEGYCIDLLRELSTILGFTYEIRLVEDGKYGAQDDANGQWNGMVRELIDHKADLAVAPLAITYVREKVIDFSKPFMTLGISILYRKPNGTNPGVFSFLNPLSPDIWMYILLAYLGVSCVLFVIARFSPYEWYNPHPCNPDSDVVENNFTLLNSFWFGVGALMQQGSELMPKALSTRIVGGIWWFFTLIIISSYTANLAAFLTVERMESPIDSADDLAKQTKIEYGAVEDGATMTFFKKSKISTYDKMWAFMSSRRQSVLVKSNEEGIQRVLTSDYAFLMESTTIEFVTQRNCNLTQIGGLIDSKGYGVGTPMGSPYRDKITIAILQLQEEGKLHMMKEKWWRGNGCPEEESKEASALGVQNIGGIFIVLAAGLVLSVFVAVGEFLYKSKKNAQLEKESSIWLVPPYHPDTV

SEQ ID NO: 29336 - protein, 892 aa, Homo sapiens
  REGION 1..892: note = ENSP00000358134
MKIIFPILSNPVFRRTVKLLLCLLWIGYSQGTTHVLRFGGIFEYVESGPMGAEELAFRFAVNTINRNRTLLPNTTLTYDTQKINLYDSFEASKKACDQLSLGVAAIFGPSHSSSANAVQSICNALGVPHIQTRWKHQVSDNKDSFYVSLYPDFSSLSRAILDLVQFFKWKTVTVVYDDSTGLIRLQELIKAPSRYNLRLKIRQLPADTKDAKPLLKEMKRGKEFHVIFDCSHEMAAGILKQALAMGMMTEYYHYIFTTLDLFALDVEPYRYSGVNMTGFRILNTENTQVSSIIEKWSMERLQAPPKPDSGLLDGFMTTDAALMYDAVHVVSVAVQQFPQMTVSSLQCNRHKPWRFGTRFMSLIKEAHWEGLTGRITFNKTNGLRTDFDLDVISLKEEGLEKIGTWDPASGLNMTESQKGKPANITDSLSNRSLIVTTILEEPYVLFKKSDKPLYGNDRFEGYCIDLLRELSTILGFTYEIRLVEDGKYGAQDDANGQWNGMVRELIDHKADLAVAPLAITYVREKVIDFSKPFMTLGISILYRKPNGTNPGVFSFLNPLSPDIWMYILLAYLGVSCVLFVIARFSPYEWYNPHPCNPDSDVVENNFTLLNSFWFGVGALMQQGSELMPKALSTRIVGGIWWFFTLIIISSYTANLAAFLTVERMESPIDSADDLAKQTKIEYGAVEDGATMTFFKKSKISTYDKMWAFMSSRRQSVLVKSNEEGIQRVLTSDYAFLMESTTIEFVTQRNCNLTQIGGLIDSKGYGVGTPMGSPYRDKITIAILQLQEEGKLHMMKEKWWRGNGCPEEESKEASALGVQNIGGIFIVLAAGLVLSVFVAVGEFLYKSKKNAQLEKRAKTKLPQDYVFLPILESVSISTVLSSSPSSSSLSSCS

SEQ ID NO: 29337 - protein, 353 aa, Homo sapiens
  REGION 1..353: note = ENSP00000351128
MKIIFPILSNPVFRRTVKLLLCLLWIGYSQGTTHVLRFGGIFEYVESGPMGAEELAFRFAVNTINRNRTLLPNTTLTYDTQKINLYDSFEASKKACDQLSLGVAAIFGPSHSSSANAVQSICNALGVPHIQTRWKHQVSDNKDSFYVSLYPDFSSLSRAILDLVQFFKWKTVTVVYDDSTGLIRLQELIKAPSRYNLRLKIRQLPADTKDAKPLLKEMKRGKEFHVIFDCSHEMAAGILKQALAMGMMTEYYHYIFTTLDLFALDVEPYRYSGVNMTGFRILNTENTQVSSIIEKWSMERLQAPPKPDSGLLDGFMTMEFHSCCPGWSAMARSQLTATSASWVQAILLPQPPE

SEQ ID NO: 29338 - protein, 180 aa, Homo sapiens
  REGION 1..180: note = ENSP00000391988
CSHEMAAGILKQALAMGMMTEYYHYIFTTLTDAALMYDAVHVVSVAVQQFPQMTVSSLQCNRHKPWRFGTRFMSLIKEAHWEGLTGRITFNKTNGLRTDFDLDVISLKEEGLEKIGTWDPASGLNMTESQKGKPANITDSLSNRSLIVTTILEEPYVLFKKSDKPLYGNDRFEGYCIDLL

SEQ ID NO: 29339 - protein, 182 aa, Homo sapiens
  REGION 1..182: note = ENSP00000407140
IGTWDPASGLNMTESQKGKPANITDSLSNRSLIVTTILEEPYVLFKKSDKPLYGNDRFEGYCIDLLRELSTILGFTYEIRLVEDGKYGAQDDANGQWNGMVRELIDHKADLAVAPLAITYVREKVIDFSKPFMTLGISILYRKPNGTNPGVFSFLNPLSPDIWMYILLAYLGVSCVLFVIAR

SEQ ID NO: 29340 - protein, 870 aa, Homo sapiens
  REGION 1..870: note = ENSP00000358130
GGIFEYVESGPMGAEELAFRFAVNTINRNRTLLPNTTLTYDTQKINLYDSFEASKKACDQLSLGVAAIFGPSHSSSANAVQSICNALGVPHIQTRWKHQVSDNKDSFYVSLYPDFSSLSRAILDLVQFFKWKTVTVVYDDSTGLIRLQELIKAPSRYNLRLKIRQLPADTKDAKPLLKEMKRGKEFHVIFDCSHEMAAGILKQALAMGMMTEYYHYIFTTLDLFALDVEPYRYSGVNMTGFRILNTENTQVSSIIEKWSMERLQAPPKPDSGLLDGFMTTDAALMYDAVHVVSVAVQQFPQMTVSSLQCNRHKPWRFGTRFMSLIKEAHWEGLTGRITFNKTNGLRTDFDLDVISLKEEGLEKIGTWDPASGLNMTESQKGKPANITDSLSNRSLIVTTILEEPYVLFKKSDKPLYGNDRFEGYCIDLLRELSTILGFTYEIRLVEDGKYGAQDDANGQWNGMVRELIDHKADLAVAPLAITYVREKVIDFSKPFMTLGISILYRKPNGTNPGVFSFLNPLSPDIWMYILLAYLGVSCVLFVIARFSPYEWYNPHPCNPDSDVVENNFTLLNSFWFGVGALMQQGSELMPKALSTRIVGGIWWFFTLIIISSYTANLAAFLTVERMESPIDSADDLAKQTKIEYGAVEDGATMTFFKKSKISTYDKMWAFMSSRRQSVLVKSNEEGIQRVLTSDYAFLMESTTIEFVTQRNCNLTQIGGLIDSKGYGVGTPMGSPYRDKITIAILQLQEEGKLHMMKEKWWRGNGCPEEESKEASALGVQNIGGIFIVLAAGLVLSVFVAVGEFLYKSKKNAQLEKRSFCSAMVEELRMSLKCQRRLKHKPQAPVIVKTEEVINMHTFNDRRLPGKETMA

SEQ ID NO: 29341 - protein, 854 aa, Homo sapiens
  REGION 1..854: note = ENSP00000313276
GGIFEYVESGPMGAEELAFRFAVNTINRNRTLLPNTTLTYDTQKINLYDSFEASKKACDQLSLGVAAIFGPSHSSSANAVQSICNALGVPHIQTRWKHQVSDNKDSFYVSLYPDFSSLSRAILDLVQFFKWKTVTVVYDDSTGLIRLQELIKAPSRYNLRLKIRQLPADTKDAKPLLKEMKRGKEFHVIFDCSHEMAAGILKQALAMGMMTEYYHYIFTTLDLFALDVEPYRYSGVNMTGFRILNTENTQVSSIIEKWSMERLQAPPKPDSGLLDGFMTTDAALMYDAVHVVSVAVQQFPQMTVSSLQCNRHKPWRFGTRFMSLIKEAHWEGLTGRITFNKTNGLRTDFDLDVISLKEEGLEKIGTWDPASGLNMTESQKGKPANITDSLSNRSLIVTTILEEPYVLFKKSDKPLYGNDRFEGYCIDLLRELSTILGFTYEIRLVEDGKYGAQDDANGQWNGMVRELIDHKADLAVAPLAITYVREKVIDFSKPFMTLGISILYRKPNGTNPGVFSFLNPLSPDIWMYILLAYLGVSCVLFVIARFSPYEWYNPHPCNPDSDVVENNFTLLNSFWFGVGALMQQGSELMPKALSTRIVGGIWWFFTLIIISSYTANLAAFLTVERMESPIDSADDLAKQTKIEYGAVEDGATMTFFKKSKISTYDKMWAFMSSRRQSVLVKSNEEGIQRVLTSDYAFLMESTTIEFVTQRNCNLTQIGGLIDSKGYGVGTPMGSPYRDKITIAILQLQEEGKLHMMKEKWWRGNGCPEEESKEASALGVQNIGGIFIVLAAGLVLSVFVAVGEFLYKSKKNAQLEKRAKTKLPQDYVFLPILESVSISTVLSSSPSSSSLSSCS

SEQ ID NO: 29342 - protein, 831 aa, Homo sapiens
  REGION 1..831: note = ENSP00000358133
GGIFEYVESGPMGAEELAFRFAVNTINRNRTLLPNTTLTYDTQKINLYDSFEASKKACDQLSLGVAAIFGPSHSSSANAVQSICNALGVPHIQTRWKHQVSDNKDSFYVSLYPDFSSLSRAILDLVQFFKWKTVTVVYDDSTGLIRLQELIKAPSRYNLRLKIRQLPADTKDAKPLLKEMKRGKEFHVIFDCSHEMAAGILKQALAMGMMTEYYHYIFTTLDLFALDVEPYRYSGVNMTGFRILNTENTQVSSIIEKWSMERLQAPPKPDSGLLDGFMTTDAALMYDAVHVVSVAVQQFPQMTVSSLQCNRHKPWRFGTRFMSLIKEAHWEGLTGRITFNKTNGLRTDFDLDVISLKEEGLEKIGTWDPASGLNMTESQKGKPANITDSLSNRSLIVTTILEEPYVLFKKSDKPLYGNDRFEGYCIDLLRELSTILGFTYEIRLVEDGKYGAQDDANGQWNGMVRELIDHKADLAVAPLAITYVREKVIDFSKPFMTLGISILYRKPNGTNPGVFSFLNPLSPDIWMYILLAYLGVSCVLFVIARFSPYEWYNPHPCNPDSDVVENNFTLLNSFWFGVGALMQQGSELMPKALSTRIVGGIWWFFTLIIISSYTANLAAFLTVERMESPIDSADDLAKQTKIEYGAVEDGATMTFFKKSKISTYDKMWAFMSSRRQSVLVKSNEEGIQRVLTSDYAFLMESTTIEFVTQRNCNLTQIGGLIDSKGYGVGTPMGSPYRDKITIAILQLQEEGKLHMMKEKWWRGNGCPEEESKEASALGVQNIGGIFIVLAAGLVLSVFVAVGEFLYKSKKNAQLEKESSIWLVPPYHPDTV

SEQ ID NO: 29343 - protein, 919 aa, Homo sapiens [sequence omitted]

SEQ ID NO: 29344 - protein, 872 aa, Homo sapiens
  REGION 1..872: note = ENSP00000362185
MTAPWRRLRSLVWEYWAGLLVCAFWIPDSRGMPHVIRIGGIFEYADGPNAQVMNAEEHAFRFSANIINRNRTLLPNTTLTYDIQRIHFHDSFEATKKACDQLALGVVAIFGPSQGSCTNAVQSICNALEVPHIQLRWKHHPLDNKDTFYVNLYPDYASLSHAILDLVQYLKWRSATVVYDDSTGLIRLQELIMAPSRYNIRLKIRQLPIDSDDSRPLLKEMKRGREFRIIFDCSHTMAAQILKQAMAMGMMTEYYHFIFTTLDLYALDLEPYRYSGVNLTGFRILNVDNPHVSAIVEKWSMERLQAAPRSESGLLDGVMMTDAALLYDAVHIVSVCYQRAPQMTVNSLQCHRHKAWRFGGRFMNFIKEAQWEGLTGRIVFNKTSGLRTDFDLDIISLKEDGLEKVGVWSPADGLNITEVAKGRGPNVTDSLTNRSLIVTTVLEEPFVMFRKSDRTLYGNDRFEGYCIDLLKELAHILGFSYEIRLVEDGKYGAQDDKGQWNGMVKELIDHKADLAVAPLTITHVREKAIDFSKPFMTLGVSILYRKPNGTNPSVFSFLNPLSPDIWMYVLLAYLGVSCVLFVIARFSPYEWYDAHPCNPGSEVVENNFTLLNSFWFGMGSLMQQGSELMPKALSTRIIGGIWWFFTLIIISSYTANLAAFLTVERMESPIDSADDLAKQTKIEYGAVKDGATMTFFKKSKISTFEKMWAFMSSKPSALVKNNEEGIQRALTADYALLMESTTIEYVTQRNCNLTQIGGLIDSKGYGIGTPMGSPYRDKITIAILQLQEEDKLHIMKEKWWRGSGCPEEENKEASALGIQKIGGIFIVLAAGLVLSVLVAVGEFVYKLRKTAEREQVSLRAWSLHRMGNGDSR

SEQ ID NO: 29345 - protein, 1464 aa, Homo sapiens [sequence omitted]

SEQ ID NO: 29346 - protein, 1281 aa, Homo sapiens
  REGION 1..1281: note = ENSP00000454998
MGRVGYWTLLVLPALLVWRGPAPSAAAEKGPPALNIAVMLGHSHDVTERELRTLWGPEQAAGLPLDVNVVALLMNRTDPKSLITHVCDLMSGARIHGLVFGDDTDQEAVAQMLDFISSHTFVPILGIHGGASMIMADKDPTSTFFQFGASIQQQATVMLKIMQDYDWHVFSLVTTIFPGYREFISFVKTTVDNSFVGWDMQNVITLDTSFEDAKTQVQLKKIHSSVILLYCSKDEAVLILSEARSLGLTGYDFFWIVPSLVSGNTELIPKEFPSGLISVSYDDWDYSLEARVRDGIGILTTAASSMLEKFSYIPEAKASCYGQMERPEVPMHTLHPFMVNVTWDGKDLSFTEEGYQVHPRLVVIVLNKDREWEKVGKWENHTLSLRHAVWPRYKSFSDCEPDDNHLSIVTLEEAPFVIVEDIDPLTETCVRNTVPCRKFVKINNSTNEGMNVKKCCKGFCIDILKKLSRTVKFTYDLYLVTNGKHGKKVNNVWNGMIGEVVYQRAVMAVGSLTINEERSEVVDFSVPFVETGISVMVSRSNGTVSPSAFLEPFSASVWVMMFVMLLIVSAIAVFVFEYFSPVGYNRNLAKGKAPHGPSFTIGKAIWLLWGLVFNNSVPVQNPKGTTSKIMVSVWAFFAVIFLASYTANLAAFMIQEEFVDQVTGLSDKKFQRPHDYSPPFRFGTVPNGSTERNIRNNYPYMHQYMTKFNQKGVEDALVSLKTGKLDAFIYDAAVLNYKAGRDEGCKLVTIGSGYIFATTGYGIALQKGSPWKRQIDLALLQFVGDGEMEELETLWLTGICHNEKNEVMSSQLDIDNMAGVFYMLAAAMALSLITFIWEHLFYWKLRFCFTGVCSDRPGLLFSISRGIYSCIHGVHIEEKKKSPDFNLTGSQSNMLKLLRSAKNISSMSNMNSSRMDSPKRAADFIQRGSLIMDMVSDKGNLMYSDNRSFQGKESIFGDNMNELQTFVANRQKDNLNNYVFQGQHPLTLNESNPNTVEVAVSTESKANSRPRQLWKKSVDSIRQDSLSQNPVSQRDEATAENRTHSLKSPRYLPEEMAHSDISETSNRATCHREPDNSKNHKTKDNFKRSVASKYPKDCSEVERTYLKTKSSSPRDKIYTIDGEKEPGFHLDPPQFVENVTLPENVDFPDPYQDPSENFRKGDSTLPMNRNPLHNEEGLSNNDQYKLYSKHFTLKDKGSPHSETSERYRQNSTHCRSCLSNMPTYSGHFTMRSPFKCDACLRMGNLYDIDEDQMLQETGMTNAWLLGDAPRTLTNTRCHPRR

SEQ ID NO: 29347 - protein, 1464 aa, Homo sapiens [sequence omitted]

SEQ ID NO: 29348 - protein, 200 aa, Homo sapiens
  REGION 1..200: note = ENSP00000490232
DKDPTSTFFQFGASIQQQATVMLKIMQDYDWHVFSLVTTIFPGYREFISFVKTTVDNSFVGWDMQNVITLDTSFEDAKTQVQLKKIHSSVILLYCSKDEAVLILSEARSLGLTGYDFFWIVPSLVSGNTELIPKEFPSGLISVSYDDWDYSLEARVRDGIGILTTAASSMLEKFSYIPEAKASCYGQMERPEVPMHTLHP

SEQ ID NO: 29349 - protein, 19 aa, Homo sapiens
  REGION 1..19: note = ENSP00000490676
MGRVGYWTLLVLPALLVWR

SEQ ID NO: 29350 - protein, 10 aa, Homo sapiens
  REGION 1..10: note = ENSP00000489946
MGRVGYWTLL

SEQ ID NO: 29351 - protein, 1144 aa, Homo sapiens
  REGION 1..1144: note = ENSP00000441572
QDPTSTFFQFGASIQQQATVMLKIMQDYDWHVFSLVTTIFPGYREFISFVKTTVDNSFVGWDMQNVITLDTSFEDAKTQVQLKKIHSSVILLYCSKDEAVLILSEARSLGLTGYDFFWIVPSLVSGNTELIPKEFPSGLISVSYDDWDYSLEARVRDGIGILTTAASSMLEKFSYIPEAKASCYGQMERPEVPMHTLHPFMVNVTWDGKDLSFTEEGYQVHPRLVVIVLNKDREWEKVGKWENHTLSLRHAVWPRYKSFSDCEPDDNHLSIVTLEEAPFVIVEDIDPLTETCVRNTVPCRKFVKINNSTNEGMNVKKCCKGFCIDILKKLSRTVKFTYDLYLVTNGKHGKKVNNVWNGMIGEVVYQRAVMAVGSLTINEERSEVVDFSVPFVETGISVMVSRSNGTVSPSAFLEPFSASVWVMMFVMLLIVSAIAVFVFEYFSPVGYNRNLAKGKAPHGPSFTIGKAIWLLWGLVFNNSVPVQNPKGTTSKIMVSVWAFFAVIFLASYTANLAAFMIQEEFVDQVTGLSDKKFQRPHDYSPPFRFGTVPNGSTERNIRNNYPYMHQYMTKFNQKGVEDALVSLKTGKLDAFIYDAAVLNYKAGRDEGCKLVTIGSGYIFATTGYGIALQKGSPWKRQIDLALLQFVGDGEMEELETLWLTGICHNEKNEVMSSQLDIDNMAGVFYMLAAAMALSLITFIWEHLFYWKLRFCFTGVCSDRPGLLFSISRGIYSCIHGVHIEEKKKSPDFNLTGSQSNMLKLLRSAKNISSMSNMNSSRMDSPKRAADFIQRGSLIMDMVSDKGNLMYSDNRSFQGKESIFGDNMNELQTFVANRQKDNLNNYVFQGQHPLTLNESNPNTVEVAVSTESKANSRPRQLWKKSVDSIRQDSLSQNPVSQRDEATAENRTHSLKSPRYLPEEMAHSDISETSNRATCHREPDNSKNHKTKDNFKRSVASKYPKDCSEVERTYLKTKSSSPRDKIYTIDGEKEPGFHLDPPQFVENVTLPENVDFPDPYQDPSENFRKGDSTLPMNRNPLHNEEGLSNNDQYKLYSKHFTLKDKGSPHSETSERYRQNSTHCRSCLSNMPTYSGHFTMRSPFKCDACLRMGNLYDIDEDQMLQETGMTNAWLLGDAPRTLTNTRCHPRR

SEQ ID NO: 29352 - protein, 46 aa, Homo sapiens
  REGION 1..46: note = ENSP00000489997
ANLAAFMIQEEYVDQVSGLSDKKMRTLRLRRSIFPKVTKLVTEPGF

SEQ ID NO: 29353 - protein, 1484 aa, Homo sapiens [sequence omitted]

SEQ ID NO: 29354 - protein, 35 aa, Homo sapiens
  REGION 1..35: note = ENSP00000486677
MKPRAECCSPKFWLVLAVLAVSGSRARSQKSPPSI

SEQ ID NO: 29355 - protein, 35 aa, Homo sapiens; identical to SEQ ID NO: 29354
  REGION 1..35: note = ENSP00000486411

SEQ ID NO: 29356 - protein, 1233 aa, Homo sapiens
  REGION 1..1233: note = ENSP00000293190
MGGALGPALLLTSLFGAWAGLGPGQGEQGMTVAVVFSSSGPPQAQFRARLTPQSFLDLPLEIQPLTVGVNTTNPSSLLTQICGLLGAAHVHGIVFEDNVDTEAVAQILDFISSQTHVPILSISGGSAVVLTPKEPGSAFLQLGVSLEQQLQVLFKVLEEYDWSAFAVITSLHPGHALFLEGVRAVADASHVSWRLLDVVTLELGPGGPRARTQRLLRQLDAPVFVAYCSREEAEVLFAEAAQAGLVGPGHVWLVPNLALGSTDAPPATFPVGLISVVTESWRLSLRQKVRDGVAILALGAHSYWRQHGTLPAPAGDCRVHPGPVSPAREAFYRHLLNVTWEGRDFSFSPGGYLVQPTMVVIALNRHRLWEMVGRWEHGVLYMKYPVWPRYSASLQPVVDSRHLTVATLEERPFVIVESPDPGTGGCVPNTVPCRRQSNHTFSSGDVAPYTKLCCKGFCIDILKKLARVVKFSYDLYLVTNGKHGKRVRGVWNGMIGEVYYKRADMAIGSLTINEERSEIVDFSVPFVETGISVMVARSNGTVSPSAFLEPYSPAVWVMMFVMCLTVVAITVFMFEYFSPVSYNQNLTRGKKSGGPAFTIGKSVWLLWALVFNNSVPIENPRGTTSKIMVLVWAFFAVIFLASYTANLAAFMIQEQYIDTVSGLSDKKFQRPQDQYPPFRFGTVPNGSTERNIRSNYRDMHTHMVKFNQRSVEDALTSLKMGKLDAFIYDAAVLNYMAGKDEGCKLVTIGSGKVFATTGYGIAMQKDSHWKRAIDLALLQFLGDGETQKLETVWLSGICQNEKNEVMSSKLDIDNMAGVFYMLLVAMGLALLVFAWEHLVYWKLRHSVPNSSQLDFLLAFSRGIYSCFSGVQSLASPPRQASPDLTASSAQASVLKMLQAARDMVTTAGVSSSLDRATRTIENWGGGRRAPPPSPCPTPRSGPSPCLPTPDPPPEPSPTGWGPPDGGRAALVRRAPQPPGRPPTPGPPLSDVSRVSRRPAWEARWPVRTGHCGRHLSASERPLSPARCHYSSFPRADRSGRPFLPLFPELEDLPLLGPEQLARREALLHAAWARGSRPRHASLPSSVAEAFARPSSLPAGCTGPACARPDGHSACRRLAQAQSMCLPIYREACQEGEQAGAPAWQHRQHVCLHAHAHLPFCWGAVCPHLPPCASHGSWLSGAWGPLGHRGRTLGLGTGYRDSGGLDEISRVARGTQGFPGPCTWRRISSLESEV

SEQ ID NO: 29357 - protein, 873 aa, Homo sapiens
  REGION 1..873: note = ENSP00000338645
MGGALGPALLLTSLFGAWAGLGPGQGEQGMTVAVVFSSSGPPQAQFRARLTPQSFLDLPLEIQPLTVGVNTTNPSSLLTQICGLLGAAHVHGIVFEDNVDTEAVAQILDFISSQTHVPILSISGGSAVVLTPKEPGSAFLQLGVSLEQQLQVLFKVLEEYDWSAFAVITSLHPGHALFLEGVRAVADASHVSWRLLDVVTLELGPGGPRARTQRLLRQLDAPVFVAYCSREEAEVLFAEAAQAGLVGPGHVWLVPNLALGSTDAPPATFPVGLISVVTESWRLSLRQKVRDGVAILALGAHSYWRQHGTLPAPAGDCRVHPGPVSPAREAFYRHLLNVTWEGRDFSFSPGGYLVQPTMVVIALNRHRLWEMVGRWEHGVLYMKYPVWPRYSASLQPVVDSRHLTVATLEERPFVIVESPDPGTGGCVPNTVPCRRQSNHTFSSGDVAPYTKLCCKGFCIDILKKLARVVKFSYDLYLVTNGKHGKRVRGVWNGMIGEVYYKRADMAIGSLTINEERSEIVDFSVPFVETGISVMVARSNGTVSPSAFLEPYSPAVWVMMFVMCLTVVAITVFMFEYFSPVSYNQNLTRGKKSGGPAFTIGKSVWLLWALVFNNSVPIENPRGTTSKIMVLVWAFFAVIFLASYTANLAAFMIQEQYIDTVSGLSDKKFQRPQDQYPPFRFGTVPNGSTERNIRSNYRDMHTHMVKFNQRSVEDALTSLKMGKLDAFIYDAAVLNYMAGKDEGCKLVTIGSGKVFATTGYGIAMQKDSHWKRAIDLALLQFLGDGETQKLETVWLSGICQNEKNEVMSSKLDIDNMAGVFYMLLVAMGLALLVFAWEHLVYWKLRHSVPNSSQLDFLLAFSRVGAHPSPHRPKF

SEQ ID NO: 29358 - protein, 1336 aa, Homo sapiens
  REGION 1..1336: note = ENSP00000263269
MRGAGGPRGPRGPAKMLLLLALACASPFPEEAPGPGGAGGPGGGLGGARPLNVALVFSGPAYAAEAARLGPAVAAAVRSPGLDVRPVALVLNGSDPRSLVLQLCDLLSGLRVHGVVFEDDSRAPAVAPILDFLSAQTSLPIVAVHGGAALVLTPKEKGSTFLQLGSSTEQQLQVIFEVLEEYDWTSFVAVTTRAPGHRAFLSYIEVLTDGSLVGWEHRGALTLDPGAGEAVLSAQLRSVSAQIRLLFCAREEAEPVFRAAEEAGLTGSGYVWFMVGPQLAGGGGSGAPGEPPLLPGGAPLPAGLFAVRSAGWRDDLARRVAAGVAVVARGAQALLRDYGFLPELGHDCRAQNRTHRGESLHRYFMNITWDNRDYSFNEDGFLVNPSLVVISLTRDRTWEVVGSWEQQTLRLKYPLWSRYGRFLQPVDDTQHLTVATLEERPFVIVEPADPISGTCIRDSVPCRSQLNRTHSPPPDAPRPEKRCCKGFCIDILKRLAHTIGFSYDLYLVTNGKHGKKIDGVWNGMIGEVFYQRADMAIGSLTINEERSEIVDFSVPFVETGISVMVARSNGTVSPSAFLEPYSPAVWVMMFVMCLTVVAVTVFIFEYLSPVGYNRSLATGKRPGGSTFTIGKSIWLLWALVFNNSVPVENPRGTTSKIMVLVWAFFAVIFLASYTANLAAFMIQEEYVDTVSGLSDRKFQRPQEQYPPLKFGTVPNGSTEKNIRSNYPDMHSYMVRYNQPRVEEALTQLKAGKLDAFIYDAAVLNYMARKDEGCKLVTIGSGKVFATTGYGIALHKGSRWKRPIDLALLQFLGDDEIEMLERLWLSGICHNDKIEVMSSKLDIDNMAGVFYMLLVAMGLSLLVFAWEHLVYWRLRHCLGPTHRMDFLLAFSRGMYSCCSAEAAPPPAKPPPPPQPLPSPAYPAPRPAPGPAPFVPRERASVDRWRRTKGAGPPGGAGLADGFHRYYGPIEPQGLGLGLGEARAAPRGAAGRPLSPPAAQPPQKPPPSYFAIVRDKEPAEPPAGAFPGFPSPPAPPAAAATAVGPPLCRLAFEDESPPAPARWPRSDPESQPLLGPGAGGAGGTGGAGGGAPAAPPPCRAAPPPCPYLDLEPSPSDSEDSESLGGASLGGLEPWWFADFPYPYAERLGPPPGRYWSVDKLGGWRAGSWDYLPPRSGPAAWHCRHCASLELLPPPRHLSCSHDGLDGGWWAPPPPPWAAGPLPRRRARCGCPRSHPHRPRASHRTPAAAAPHHHRHRRAAGGWDLPPPAPTSRSLEDLSSCPRAAPARRLTGPSRHARRCPHAAHWGPPLPTASHRRHRGGDLGTRRGSAHFSSLESEV

SEQ ID NO: 29359 - protein, 1076 aa, Homo sapiens
  REGION 1..1076: note = ENSP00000381098
MIAVSFKCRCQILRRLTKDESPYTKSASQTKPPDGALAVRRQSIPEEFKGSTVVELMKKEGTTLGLTVSGGIDKDGKPRVSNLRQGGIAARSDQLDVGDYIKAVNGINLAKFRHDEIISLLKNVGERVVLEVEYELPPVSVQGSSVIFRTVEVTLHKEGNTFGFVIRGGAHDDRNKSRPVVITCVRPGGPADREGTIKPGDRLLSVDGIRLLGTTHAEAMSILKQCGQEAALLIEYDVSVMDSVATASGPLLVEVAKTPGASLGVALTTSMCCNKQVIVIDKIKSASIADRCGALHVGDHILSIDGTSMEYCTLAEATQFLANTTDQVKLEILPHHQTRLALKGPDHAALVSSSFSPTSMSAYSLSSLNMGTLPRSLYSTSPRGTMMRRRLKKKDFKSSLSLASSTVGLAGQVVHTETTEVVLTADPVTGFGIQLQGSVFATETLSSPPLISYIEADSPAERCGVLQIGDRVMAINGIPTEDSTFEEASQLLRDSSITSKVTLEIEFDVAESVIPSSGTFHVKLPKKHNVELGITISSPSSRKPGDPLVISDIKKGSVAHRTGTLELGDKLLAIDNIRLDNCSMEDAVQILQQCEDLVKLKIRKDEDNSDEQESSGAIIYTVELKRYGGPLGITISGTEEPFDPIIISSLTKGGLAERTGAIHIGDRILAINSSSLKGKPLSEAIHLLQMAGETVTLKIKKQTDAQSASSPKKFPISSHLSDLGDVEEDSSPAQKPGKLSDMYPSTVPSVDSAVDSWDGSAIDTSYGTQGTSFQASGYNFNTYDWRSPKQRGSLSPVTKPRSQTYPDVGLSYEDWDRSTASGFAGAADSAETEQEENFWSQALEDLETCGQSGILRELEEKADRRVSLRNMTLLATIMSGSTMSLNHEAPTPRSQLGRQASFQERSSSRPHYSQTTRSNTLPSDVGRKSVTLRKMKQEIKEIMSPTPVELHKVTLYKDSDMEDFGFSVADGLLEKGVYVKNIRPAGPGDLGGLKPYDRLLQVNHVRTRDFDCCLVVPLIAESGNKLDLVISRNPLASQKSIDQQSLPGDWSEQNSAFFQQPSHGGNLETREPTNTL

SEQ ID NO: 29360 - protein, 928 aa, Homo sapiens
  REGION 1..928: note = ENSP00000439053
  VARIANT 1: note = Any amino acid
XPGGPADREGTIKPGDRLLSVDGIRLLGTTHAEAMSILKQCGQEAALLIEYDVSVMDSVATASGPLLVEVAKTPGASLGVALTTSMCCNKQVIVIDKIKSASIADRCGALHVGDHILSIDGTSMEYCTLAEATQFLANTTDQVKLEILPHHQTRLALKGPDHVKIQRSDRQLTWDSWASNHSSLHTNHHYNTYHPDHCRVPALTFPKAPPPNSPPALVSSSFSPTSMSAYSLSSLNMGTLPRSLYSTSPRGTMMRRRLKKKDFKSSLSLASSTVGLAGQVVHTETTEVVLTADPVTGFGIQLQGSVFATETLSSPPLISYIEADSPAERCGVLQIGDRVMAINGIPTEDSTFEEASQLLRDSSITSKVTLEIEFDVAESVIPSSGTFHVKLPKKHNVELGITISSPSSRKPGDPLVISDIKKGSVAHRTGTLELGDKLLAIDNIRLDNCSMEDAVQILQQCEDLVKLKIRKDEDNSDEQESSGAIIYTVELKRYGGPLGITISGTEEPFDPIIISSLTKGGLAERTGAIHIGDRILAINSSSLKGKPLSEAIHLLQMAGETVTLKIKKQTDAQSASSPKKFPISSHLSDLGDVEEDSSPAQKPGKLSDMYPSTVPSVDSAVDSWDGSAIDTSYGTQGTSFQASGYNFNTYDWRSPKQRGSLSPVTKPRSQTYPDVGLSYEDWDRSTASGFAGAADSAETEQEENFWSQALEDLETCGQSGILRELEATIMSGSTMSLNHEAPTPRSQLGRQASFQERSSSRPHYSQTTRSNTLPSDVGRKSVTLRKMKQEIKEIMSPTPVELHKVTLYKDSDMEDFGFSVADGLLEKGVYVKNIRPAGPGDLGGLKPYDRLLQVNHVRTRDFDCCLVVPLIAESGNKLDLVISRNPLASQKSIDQQSLPGDWSEQNSAFFQQPSHGGNLETREPTNTL

SEQ ID NO: 29361 - protein, 121 aa, Homo sapiens
  REGION 1..121: note = ENSP00000443006
LEVEYELPPVSVQGSSVIFRTVEVTLHKEGNTFGFVIRGGAHDDRNKSRPVVITCVRPGGPADREGTIKPGDRLLSVDGIRLLGTTHAEAMSILKQCGQEAALLIEYDVSVMGESCPNQRL

SEQ ID NO: 29362 - protein, 1056 aa, Homo sapiens
  REGION 1..1056: note = ENSP00000446047
MIAVSFKCRCQILRRLTKDESPYTKSASQTKPPDGALAVRRQSIPEEFKGSTVVELMKKEGTTLGLTVSGGIDKDGKPRVSNLRQGGIAARSDQLDVGDYIKAVNGINLAKFRHDEIISLLKNVGERVVLEVEYELPPVSVQGSSVIFRTVEVTLHKEGNTFGFVIRGGAHDDRNKSRPVVITCVRPGGPADREGTIKPGDRLLSVDGIRLLGTTHAEAMSILKQCGQEAALLIEYDVSVMDSVATASGPLLVEVAKTPGASLGVALTTSMCCNKQVIVIDKIKSASIADRCGALHVGDHILSIDGTSMEYCTLAEATQFLANTTDQVKLEILPHHQTRLALKGPDHAALVSSSFSPTSMSAYSLSSLNMGTLPRSLYSTSPRGTMMRRRLKKKDFKSSLSLASSTVGLAGQVVHTETTEVVLTADPVTGFGIQLQGSVFATETLSSPPLISYIEADSPAERCGVLQIGDRVMAINGIPTEDSTFEEASQLLRDSSITSKVTLEIEFDVAESVIPSSGTFHVKLPKKHNVELGITISSPSSRKPGDPLVISDIKKGSVAHRTGTLELGDKLLAIDNIRLDNCSMEDAVQILQQCEDLVKLKIRKDEDNSDEQESSGAIIYTVELKRYGGPLGITISGTEEPFDPIIISSLTKGGLAERTGAIHIGDRILAINSSSLKGKPLSEAIHLLQMAGETVTLKIKKQTDAQSASSPKKFPISSHLSDLGDVEEDSSPAQKPGKLSDMYPSTVPSVDSAVDSWDGSAIDTSYGTQGTSFQASGYNFNTYDWRSPKQRGSLSPVTKPRSQTYPDVGLSYEDWDRSTASGFAGAADSAETEQEENFWSQALEDLETCGQSGILRELEATIMSGSTMSLNHEAPTPRSQLGRQASFQERSSSRPHYSQTTRSNTLPSDVGRKSVTLRKMKQEIKEIMSPTPVELHKVTLYKDSDMEDFGFSVADGLLEKGVYVKNIRPAGPGDLGGLKPYDRLLQVNHVRTRDFDCCLVVPLIAESGNKLDLVISRNPLASQKSIDQQSLPGDWSEQNSAFFQQPSHGGNLETRE

SEQ ID NO: 29363 - protein, 876 aa, Homo sapiens
  REGION 1..876: note = ENSP00000446024
MKKEGTTLGLTVSGGIDKDGKPRVSNLRQGGIAARSDQLDVGDYIKAVNGINLAKFRHDEIISLLKNVGERVVLEVEYELPPVSVQGSSVIFRTVEVTLHKEGNTFGFVIRGGAHDDRNKSRPVVITCVRPGGPADREGTIKPGDRLLSVDGIRLLGTTHAEAMSILKQCGQEAALLIEYDVSVMDSVATASGPLLVEVAKTPGASLGVALTTSMCCNKQVIVIDKIKSASIADRCGALHVGDHILSIDGTSMEYCTLAEATQFLANTTDQVKLEILPHHQTRLALKGPDHAALVSSSFSPTSMSAYSLSSLNMGTLPRSLYSTSPRGTMMRRRLKKKDFKSSLSLASSTVGLAGQVVHTETTEVVLTADPVTGFGIQLQGSVFATETLSSPPLISYIEADSPAERCGVLQIGDRVMAINGIPTEDSTFEEASQLLRDSSITSKVTLEIEFDVAESVIPSSGTFHVKLPKKHNVELGITISSPSSRKPGDPLVISDIKKGSVAHRTGTLELGDKLLAIDNIRLDNCSMEDAVQILQQCEDLVKLKIRKDEDNSDEQESSGAIIYTVELKRYGGPLGITISGTEEPFDPIIISSLTKGGLAERTGAIHIGDRILAINSSSLKGKPLSEAIHLLQMAGETVTLKIKKQTDAQSASSPKKFPISSHLSDLGDVEEDSSPAQKPGKLSDMYPSTVPSVDSAVDSWDGSAIDTSYGTQGTSFQASGYNFNTYDWRSPKQRGSLSPVTKPRSQTYPDVGLSYEDWDRSTASGFAGAADSAETEQEENFWSQALEDLETCGQSGILRELEEKADRRVSLRNMTLLATIMSGSTMSLNHEAPTPRSQLGRQASFQERSSSRPHYSQTTRSNTLPSDVGRKSVTL

SEQ ID NO: 29364 - protein, 787 aa, Homo sapiens
  REGION 1..787: note = ENSP00000446011
MKKEGTTLGLTVSGGIDKDGKPRVSNLRQGGIAARSDQLDVGDYIKAVNGINLAKFRHDEIISLLKNVGERVVLEVEYELPPVSVQGSSVIFRTVEVTLHKEGNTFGFVIRGGAHDDRNKSRPVVITCVRPGGPADREGTIKPGDRLLSVDGIRLLGTTHAEAMSILKQCGQEAALLIEYDVSVMDSVATASGPLLVEVAKTPGASLGVALTTSMCCNKQVIVIDKIKSASIADRCGALHVGDHILSIDGTSMEYCTLAEATQFLANTTDQVKLEILPHHQTRLALKGPDHVSLASSTVGLAGQVVHTETTEVVLTADPVTGFGIQLQGSVFATETLSSPPLISYIEADSPAERCGVLQIGDRVMAINGIPTEDSTFEEASQLLRDSSITSKVTLEIEFDVAESVIPSSGTFHVKLPKKHNVELGITISSPSSRKPGDPLVISDIKKGSVAHRTGTLELGDKLLAIDNIRLDNCSMEDAVQILQQCEDLVKLKIRKDEDNSDEQESSGAIIYTVELKRYGGPLGITISGTEEPFDPIIISSLTKGGLAERTGAIHIGDRILAINSSSLKGKPLSEAIHLLQMAGETVTLKIKKQTDAQSASSPKKFPISSHLSDLGDVEEDSSPAQKPGKLSDMYPSTVPSVDSAVDSWDGSAIDTSYGTQGTSFQASGYNFNTYDWRSPKQRGSLSPVTKPRSQTYPDVGLSYEDWDRSTASGFAGAADSAETEQEENFWSQALEDLETCGQSGILRELEATIMSGSTMSLNHEAPTPRSQLGRQASFQERSSSRP

SEQ ID NO: 29365 - protein, 283 aa, Homo sapiens
  REGION 1..283: note = ENSP00000443860
  VARIANT 1: note = Any amino acid
XVITCVRPGGPADREGTIKPGDRLLSVDGIRLLGTTHAEAMSILKQCGQEAALLIEYDVSVMDSVATASGPLLVEVAKTPGASLGVALTTSMCCNKQVIVIDKIKSASIADRCGALHVGDHILSIDGTSMEYCTLAEATQFLANTTDQVKLEILPHHQTRLALKGPDHALVSSSFSPTSMSAYSLSSLNMGTLPRSLYSTSPRGTMMRRRLKKKDFKSSLSLASSTVGLAGQVVHTETTEVVLTADPVTGFGIQLQGSVFATETLSSPPLISYIEADSPAERC

SEQ ID NO: 29366 - protein, 77 aa, Homo sapiens
  REGION 1..77: note = ENSP00000440918
  VARIANT 1: note = Any amino acid
XSVATASGPLLVEVAKTPGASLGVALTTSMCCNKQVIVIDKIKSASIADSENSEERQATYLGFLGQQPQQPSHQPSL

SEQ ID NO: 29367 - protein, 210 aa, Homo sapiens
  REGION 1..210: note = ENSP00000439124
MIAVSFKCRCQILRRLTKEEFKGSTVVELMKKEGTTLGLTVSGGIDKDGKPRVSNLRQGGIAARSDQLDVGDYIKAVNGINLAKFRHDEIISLLKNVGERVVLEVEYELPPVSVQGSSVIFRTVEVTLHKEGNTFGFVIRGGAHDDRNKSRPVVITCVRPGGPADREGTIKPGDRLLSVDGIRLLGTTHAEAMSILKQCGQEAALLIEYD

SEQ ID NO: 29368 - protein, 149 aa, Homo sapiens
  REGION 1..149: note = ENSP00000438500
MKKEGTTLGLTVSGGIDKDGKPRVSNLRQGGIAARSDQLDVGDYIKAVNGINLAKFRHDEIISLLKNVGERVVLEVEYELPPVSVQGSSVIFRTVEVTLHKEGNTFGFVIRGGAHDDRNKSRPVVITCVRPGGPADREGTIKPGDRLLS

SEQ ID NO: 29369 - protein, 120 aa, Homo sapiens
  REGION 1..120: note = ENSP00000443392
MKKEGTTLGLTVSGGIDKDGKPRVSNLRQGGIAARSDQLDVGDYIKAVNGINLAKFRHDEIISLLKNVGERVVLEVEYELPPVSVQGSSVIFRTVEVTLHKEGNTFGFVIRGGAHDDRNK

SEQ ID NO: 29370 - protein, 188 aa, Homo sapiens
  REGION 1..188: note = ENSP00000438921
MDRFLGFVKAIRRSRRRKGKKYRPEEDYHEGYEDVYYYASEHFRNESPYTKSASQTKPPDGALAVRRQSIPEEFKGSTVVELMKKEGTTLGLTVSGGIDKDGKPRVSNLRQGGIAARSDQLDVGDYIKAVNGINLAKFRHDEIISLLKNVGERVVLEVEYELPPVSVQGSSVIFRTVEVTLHKEGNTF

SEQ ID NO: 29371 - protein, 15 aa, Homo sapiens
  REGION 1..15: note = ENSP00000446067
MKKEGTTLGLTVSGG

SEQ ID NO: 29372 - protein, 1128 aa, Homo sapiens
  REGION 1..1128: note = ENSP00000352780
MIAVSFKCRCQILRRLTKDESPYTKSASQTKPPDGALAVRRQSIPEEFKGSTVVELMKKEGTTLGLTVSGGIDKDGKPRVSNLRQGGIAARSDQLDVGDYIKAVNGINLAKFRHDEIISLLKNVGERVVLEVEYELPPVSVQGSSVIFRTVEVTLHKEGNTFGFVIRGGAHDDRNKSRPVVITCVRPGGPADREGTIKPGDRLLSVDGIRLLGTTHAEAMSILKQCGQEAALLIEYDVSVMDSVATASGPLLVEVAKTPGASLGVALTTSMCCNKQVIVIDKIKSASIADRCGALHVGDHILSIDGTSMEYCTLAEATQFLANTTDQVKLEILPHHQTRLALKGPDHVKIQRSDRQLTWDSWASNHSSLHTNHHYNTYHPDHCRVPALTFPKAPPPNSPPALVSSSFSPTSMSAYSLSSLNMGTLPRSLYSTSPRGTMMRRRLKKKDFKSSLSLASSTVGLAGQVVHTETTEVVLTADPVTGFGIQLQGSVFATETLSSPPLISYIEADSPAERCGVLQIGDRVMAINGIPTEDSTFEEASQLLRDSSITSKVTLEIEFDVAESVIPSSGTFHVKLPKKHNVELGITISSPSSRKPGDPLVISDIKKGSVAHRTGTLELGDKLLAIDNIRLDNCSMEDAVQILQQCEDLVKLKIRKDEDNSDEQESSGAIIYTVELKRYGGPLGITISGTEEPFDPIIISSLTKGGLAERTGAIHIGDRILAINSSSLKGKPLSEAIHLLQMAGETVTLKIKKQTDAQSASSPKKFPISSHLSDLGDVEEDSSPAQKPGKLSDMYPSTVPSVDSAVDSWDGSAIDTSYGTQGTSFQASGYNFNTYDWRSPKQRGSLSPVTKPRSQTYPDVGLSYEDWDRSTASGFAGAADSAETEQEENFWSQALEDLETCGQSGILRELEEKADRRVSLRNMTLLATIMSGSTMSLNHEAPTPRSQLGRQASFQERSSSRPHYSQTTRSNTLPSDVGRKSVTLRKMKQEIKEIMSPTPVELHKVTLYKDSDMEDFGFSVADGLLEKGVYVKNIRPAGPGDLGGLKPYDRLLQVNHVRTRDFDCCLVVPLIAESGNKLDLVISRNPLASQKSIDQQSLPGDWSEQNSAFFQQPSHGGNLETREPTNTL

SEQ ID NO: 29373 - protein, 688 aa, Homo sapiens
  REGION 1..688: note = ENSP00000317578
MADLEAVLADVSYLMAMEKSKATPAARASKRIVLPEPSIRSVMQKYLAERNEITFDKIFNQKIGFLLFKDFCLNEINEAVPQVKFYEEIKEYEKLDNEEDRLCRSRQIYDAYIMKELLSCSHPFSKQAVEHVQSHLSKKQVTSTLFQPYIEEICESLRGDIFQKFMESDKFTRFCQWKNVELNIHLTMNEFSVHRIIGRGGFGEVYGCRKADTGKMYAMKCLDKKRIKMKQGETLALNERIMLSLVSTGDCPFIVCMTYAFHTPDKLCFILDLMNGGDLHYHLSQHGVFSEKEMRFYATEIILGLEHMHNRFVVYRDLKPANILLDEHGHARISDLGLACDFSKKKPHASVGTHGYMAPEVLQKGTAYDSSADWFSLGCMLFKLLRGHSPFRQHKTKDKHEIDRMTLTVNVELPDTFSPELKSLLEGLLQRDVSKRLGCHGGGSQEVKEHSFFKGVDWQHVYLQKYPPPLIPPRGEVNAADAFDIGSFDEEDTKGIKLLDCDQELYKNFPLVISERWQQEVTETVYEAVNADTDKIEARKRAKNKQLGHEEDYALGKDCIMHGYMLKLGNPFLTQWQRRYFYLFPNRLEWRGEGESRQNLLTMEQILSVEETQIKDKKCILFRIKGGKQFVLQCESDPEFVQWKKELNETFKEAQRLLRRAPKFLNKPRSGTVELPKPSLCHRNSNGL

SEQ ID NO: 29374 - protein, 45 aa, Homo sapiens
  REGION 1..45: note = ENSP00000393688
TPAARASKRIVLPEPSIRSVMQKYLAERNEITFDKIFNQKIDKGI

SEQ ID NO: 29375 - protein, 387 aa, Homo sapiens
  REGION 1..387: note = ENSP00000478925
MADLEAVLADVSYLMAMEKSKATPAARASKRIVLPEPSIRSVMQKYLAERNEITFDKIFNQKIGFLLFKDFCLNEINEAVPQVKFYEEIKEYEKLDNEEDRLCRSRQIYDAYIMKELLSCSHPFSKQAVEHVQSHLSKKQVTSTLFQPYIEEICESLRGDIFQKFMESDKFTRFCQWKNVELNIHLTMNEFSVHRIIGRGGFGEVYGCRKADTGKMYAMKCLDKKRIKMKQGETLALNERIMLSLVSTGDCPFIVCMTYAFHTPDKLCFILDLMNGGDLHYHLSQHGVFSEKEMRFYATEIILGLEHMHNRFVVYRDLKPANILLDEHGHARISDLGLACDFSKKKPHASVGTHGYMAPEVLQKGTAYDSSADWFSLGCMLFKLLRG

SEQ ID NO: 29376 - protein, 500 aa, Homo sapiens
  REGION 1..500: note = ENSP00000381128
MELENIVANSLLLKARQEKDYSSLCDKQPIGRRLFRQFCDTKPTLKRHIEFLDAVAEYEVADDEDRSDCGLSILDRFFNDKLAAPLPEIPPDVVTECRLGLKEENPSKKAFEECTRVAHNYLRGEPFEEYQESSYFSQFLQWKWLERQPVTKNTFRHYRVLGKGGFGEVCACQVRATGKMYACKKLQKKRIKKRKGEAMALNEKRILEKVQSRFVVSLAYAYETKDALCLVLTIMNGGDLKFHIYNLGNPGFDEQRAVFYAAELCCGLEDLQRERIVYRDLKPENILLDDRGHIRISDLGLATEIPEGQRVRGRVGTVGYMAPEVVNNEKYTFSPDWWGLGCLIYEMIQGHSPFKKYKEKVKWEEVDQRIKNDTEEYSEKFSEDAKSICRMLLTKNPSKRLGCRGEGAAGVKQHPVFKDINFRRLEANMLEPPFCPDPHAVYCKDVLDIEQFSVVKGIYLDTADEDFYARFATGCVSIPWQNEGCLTMVPSEKEVEPKQC

SEQ ID NO: 29377 - protein, 84 aa, Homo sapiens
  REGION 1..84: note = ENSP00000421650
MELENIVANSLLLKARQVLCIPPQKHQLVQPFSGRPPQSSVQSSVSDLMSPLPASQESWRQSLGPQVPVLATVVLHTPSLLRNC

SEQ ID NO: 29378 - protein, 578 aa, Homo sapiens [sequence omitted]

SEQ ID NO: 29379 - protein, 546 aa, Homo sapiens
  REGION 1..546: note = ENSP00000264764
MELENIVANSLLLKARQEKDYSSLCDKQPIGRRLFRQFCDTKPTLKRHIEFLDAVAEYEVADDEDRSDCGLSILDRFFNDKLAAPLPEIPPDVVTECRLGLKEENPSKKAFEECTRVAHNYLRGEPFEEYQESSYFSQFLQWKWLERQPVTKNTFRHYRVLGKGGFGEVCACQVRATGKMYACKKLQKKRIKKRKGEAMALNEKRILEKVQSRFVVSLAYAYETKDALCLVLTIMNGGDLKFHIYNLGNPGFDEQRAVFYAAELCCGLEDLQRERIVYRDLKPENILLDDRGHIRISDLGLATEIPEGQRVRGRVGTVGYMAPEVVNNEKYTFSPDWWGLGCLIYEMIQGHSPFKKYKEKVKWEEVDQRIKNDTEEYSEKFSEDAKSICRMLLTKNPSKRLGCRGEGAAGVKQHPVFKDINFRRLEANMLEPPFCPDPHAVYCKDVLDIEQFSVVKGIYLDTADEDFYARFATGCVSIPWQNEMIESGCFKDINKSESEEALPLDLDKNIHTPVSRPNRGFFYRLFRRGGCLTMVPSEKEVEPKQC

SEQ ID NO: 29380 - protein, 532 aa, Homo sapiens
  REGION 1..532: note = ENSP00000427445
MELENIVANSLLLKARQGGYGKKSGRSKKWKEILTLPPVSQCSELRHSIEKDYSSLCDKQPIGRRLFRQFCDTKPTLKRHIEFLDAVAEYEVADDEDRSDCGLSILDRFFNDKLAAPLPEIPPDVVTECRLGLKEENPSKKAFEECTRVAHNYLRGEPFEEYQESSYFSQFLQWKWLERQPVTKNTFRHYRVLGKGGFGEVCACQVRATGKMYACKKLQKKRIKKRKGEAMALNEKRILEKVQSRFVVSLAYAYETKDALCLVLTIMNGGDLKFHIYNLGNPGFDEQRAVFYAAELCCGLEDLQRERIVYRDLKPENILLDDRGHIRISDLGLATEIPEGQRVRGRVGTVGYMAPEVVNNEKYTFSPDWWGLGCLIYEMIQGHSPFKKYKEKVKWEEVDQRIKNDTEEYSEKFSEDAKSICRMLLTKNPSKRLGCRGEGAAGVKQHPVFKDINFRRLEANMLEPPFCPDPHAVYCKDVLDIEQFSVVKGIYLDTADEDFYARFATGCVSIPWQNEGCLTMVPSEKEVEPKQC

SEQ ID NO: 29381 - protein, 590 aa, Homo sapiens
  REGION 1..590: note = ENSP00000376609
MELENIVANTVLLKAREGGGGKRKGKSKKWKEILKFPHISQCEDLRRTIDRDYCSLCDKQPIGRLLFRQFCETRPGLECYIQFLDSVAEYEVTPDEKLGEKGKEIMTKYLTPKSPVFIAQVGQDLVSQTEEKLLQKPCKELFSACAQSVHEYLRGEPFHEYLDSMFFDRFLQWKWLERQPVTKNTFRQYRVLGKGGFGEVCACQVRATGKMYACKRLEKKRIKKRKGESMALNEKQILEKVNSQFVVNLAYAYETKDALCLVLTIMNGGDLKFHIYNMGNPGFEEERALFYAAEILCGLEDLHRENTVYRDLKPENILLDDYGHIRISDLGLAVKIPEGDLIRGRVGTVGYMAPEVLNNQRYGLSPDYWGLGCLIYEMIEGQSPFRGRKEKVKREEVDRRVLETEEVYSHKFSEEAKSICKMLLTKDAKQRLGCQEEGAAEVKRHPFFRNMNFKRLEAGMLDPPFVPDPRAVYCKDVLDIEQFSTVKGVNLDHTDDDFYSKFSTGSVSIPWQNEMIETECFKELNVFGPNGTLPPDLNRNHPPEPPKKGLLQRLFKRQHQNNSKSSPSSKTSFNHHINSNHVSSNSTGSS

SEQ ID NO: 29382 - protein, 906 aa, Homo sapiens
  REGION 1..906: note = ENSP00000424095
MVGLLLFFFPAIFLEVSLLPRSPGRKVLLAGASSQRSVARMDGDVIIGALFSVHHQPPAEKVPERKCGEIREQYGIQRVEAMFHTLDKINADPVLLPNITLGSEIRDSCWHSSVALEQSIEFIRDSLISIRDEKDGINRCLPDGQSLPPGRTKKPIAGVIGPGSSSVAIQVQNLLQLFDIPQIAYSATSIDLSDKTLYKYFLRVVPSDTLQARAMLDIVKRYNWTYVSAVHTEGNYGESGMDAFKELAAQEGLCIAHSDKIYSNAGEKSFDRLLRKLRERLPKARVVVCFCEGMTVRGLLSAMRRLGVVGEFSLIGSDGWADRDEVIEGYEVEANGGITIKLQSPEVRSFDDYFLKLRLDTNTRNPWFPEFWQHRFQCRLPGHLLENPNFKRICTGNESLEENYVQDSKMGFVINAIYAMAHGLQNMHHALCPGHVGLCDAMKPIDGSKLLDFLIKSSFIGVSGEEVWFDEKGDAPGRYDIMNLQYTEANRYDYVHVGTWHEGVLNIDDYKIQMNKSGVVRSVCSEPCLKGQIKVIRKGEVSCCWICTACKENEYVQDEFTCKACDLGWWPNADLTGCEPIPVRYLEWSNIESIIAIAFSCLGILVTLFVTLIFVLYRDTPVVKSSSRELCYIILAGIFLGYVCPFTLIAKPTTTSCYLQRLLVGLSSAMCYSALVTKTNRIARILAGSKKKICTRKPRFMSAWAQVIIASILISVQLTLVVTLIIMEPPMPILSYPSIKEVYLICNTSNLGVVAPLGYNGLLIMSCTYYAFKTRNVPANFNEAKYIAFTMYTTCIIWLAFVPIYFGSNYKIITTCFAVSLSVTVALGCMFTPKMYIIIAKPERNVRSAFTTSDVVRMHVGDGKLPCRSNTFLNIFRRKKAGAGNAKKRQPEFSPTSQCPSAHVQL

SEQ ID NO: 29383 - protein, 908 aa, Homo sapiens
  REGION 1..908: note = ENSP00000347437
MVGLLLFFFPAIFLEVSLLPRSPGRKVLLAGASSQRSVARMDGDVIIGALFSVHHQPPAEKVPERKCGEIREQYGIQRVEAMFHTLDKINADPVLLPNITLGSEIRDSCWHSSVALEQSIEFIRDSLISIRDEKDGINRCLPDGQSLPPGRTKKPIAGVIGPGSSSVAIQVQNLLQLFDIPQIAYSATSIDLSDKTLYKYFLRVVPSDTLQARAMLDIVKRYNWTYVSAVHTEGNYGESGMDAFKELAAQEGLCIAHSDKIYSNAGEKSFDRLLRKLRERLPKARVVVCFCEGMTVRGLLSAMRRLGVVGEFSLIGSDGWADRDEVIEGYEVEANGGITIKLQSPEVRSFDDYFLKLRLDTNTRNPWFPEFWQHRFQCRLPGHLLENPNFKRICTGNESLEENYVQDSKMGFVINAIYAMAHGLQNMHHALCPGHVGLCDAMKPIDGSKLLDFLIKSSFIGVSGEEVWFDEKGDAPGRYDIMNLQYTEANRYDYVHVGTWHEGVLNIDDYKIQMNKSGVVRSVCSEPCLKGQIKVIRKGEVSCCWICTACKENEYVQDEFTCKACDLGWWPNADLTGCEPIPVRYLEWSNIESIIAIAFSCLGILVTLFVTLIFVLYRDTPVVKSSSRELCYIILAGIFLGYVCPFTLIAKPTTTSCYLQRLLVGLSSAMCYSALVTKTNRIARILAGSKKKICTRKPRFMSAWAQVIIASILISVQLTLVVTLIIMEPPMPILSYPSIKEVYLICNTSNLGVVAPLGYNGLLIMSCTYYAFKTRNVPANFNEAKYIAFTMYTTCIIWLAFVPIYFGSNYKIITTCFAVSLSVTVALGCMFTPKMYIIIAKPERNVRSAFTTSDVVRMHVGDGKLPCRSNTFLNIFRRKKAGAGNAKWRTGAQGTAYVAPPLCAREDQ

SEQ ID NO: 29384 - protein, 1194 aa, Homo sapiens
  REGION 1..1194: note = ENSP00000282753
MVGLLLFFFPAIFLEVSLLPRSPGRKVLLAGASSQRSVARMDGDVIIGALFSVHHQPPAEKVPERKCGEIREQYGIQRVEAMFHTLDKINADPVLLPNITLGSEIRDSCWHSSVALEQSIEFIRDSLISIRDEKDGINRCLPDGQSLPPGRTKKPIAGVIGPGSSSVAIQVQNLLQLFDIPQIAYSATSIDLSDKTLYKYFLRVVPSDTLQARAMLDIVKRYNWTYVSAVHTEGNYGESGMDAFKELAAQEGLCIAHSDKIYSNAGEKSFDRLLRKLRERLPKARVVVCFCEGMTVRGLLSAMRRLGVVGEFSLIGSDGWADRDEVIEGYEVEANGGITIKLQSPEVRSFDDYFLKLRLDTNTRNPWFPEFWQHRFQCRLPGHLLENPNFKRICTGNESLEENYVQDSKMGFVINAIYAMAHGLQNMHHALCPGHVGLCDAMKPIDGSKLLDFLIKSSFIGVSGEEVWFDEKGDAPGRYDIMNLQYTEANRYDYVHVGTWHEGVLNIDDYKIQMNKSGVVRSVCSEPCLKGQIKVIRKGEVSCCWICTACKENEYVQDEFTCKACDLGWWPNADLTGCEPIPVRYLEWSNIESIIAIAFSCLGILVTLFVTLIFVLYRDTPVVKSSSRELCYIILAGIFLGYVCPFTLIAKPTTTSCYLQRLLVGLSSAMCYSALVTKTNRIARILAGSKKKICTRKPRFMSAWAQVIIASILISVQLTLVVTLIIMEPPMPILSYPSIKEVYLICNTSNLGVVAPLGYNGLLIMSCTYYAFKTRNVPANFNEAKYIAFTMYTTCIIWLAFVPIYFGSNYKIITTCFAVSLSVTVALGCMFTPKMYIIIAKPERNVRSAFTTSDVVRMHVGDGKLPCRSNTFLNIFRRKKAGAGNANSNGKSVSWSEPGGGQVPKGQHMWHRLSVHVKTNETACNQTAVIKPLTKSYQGSGKSLTFSDTSTKTLYNVEEEEDAQPIRFSPPGSPSMVVHRRVPSAATTPPLPSHLTAEETPLFLAEPALPKGLPPPLQQQQQPPPQQKSLMDQLQGVVSNFSTAIPDFHAVLAGPGGPGNGLRSLYPPPPPPQHLQMLPLQLSTFGEELVSPPADDDDDSERFKLLQEYVYEHEREGNTEEDELEEEEEDLQAASKLTPDDSPALTPPSPFRDSVASGSSVPSSPVSESVLCTPPNVSYASVILRDYKQSSSTL

SEQ ID NO: 29385 - protein, 906 aa, Homo sapiens; identical to SEQ ID NO: 29382
  REGION 1..906: note = ENSP00000425599

SEQ ID NO: 29386 - protein, 1194 aa, Homo sapiens; identical to SEQ ID NO: 29384
  REGION 1..1194: note = ENSP00000354896

SEQ ID NO: 29387 - protein, 912 aa, Homo sapiens
  REGION 1..912: note = ENSP00000440556
MPGKRGLGWWWARLPLCLLLSLYGPWMPSSLGKPKGHPHMNSIRIDGDITLGGLFPVHGRGSEGKPCGELKKEKGIHRLEAMLFALDRINNDPDLLPNITLGARILDTCSRDTHALEQSLTFVQALIEKDGTEVRCGSGGPPIITKPERVVGVIGASGSSVSIMVANILRLFKIPQISYASTAPDLSDNSRYDFFSRVVPSDTYQAQAMVDIVRALKWNYVSTVASEGSYGESGVEAFIQKSREDGGVCIAQSVKIPREPKAGEFDKIIRRLLETSNARAVIIFANEDDIRRVLEAARRANQTGHFFWMGSDSWGSKIAPVLHLEEVAEGAVTILPKRMSVRGFDRYFSSRTLDNNRRNIWFAEFWEDNFHCKLSRHALKKGSHVKKCTNRERIGQDSAYEQEGKVQFVIDAVYAMGHALHAMHRDLCPGRVGLCPRMDPVDGTQLLKYIRNVNFSGIAGNPVTFNENGDAPGRYDIYQYQLRNDSAEYKVIGSWTDHLHLRIERMHWPGSGQQLPRSICSLPCQPGERKKTVKGMPCCWHCEPCTGYQYQVDRYTCKTCPYDMRPTENRTGCRPIPIIKLEWGSPWAVLPLFLAVVGIAATLFVVITFVRYNDTPIVKASGRELSYVLLAGIFLCYATTFLMIAEPDLGTCSLRRIFLGLGMSISYAALLTKTNRIYRIFEQGKRSVSAPRFISPASQLAITFSLISLQLLGICVWFVVDPSHSVVDFQDQRTLDPRFARGVLKCDISDLSLICLLGYSMLLMVTCTVYAIKTRGVPETFNEAKPIGFTMYTTCIVWLAFIPIFFGTSQSADKLYIQTTTLTVSVSLSASVSLGMLYMPKVYIILFHPEQNVPKRKRSLKAVVTAATMSNKFTQKGNFRPNGEAKSELCENLEAPALATKQTYVTYTNHAI

SEQ ID NO: 29388 - protein, 796 aa, Homo sapiens
  REGION 1..796: note = ENSP00000363292
MPAWEPGVAASCGWRAPPCSPLRLCIAPHPCTPPSSHQGNLTCRLPPRSFGFCRCVWVRTRGPSLPGEQVSLAAHESEGAAAQLGSSPEIDPRRPRCLLPESAQIPQISYASTAPDLSDNSRYDFFSRVVPSDTYQAQAMVDIVRALKWNYVSTVASEGSYGESGVEAFIQKSREDGGVCIAQSVKIPREPKAGEFDKIIRRLLETSNARAVIIFANEDDIRRVLEAARRANQTGHFFWMGSDSWGSKIAPVLHLEEVAEGAVTILPKRMSVRDRERIGQDSAYEQEGKVQFVIDAVYAMGHALHAMHRDLCPGRVGLCPRMDPVDGTQLLKYIRNVNFSGIAGNPVTFNENGDAPGRYDIYQYQLRNDSAEYKVIGSWTDHLHLRIERMHWPGSGQQLPRSICSLPCQPGERKKTVKGMPCCWHCEPCTGYQYQVDRYTCKTCPYDMRPTENRTGCRPIPIIKLEWGSPWAVLPLFLAVVGIAATLFVVITFVRYNDTPIVKASGRELSYVLLAGIFLCYATTFLMIAEPDLGTCSLRRIFLGLGMSISYAALLTKTNRIYRIFEQGKRSVSAPRFISPASQLAITFSLISLQLLGICVWFVVDPSHSVVDFQDQRTLDPRFARGVLKCDISDLSLICLLGYSMLLMVTCTVYAIKTRGVPETFNEAKPIGFTMYTTCIVWLAFIPIFFGTSQSADKLYIQTTTLTVSVSLSASVSLGMLYMPKVYIILFHPEQNVPKRKRSLKAVVTAATMSNKFTQKGNFRPNGEAKSELCENLEAPALATKQTYVTYTNHAI

SEQ ID NO: 29389 - protein, 779 aa, Homo sapiens
  REGION 1..779: note = ENSP00000477466
MAVPLGAPCWASALPAWAPPGLPHRSLLTRLLSQHVKPAKIPQISYASTAPDLSDNSRYDFFSRVVPSDTYQAQAMVDIVRALKWNYVSTVASEGSYGESGVEAFIQKSREDGGVCIAQSVKIPREPKAGEFDKIIRRLLETSNARAVIIFANEDDIRRVLEAARRANQTGHFFWMGSDSWGSKIAPVLHLEEVAEGAVTILPKRMSVRGFDRYFSSRTLDNNRRNIWFAEFWEDNFHCKLSRHALKKGSHVKKCTNRERIGQDSAYEQEGKVQFVIDAVYAMGHALHAMHRDLCPGRVGLCPRMDPVDGTQLLKYIRNVNFSGIAGNPVTFNENGDAPGRYDIYQYQLRNDSAEYKVIGSWTDHLHLRIERMHWPGSGQQLPRSICSLPCQPGERKKTVKGMPCCWHCEPCTGYQYQVDRYTCKTCPYDMRPTENRTGCRPIPIIKLEWGSPWAVLPLFLAVVGIAATLFVVITFVRYNDTPIVKASGRELSYVLLAGIFLCYATTFLMIAEPDLGTCSLRRIFLGLGMSISYAALLTKTNRIYRIFEQGKRSVSAPRFISPASQLAITFSLISLQLLGICVWFVVDPSHSVVDFQDQRTLDPRFARGVLKCDISDLSLICLLGYSMLLMVTCTVYAIKTRGVPETFNEAKPIGFTMYTTCIVWLAFIPIFFGTSQSADKLYIQTTTLTVSVSLSASVSLGMLYMPKVYIILFHPEQNVPKRKRSLKAVVTAATMSNKFTQKGNFRPNGEAKSELCENLEAPALATKQTYVTYTNHAI

SEQ ID NO: 29390 - protein, 743 aa, Homo sapiens
  REGION 1..743: note = ENSP00000437730
MSCKIPQISYASTAPDLSDNSRYDFFSRVVPSDTYQAQAMVDIVRALKWNYVSTVASEGSYGESGVEAFIQKSREDGGVCIAQSVKIPREPKAGEFDKIIRRLLETSNARAVIIFANEDDIRRVLEAARRANQTGHFFWMGSDSWGSKIAPVLHLEEVAEGAVTILPKRMSVRGFDRYFSSRTLDNNRRNIWFAEFWEDNFHCKLSRHALKKGSHVKKCTNRERIGQDSAYEQEGKVQFVIDAVYAMGHALHAMHRDLCPGRVGLCPRMDPVDGTQLLKYIRNVNFSGIAGNPVTFNENGDAPGRYDIYQYQLRNDSAEYKVIGSWTDHLHLRIERMHWPGSGQQLPRSICSLPCQPGERKKTVKGMPCCWHCEPCTGYQYQVDRYTCKTCPYDMRPTENRTGCRPIPIIKLEWGSPWAVLPLFLAVVGIAATLFVVITFVRYNDTPIVKASGRELSYVLLAGIFLCYATTFLMIAEPDLGTCSLRRIFLGLGMSISYAALLTKTNRIYRIFEQGKRSVSAPRFISPASQLAITFSLISLQLLGICVWFVVDPSHSVVDFQDQRTLDPRFARGVLKCDISDLSLICLLGYSMLLMVTCTVYAIKTRGVPETFNEAKPIGFTMYTTCIVWLAFIPIFFGTSQSADKLYIQTTTLTVSVSLSASVSLGMLYMPKVYIILFHPEQNVPKRKRSLKAVVTAATMSNKFTQKGNFRPNGEAKSELCENLEAPALATKQTYVTYTNHAI

SEQ ID NO: 29391 - protein, 772 aa, Homo sapiens
  REGION 1..772: note = ENSP00000398456
MVQTLPKLFPHDGAKRKKRTLRTSGPCFGGGGQIPQISYASTAPDLSDNSRYDFFSRVVPSDTYQAQAMVDIVRALKWNYVSTVASEGSYGESGVEAFIQKSREDGGVCIAQSVKIPREPKAGEFDKIIRRLLETSNARAVIIFANEDDIRRVLEAARRANQTGHFFWMGSDSWGSKIAPVLHLEEVAEGAVTILPKRMSVRGFDRYFSSRTLDNNRRNIWFAEFWEDNFHCKLSRHALKKGSHVKKCTNRERIGQDSAYEQEGKVQFVIDAVYAMGHALHAMHRDLCPGRVGLCPRMDPVDGTQLLKYIRNVNFSGIAGNPVTFNENGDAPGRYDIYQYQLRNDSAEYKVIGSWTDHLHLRIERMHWPGSGQQLPRSICSLPCQPGERKKTVKGMPCCWHCEPCTGYQYQVDRYTCKTCPYDMRPTENRTGCRPIPIIKLEWGSPWAVLPLFLAVVGIAATLFVVITFVRYNDTPIVKASGRELSYVLLAGIFLCYATTFLMIAEPDLGTCSLRRIFLGLGMSISYAALLTKTNRIYRIFEQGKRSVSAPRFISPASQLAITFSLISLQLLGICVWFVVDPSHSVVDFQDQRTLDPRFARGVLKCDISDLSLICLLGYSMLLMVTCTVYAIKTRGVPETFNEAKPIGFTMYTTCIVWLAFIPIFFGTSQSADKLYIQTTTLTVSVSLSASVSLGMLYMPKVYIILFHPEQNVPKRKRSLKAVVTAATMSNKFTQKGNFRPNGEAKSELCENLEAPALATKQTYVTYTNHAI

SEQ ID NO: 29392 - protein, 181 aa, Homo sapiens
  REGION 1..181: note = ENSP00000477016
MPGKRGLGWWWARLPLCLLLSLYGPWMPSSLGKPKGHPHMNSIRIDGDITLGGLFPVHGRGSEGKPCGELKKEKGIHRLEAMLFALDRINNDPDLLPNITLGARILDTCSRDTHALEQSLTFVQALIEKDGTEVRCGSGGPPIITKPERVVGVIGASGSSVSIMVANILRLFKGACASPSR

SEQ ID NO: 29393 - protein, 96 aa, Homo sapiens
  REGION 1..96: note = ENSP00000476561
MGSDSWGSKIAPVLHLEEVAEGAVTILPKRMSVRGFDRYFSSRTLDNNRRNIWFAEFWEDNFHCKLSRHALKKGSHVKKCTNRERIGQDSAYEQEG

SEQ ID NO: 29394 - protein, 779 aa, Homo sapiens; identical to SEQ ID NO: 29389
  REGION 1..779: note = ENSP00000437925

SEQ ID NO: 29395 - protein, 865 aa, Homo sapiens
  REGION 1..865: note = ENSP00000363296
MPGKRGLGWWWARLPLCLLLSLYGPWMPSSLGKPKGHPHMNSIRIDGDITLGGLFPVHGRGSEGKPCGELKKEKGIHRLEAMLFALDRINNDPDLLPNITLGARILDTCSRDTHALEQSLTFVQALIEKDGTEVRCGSGGPPIITKPERVVGVIGASGSSVSIMVANILRLFKIPQISYASTAPDLSDNSRYDFFSRVVPSDTYQAQAMVDIVRALKWNYVSTVASEGSYGESGVEAFIQKSREDGGVCIAQSVKIPREPKAGEFDKIIRRLLETSNARAVIIFANEDDIRRVLEAARRANQTGHFFWMGSDSWGSKIAPVLHLEEVAEGAVTILPKRMSVRDRERIGQDSAYEQEGKVQFVIDAVYAMGHALHAMHRDLCPGRVGLCPRMDPVDGTQLLKYIRNVNFSGIAGNPVTFNENGDAPGRYDIYQYQLRNDSAEYKVIGSWTDHLHLRIERMHWPGSGQQLPRSICSLPCQPGERKKTVKGMPCCWHCEPCTGYQYQVDRYTCKTCPYDMRPTENRTGCRPIPIIKLEWGSPWAVLPLFLAVVGIAATLFVVITFVRYNDTPIVKASGRELSYVLLAGIFLCYATTFLMIAEPDLGTCSLRRIFLGLGMSISYAALLTKTNRIYRIFEQGKRSVSAPRFISPASQLAITFSLISLQLLGICVWFVVDPSHSVVDFQDQRTLDPRFARGVLKCDISDLSLICLLGYSMLLMVTCTVYAIKTRGVPETFNEAKPIGFTMYTTCIVWLAFIPIFFGTSQSADKLYIQTTTLTVSVSLSASVSLGMLYMPKVYIILFHPEQNVPKRKRSLKAVVTAATMSNKFTQKGNFRPNGEAKSELCENLEAPALATKQTYVTYTNHAI

SEQ ID NO: 29396 - protein, 1180 aa, Homo sapiens
  REGION 1..1180: note = ENSP00000305905
MVLLLILSVLLLKEDVRGSAQSSERRVVAHMPGDIIIGALFSVHHQPTVDKVHERKCGAVREQYGIQRVEAMLHTLERINSDPTLLPNITLGCEIRDSCWHSAVALEQSIEFIRDSLISSEEEEGLVRCVDGSSSSFRSKKPIVGVIGPGSSSVAIQVQNLLQLFNIPQIAYSATSMDLSDKTLFKYFMRVVPSDAQQARAMVDIVKRYNWTYVSAVHTEGNYGESGMEAFKDMSAKEGICIAHSYKIYSNAGEQSFDKLLKKLTSHLPKARVVACFCEGMTVRGLLMAMRRLGLAGEFLLLGSDGWADRYDVTDGYQREAVGGITIKLQSPDVKWFDDYYLKLRPETNHRNPWFQEFWQHRFQCRLEGFPQENSKYNKTCNSSLTLKTHHVQDSKMGFVINAIYSMAYGLHNMQMSLCPGYAGLCDAMKPIDGRKLLESLMKTNFTGVSGDTILFDENGDSPGRYEIMNFKEMGKDYFDYINVGSWDNGELKMDDDEVWSKKSNIIRSVCSEPCEKGQIKVIRKGEVSCCWTCTPCKENEYVFDEYTCKACQLGSWPTDDLTGCDLIPVQYLRWGDPEPIAAVVFACLGLLATLFVTVVFIIYRDTPVVKSSSRELCYIILAGICLGYLCTFCLIAKPKQIYCYLQRIGIGLSPAMSYSALVTKTNRIARILAGSKKKICTKKPRFMSACAQLVIAFILICIQLGIIVALFIMEPPDIMHDYPSIREVYLICNTTNLGVVTPLGYNGLLILSCTFYAFKTRNVPANFNEAKYIAFTMYTTCIIWLAFVPIYFGSNYKIITMCFSVSLSATVALGCMFVPKVYIILAKPERNVRSAFTTSTVVRMHVGDGKSSSAASRSSSLVNLWKRRGSSGETLSSNGKSVTWAQNEKSSRGQHLWQRLSIHINKKENPNQTAVIKPFPKSTESRGLGAGAGAGGSAGGVGATGGAGCAGAGPGGPESPDAGPKALYDVAEAEEHFPAPARPRSPSPISTLSHRAGSASRTDDDVPSLHSEPVARSSSSQGSLMEQISSVVTRFTANISELNSMMLSTAAPSPGVGAPLCSSYLIPKEIQLPTTMTTFAEIQPLPAIEVTGGAQPAAGAQAAGDAARESPAAGPEAAAAKPDLEELVALTPPSPFRDSVDSGSTTPNSPVSESALCIPSSPKYDTLIIRDYTQSSSSL

SEQ ID NO: 29397 - protein, 1212 aa, Homo sapiens
  REGION 1..1212: note = ENSP00000306138
MVLLLILSVLLLKEDVRGSAQSSERRVVAHMPGDIIIGALFSVHHQPTVDKVHERKCGAVREQYGIQRVEAMLHTLERINSDPTLLPNITLGCEIRDSCWHSAVALEQSIEFIRDSLISSEEEEGLVRCVDGSSSSFRSKKPIVGVIGPGSSSVAIQVQNLLQLFNIPQIAYSATSMDLSDKTLFKYFMRVVPSDAQQARAMVDIVKRYNWTYVSAVHTEGNYGESGMEAFKDMSAKEGICIAHSYKIYSNAGEQSFDKLLKKLTSHLPKARVVACFCEGMTVRGLLMAMRRLGLAGEFLLLGSDGWADRYDVTDGYQREAVGGITIKLQSPDVKWFDDYYLKLRPETNHRNPWFQEFWQHRFQCRLEGFPQENSKYNKTCNSSLTLKTHHVQDSKMGFVINAIYSMAYGLHNMQMSLCPGYAGLCDAMKPIDGRKLLESLMKTNFTGVSGDTILFDENGDSPGRYEIMNFKEMGKDYFDYINVGSWDNGELKMDDDEVWSKKSNIIRSVCSEPCEKGQIKVIRKGEVSCCWTCTPCKENEYVFDEYTCKACQLGSWPTDDLTGCDLIPVQYLRWGDPEPIAAVVFACLGLLATLFVTVVFIIYRDTPVVKSSSRELCYIILAGICLGYLCTFCLIAKPKQIYCYLQRIGIGLSPAMSYSALVTKTNRIARILAGSKKKICTKKPRFMSACAQLVIAFILICIQLGIIVALFIMEPPDIMHDYPSIREVYLICNTTNLGVVTPLGYNGLLILSCTFYAFKTRNVPANFNEAKYIAFTMYTTCIIWLAFVPIYFGSNYKIITMCFSVSLSATVALGCMFVPKVYIILAKPERNVRSAFTTSTVVRMHVGDGKSSSAASRSSSLVNLWKRRGSSGETLRYKDRRLAQHKSEIECFTPKGSMGNGGRATMSSSNGKSVTWAQNEKSSRGQHLWQRLSIHINKKENPNQTAVIKPFPKSTESRGLGAGAGAGGSAGGVGATGGAGCAGAGPGGPESPDAGPKALYDVAEAEEHFPAPARPRSPSPISTLSHRAGSASRTDDDVPSLHSEPVARSSSSQGSLMEQISSVVTRFTANISELNSMMLSTAAPSPGVGAPLCSSYLIPKEIQLPTTMTTFAEIQPLPAIEVTGGAQPAAGAQAAGDAARESPAAGPEAAAAKPDLEELVALTPPSPFRDSVDSGSTTPNSPVSESALCIPSSPKYDTLIIRDYTQSSSSL

SEQ ID NO: 29398 - protein, 87 aa, Homo sapiens
  REGION 1..87: note = ENSP00000403724
  VARIANT 1: note = Any amino acid
XQIAYSATSMDLSDKTLFKYFMRVVPSDAQQARAMVDIVKRYNWTYVSAVHTEGRGTKKEEMRKRDQTLMLSFMRFKLFSCLSLQRS

SEQ ID NO: 29399 - protein, 298 aa, Homo sapiens
  REGION 1..298: note = ENSP00000376972
MVLLLILSVLLLKEDVRGSAQSSERRVVAHMPGDIIIGALFSVHHQPTVDKVHERKCGAVREQYGIQRVEAMLHTLERINSDPTLLPNITLGCEIRDSCWHSAVALEQSIEFIRDSLISSEEEEGLVRCVDGSSSSFRSKKPIVGVIGPGSSSVAIQVQNLLQLFNIPQIAYSATSMDLSDKTLFKYFMRVVPSDAQQARAMVDIVKRYNWTYVSAVHTEGRGTKKEEMRKRDQTLMLSFMRCVFLRFEEIRWNDSLVYDALENENIQVLSLCFPSSAVIQINTFLSPIALINRLNVT

SEQ ID NO: 29400 - protein, 1180 aa, Homo sapiens; identical to SEQ ID NO: 29396
  REGION 1..1180: note = ENSP00000405690

SEQ ID NO: 29401 - protein, 68 aa, Homo sapiens
  REGION 1..68: note = ENSP00000404161
MNPVPQMEMQKSPVFGHLGSSPEVLWNTRYYTEAAIWKDHLERFFIKTEPQSIRKHPCLISMKVMRRT

SEQ ID NO: 29402 - protein, 122 aa, Homo sapiens
  REGION 1..122: note = ENSP00000393799
MVDIVKALGWNYVSTLASEGSYGEKGVESFTQISKEAGGLCIAQSVRIPQERKDRTIDFDRIIKQLLDTPNSRAVVIFANDEDIKQILAAAKRADQVGHFLWVGSDSWGSKINPLHQHEDIA

SEQ ID NO: 29403 - protein, 922 aa, Homo sapiens
  REGION 1..922: note = ENSP00000419835
MVQLRKLLRVLTLMKFPCCVLEVLLCALAAAARGQEMYAPHSIRIEGDVTLGGLFPVHAKGPSGVPCGDIKRENGIHRLEAMLYALDQINSDPNLLPNVTLGARILDTCSRDTYALEQSLTFVQALIQKDTSDVRCTNGEPPVFVKPEKVVGVIGASGSSVSIMVANILRLFQIPQISYASTAPELSDDRRYDFFSRVVPPDSFQAQAMVDIVKALGWNYVSTLASEGSYGEKGVESFTQISKEAGGLCIAQSVRIPQERKDRTIDFDRIIKQLLDTPNSRAVVIFANDEDIKQILAAAKRADQVGHFLWVGSDSWGSKINPLHQHEDIAEGAITIQPKRATVEGFDAYFTSRTLENNRRNVWFAEYWEENFNCKLTISGSKKEDTDRKCTGQERIGKDSNYEQEGKVQFVIDAVYAMAHALHHMNKDLCADYRGVCPEMEQAGGKKLLKYIRNVNFNGSAGTPVMFNKNGDAPGRYDIFQYQTTNTSNPGYRLIGQWTDELQLNIEDMQWGKGVREIPASVCTLPCKPGQRKKTQKGTPCCWTCEPCDGYQYQFDEMTCQHCPYDQRPNENRTGCQDIPIIKLEWHSPWAVIPVFLAMLGIIATIFVMATFIRYNDTPIVRASGRELSYVLLTGIFLCYIITFLMIAKPDVAVCSFRRVFLGLGMCISYAALLTKTNRIYRIFEQGKKSVTAPRLISPTSQLAITSSLISVQLLGVFIWFGVDPPNIIIDYDEHKTMNPEQARGVLKCDITDLQIICSLGYSILLMVTCTVYAIKTRGVPENFNEAKPIGFTMYTTCIVWLAFIPIFFGTAQSAEKLYIQTTTLTISMNLSASVALGMLYMPKVYIIIFHPELNVQKRKRSFKAVVTAATMSSRLSHKPSDRPNGEAKTELCENVDPNNCIPPVRKSVQKSVTWYTIPPTV

SEQ ID NO: 29404 - protein, 915 aa, Homo sapiens
  REGION 1..915: note = ENSP00000350348
MVQLRKLLRVLTLMKFPCCVLEVLLCALAAAARGQEMYAPHSIRIEGDVTLGGLFPVHAKGPSGVPCGDIKRENGIHRLEAMLYALDQINSDPNLLPNVTLGARILDTCSRDTYALEQSLTFVQALIQKDTSDVRCTNGEPPVFVKPEKVVGVIGASGSSVSIMVANILRLFQIPQISYASTAPELSDDRRYDFFSRVVPPDSFQAQAMVDIVKALGWNYVSTLASEGSYGEKGVESFTQISKEAGGLCIAQSVRIPQERKDRTIDFDRIIKQLLDTPNSRAVVIFANDEDIKQILAAAKRADQVGHFLWVGSDSWGSKINPLHQHEDIAEGAITIQPKRATVEGFDAYFTSRTLENNRRNVWFAEYWEENFNCKLTISGSKKEDTDRKCTGQERIGKDSNYEQEGKVQFVIDAVYAMAHALHHMNKDLCADYRGVCPEMEQAGGKKLLKYIRNVNFNGSAGTPVMFNKNGDAPGRYDIFQYQTTNTSNPGYRLIGQWTDELQLNIEDMQWGKGVREIPASVCTLPCKPGQRKKTQKGTPCCWTCEPCDGYQYQFDEMTCQHCPYDQRPNENRTGCQDIPIIKLEWHSPWAVIPVFLAMLGIIATIFVMATFIRYNDTPIVRASGRELSYVLLTGIFLCYIITFLMIAKPDVAVCSFRRVFLGLGMCISYAALLTKTNRIYRIFEQGKKSVTAPRLISPTSQLAITSSLISVQLLGVFIWFGVDPPNIIIDYDEHKTMNPEQARGVLKCDITDLQIICSLGYSILLMVTCTVYAIKTRGVPENFNEAKPIGFTMYTTCIVWLAFIPIFFGTAQSAEKLYIQTTTLTISMNLSASVALGMLYMPKVYIIIFHPELNVQKRKRSFKAVVTAATMSSRLSHKPSDRPNGEAKTELCENVDPNSPAAKKKYVSYNNLVI

SEQ ID NO: 29405 - protein, 922 aa, Homo sapiens; identical to SEQ ID NO: 29403
  REGION 1..922: note = ENSP00000417536

SEQ ID NO: 29406 - protein, 913 aa, Homo sapiens
  REGION 1..913: note = ENSP00000412329
MVQLRKLLRVLTLMKFPCCVLEVLLCALAAAARGQEMYAPHSIRIEGDVTLGGLFPVHAKGPSGVPCGDIKRENGIHRLEAMLYALDQINSDPNLLPNVTLGARILDTCSRDTYALEQSLTFVQALIQKDTSDVRCTNGEPPVFVKPEKVVGVIGASGSSVSIMVANILRLFQIPQISYASTAPELSDDRRYDFFSRVVPPDSFQAQAMVDIVKALGWNYVSTLASEGSYGEKGVESFTQISKEAGGLCIAQSVRIPQERKDRTIDFDRIIKQLLDTPNSRAVVIFANDEDIKQILAAAKRADQVGHFLWVGSDSWGSKINPLHQHEDIAEGAITIQPKRATVEGFDAYFTSRTLENNRRNVWFAEYWEENFNCKLTISGSKKEDTDRKCTGQERIGKDSNYEQEGKVQFVIDAVYAMAHALHHMNKDLCADYRGVCPEMEQAGGKKLLKYIRNVNFNGSAGTPVMFNKNGDAPGRYDIFQYQTTNTSNPGYRLIGQWTDELQLNIEDMQWGKGVREIPASVCTLPCKPGQRKKTQKGTPCCWTCEPCDGYQYQFDEMTCQHCPYDQRPNENRTGCQDIPIIKLEWHSPWAVIPVFLAMLGIIATIFVMATFIRYNDTPIVRASGRELSYVLLTGIFLCYIITFLMIAKPDVAVCSFRRVFLGLGMCISYAALLTKTNRIYRIFEQGKKSVTAPRLISPTSQLAITSSLISVQLLGVFIWFGVDPPNIIIDYDEHKTMNPEQARGVLKCDITDLQIICSLGYSILLMVTCTVYAIKTRGVPENFNEAKPIGFTMYTTCIVWLAFIPIFFGTAQSAEKLYIQTTTLTISMNLSASVALGMLYMPKVYIIIFHPELNVQKRKRSFKAVVTAATMSSRLSHKPSDRPNGEAKTELCENVDPNNFFFWLYSGTWITL

SEQ ID NO: 29407 - protein, 906 aa, Homo sapiens
  REGION 1..906: note = ENSP00000373987
MVQLRKLLRVLTLMKFPCCVLEVLLCALAAAARGQEMYAPHSIRIEGDVTLGGLFPVHAKGPSGVPCGDIKRENGIHRLEAMLYALDQINSDPNLLPNVTLGARILDTCSRDTYALEQSLTFVQALIQKDTSDVRCTNGEPPVFVKPEKVVGVIGASGSSVSIMVANILRLFQIPQISYASTAPELSDDRRYDFFSRVVPPDSFQAQAMVDIVKALGWNYVSTLASEGSYGEKGVESFTQISKEAGGLCIAQSVRIPQERKDRTIDFDRIIKQLLDTPNSRAVVIFANDEDIKQILAAAKRADQVGHFLWVGSDSWGSKINPLHQHEDIAEGAITIQPKRATVEGFDAYFTSRTLENNRRNVWFAEYWEENFNCKLTISGSKKEDTDRKCTGQERIGKDSNYEQEGKVQFVIDAVYAMAHALHHMNKDLCADYRGVCPEMEQAGGKKLLKYIRNVNFNGSAGTPVMFNKNGDAPGRYDIFQYQTTNTSNPGYRLIGQWTDELQLNIEDMQWGKGVREIPASVCTLPCKPGQRKKTQKGTPCCWTCEPCDGYQYQFDEMTCQHCPYDQRPNENRTGCQDIPIIKLEWHSPWAVIPVFLAMLGIIATIFVMATFIRYNDTPIVRASGRELSYVLLTGIFLCYIITFLMIAKPDVAVCSFRRVFLGLGMCISYAALLTKTNRIYRIFEQGKKSVTAPRLISPTSQLAITSSLISVQLLGVFIWFGVDPPNIIIDYDEHKTMNPEQARGVLKCDITDLQIICSLGYSILLMVTCTVYAIKTRGVPENFNEAKPIGFTMYTTCIVWLAFIPIFFGTAQSAEKLYIQTTTLTISMNLSASVALGMLYMPKVYIIIFHPELNVQKRKRSFKAVVTAATMSSRLSHKPSDRPNGEAKTELCENVDPNSEKCNCY

SEQ ID NO: 29408 - protein, 911 aa, Homo sapiens
  REGION 1..911: note = ENSP00000373986
MVQLRKLLRVLTLMKFPCCVLEVLLCALAAAARGQEMYAPHSIRIEGDVTLGGLFPVHAKGPSGVPCGDIKRENGIHRLEAMLYALDQINSDPNLLPNVTLGARILDTCSRDTYALEQSLTFVQALIQKDTSDVRCTNGEPPVFVKPEKVVGVIGASGSSVSIMVANILRLFQIPQISYASTAPELSDDRRYDFFSRVVPPDSFQAQAMVDIVKALGWNYVSTLASEGSYGEKGVESFTQISKEAGGLCIAQSVRIPQERKDRTIDFDRIIKQLLDTPNSRAVVIFANDEDIKQILAAAKRADQVGHFLWVGSDSWGSKINPLHQHEDIAEGAITIQPKRATVEGFDAYFTSRTLENNRRNVWFAEYWEENFNCKLTISGSKKEDTDRKCTGQERIGKDSNYEQEGKVQFVIDAVYAMAHALHHMNKDLCADYRGVCPEMEQAGGKKLLKYIRNVNFNGSAGTPVMFNKNGDAPGRYDIFQYQTTNTSNPGYRLIGQWTDELQLNIEDMQWGKGVREIPASVCTLPCKPGQRKKTQKGTPCCWTCEPCDGYQYQFDEMTCQHCPYDQRPNENRTGCQDIPIIKLEWHSPWAVIPVFLAMLGIIATIFVMATFIRYNDTPIVRASGRELSYVLLTGIFLCYIITFLMIAKPDVAVCSFRRVFLGLGMCISYAALLTKTNRIYRIFEQGKKSVTAPRLISPTSQLAITSSLISVQLLGVFIWFGVDPPNIIIDYDEHKTMNPEQARGVLKCDITDLQIICSLGYSILLMVTCTVYAIKTRGVPENFNEAKPIGFTMYTTCIVWLAFIPIFFGTAQSAEKLYIQTTTLTISMNLSASVALGMLYMPKVYIIIFHPELNVQKRKRSFKAVVTAATMSSRLSHKPSDRPNGEAKTELCENVDPNITSEDLSLHKED

SEQ ID NO: 29409 - protein, 37 aa, Homo sapiens
  REGION 1..37: note = ENSP00000405194
MAPELHWGDALLSCLSFPILNVLQKSPRLVMHQRHPS

SEQ ID NO: 29410 - protein, 185 aa, Homo sapiens
  REGION 1..185: note = ENSP00000395035
MGFDAYFTSRTLENNRRNVWFAEYWEENFNCKLTISGSKKEDTDRKCTGQERIGKDSNYEQEGKVQFVIDAVYAMAHALHHMNKDLCADYRGVCPEMEQAGGKKLLKYIRNVNFNGSAGTPVMFNKNGDAPGRYDIFQYQTTNTSNPGYRLIGQWTDELQLNIEDMQWGKGVREIPASVCTLPCK

SEQ ID NO: 29411 - protein, 677 aa, Homo sapiens
  REGION 1..677: note = ENSP00000384585
GGLCIAQSVRIPQERKDRTIDFDRIIKQLLDTPNSRAVVIFANDEDIKQILAAAKRADQVGHFLWVGSDSWGSKINPLHQHEDIAEGAITIQPKRATVEGFDAYFTSRTLENNRRNVWFAEYWEENFNCKLTISGSKKEDTDRKCTGQERIGKDSNYEQEGKVQFVIDAVYAMAHALHHMNKDLCADYRGVCPEMEQAGGKKLLKYIRNVNFNGSAGTPVMFNKNGDAPGRYDIFQYQTTNTSNPGYRLIGQWTDELQLNIEDMQWGKGVREIPASVCTLPCKPGQRKKTQKGTPCCWTCEPCDGYQYQFDEMTCQHCPYDQRPNENRTGCQDIPIIKLEWHSPWAVIPVFLAMLGIIATIFVMATFIRYNDTPIVRASGRELSYVLLTGIFLCYIITFLMIAKPDVAVCSFRRVFLGLGMCISYAALLTKTNRIYRIFEQGKKSVTAPRLISPTSQLAITSSLISVQLLGVFIWFGVDPPNIIIDYDEHKTMNPEQARGVLKCDITDLQIICSLGYSILLMVTCTVYAIKTRGVPENFNEAKPIGFTMYTTCIVWLAFIPIFFGTAQSAEKLYIQTTTLTISMNLSASVALGMLYMPKVYIIIFHPELNVQKRKRSFKAVVTAATMSSRLSHKPSDRPNGEAKTELCENVDPNNCIPPVRKSVQKSVTWYTIPPTV

SEQ ID NO: 29412 - protein, 908 aa, Homo sapiens
  REGION 1..908: note = ENSP00000344173
MVCEGKRSASCPCFFLLTAKFYWILTMMQRTHSQEYAHSIRVDGDIILGGLFPVHAKGERGVPCGELKKEKGIHRLEAMLYAIDQINKDPDLLSNITLGVRILDTCSRDTYALEQSLTFVQALIEKDASDVKCANGDPPIFTKPDKISGVIGAAASSVSIMVANILRLFKIPQISYASTAPELSDNTRYDFFSRVVPPDSYQAQAMVDIVTALGWNYVSTLASEGNYGESGVEAFTQISREIGGVCIAQSQKIPREPRPGEFEKIIKRLLETPNARAVIMFANEDDIRRILEAAKKLNQSGHFLWIGSDSWGSKIAPVYQQEEIAEGAVTILPKRASIDGFDRYFRSRTLANNRRNVWFAEFWEENFGCKLGSHGKRNSHIKKCTGLERIARDSSYEQEGKVQFVIDAVYSMAYALHNMHKDLCPGYIGLCPRMSTIDGKELLGYIRAVNFNGSAGTPVTFNENGDAPGRYDIFQYQITNKSTEYKVIGHWTNQLHLKVEDMQWAHREHTHPASVCSLPCKPGERKKTVKGVPCCWHCERCEGYNYQVDELSCELCPLDQRPNMNRTGCQLIPIIKLEWHSPWAVVPVFVAILGIIATTFVIVTFVRYNDTPIVRASGRELSYVLLTGIFLCYSITFLMIAAPDTIICSFRRVFLGLGMCFSYAALLTKTNRIHRIFEQGKKSVTAPKFISPASQLVITFSLISVQLLGVFVWFVVDPPHIIIDYGEQRTLDPEKARGVLKCDISDLSLICSLGYSILLMVTCTVYAIKTRGVPETFNEAKPIGFTMYTTCIIWLAFIPIFFGTAQSAEKMYIQTTTLTVSMSLSASVSLGMLYMPKVYIIIFHPEQNVQKRKRSFKAVVTAATMQSKLIQKGNDRPNGEVKSELCESLETNTSSTKTTYISYSNHSI

SEQ ID NO: 29413 - protein, 908 aa, Homo sapiens
  REGION 1..908: note = ENSP00000351142
MVCEGKRSASCPCFFLLTAKFYWILTMMQRTHSQEYAHSIRVDGDIILGGLFPVHAKGERGVPCGELKKEKGIHRLEAMLYAIDQINKDPDLLSNITLGVRILDTCSRDTYALEQSLTFVQALIEKDASDVKCANGDPPIFTKPDKISGVIGAAASSVSIMVANILRLFKIPQISYASTAPELSDNTRYDFFSRVVPPDSYQAQAMVDIVTALGWNYVSTLASEGNYGESGVEAFTQISREIGGVCIAQSQKIPREPRPGEFEKIIKRLLETPNARAVIMFANEDDIRRILEAAKKLNQSGHFLWIGSDSWGSKIAPVYQQEEIAEGAVTILPKRASIDGFDRYFRSRTLANNRRNVWFAEFWEENFGCKLGSHGKRNSHIKKCTGLERIARDSSYEQEGKVQFVIDAVYSMAYALHNMHKDLCPGYIGLCPRMSTIDGKELLGYIRAVNFNGSAGTPVTFNENGDAPGRYDIFQYQITNKSTEYKVIGHWTNQLHLKVEDMQWAHREHTHPASVCSLPCKPGERKKTVKGVPCCWHCERCEGYNYQVDELSCELCPLDQRPNMNRTGCQLIPIIKLEWHSPWAVVPVFVAILGIIATTFVIVTFVRYNDTPIVRASGRELSYVLLTGIFLCYSITFLMIAAPDTIICSFRRVFLGLGMCFSYAALLTKTNRIHRIFEQGKKSVTAPKFISPASQLVITFSLISVQLLGVFVWFVVDPPHIIIDYGEQRTLDPEKARGVLKCDISDLSLICSLGYSILLMVTCTVYAIKTRGVPETFNEAKPIGFTMYTTCIIWLAFIPIFFGTAQSAEKMYIQTTTLTVSMSLSASVSLGMLYMPKVYIIIFHPEQNVQKRKRSFKAVVTAATMQSKLIQKGNDRPNGEVKSELCESLETNSKSSVEFPMVKSGSTS

SEQ ID NO: 29414 - protein, 501 aa, Homo sapiens
  REGION 1..501: note = ENSP00000345747
MVCEGKRSASCPCFFLLTAKFYWILTMMQRTHSQEYAHSIRVDGDIILGGLFPVHAKGERGVPCGELKKEKGIHRLEAMLYAIDQINKDPDLLSNITLGVRILDTCSRDTYALEQSLTFVQALIEKDASDVKCANGDPPIFTKPDKISGVIGAAASSVSIMVANILRLFKIPQISYASTAPELSDNTRYDFFSRVVPPDSYQAQAMVDIVTALGWNYVSTLASEGNYGESGVEAFTQISREIGGVCIAQSQKIPREPRPGEFEKIIKRLLETPNARAVIMFANEDDIRRILEAAKKLNQSGHFLWIGSDSWGSKIAPVYQQEEIAEGAVTILPKRASIDGFDRYFRSRTLANNRRNVWFAEFWEENFGCKLGSHGKRNSHIKKCTGLERIARDSSYEQEGKVQFVIDAVYSMAYALHNMHKDLCPGYIGLCPRMSTIDGKELLGYIRAVNFNGCRRGIQMSLPWPTLFTPSFSSSWAVLALLSLLMKTEMLLDVMISSSIK

SEQ ID NO: 29415 - protein, 908 aa, Homo sapiens; identical to SEQ ID NO: 29413
  REGION 1..908: note = ENSP00000419832

SEQ ID NO: 29416 - protein, 293 aa, Homo sapiens
  REGION 1..293: note = ENSP00000415522
MVCEGKRSASCPCFFLLTAKFYWILTMMQRTHSQEYAHSIRVDGDIILGGLFPVHAKGERGVPCGELKKEKGIHRLEAMLYAIDQINKDPDLLSNITLGVRILDTCSRDTYALEQSLTFVQALIEKDASDVKCANGDPPIFTKPDKISGVIGAAASSVSIMVANILRLFKIPQISYASTAPELSDNTRYDFFSRVVPPDSYQAQAMVDIVTALGWNYVSTLASEGNYGESGVEAFTQISREIGGVCIAQSQKIPREPRPGEFEKIIKRLLETPNARAVIMFANEDDIRRILEA

SEQ ID NO: 29417 - protein, 91 aa, Homo sapiens
  REGION 1..91: note = ENSP00000418255
FFSRVVPPDSYQAQAMVDIVTALGWNYVSTLASEGNYGESGVEAFTQISREIGYPSLFGIQGCLHECFAILCQVVYQFLLLMQLSDAQTVY

SEQ ID NO: 29418 - protein, 20 aa, Homo sapiens
  REGION 1..20: note = ENSP00000398012
MVCEGKRSASCPCFFLLTAK

SEQ ID NO: 29419 - protein, 416 aa, Homo sapiens
  REGION 1..416: note = ENSP00000409790
NFLYPQVEDMQWAHREHTHPASVCSLPCKPGERKKTVKGVPCCWHCERCEGYNYQVDELSCELCPLDQRPNMNRTGCQLIPIIKLEWHSPWAVVPVFVAILGIIATTFVIVTFVRYNDTPIVRASGRELSYVLLTGIFLCYSITFLMIAAPDTIICSFRRVFLGLGMCFSYAALLTKTNRIHRIFEQGKKSVTAPKFISPASQLVITFSLISVQLLGVFVWFVVDPPHIIIDYGEQRTLDPEKARGVLKCDISDLSLICSLGYSILLMVTCTVYAIKTRGVPETFNEAKPIGFTMYTTCIIWLAFIPIFFGTAQSAEKMYIQTTTLTVSMSLSASVSLGMLYMPKVYIIIFHPEQNVQKRKRSFKAVVTAATMQSKLIQKGNDRPNGEVKSELCESLETNTSSTKTTYISYSNHSI

SEQ ID NO: 29420 - protein, 854 aa, Homo sapiens
  REGION 1..854: note = ENSP00000257626
MALRLVADFDLGKDVLPWLRAQRAVSEASGAGSGGADVLENDYESLHVLNVERNGNIIYTYKDDKGNVVFGLYDCQTRQNELLYTFEKDLQVFSCSVNSERTLLAASLVQSTKEGKRNELQPGSKCLTLLVEIHPVNNVKVLKAVDSYIWVQFLYPHIESHPLPENHLLLISEEKYIEQFRIHVAQEDGNRVVIKNSGHLPRDRIAEDFVWAQWDMSEQRLYYIDLKKSRSILKCIQFYADESYNLMFEVPLDISLSNSGFKLVNFGCDYHQYRDKFSKHLTLCVFTNHTGSLCVCYSPKCASWGQITYSVFYIHKGHSKTFTTSLENVGSHMTKGITFLNLDYYVAVYLPGHFFHLLNVQHPDLICHNLFLTGNNEMIDMLPHCPLQSLSGSLVLDCCSGKLYRALLSQSSLLQLLQNTCLDCEKMAALHCALYCGQGAQFLEAQIIQWISENVSACHSFDLIQEFIIASSYWSVYSETSNMDKLLPHSSVLTWNTEIPGITLVTEDIALPLMKVLSFKGYWEKLNSNLEYVKYAKPHFHYNNSVVRREWHNLISEEKTGKRRSAAYVRNILDNAVKVISNLEARNLGPRLTPLLQEEDSHQRLLMGLMVSELKDHFLRHLQGVEKKKIEQMVLDYISKLLDLICHIVETNWRKHNLHSWVLHFNSRGSAAEFAVFHIMTRILEATNSLFLPLPPGFHTLHTILGVQCLPLHNLLHCIDSGVLLLTETAVIRLMKDLDNTEKNEKLKFSIIVRLPPLIGQKICRLWDHPMSSNIISRNHVTRLLQNYKKQPRNSMINKSSFSVEFLPLNYFIEILTDIESSNQALYPFEGHDNVDAEFVEEAALKHTAMLLGL

SEQ ID NO: 29421 - protein, 188 aa, Homo sapiens
  REGION 1..188: note = ENSP00000396230
VLSFKGYWEKLNSNLEYVKYAKPHFHYNNSVVRREWHNLISEEKTGKRRSAAYVRNILDNAVKVISNLEARNLGPRLTPLLQEEDSHQRLLMGLLDLICHIVETNWRKHNLHSWVLHFNSRGSAAEFAVFHIMTRILEATNSLFLPLPPGFHTLHTILGVQCLPLHNLLHCIDSGVLLLTETAVIRLM

SEQ ID NO: 29422 - protein, 58 aa, Homo sapiens
  REGION 1..58: note = ENSP00000402748
MLKEMEILFIPIRMIREMSSLDYMIVKPDKMSFYIPLRKTCKFSVALSTVKGLCLLQV

SEQ ID NO: 29423 - protein, 175 aa, Homo sapiens
  REGION 1..175: note = ENSP00000415402
MTRILEATNSLFLPLPPGFHTLHTILGVQCLPLHNLLHCIDSGVLLLTETAVIRLMKDLDNTEKNEKLKFSIIVRLPPLIGQKICRLWDHPMSSNIISRNHVTRLLQNYKKQPRNSMINKSSFSVEFLPLNYFIEILTDIESSNQALYPFEGHDNVDAEFVEEAALKHTAMLLGL

SEQ ID NO: 29424 - protein, 731 aa, Homo sapiens
  REGION 1..731: note = ENSP00000362929
MVVEHPEFLKAGKEPGLQIWRVEKFDLVPVPTNLYGDFFTGDAYVILKTVQLRNGNLQYDLHYWLGNECSQDESGAAAIFTVQLDDYLNGRAVQHREVQGFESATFLGYFKSGLKYKKGGVASGFKHVVPNEVVVQRLFQVKGRRVVRATEVPVSWESFNNGDCFILDLGNNIHQWCGSNSNRYERLKATQVSKGIRDNERSGRARVHVSEEGTEPEAMLQVLGPKPALPAGTEDTAKEDAANRKLAKLYKVSNGAGTMSVSLVADENPFAQGALKSEDCFILDHGKDGKIFVWKGKQANTEERKAALKTASDFITKMDYPKQTQVSVLPEGGETPLFKQFFKNWRDPDQTDGLGLSYLSSHIANVERVPFDAATLHTSTAMAAQHGMDDDGTGQKQIWRIEGSNKVPVDPATYGQFYGGDSYIILYNYRHGGRQGQIIYNWQGAQSTQDEVAASAILTAQLDEELGGTPVQSRVVQGKEPAHLMSLFGGKPMIIYKGGTSREGGQTAPASTRLFQVRANSAGATRAVEVLPKAGALNSNDAFVLKTPSAAYLWVGTGASEAEKTGAQELLRVLRAQPVQVAEGSEPDGFWEALGGKAAYRTSPRLKDKKMDAHPPRLFACSNKIGRFVIEEVPGELMQEDLATDDVMLLDTWDQVFVWVGKDSQEEEKTEALTSAKRYIETDPANRDRRTPITVVKQGFEPPSFVGWFLGWDDDYWSVDPLDRAMAELAA

SEQ ID NO: 29425 - protein, 260 aa, Homo sapiens
  REGION 1..260: note = ENSP00000404226
MVVEHPEFLKAGKEPGLQIWRVEKFDLVPVPTNLYGDFFTGDAYVILKTVQLRNGNLQYDLHYWLGNECSQDESGAAAIFTVQLDDYLNGRAVQHREVQGFESATFLGYFKSGLKYKKGGVASGFKHVVPNEVVVQRLFQVKGRRVVRATEVPVSWESFNNGDCFILDLGNNIHQWCGSNSNRYERLKATQVSKGIRDNERSGRARVHVSEEGTEPEAMLQVLGPKPALPAGTEDTAKEDAANRKLAKLYKVSNGAGTMS

SEQ ID NO: 29426 - protein, 742 aa, Homo sapiens
  REGION 1..742: note = ENSP00000362914
MEKLFCCFPNSMVVEHPEFLKAGKEPGLQIWRVEKFDLVPVPTNLYGDFFTGDAYVILKTVQLRNGNLQYDLHYWLGNECSQDESGAAAIFTVQLDDYLNGRAVQHREVQGFESATFLGYFKSGLKYKKGGVASGFKHVVPNEVVVQRLFQVKGRRVVRATEVPVSWESFNNGDCFILDLGNNIHQWCGSNSNRYERLKATQVSKGIRDNERSGRARVHVSEEGTEPEAMLQVLGPKPALPAGTEDTAKEDAANRKLAKLYKVSNGAGTMSVSLVADENPFAQGALKSEDCFILDHGKDGKIFVWKGKQANTEERKAALKTASDFITKMDYPKQTQVSVLPEGGETPLFKQFFKNWRDPDQTDGLGLSYLSSHIANVERVPFDAATLHTSTAMAAQHGMDDDGTGQKQIWRIEGSNKVPVDPATYGQFYGGDSYIILYNYRHGGRQGQIIYNWQGAQSTQDEVAASAILTAQLDEELGGTPVQSRVVQGKEPAHLMSLFGGKPMIIYKGGTSREGGQTAPASTRLFQVRANSAGATRAVEVLPKAGALNSNDAFVLKTPSAAYLWVGTGASEAEKTGAQELLRVLRAQPVQVAEGSEPDGFWEALGGKAAYRTSPRLKDKKMDAHPPRLFACSNKIGRFVIEEVPGELMQEDLATDDVMLLDTWDQVFVWVGKDSQEEEKTEALTSAKRYIETDPANRDRRTPITVVKQGFEPPSFVGWFLGWDDDYWSVDPLDRAMAELAA

SEQ ID NO: 29427 - protein, 767 aa, Homo sapiens
  REGION 1..767: note = ENSP00000409358
MNTGLTRLLWPSWLPDGDMSHPQPELFLFPKAQPNSMVVEHPEFLKAGKEPGLQIWRVEKFDLVPVPTNLYGDFFTGDAYVILKTVQLRNGNLQYDLHYWLGNECSQDESGAAAIFTVQLDDYLNGRAVQHREVQGFESATFLGYFKSGLKYKKGGVASGFKHVVPNEVVVQRLFQVKGRRVVRATEVPVSWESFNNGDCFILDLGNNIHQWCGSNSNRYERLKATQVSKGIRDNERSGRARVHVSEEGTEPEAMLQVLGPKPALPAGTEDTAKEDAANRKLAKLYKVSNGAGTMSVSLVADENPFAQGALKSEDCFILDHGKDGKIFVWKGKQANTEERKAALKTASDFITKMDYPKQTQVSVLPEGGETPLFKQFFKNWRDPDQTDGLGLSYLSSHIANVERVPFDAATLHTSTAMAAQHGMDDDGTGQKQIWRIEGSNKVPVDPATYGQFYGGDSYIILYNYRHGGRQGQIIYNWQGAQSTQDEVAASAILTAQLDEELGGTPVQSRVVQGKEPAHLMSLFGGKPMIIYKGGTSREGGQTAPASTRLFQVRANSAGATRAVEVLPKAGALNSNDAFVLKTPSAAYLWVGTGASEAEKTGAQELLRVLRAQPVQVAEGSEPDGFWEALGGKAAYRTSPRLKDKKMDAHPPRLFACSNKIGRFVIEEVPGELMQEDLATDDVMLLDTWDQVFVWVGKDSQEEEKTEALTSAKRYIETDPANRDRRTPITVVKQGFEPPSFVGWFLGWDDDYWSVDPLDRAMAELAA

SEQ ID NO: 29428 - protein, 232 aa, Homo sapiens
  REGION 1..232: note = ENSP00000489067
MEKLFCCFPNSMVVEHPEFLKAGKEPGLQIWRVEKFDLVPVPTNLYGDFFTGDAYVILKTVQLRNGNLQYDLHYWLGNECSQDESGAAAIFTVQLDDYLNGRAVQHREVQGFESATFLGYFKSGLKYKKGGVASGFKHVVPNEVVVQRLFQVKGRRVVRATEVPVSWESFNNGDCFILDLGNNIHQWCGSNSNRYERLKATQVSKGIRDNERSGRARVHVSEEGTEPEAMLQ

SEQ ID NO: 29429 - protein, 748 aa, Homo sapiens
  REGION 1..748: note = ENSP00000377882
MAEEEALRGNSDPWPNSMVVEHPEFLKAGKEPGLQIWRVEKFDLVPVPTNLYGDFFTGDAYVILKTVQLRNGNLQYDLHYWLGNECSQDESGAAAIFTVQLDDYLNGRAVQHREVQGFESATFLGYFKSGLKYKKGGVASGFKHVVPNEVVVQRLFQVKGRRVVRATEVPVSWESFNNGDCFILDLGNNIHQWCGSNSNRYERLKATQVSKGIRDNERSGRARVHVSEEGTEPEAMLQVLGPKPALPAGTEDTAKEDAANRKLAKLYKVSNGAGTMSVSLVADENPFAQGALKSEDCFILDHGKDGKIFVWKGKQANTEERKAALKTASDFITKMDYPKQTQVSVLPEGGETPLFKQFFKNWRDPDQTDGLGLSYLSSHIANVERVPFDAATLHTSTAMAAQHGMDDDGTGQKQIWRIEGSNKVPVDPATYGQFYGGDSYIILYNYRHGGRQGQIIYNWQGAQSTQDEVAASAILTAQLDEELGGTPVQSRVVQGKEPAHLMSLFGGKPMIIYKGGTSREGGQTAPASTRLFQVRANSAGATRAVEVLPKAGALNSNDAFVLKTPSAAYLWVGTGASEAEKTGAQELLRVLRAQPVQVAEGSEPDGFWEALGGKAAYRTSPRLKDKKMDAHPPRLFACSNKIGRFVIEEVPGELMQEDLATDDVMLLDTWDQVFVWVGKDSQEEEKTEALTSAKRYIETDPANRDRRTPITVVKQGFEPPSFVGWFLGWDDDYWSVDPLDRAMAELAA

SEQ ID NO: 29430 - protein, 739 aa, Homo sapiens
  REGION 1..739: note = ENSP00000445823
MPLCTPNSMVVEHPEFLKAGKEPGLQIWRVEKFDLVPVPTNLYGDFFTGDAYVILKTVQLRNGNLQYDLHYWLGNECSQDESGAAAIFTVQLDDYLNGRAVQHREVQGFESATFLGYFKSGLKYKKGGVASGFKHVVPNEVVVQRLFQVKGRRVVRATEVPVSWESFNNGDCFILDLGNNIHQWCGSNSNRYERLKATQVSKGIRDNERSGRARVHVSEEGTEPEAMLQVLGPKPALPAGTEDTAKEDAANRKLAKLYKVSNGAGTMSVSLVADENPFAQGALKSEDCFILDHGKDGKIFVWKGKQANTEERKAALKTASDFITKMDYPKQTQVSVLPEGGETPLFKQFFKNWRDPDQTDGLGLSYLSSHIANVERVPFDAATLHTSTAMAAQHGMDDDGTGQKQIWRIEGSNKVPVDPATYGQFYGGDSYIILYNYRHGGRQGQIIYNWQGAQSTQDEVAASAILTAQLDEELGGTPVQSRVVQGKEPAHLMSLFGGKPMIIYKGGTSREGGQTAPASTRLFQVRANSAGATRAVEVLPKAGALNSNDAFVLKTPSAAYLWVGTGASEAEKTGAQELLRVLRAQPVQVAEGSEPDGFWEALGGKAAYRTSPRLKDKKMDAHPPRLFACSNKIGRFVIEEVPGELMQEDLATDDVMLLDTWDQVFVWVGKDSQEEEKTEALTSAKRYIETDPANRDRRTPITVVKQGFEPPSFVGWFLGWDDDYWSVDPLDRAMAELAA

SEQ ID NO: 29431 - protein, 782 aa, Homo sapiens
  REGION 1..782: note = ENSP00000362924
MAPHRPAPALLCALSLALCALSLPVRAATASRGASQAGAPQGRVPEARPNSMVVEHPEFLKAGKEPGLQIWRVEKFDLVPVPTNLYGDFFTGDAYVILKTVQLRNGNLQYDLHYWLGNECSQDESGAAAIFTVQLDDYLNGRAVQHREVQGFESATFLGYFKSGLKYKKGGVASGFKHVVPNEVVVQRLFQVKGRRVVRATEVPVSWESFNNGDCFILDLGNNIHQWCGSNSNRYERLKATQVSKGIRDNERSGRARVHVSEEGTEPEAMLQVLGPKPALPAGTEDTAKEDAANRKLAKLYKVSNGAGTMSVSLVADENPFAQGALKSEDCFILDHGKDGKIFVWKGKQANTEERKAALKTASDFITKMDYPKQTQVSVLPEGGETPLFKQFFKNWRDPDQTDGLGLSYLSSHIANVERVPFDAATLHTSTAMAAQHGMDDDGTGQKQIWRIEGSNKVPVDPATYGQFYGGDSYIILYNYRHGGRQGQIIYNWQGAQSTQDEVAASAILTAQLDEELGGTPVQSRVVQGKEPAHLMSLFGGKPMIIYKGGTSREGGQTAPASTRLFQVRANSAGATRAVEVLPKAGALNSNDAFVLKTPSAAYLWVGTGASEAEKTGAQELLRVLRAQPVQVAEGSEPDGFWEALGGKAAYRTSPRLKDKKMDAHPPRLFACSNKIGRFVIEEVPGELMQEDLATDDVMLLDTWDQVFVWVGKDSQEEEKTEALTSAKRYIETDPANRDRRTPITVVKQGFEPPSFVGWFLGWDDDYWSVDPLDRAMAELAA

SEQ ID NO: 29432 - protein, 67 aa, Homo sapiens
  REGION 1..67: note = ENSP00000362912
  VARIANT 1: note = Any amino acid
XKGGTSREGGQTAPASTRLFQVRANSAGATRAVEVISRSWNTEGIGLPETSQLNDQISRHRNGGRGW

SEQ ID NO: 29433 - protein, 218 aa, Homo sapiens
  REGION 1..218: note = ENSP00000311469
MPMILGYWDIRGLAHAIRLLLEYTDSSYEEKKYTMGDAPDYDRSQWLNEKFKLGLDFPNLPYLIDGAHKITQSNAILCYIARKHNLCGETEEEKIRVDILENQTMDNHMQLGMICYNPEFEKLKPKYLEELPEKLKLYSEFLGKRPWFAGNKITFVDFLVYDVLDLHRIFEPKCLDAFPNLKDFISRFEGLEKISAYMKSSRFLPRPVFSKMAVWGNK

SEQ ID NO: 29434 - protein, 237 aa, Homo sapiens
  REGION 1..237: note = ENSP00000358838
MPMILGYWDIRGLAHAIRLLLEYTDSSYEEKKYTMGDAPDYDRSQWLNEKFKLGLDFPNGMLGSLVAQLSFAGFPSIQLPYLIDGAHKITQSNAILCYIARKHNLCGETEEEKIRVDILENQTMDNHMQLGMICYNPEFEKLKPKYLEELPEKLKLYSEFLGKRPWFAGNKITFVDFLVYDVLDLHRIFEPKCLDAFPNLKDFISRFEGLEKISAYMKSSRFLPRPVFSKMAVWGNK

SEQ ID NO: 29435 - protein, 181 aa, Homo sapiens
  REGION 1..181: note = ENSP00000234981
MPMILGYWDIRGLAHAIRLLLEYTDSSYEEKKYTMGDAPDYDRSQWLNEKFKLGLDFPNLPYLIDGAHKITQSNAILCYIARKHNLCGETEEEKIRVDILENQTMDNHMQLGMICYNPEFEKLKPKYLEELPEKLKLYSEFLGKRPWFAGNKGLEKISAYMKSSRFLPRPVFSKMAVWGNK

SEQ ID NO: 29436 - protein, 102 aa, Homo sapiens
  REGION 1..102: note = ENSP00000456315
MGDAPDYDRSQWLNEKFKLGLDFPNLPYLIDGAHKITQSNAILCYIARKHNLCGETEEEKIRVDILENQTMDNHMQLGMICYNPEFEKLKPKYLEELPEKLK

SEQ ID NO: 29437 - protein, 85 aa, Homo sapiens
  REGION 1..85: note = ENSP00000455929
MPMILGYWDIRGLAHAIRLLLEYTDSSYEEKKYTMGDAPDYDRSQWLNEKFKLGLDFPNVGRQKRRRFVWTFWRTRPWTTICSWA

SEQ ID NO: 29438 - protein, 149 aa, Homo sapiens
  REGION 1..149: note = ENSP00000358834
MPMILGYWDIRGLAHAIRLLLEYTDSSYEEKKYTMGDAPDYDRSQWLNEKFKLGLDFPNLPYLIDGAHKITQSNAILCYIARKHNLCGETEEEKIRVDILENQTMDNHMQLGMICYNPEFGLEKISAYMKSSRFLPRPVFSKMAVWGNK

SEQ ID NO: 29439 - protein, 243 aa, Homo sapiens
  REGION 1..243: note = ENSP00000345023
MSGDATRTLGKGSQPPGPVPEGLIRIYSMRFCPYSHRTRLVLKAKDIRHEVVNINLRNKPEWYYTKHPFGHIPVLETSQCQLIYESVIACEYLDDAYPGRKLFPYDPYERARQKMLLELFCKVPHLTKECLVALRCGRECTNLKAALRQEFSNLEEILEYQNTTFFGGTCISMIDYLLWPWFERLDVYGILDCVSHTPALRLWISAMKWDPTVCALLMDKSIFQGFLNLYFQNNPNAFDFGLC

SEQ ID NO: 29440 - protein, 215 aa, Homo sapiens
  REGION 1..215: note = ENSP00000358721
MRFCPYSHRTRLVLKAKDIRHEVVNINLRNKPEWYYTKHPFGHIPVLETSQCQLIYESVIACEYLDDAYPGRKLFPYDPYERARQKMLLELFCKVPHLTKECLVALRCGRECTNLKAALRQEFSNLEEILEYQNTTFFGGTCISMIDYLLWPWFERLDVYGILDCVSHTPALRLWISAMKWDPTVCALLMDKSIFQGFLNLYFQNNPNAFDFGLC

SEQ ID NO: 29441 - protein, 209 aa, Homo sapiens
  REGION 1..209: note = ENSP00000390986
MSGDATRTLGKGSQPPGPVPEGLIRIYSMRFCPYSHRTRLVLKAKDIRHEVVNINLRNKPEWYYTKHPFGHIPVLETSQCQLIYESVIACEYLDDAYPGRKLFPYDPYERARQKMLLELFCKILEYQNTTFFGGTCISMIDYLLWPWFERLDVYGILDCVSHTPALRLWISAMKWDPTVCALLMDKSIFQGFLNLYFQNNPNAFDFGLC

SEQ ID NO: 29442 - protein, 264 aa, Homo sapiens
  REGION 1..264: note = ENSP00000304331
MPRSFLVDSLVLREAGEKKAPEGSPPPLFPYAVPPPHALHGLSPGACHARKAGLLCVCPLCVTASQLHGPPGPPALPLLKASFPPFGSQYCHAPLGRQHSAVSPGVAHGPAAAAAAAALYQTSYPLPDPRQFHCISVDSSSNQLPSSKRMRTAFTSTQLLELEREFASNMYLSRLRRIEIATYLNLSEKQVKIWFQNRRVKHKKEGKGSNHRGGGGGGAGGGGSAPQGCKCASLSSAKCSEDDDELPMSPSSSGKDDRDLTVTP

SEQ ID NO: 29443 - protein, 164 aa, Homo sapiens
  REGION 1..164: note = ENSP00000412645
MACLNPVLWETKVLQSKATEDFFRNSIQSPLFTLQLPHSLHQTLQSSTASLVIPAGRTLPSFTTAELGTSNSSANFTFPGYPIHVPAGVTLQTVSGHLYKVNVPIMVTETSGRAGILQHPIQQVFQQLGQPSVIQTSVPQLNPWSLQATTEKSQRIETVLQQPA

SEQ ID NO: 29444 - protein, 335 aa, Homo sapiens
  REGION 1..335: note = ENSP00000396702
MACLNPVPKLYRSVIEDVIEGVRNLFAEEGIEEQVLKDLKQLWETKVLQSKATEDFFRNSIQSPLFTLQLPHSLHQTLQSSTGWIPLVNEYSSLVIPAGRTLPSFTTAELGTSNSSANFTFPGYPIHVPAGVTLQTVSGHLYKVNVPIMVTETSGRAGILQHPIQQVFQQLGQPSVIQTSVPQLNPWSLQATTEKSQRIETVLQQPAILPSGPVDRKHLENATSDILVSPGNEHKIVPEALLCHQESSHYISLPGVVFSPQVSQTNSNVESVLSGSASMAQNLHDESLSTSPHGALHQHVTDIQLHILKNRMYGCDSVKQPRNIEEPSNIPVSEK

SEQ ID NO: 29445 - protein, 478 aa, Homo sapiens
  REGION 1..478: note = ENSP00000384597
MACLNPVPKLYRSVIEDVIEGVRNLFAEEGIEEQVLKDLKQLWETKVLQSKATEDFFRNSIQSPLFTLQLPHSLHQTLQSSTASLVIPAGRTLPSFTTAELGTSNSSANFTFPGYPIHVPAGVTLQTVSGHLYKVNVPIMVTETSGRAGILQHPIQQVFQQLGQPSVIQTSVPQLNPWSLQATTEKSQRIETVLQQPAILPSGPVDRKHLENATSDILVSPGNEHKIVPEALLCHQESSHYISLPGVVFSPQVSQTNSNVESVLSGSASMAQNLHDESLSTSPHGALHQHVTDIQLHILKNRMYGCDSVKQPRNIEEPSNIPVSEKDSNSQVDLSIRVTDDDIGEIIQVDGSGDTSSNEEIGSTRDADENEFLGNIDGGDLKVPEEEADSISNEDSATNSSDNEDPQVNIVEEDPLNSGDDVSEQDVPDLFDTDNVIVCQYDKIHRSKNKWKFYLKDGVMCFGGRDYVFAKAIGDAEW

SEQ ID NO: 29446 - protein, 55 aa, Homo sapiens
  REGION 1..55: note = ENSP00000394793
MACLNPVLWETKVLQSKATEDFFRNSIQSPLFTLQLPHSLHQTLQSSTGWIPLHH

SEQ ID NO: 29447 - protein, 102 aa, Homo sapiens
  REGION 1..102: note = ENSP00000421474
SGDTSSNEEIGSTRDADENEFLGNIDGGDLKVPEEEADSISNEDSATNSSDNEDPQVNIVEEDPLNSGDDVSEQDVPDLFDTDNVIVCQYDKAFPRRTSFNT

SEQ ID NO: 29448 - protein, 444 aa, Homo sapiens
  REGION 1..444: note = ENSP00000387896
MACLNPVLWETKVLQSKATEDFFRNSIQSPLFTLQLPHSLHQTLQSSTASLVIPAGRTLPSFTTAELGTSNSSANFTFPGYPIHVPAGVTLQTVSGHLYKVNVPIMVTETSGRAGILQHPIQQVFQQLGQPSVIQTSVPQLNPWSLQATTEKSQRIETVLQQPAILPSGPVDRKHLENATSDILVSPGNEHKIVPEALLCHQESSHYISLPGVVFSPQVSQTNSNVESVLSGSASMAQNLHDESLSTSPHGALHQHVTDIQLHILKNRMYGCDSVKQPRNIEEPSNIPVSEKDSNSQVDLSIRVTDDDIGEIIQVDGSGDTSSNEEIGSTRDADENEFLGNIDGGDLKVPEEEADSISNEDSATNSSDNEDPQVNIVEEDPLNSGDDVSEQDVPDLFDTDNVIVCQYDKIHRSKNKWKFYLKDGVMCFGGRDYVFAKAIGDAEW

SEQ ID NO: 29449 - protein, 316 aa, Homo sapiens
  REGION 1..316: note = ENSP00000359531
MASTSRLDALPRVTCPNHPDAILVEDYRAGDMICPECGLVVGDRVIDVGSEWRTFSNDKATKDPSRVGDSQNPLLSDGDLSTMIGKGTGAASFDEFGNSKYQNRRTMSSSDRAMMNAFKEITTMADRINLPRNIVDRTNNLFKQVYEQKSLKGRANDAIASACLYIACRQEGVPRTFKEICAVSRISKKEIGRCFKLILKALETSVDLITTGDFMSRFCSNLCLPKQVQMAATHIARKAVELDLVPGRSPISVAAAAIYMASQASAEKRTQKEIGDIAGVADVTIRQSYRLIYPRAPDLFPTDFKFDTPVDKLPQL

SEQ ID NO: 29450 - protein, 224 aa, Homo sapiens
  REGION 1..224: note = ENSP00000415741
ASTSRLDALPRVTCPNHPDAILVEDYRAGDMICPECGLVVGDRVIDVGSEWRTFSNDKATKDPSRVGDSQNPLLSDGDLSTMIGKGTGAASFDEFGNSKYQNRRTMSSSDRAMMNAFKEITTMADRINLPRNIVDRTNNLFKQVYEQKSLKGRANDAIASACLYIACRQEGVPRTFKEICAVSRISKKEIGRCFKLILKALETSVDLITTGDFMSRNWRYCWCC

SEQ ID NO: 29451 - protein, 231 aa, Homo sapiens
  REGION 1..231: note = ENSP00000402345
MASTSRLDALPRVTCPNHPDAILVEDYRAGDMICPECDRVIDVGSEWRTFSNDKATKDPSRVGDSQNPLLSDGDLSTMIGKGTGAASFDEFGNSKYQNRRTMSSSDRAMMNAFKEITTMADRINLPRNIVDRTNNLFKQVYEQKSLKGRANDAIASACLYIACRQEGVPRTFKEICAVSRISKKEIGRCFKLILKALETSVDLITTGDFMSRFCSNLCLPKQVQMAATHIA

SEQ ID NO: 29452 - protein, 105 aa, Homo sapiens
  REGION 1..105: note = ENSP00000436973
GMVMVSPEMNPTICSVFEAEIVLLFHATTFRRGFQVTVHVGNVRQTAVVEKIHAKDKLRTGEKAVVRFRFLKHPEYLKVQSSSIVTKYCGLFSVVQVSRILRPFT

SEQ ID NO: 29453 - protein, 153 aa, Homo sapiens
  REGION 1..153: note = ENSP00000392944
  VARIANT 1: note = Any amino acid
XGICREGDQLVVGPTDDGCFLELRVCSIQRNRSACRVLRAGQAATLALGDFDRALLRKGMVMVSPEMNPTICSVFEAEIVLLFHATTFRRGFQVTVHVGNVRQTAVVEKIHAKDKLRTGEKAVARERGVLSATCSLPTFWRGAKLGVARKGQS

SEQ ID NO: 29454 - protein, 154 aa, Homo sapiens
  REGION 1..154: note = ENSP00000398905
  VARIANT 1: note = Any amino acid
XGICREGDQLVVGPTDDGCFLELRVCSIQRNRSACRVLRAGQAATLALGDFDRALLRKGMVMVSPEMNPTICSVFEAEIVLLFHATTFRRGFQVTVHVGNVRQTAVVEKIHAKVRGTWPSISPEVRKEGGLPQTGRELLDPTMGIKPHLGWVAA

SEQ ID NO: 29455 - protein, 602 aa, Homo sapiens
  REGION 1..602: note = ENSP00000303997
MDSRVSELFGGCCRPGGGPAVGGTLKARGAGSSSGCGGPKGKKKNGRNRGGKANNPPYLPPEAEDGNIEYKLKLVNPSQYRFEHLVTQMKWRLQEGRGEAVYQIGVEDNGLLVGLAEEEMRASLKTLHRMAEKVGADITVLREREVDYDSDMPRKITEVLVRKVPDNQQFLDLRVAVLGNVDSGKSTLLGVLTQGELDNGRGRARLNLFRHLHEIQSGRTSSISFEILGFNSKGEVVNYSDSRTAEEICESSSKMITFIDLAGHHKYLHTTIFGLTSYCPDCALLLVSANTGIAGTTREHLGLALALKVPFFIVVSKIDLCAKTTVERTVRQLERVLKQPGCHKVPMLVTSEDDAVTAAQQFAQSPNVTPIFTLSSVSGESLDLLKVFLNILPPLTNSKEQEELMQQLTEFQVDEIYTVPEVGTVVGGTLSSGICREGDQLVVGPTDDGCFLELRVCSIQRNRSACRVLRAGQAATLALGDFDRALLRKGMVMVSPEMNPTICSVFEAEIVLLFHATTFRRGFQVTVHVGNVRQTAVVEKIHAKDKLRTGEKAVVRFRFLKHPEYLKVGAKLLFREGVTKGIGHVTDVQAITAGEAQANMGF

SEQ ID NO: 29456 - protein, 315 aa, Homo sapiens
  REGION 1..315: note = ENSP00000411358
  VARIANT 1: note = Any amino acid
XQGGGAREENTSFRSRDPREEGQRLDSQAEDGNIEYKLKLVNPSQYRFEHLVTQMKWRLQEGRGEAVYQIGVEDNGLLVGLAEEEMRASLKTLHRMAEKVGADITVLREREVDYDSDMPRKITEVLVRKVPDNQQFLDLRVAVLGNVDSGKSTLLGVLTQGELDNGRGRARLNLFRHLHEIQSGRTSSISFEILGFNSKGEVVNYSDSRTAEEICESSSKMITFIDLAGHHKYLHTTIFGLTSYCPDCALLLVSANTGIAGTTREHLGLALALKVPFFIVVSKIDLCAKTTVERTVRQLERVLKQPGCHKVPMLV

SEQ ID NO: 29457 - protein, 227 aa, Homo sapiens
  REGION 1..227: note = ENSP00000410676
MDSRVSELFGGCCRPGGGPAVGGTLKARGAGSSSGCGGPKGKKKNGRNRGGKANNPPYLPPEAEDGNIEYKYRFEHLVTQMKWRLQEGRGEAVYQIGVEDNGLLVGLAEEEMRASLKTLHRMAEKVGADITVLREREVDYDSDMPRKITEVLVRKVPDNQQFLDLRVAVLGNVDSGKSTLLGVLTQGELDNGRGRARLNLFRHLHEIQSGRTSSISFEILGFNSKGE

SEQ ID NO: 29458 - protein, 514 aa, Homo sapiens
  REGION 1..514: note = ENSP00000304893
MKWRLQEGRGEAVYQIGVEDNGLLVGLAEEEMRASLKTLHRMAEKVGADITVLREREVDYDSDMPRKITEVLVRKVPDNQQFLDLRVAVLGNVDSGKSTLLGVLTQGELDNGRGRARLNLFRHLHEIQSGRTSSISFEILGFNSKGEVVNYSDSRTAEEICESSSKMITFIDLAGHHKYLHTTIFGLTSYCPDCALLLVSANTGIAGTTREHLGLALALKVPFFIVVSKIDLCAKTTVERTVRQLERVLKQPGCHKVPMLVTSEDDAVTAAQQFAQSPNVTPIFTLSSVSGESLDLLKVFLNILPPLTNSKEQEELMQQLTEFQVDEIYTVPEVGTVVGGTLSSGICREGDQLVVGPTDDGCFLELRVCSIQRNRSACRVLRAGQAATLALGDFDRALLRKGMVMVSPEMNPTICSVFEAEIVLLFHATTFRRGFQVTVHVGNVRQTAVVEKIHAKDKLRTGEKAVVRFRFLKHPEYLKVGAKLLFREGVTKGIGHVTDVQAITAGEAQANMGF

SEQ ID NO: 29459 - protein, 690 aa, Homo sapiens
  REGION 1..690: note = ENSP00000424361
MFCTKLKDLKITGECPFSLLAPGQVPNESSEEAAGSSESCKATVPICQDIPEKNIQESLPQRKTSRSRVYLHTLAESICKLIFPEFERLNVALQRTLAKHKIKESRKSLEREDFEKTIAEQAVAAGVPVEVIKESLGEEVFKICYEEDENILGVVGGTLKDFLNSFSTLLKQSSHCQEAGKRGRLEDASILCLDKEDDFLHVYYFFPKRTTSLILPGIIKAAAHVLYETEVEVSLMPPCFHNDCSEFVNQPYLLYSVHMKSTKPSLSPSKPQSSLVIPTSLFCKTFPFHFMFDKDMTILQFGNGIRRLMNRRDFQGKPNFEEYFEILTPKINQTFSGIMTMLNMQFVVRVRRWDNSVKKSSRVMDLKGQMIYIVESSAILFLGSPCVDRLEDFTGRGLYLSDIPIHNALRDVVLIGEQARAQDGLKKRLGKLKATLEQAHQALEEEKKKTVDLLCSIFPCEVAQQLWQGQVVQAKKFSNVTMLFSDIVGFTAICSQCSPLQVITMLNALYTRFDQQCGELDVYKVETIGDAYCVAGGLHKESDTHAVQIALMALKMMELSDEVMSPHGEPIKMRIGLHSGSVFAGVVGVKMPRYCLFGNNVTLANKFESCSVPRKINVSPTTYRLLKDCPGFVFTPRSREELPPNFPSEIPGICHFLDAYQQGTNSKPCFQKKDVEDGNANFLGKASGID

SEQ ID NO: 29460 - protein, 690 aa, Homo sapiens; identical to SEQ ID NO: 29459
  REGION 1..690: note = ENSP00000421493

SEQ ID NO: 29461 - protein, 624 aa, Homo sapiens
  REGION 1..624: note = ENSP00000426968
MFCTKLKDLKITGECPFSLLAPGQVPNESSEEAAGSSESCKATVPICQDIPEKNIQESLPQRKTSRSRVYLHTLAESICKLIFPEFERLNVALQRTLAKHKIKESRKSLEREDFEKTIAEQAVAAGVPVEVIKESLGEEVFKICYEEDENILGVVGGTLKDFLNSFSTLLKQSSHCQEAGKRGRLEDASILCLDKEDDFLHVYYFFPKRTTSLILPGIIKAAAHVLYETEVEVSLMPPCFHNDCSEFVNQPYLLYSVHMKSTKPSLSPSKPQSSLVIPTSLFCKTFPFHFMFDKDMTILQFGNGIRRLMNRRDFQGKPNFEEYFEILTPKINQTFSGIMTMLNMQFVVRVRRWDNSVKKSSRVMDLKGQMIYIVESSAILFLGSPCVDRLEDFTGRGLYLSDIPIHNALRDVVLIGEQARAQDGLKKRLGKLKATLEQAHQALEEEKKKTVDLLCSIFPCEVAQQLWQGQVVQAKKFSNVTMLFSDIVGFTAICSQCSPLQVITMLNALYTRFDQQCGELDVYKVETIGDAYCVAGGLHKESDTHAVQIALMALKMMELSDEVMSPHGEPIKMRIGLHSGSVFAGVVGVKMPRYCLFGNNVTLANKFESCSVPRKINVSPTTYR

SEQ ID NO: 29462 - protein, 690 aa, Homo sapiens; identical to SEQ ID NO: 29459
  REGION 1..690: note = ENSP00000412201

SEQ ID NO: 29463 - protein, 82 aa, Homo sapiens
  REGION 1..82: note = ENSP00000424863
MFCTKLKDLKITGECPFSLLAPGQVPNESSEEAAGSSESCKATVPICQDIPEKNIQESLPQRKTSGDHWRCLLCSWGITQRE

SEQ ID NO: 29464 - protein, 138 aa, Homo sapiens
  REGION 1..138: note = ENSP00000409903
MFCTKLKDLKITGECPFSLLAPGQVPNESSEEAAGSSESCKATVPICQDIPEKNIQESLPQRKTSRSRVYLHTLAESICKLIFPEFERLNVALQRTLAKHKIKESRKSLEREDFEKTIAEQAVAAEQPLPRSRKKGQA

SEQ ID NO: 29465 - protein, 432 aa, Homo sapiens
  REGION 1..432: note = ENSP00000377418
MKSTKPSLSPSKPQSSLVIPTSLFCKTFPFHFMFDKDMTILQFGNGIRRLMNRRDFQGKPNFEEYFEILTPKINQTFSGIMTMLNMQFVVRVRRWDNSVKKSSRVMDLKGQMIYIVESSAILFLGSPCVDRLEDFTGRGLYLSDIPIHNALRDVVLIGEQARAQDGLKKRLGKLKATLEQAHQALEEEKKKTVDLLCSIFPCEVAQQLWQGQVVQAKKFSNVTMLFSDIVGFTAICSQCSPLQVITMLNALYTRFDQQCGELDVYKVETIGDAYCVAGGLHKESDTHAVQIALMALKMMELSDEVMSPHGEPIKMRIGLHSGSVFAGVVGVKMPRYCLFGNNVTLANKFESCSVPRKINVSPTTYRLLKDCPGFVFTPRSREELPPNFPSEIPGICHFLDAYQQGTNSKPCFQKKDVEDGNANFLGKASGID

SEQ ID NO: 29466 - protein, 690 aa, Homo sapiens; identical to SEQ ID NO: 29459
  REGION 1..690: note = ENSP00000296518

SEQ ID NO: 29467 - protein, 143 aa, Homo sapiens
  REGION 1..143: note = ENSP00000422141
MFCTKLKDLKITGECPFSLLAPGQVPNESSEEAAGSSESCKATVPICQDIPEKNIQESLPQRKTSRSRVYLHTLAESICKLIFPEFERLNVALQRTLAKHKIKESRKSLEREDFEKTIAEQAVAAGGDHWRCLLCSWGITQRE

SEQ ID NO: 29468 - protein, 690 aa, Homo sapiens; identical to SEQ ID NO: 29459
  REGION 1..690: note = ENSP00000426040

SEQ ID NO: 29469 - protein, 143 aa, Homo sapiens; identical to SEQ ID NO: 29467
  REGION 1..143: note = ENSP00000479710

SEQ ID NO: 29470 - protein, 470 aa, Homo sapiens
  REGION 1..470: note = ENSP00000381786
MSVTDQAFVTLATNDIYCQGALVLGQSLRRHRLTRKLVVLITPQVSSLLRVILSKVFDEVIEVNLIDSADYIHLAFLKRPELGLTLTKLHCWTLTHYSKCVFLDADTLVLSNVDELFDRGEFSAAPDPGWPDCFNSGVFVFQPSLHTHKLLLQHAMEHGSFDGADQGLLNSFFRNWSTTDIHKHLPFIYNLSSNTMYTYSPAFKQFGSSAKVVHFLGSMKPWNYKYNPQSGSVLEQGSASSSQHQAAFLHLWWTVYQNNVLPLYKSVQAGEARASPGHTLCHSDVGGPCADSASGVGEPCENSTPSAGVPCANSPLGSNQPAQGLPEPTQIVDETLSLPEGRRSEDMIACPETETPAVITCDPLSQPSPQPADFTETETILQPANKVESVSSEETFEPSQELPAEALRDPSLQDALEVDLAVSVSQISIEEKVKELSPEEERRKWEEGRIDYMGKDAFARIQEKLDRFLQ

SEQ ID NO: 29471 - protein, 501 aa, Homo sapiens
  REGION 1..501: note = ENSP00000370555
MSETEFHHGAQAGLELLRSSNSPTSASQSAGMTVTDQAFVTLATNDIYCQGALVLGQSLRRHRLTRKLVVLITPQVSSLLRVILSKVFDEVIEVNLIDSADYIHLAFLKRPELGLTLTKLHCWTLTHYSKCVFLDADTLVLSNVDELFDRGEFSAAPDPGWPDCFNSGVFVFQPSLHTHKLLLQHAMEHGSFDGADQGLLNSFFRNWSTTDIHKHLPFIYNLSSNTMYTYSPAFKQFGSSAKVVHFLGSMKPWNYKYNPQSGSVLEQGSASSSQHQAAFLHLWWTVYQNNVLPLYKSVQAGEARASPGHTLCHSDVGGPCADSASGVGEPCENSTPSAGVPCANSPLGSNQPAQGLPEPTQIVDETLSLPEGRRSEDMIACPETETPAVITCDPLSQPSPQPADFTETETILQPANKVESVSSEETFEPSQELPAEALRDPSLQDALEVDLAVSVSQISIEEKVKELSPEEERRKWEEGRIDYMGKDAFARIQEKLDRFLQ

SEQ ID NO: 29472 - protein, 137 aa, Homo sapiens
  REGION 1..137: note = ENSP00000430764
MSVTDQAFVTLATNDIYCQGALVLGQSLRRHRLTRKLVVLITPQVSSLLRVILSKVFDEVIEVNLIDSADYIHLAFLKRPELGLTLTKLHCWTLTHYSKCVFLDADTLVLSNVDELFDRGEFSAAPDPGWPDCFNSG

SEQ ID NO: 29473 - protein, 430 aa, Homo sapiens
  REGION 1..430: note = ENSP00000487294
MSETEFHHGAQAGLELLRSSNSPTSASQSAGMTVTDQAFVTLATNDIYCQGALVLGQSLRRHRLTRKLVVLITPQVSSLLRVILSKVFDEVIEVNLIDSADYIHLAFLKRPELGLTLTKLHCWTLTHYSKCVFLDADTLVLSNVDELFDRGEFSAAPDPGWPDCFNSGVFVFQPSLHTHKLLLQHAMEHGSFDGADQGLLNSFFRNWSTTDIHKHLPFIYNLSSNTMYTYSPAFKQFGSSAKVVHFLGSMKPWNYKYNPQSGSVLEQGSASSSQHQAAFLHLWWTVYQNNVLPLYKSVQAGEARASPGHTLCHSDVGGPCADSASGVGEPCENSTPSAGVPCANSPLGSNQPAQGLPEPTQIVDETLSLPEGRRSEDVDLAVSVSQISIEEKVKELSPEEERRKWEEGRIDYMGKDAFARIQEKLDRFLQ

SEQ ID NO: 29474 - protein, 244 aa, Homo sapiens
  REGION 1..244: note = ENSP00000370549
  VARIANT 1: note = Any amino acid
XLQHAMEHGSFDGADQGLLNSFFRNWSTTDIHKHLPFIYNLSSNTMYTYSPAFKQFGSSAKVVHFLGSMKPWNYKYNPQSGSVLEQGSASSSQHQAAFLHLWWTVYQNNVLPLYKSVQAGEARASPGHTLCHSDVGGPCADSASGVGEPCENSTPSAGVPCANSPLGSNQPAQGLPEPTQIVDETLSLPEGRRSEDMIACPETETPAVITCDPLSQPSPQPADFTETETILVDLAVSVSQISIE

SEQ ID NO: 29475 - protein, 430 aa, Homo sapiens
  REGION 1..430: note = ENSP00000491962
FVETEFHHGAQAGLELLRSSNSPTSASQSAGMTVTDQAFVTLATNDIYCQGALVLGQSLRRHRLTRKLVVLITPQVSSLLRVILSKVFDEVIEVNLIDSADYIHLAFLKRPELGLTLTKLHCWTLTHYSKCVFLDADTLVLSNVDELFDRGEFSAAPDPGWPDCFNSGVFVFQPSLHTHKLLLQHAMEHGSFDGADQGLLNSFFRNWSTTDIHKHLPFIYNLSSNTMYTYSPAFKQFGSSAKVVHFLGSMKPWNYKYNPQSGSVLEQGSASSSQHQAAFLHLWWTVYQNNVLPLYKSVQAGEARASPGHTLCHSDVGGPCADSASGVGEPCENSTPSAGVPCANSPLGSNQPAQGLPEPTQIVDETLSLPEGRRSEDVDLAVSVSQISIEEKVKELSPEEERRKWEEGRIDYMGKDAFARIQEKLDRFLQ

SEQ ID NO: 29476 - protein, 737 aa, Homo sapiens
  REGION 1..737: note = ENSP00000317904
MPLNRTLSMSSLPGLEDWEDEFDLENAVLFEVAWEVANKVGGIYTVLQTKAKVTGDEWGDNYFLVGPYTEQGVRTQVELLEAPTPALKRTLDSMNSKGCKVYFGRWLIEGGPLVVLLDVGASAWALERWKGELWDTCNIGVPWYDREANDAVLFGFLTTWFLGEFLAQSEEKPHVVAHFHEWLAGVGLCLCRARRLPVATIFTTHATLLGRYLCAGAVDFYNNLENFNVDKEAGERQIYHRYCMERAAAHCAHVFTTVSQITAIEAQHLLKRKPDIVTPNGLNVKKFSAMHEFQNLHAQSKARIQEFVRGHFYGHLDFNLDKTLYFFIAGRYEFSNKGADVFLEALARLNYLLRVNGSEQTVVAFFIMPARTNNFNVETLKGQAVRKQLWDTANTVKEKFGRKLYESLLVGSLPDMNKMLDKEDFTMMKRAIFATQRQSFPPVCTHNMLDDSSDPILTTIRRIGLFNSSADRVKVIFHPEFLSSTSPLLPVDYEEFVRGCHLGVFPSYYEPWGYTPAECTVMGIPSISTNLSGFGCFMEEHIADPSAYGIYILDRRFRSLDDSCSQLTSFLYSFCQQSRRQRIIQRNRTERLSDLLDWKYLGRYYMSARHMALSKAFPEHFTYEPNEADAAQGYRYPRPASVPPSPSLSRHSSPHQSEDEEDPRNGPLEEDGERYDEDEEAAKDRRNIRAPEWPRRASCTSSTSGSKRNSVDTATSSSLSTPSEPLSPTSSLGEERN

SEQ ID NO: 29477 - protein, 673 aa, Homo sapiens
  REGION 1..673: note = ENSP00000263276
MPLNRTLSMSSLPGLEDWEDEFDLENAVLFEVAWEVANKVGGIYTVLQTKAKVTGDEWGDNYFLVGPYTEQGVRTQVELLEAPTPALKRTLDSMNSKGCKFLAQSEEKPHVVAHFHEWLAGVGLCLCRARRLPVATIFTTHATLLGRYLCAGAVDFYNNLENFNVDKEAGERQIYHRYCMERAAAHCAHVFTTVSQITAIEAQHLLKRKPDIVTPNGLNVKKFSAMHEFQNLHAQSKARIQEFVRGHFYGHLDFNLDKTLYFFIAGRYEFSNKGADVFLEALARLNYLLRVNGSEQTVVAFFIMPARTNNFNVETLKGQAVRKQLWDTANTVKEKFGRKLYESLLVGSLPDMNKMLDKEDFTMMKRAIFATQRQSFPPVCTHNMLDDSSDPILTTIRRIGLFNSSADRVKVIFHPEFLSSTSPLLPVDYEEFVRGCHLGVFPSYYEPWGYTPAECTVMGIPSISTNLSGFGCFMEEHIADPSAYGIYILDRRFRSLDDSCSQLTSFLYSFCQQSRRQRIIQRNRTERLSDLLDWKYLGRYYMSARHMALSKAFPEHFTYEPNEADAAQGYRYPRPASVPPSPSLSRHSSPHQSEDEEDPRNGPLEEDGERYDEDEEAAKDRRNIRAPEWPRRASCTSSTSGSKRNSVDTATSSSLSTPSEPLSPTSSLGEERN

SEQ ID NO: 29478 - protein, 113 aa, Homo sapiens
  REGION 1..113: note = ENSP00000470072
  VARIANT 1: note = Any amino acid
XIYILDRRFRSLDDSCSQLTSFLYSFCQQSRRQRIIQRNRTERLSDLLDWKYLGRVGPPLSYPLLANQQLLARGLWCRVQGLILLVTVAVPLSNEPGRSRWWLMVVIPALWEA

SEQ ID NO: 29479 - protein, 711 aa, Homo sapiens
  REGION 1..711: note = ENSP00000338290
MESGAVLLESKSSPFNLLHEMHELRLLGHLCDVTVSVEYQGVRKDFMAHKAVLAATSKFFKEVFLNEKSVDGTRTNVYLNEVQVADFASFLEFVYTAKVQVEEDRVQRMLEVAEKLKCLDLSETCFQLKKQMLESVLLELQNFSESQEVEVSSGSQVSAAPAPRASVATDGPHPSGLTDSLDYPGERASNGMSSDLPPKKSKDKLDKKKEVVKPPYPKIRRASGRLAGRKVFVEIPKKKYTRRLREQQKTAEGDVGDYRCPQDQSPDRVGTEMEQVSKNEGCQAGAELEELSKKAGPEEEEEEEEEDEEGEKKKSNFKCSICEKAFLYEKSFLKHSKHRHGVATEVVYRCDTCGQTFANRCNLKSHQRHVHSSERHFPCELCGKKFKRKKDVKRHVLQVHEGGGERHRCGQCGKGLSSKTALRLHERTHTGDRPYGCTECGARFSQPSALKTHMRIHTGEKPFVCDECGARFTQNHMLIYHKRCHTGERPFMCETCGKSFASKEYLKHHNRIHTGSKPFKCEVCFRTFAQRNSLYQHIKVHTGERPYCCDQCGKQFTQLNALQRHRRIHTGERPFMCNACGRTFTDKSTLRRHTSIHDKNTPWKSFLVIVDGSPKNDDGHKTEQPDEEYVSSKLSDKLLSFAENGHFHNLAAVQDTVPTMQENSSADTACKADDSVVSQDTLLATTISELSELTPQTDSMPTQLHSLSNME

SEQ ID NO: 29480 - protein, 48 aa, Homo sapiens
  REGION 1..48: note = ENSP00000410009
MESGAVLLESKSSPFNLLHEMHELRLLGHLCDVTVSVEYQGVRKDFMA

SEQ ID NO: 29481 - protein, 711 aa, Homo sapiens; identical to SEQ ID NO: 29479
  REGION 1..711: note = ENSP00000366250

SEQ ID NO: 29482 - protein, 84 aa, Homo sapiens
  REGION 1..84: note = ENSP00000471894
MALSSQIWAACLLLLLLLASLTSGSVFPQQTGQLAELQPQDRAGARASWMPMFQRRRRRDTHFPICIFCCGCCHRSKCGMCCKT

SEQ ID NO: 29483 - protein, 84 aa, Homo sapiens; identical to SEQ ID NO: 29482
  REGION 1..84: note = ENSP00000222304

SEQ ID NO: 29484 - protein, 340 aa, Homo sapiens
  REGION 1..340: note = ENSP00000255039
MPGWLTLPTLCRFLLWAFTIFHKAQGDPASHPGPHYLLPPIHEVIHSHRGATATLPCVLGTTPPSYKVRWSKVEPGELRETLILITNGLHARGYGPLGGRARMRRGHRLDASLVIAGVRLEDEGRYRCELINGIEDESVALTLSLEGVVFPYQPSRGRYQFNYYEAKQACEEQDGRLATYSQLYQAWTEGLDWCNAGWLLEGSVRYPVLTARAPCGGRGRPGIRSYGPRDRMRDRYDAFCFTSALAGQVFFVPGRLTLSEAHAACRRRGAVVAKVGHLYAAWKFSGLDQCDGGWLADGSVRFPITTPRPRCGGLPDPGVRSFGFPRPQQAAYGTYCYAEN

SEQ ID NO: 29485 - protein, 185 aa, Homo sapiens
  REGION 1..185: note = ENSP00000388835
MPGWLTLPTLCRFLLWAFTIFHKAQGDPASHPGPHYLLPPIHEVIHSHRGATATLPCVLGTTPPSYKVRWSKVEPGELRETLILITNGLHARGYGPLGGRARMRRGHRLDASLVIAGVRLEDEGRYRCELINGIEDESVALTLSLEGVVFPYQPSRGRYQFNYYEAKQACEEQDGRLATYSQLYQ

SEQ ID NO: 29486 - protein, 552 aa, Homo sapiens
  REGION 1..552: note = ENSP00000306991
MHCERFLCILRIIGTTLFGVSLLLGITAAYIVGYQFIQTDNYYFSFGLYGAFLASHLIIQSLFAFLEHRKMKKSLETPIKLNKTVALCIAAYQEDPDYLRKCLQSVKRLTYPGIKVVMVIDGNSEDDLYMMDIFSEVMGRDKSATYIWKNNFHEKGPGETDESHKESSQHVTQLVLSNKSICIMQKWGGKREVMYTAFRALGRSVDYVQVCDSDTMLDPASSVEMVKVLEEDPMVGGVGGDVQILNKYDSWISFLSSVRYWMAFNIERACQSYFGCVQCISGPLGMYRNSLLHEFVEDWYNQEFMGNQCSFGDDRHLTNRVLSLGYATKYTARSKCLTETPIEYLRWLNQQTRWSKSYFREWLYNAMWFHKHHLWMTYEAIITGFFPFFLIATVIQLFYRGKIWNILLFLLTVQLVGLIKSSFASCLRGNIVMVFMSLYSVLYMSSLLPAKMFAIATINKAGWGTSGRKTIVVNFIGLIPVSVWFTILLGGVIFTIYKESKRPFSESKQTVLIVGTLLYACYWVMLLTLYVVLINKCGRRKKGQQYDMVLDV

SEQ ID NO: 29487 - protein, 890 aa, Homo sapiens
  REGION 1..890: note = ENSP00000307342
MEGGGKPNSSSNSRDDGNSVFPAKASATGAGPAAAEKRLGTPPGGGGAGAKEHGNSVCFKVDGGGGGGGGGGGGEEPAGGFEDAEGPRRQYGFMQRQFTSMLQPGVNKFSLRMFGSQKAVEKEQERVKTAGFWIIHPYSDFRFYWDLIMLIMMVGNLVIIPVGITFFTEQTTTPWIIFNVASDTVFLLDLIMNFRTGTVNEDSSEIILDPKVIKMNYLKSWFVVDFISSIPVDYIFLIVEKGMDSEVYKTARALRIVRFTKILSLLRLLRLSRLIRYIHQWEEIFHMTYDLASAVVRIFNLIGMMLLLCHWDGCLQFLVPLLQDFPPDCWVSLNEMVNDSWGKQYSYALFKAMSHMLCIGYGAQAPVSMSDLWITMLSMIVGATCYAMFVGHATALIQSLDSSRRQYQEKYKQVEQYMSFHKLPADMRQKIHDYYEHRYQGKIFDEENILNELNDPLREEIVNFNCRKLVATMPLFANADPNFVTAMLSKLRFEVFQPGDYIIREGAVGKKMYFIQHGVAGVITKSSKEMKLTDGSYFGEICLLTKGRRTASVRADTYCRLYSLSVDNFNEVLEEYPMMRRAFETVAIDRLDRIGKKNSILLQKFQKDLNTGVFNNQENEILKQIVKHDREMVQAIAPINYPQMTTLNSTSSTTTPTSRMRTQSPPVYTATSLSHSNLHSPSPSTQTPQPSAILSPCSYTTAVCSPPVQSPLAARTFHYASPTASQLSLMQQQPQQQVQQSQPPQTQPQQPSPQPQTPGSSTPKNEVHKSTQALHNTNLTREVRPLSASQPSLPHEVSTLISRPHPTVGESLASIPQPVTAVPGTGLQAGGRSTVPQRVTLFRQMSSGAIPPNRGVPPAPPPPAAALPRESSSVLNTDPDAEKPRFASNL

SEQ ID NO: 29488 - protein, 295 aa, Homo sapiens
  REGION 1..295: note = ENSP00000489134
MEGGGKPNSSSNSRDDGNSVFPAKASATGAGPAAAEKRLGTPPGGGGAGAKEHGNSVCFKVDGGGGGGGGGGGGEEPAGGFEDAEGPRRQYGFMQRQFTSMLQPGVNKFSLRMFGSQKAVEKEQERVKTAGFWIIHPYSDFRFYWDLIMLIMMVGNLVIIPVGITFFTEQTTTPWIIFNVASDTVFLLDLIMNFRTGTVNEDSSEIILDPKVIKMNYLKSWFVVDFISSIPVDYIFLIVEKGMDSEVYKTARALRIVRFTKILSLLRLLRLSRLIRYIHQWEEVRCIFFFFKSIS

SEQ ID NO: 29489 - protein, 889 aa, Homo sapiens
  REGION 1..889: note = ENSP00000251287
MDARGGGGRPGESPGATPAPGPPPPPPPAPPQQQPPPPPPPAPPPGPGPAPPQHPPRAEALPPEAADEGGPRGRLRSRDSSCGRPGTPGAASTAKGSPNGECGRGEPQCSPAGPEGPARGPKVSFSCRGAASGPAPGPGPAEEAGSEEAGPAGEPRGSQASFMQRQFGALLQPGVNKFSLRMFGSQKAVEREQERVKSAGAWIIHPYSDFRFYWDFTMLLFMVGNLIIIPVGITFFKDETTAPWIVFNVVSDTFFLMDLVLNFRTGIVIEDNTEIILDPEKIKKKYLRTWFVVDFVSSIPVDYIFLIVEKGIDSEVYKTARALRIVRFTKILSLLRLLRLSRLIRYIHQWEEIFHMTYDLASAVMRICNLISMMLLLCHWDGCLQFLVPMLQDFPRNCWVSINGMVNHSWSELYSFALFKAMSHMLCIGYGRQAPESMTDIWLTMLSMIVGATCYAMFIGHATALIQSLDSSRRQYQEKYKQVEQYMSFHKLPADFRQKIHDYYEHRYQGKMFDEDSILGELNGPLREEIVNFNCRKLVASMPLFANADPNFVTAMLTKLKFEVFQPGDYIIREGTIGKKMYFIQHGVVSVLTKGNKEMKLSDGSYFGEICLLTRGRRTASVRADTYCRLYSLSVDNFNEVLEEYPMMRRAFETVAIDRLDRIGKKNSILLHKVQHDLNSGVFNNQENAIIQEIVKYDREMVQQAELGQRVGLFPPPPPPPQVTSAIATLQQAAAMSFCPQVARPLVGPLALGSPRLVRRPPPGPAPAAASPGPPPPASPPGAPASPRAPRTSPYGGLPAAPLAGPALPARRLSRASRPLSASQPSLPHGAPGPAASTRPASSSTPRLGPTPAARAAAPSPDRRDSASPGAAGGLDPQDSARSRLSSNL

SEQ ID NO: 29490 - protein, 1203 aa, Homo sapiens
  REGION 1..1203: note = ENSP00000261917
MDKLPPSMRKRLYSLPQQVGAKAWIMDEEEDAEEEGAGGRQDPSRRSIRLRPLPSPSPSAAAGGTESRSSALGAADSEGPARGAGKSSTNGDCRRFRGSLASLGSRGGGSGGTGSGSSHGHLHDSAEERRLIAEGDASPGEDRTPPGLAAEPERPGASAQPAASPPPPQQPPQPASASCEQPSVDTAIKVEGGAAAGDQILPEAEVRLGQAGFMQRQFGAMLQPGVNKFSLRMFGSQKAVEREQERVKSAGFWIIHPYSDFRFYWDLTMLLLMVGNLIIIPVGITFFKDENTTPWIVFNVVSDTFFLIDLVLNFRTGIVVEDNTEIILDPQRIKMKYLKSWFMVDFISSIPVDYIFLIVETRIDSEVYKTARALRIVRFTKILSLLRLLRLSRLIRYIHQWEEIFHMTYDLASAVVRIVNLIGMMLLLCHWDGCLQFLVPMLQDFPDDCWVSINNMVNNSWGKQYSYALFKAMSHMLCIGYGRQAPVGMSDVWLTMLSMIVGATCYAMFIGHATALIQSLDSSRRQYQEKYKQVEQYMSFHKLPPDTRQRIHDYYEHRYQGKMFDEESILGELSEPLREEIINFNCRKLVASMPLFANADPNFVTSMLTKLRFEVFQPGDYIIREGTIGKKMYFIQHGVVSVLTKGNKETKLADGSYFGEICLLTRGRRTASVRADTYCRLYSLSVDNFNEVLEEYPMMRRAFETVALDRLDRIGKKNSILLHKVQHDLNSGVFNYQENEIIQQIVQHDREMAHCAHRVQAAASATPTPTPVIWTPLIQAPLQAAAATTSVAIALTHHPRLPAAIFRPPPGSGLGNLGAGQTPRHLKRLQSLIPSALGSASPASSPSQVDTPSSSSFHIQQLAGFSAPAGLSPLLPSSSSSPPPGACGSPSAPTPSAGVAATTIAGFGHFHKALGGSLSSSDSPLLTPLQPGARSPQAAQPSPAPPGARGGLGLPEHFLPPPPSSRSPSSSPGQLGQPPGELSLGLATGPLSTPETPPRQPEPPSLVAGASGGASPVGFTPRGGLSPPGHSPGPPRTFPSAPPRASGSHGSLLLPPASSPPPPQVPQRRGTPPLTPGRLTQDLKLISASQPALPQDGAQTLRRASPHSSGESMAAFPLFPRAGGGSGGSGSSGGLGPPGRPYGAIPGQHVTLPRKTSSGSLPPPLSLFGARATSSGGPPLTAGPQREPGARPEPVRSKLPSNL

SEQ ID NO: 29491 - protein, 64 aa, Homo sapiens
  REGION 1..64: note = ENSP00000362685
MEEPEEPADSGQSLVPVYIYSPEYVSMCDSLAKIPKRASMVHSLIEAYALHKQMRSWMRAVTSL

SEQ ID NO: 29492 - protein, 377 aa, Homo sapiens
  REGION 1..377: note = ENSP00000362674
MEEPEEPADSGQSLVPVYIYSPEYVSMCDSLAKIPKRASMVHSLIEAYALHKQMRIVKPKVASMEEMATFHTDAYLQHLQKVSQEGDDDHPDSIEYGLGYDCPATEGIFDYAAAIGGATITAAQCLIDGMCKVAINWSGGWHHAKKDEASGFCYLNDAVLGILRLRRKFERILYVDLDLHHGDGVEDAFSFTSKVMTVSLHKFSPGFFPGTGDVSDVGLGKGRYYSVNVPIQDGIQDEKYYQICESVLKEVYQAFNPKAVVLQLGADTIAGDPMCSFNMTPVGIGKCLKYILQWQLATLILGGGGYNLANTARCWTYLTGVILGKTLSSEIPDHEFFTAYGPDYVLEITPSCRPDRNEPHRIQQILNYIKGNLKHVV

SEQ ID NO: 29493 - protein, 248 aa, Homo sapiens
  REGION 1..248: note = ENSP00000362669
MEEPEEPADSGQSLVPVYIYSPEYVSMCDSLAKIPKRASMVHSLIEAYALHKQMRDEASGFCYLNDAVLGILRLRRKFERILYVDLDLHHGDGVEDAFSFTSKVMTVSLHKFSPGFFPGTGDVSDVGLGKGRYYSVNVPIQDGIQDEKYYQICESVLKEVYQAFNPKAVVLQLGADTIAGDPMCSFNMTPVGIGKCLKYILQWQLATLILGGGGYNLANTARCWTYLTGVILGKTLSSEIPDHEFFTA

SEQ ID NO: 29494 - protein, 185 aa, Homo sapiens
  REGION 1..185: note = ENSP00000416489
MEEPEEPADSGQSLVPVYIYSPEYVSMCDSLAKIPKRASMVHSLIEAYALHKQMRIVKPKVASMEEMATFHTDAYLQHLQKVSQEGDDDHPDSIEYGLGYDCPATEGIFDYAAAIGGATITAAQCLIDGMCKVAINWSGGWHHAKKDEASGFCYLNDAVLGILRLRRKFERILYVDLDLHHGDVY

SEQ ID NO: 29495 - protein, 299 aa, Homo sapiens
  REGION 1..299: note = ENSP00000396424
MEEPEEPADSGQSLVPVYIYSPEYVSMCDSLAKIPKRASMVHSLIEAYALHKQMRIVKPKVASMEEMATFHTDAYLQHLQKVSQEGDDDHPDSIEYGLGYDCPATEGIFDYAAAIGGATITAAQCLIDGMCKVAINWSGGWHHAKKDEASGFCYLNDAVLGILRLRRKFERILYVDLDLHHGDGTGDVSDVGLGKGRYYSVNVPIQDGIQDEKYYQICESVLKEVYQAFNPKAVVLQLGADTIAGDPMCSFNMTPVGIGKCLKYILQWQLATLILGGGGYNLANTARCWTYLTGVILGK

SEQ ID NO: 29496 - protein, 56 aa, Homo sapiens
  REGION 1..56: note = ENSP00000400180
MEEPEEPADSGQSLVPVYIYSPEYVSMCDSLAKIPKRASMVHSLIEAYALHKQMRL

SEQ ID NO: 29497 - protein, 253 aa, Homo sapiens
  REGION 1..253: note = ENSP00000362672
MEEPEEPADSGQSLVPVYIYSPEYVSMCDSLAKIPKRASMVHSLIEAYALHKQMRIVKPKVASMEEMATFHTDAYLQHLQKVSQEGDDDHPDSIEYGLGYDCPATEGIFDYAAAIGGATITAAQCLIDGMCKVAINWSGGWHHAKKDEASGFCYLNDAVLGILRLRRKFERILYVDLDLHHGDGVEDAFSFTSKVMTVSLHKFSPGFFPGTGDVSDVGLGKGRYYSVNVPIQDGIQDEKYYQICERALFIRTP

SEQ ID NO: 29498 - protein, 256 aa, Homo sapiens
  REGION 1..256: note = ENSP00000414486
MEEPEEPADSGQSLVPVYIYSPEYVSMCDSLAKIPKRASMVHSLIEAYALHKQMRIVKPKVASMEEMATFHTDAYLQHLQKVSQEGDDDHPDSIEYGLGYDCPATEGIFDYAAAIGGATITAAQCLIDGMCKVAINWSGGWHHAKKDEASGFCYLNDAVLGILRLRRKFERILYVDLDLHHGDGVEDAFSFTSKVMTVSLHKFSPGFFPGTGDVSDVGLGKGRYYSVNVPIQDGIQDEKYYQICERYEPPAPNPGL

SEQ ID NO: 29499 - protein, 156 aa, Homo sapiens
  REGION 1..156: note = ENSP00000362661
MEEPEEPADSGQSLVPVYIYSPEYVSMCDSLAKIPKRASMVHSLIEAYALHKQMRIVKPKVASMEEMATFHTDAYLQHLQKVSQEGDDDHPDSIEYGLGYDCPATEGIFDYAAAIGGATITAAQCLIDGMCKVAINWSGGWHHAKKYEPPAPNPGL

SEQ ID NO: 29500 - protein, 139 aa, Homo sapiens
  REGION 1..139: note = ENSP00000362660
MEEPEEPADSGQSLVPVYIYSPEYVSMCDSLAKIPKRASMVHSLIEAYALHKQMRDEASGFCYLNDAVLGILRLRRKFERILYVDLDLHHGDGTGDVSDVGLGKGRYYSVNVPIQDGIQDEKYYQICERYEPPAPNPGL

SEQ ID NO: 29501 - protein, 131 aa, Homo sapiens
  REGION 1..131: note = ENSP00000398997
MVHSLIEAYALHKQMRIVKPKVASMEEMATFHTDAYLQHLQKVSQEGDDDHPDSIEYGLGYDCPATEGIFDYAAAIGGATITAAQCLIDGMCKVAINWSGGWHHAKKDEASGFCYLNDAVLGILRLRRKFE

SEQ ID NO: 29502 - protein, 158 aa, Homo sapiens
  REGION 1..158: note = ENSP00000362657
MEEPEEPADSGQSLVPVYIYSPEYVSMCDSLAKIPKRASMVHSLIEAYALHKQMRIVKPKVASMEEMATFHTDAYLQHLQKVSQEGDDDHPDSIEYGLGYDCPATEGIFDYAAAIGGATITAAQCLIDGMCKVAINWSGGWHHAKKETCVYVALYKAF

SEQ ID NO: 29503 - protein, 146 aa, Homo sapiens
  REGION 1..146: note = ENSP00000362655
MEEPEEPADSGQSLVPVYIYSPEYVSMCDSLAKIPKRASMVHSLIEAYALHKQMRIVKPKVASMEEMATFHTDAYLQHLQKVSQEGDDDHPDSIEYGLGYDCPATEGIFDYAAAIGGATITAAQCLIDGMCKVAINWSGGWHHAKK

SEQ ID NO: 29504 - protein, 55 aa, Homo sapiens
  REGION 1..55: note = ENSP00000409778
MEEPEEPADSGQSLVPVYIYSPEYVSMCDSLAKIPKRASMVHSLIEAYALHKQMS

SEQ ID NO: 29505 - protein, 286 aa, Homo sapiens
  REGION 1..286: note = ENSP00000362691
MEEPEEPADSGQSLVPVYIYSPEYVSMCDSLAKIPKRASMVHSLIEAYALHKQMRDEASGFCYLNDAVLGILRLRRKFERILYVDLDLHHGDGVEDAFSFTSKVMTVSLHKFSPGFFPGTGDVSDVGLGKGRYYSVNVPIQDGIQDEKYYQICESVLKEVYQAFNPKAVVLQLGADTIAGDPMCSFNMTPVGIGKCLKYILQWQLATLILGGGGYNLANTARCWTYLTGVILGKTLSSEIPDHEFFTAYGPDYVLEITPSCRPDRNEPHRIQQILNYIKGNLKHVV

SEQ ID NO: 29506 - protein, 259 aa, Homo sapiens
  REGION 1..259: note = ENSP00000300605
MAACRALKAVLVDLSGTLHIEDAAVPGAQEALKRLRGASVIIRFVTNTTKESKQDLLERLRKLEFDISEDEIFTSLTAARSLLERKQVRPMLLVDDRALPDFKGIQTSDPNAVVMGLAPEHFHYQILNQAFRLLLDGAPLIAIHKARYYKRKDGLALGPGPFVTALEYATDTKATVVGKPEKTFFLEALRGTGCEPEEAVMIGDDCRDDVGGAQDVGMLGILVKTGKYRASDEEKINPPPYLTCESFPHAVDHILQHLL

SEQ ID NO: 29507 - protein, 54 aa, Homo sapiens
  REGION 1..54: note = ENSP00000466602
MAACRALKAVLVDLSGTLHIEDAAVPGAQEALKRQAILQVQLTNMFVTWCFCNH

SEQ ID NO: 29508 - protein, 204 aa, Homo sapiens
  REGION 1..204: note = ENSP00000468067
MAACRALKAVLVDLSGTLHIEDAAVPGAQEALKRLRGASVIIRFVTNTTKESKQDLLERLRKLEFDISEDEIFTSLTAARSLLERKQVRPMLLVDDRALPDFKGIQTSDPNAVVMGLAPEHFHYQILNQAFRLLLDGAPLIAIHKARYYKRKDGLALGPGPFVTALEYATDTKATVVGKPEKTFFLEALRGTGCEPEEAVMIGD

SEQ ID NO: 29509 - protein, 146 aa, Homo sapiens
  REGION 1..146: note = ENSP00000466710
MAACRALKAVLVDLSGTLHIEDAAVPGAQEALKRFVTNTTKESKQDLLERLRKLEFDISEDEIFTSLTAARSLLERKQVRPMLLVDDRALPDFKGIQTSDPNAVVMGLAPEHFHYQILNQAFRLLLDGAPLIAIHKARYYKRKDGL

SEQ ID NO: 29510 - protein, 54 aa, Homo sapiens; identical to SEQ ID NO: 29507
  REGION 1..54: note = ENSP00000467309

SEQ ID NO: 29511 - protein, 132 aa, Homo sapiens
  REGION 1..132: note = ENSP00000467998
MAACRALKAVLVDLSGTLHIEDAAVPGAQEALKRLRGASVIIRFVTNTTKESKQDLLERLRKLEFDISEDEIFTSLTAARSLLERKQVRPMLLVDDRALPDFKGIQTSDPNAVVMGLAPEHFHYQILNQAFR

SEQ ID NO: 29512 - protein, 132 aa, Homo sapiens; identical to SEQ ID NO: 29511
  REGION 1..132: note = ENSP00000467775

SEQ ID NO: 29513 - protein, 54 aa, Homo sapiens; identical to SEQ ID NO: 29507
  REGION 1..54: note = ENSP00000465829

SEQ ID NO: 29514 - protein, 131 aa, Homo sapiens
  REGION 1..131: note = ENSP00000466923
MAACRALKAVLVDLSGTLHIEDAAVPGAQEALKRLRGASVIIRFVTNTTKESKQDLLERLRKLEFDISEDEIFTSLTAARSLLERKQVRPMLLVDDRALPDFKGIQTSDPNAVVMGLAPEHFHYQILNQAF

SEQ ID NO: 29515 - protein, 122 aa, Homo sapiens
  REGION 1..122: note = ENSP00000465282
MAACRALKAVLVDLSGTLHIEDAAVPGAQEALKRFVTNTTKESKQDLLERLRKLEFDISEDEIFTSLTAARSLLERKQVRPMLLVDDRALPDFKGIQTSDPNAVVMGLAPEHFHYQILNQAF

SEQ ID NO: 29516 - protein, 189 aa, Homo sapiens
  REGION 1..189: note = ENSP00000014930
MLGMIKNSLFGSVETWPWQVLSKGDKEEVAYEERACEGGKFATVEVTDKPVDEALREAMPKVAKYAGGTNDKGIGMGMTVPISFAVFPNEDGSLQKKLKVWFRIPNQFQSDPPAPSDKSVKIEEREGITVYSMQFGGYAKEADYVAQATRLRAALEGTATYRGDIYFCTGYDPPMKPYGRRNEIWLLKT

SEQ ID NO: 29517 - protein, 62 aa, Homo sapiens
  REGION 1..62: note = ENSP00000442020
KGIGMGMTVPISFAVFPNEDGSLQKKLKVWFRIPNQFQSDPPAPSDKSVKIEEREGITVYSI

SEQ ID NO: 29518 - protein, 133 aa, Homo sapiens
  REGION 1..133: note = ENSP00000441678
MLGMIKNSLFGSVETWPWQVLSKGDKEEVAYEERACEGGKFATVEVTDKPVDEALREAMPKVAKYAGGTNDKGIGMGMTVPISFAVFPNEDGSLQKKLKVWFRIPNQFQSDPPAPSDKSVKIEEREGITVYSM

SEQ ID NO: 29519 - protein, 543 aa, Homo sapiens
  REGION 1..543: note = ENSP00000356630
MPNPKNSKGGRKNKRANSSGDEQENGAGALAAAGAAGAAAGGALAAAAGCGAAAAGAPGAGGAAGAGGAGTGAANAAAAAGAAAAGDAKNEAPCATPLICSFGRPVDLEKDDYQKVVCNNEHCPCSTWMHLQCFYEWESSILVQFNCIGRARSWNEKQCRQNMWTKKGYDLAFRFCSCRCGQGHLKKDTDWYQVKRMQDEKKKKSGSEKNTGRPPGEAAEEAKKCRPPNKPQKGPSHDLPRRHSMDRQNSQEKAVGAAAYGARSPGGSPGQSPPTGYSILSPAHFSGPRSSRYLGEFLKNAIHLEPHKKAMAGGHVFRNAHFDYSPAGLAVHRGGHFDTPVQFLRRLDLSELLTHIPRHKLNTFHVRMEDDAQVGQGEDLRKFILAALSASHRNVVNCALCHRALPVFEQFPLVDGTLFLSPSRHDEIEYDVPCHLQGRLMHLYAVCVDCLEGVHKIICIKCKSRWDGSWHQLGTMYTYDILAASPCCQARLNCKHCGKPVIDVRIGMQYFSEYSNVQQCPHCGNLDYHFVKPFSSFKVLEAY

SEQ ID NO: 29520 - protein, 1606 aa, Homo sapiens
  REGION 1..1606: note = ENSP00000379228
MLLHLCSVKNLYQNRFLGLAAMASPSRNSQSRRRCKEPLRYSYNPDQFHNMDLRGGPHDGVTIPRSTSDTDLVTSDSRSTLMVSSSYYSIGHSQDLVIHWDIKEEVDAGDWIGMYLIDEVLSENFLDYKNRGVNGSHRGQIIWKIDASSYFVEPETKICFKYYHGVSGALRATTPSVTVKNSAAPIFKSIGADETVQGQGSRRLISFSLSDFQAMGLKKGMFFNPDPYLKISIQPGKHSIFPALPHHGQERRSKIIGNTVNPIWQAEQFSFVSLPTDVLEIEVKDKFAKSRPIIKRFLGKLSMPVQRLLERHAIGDRVVSYTLGRRLPTDHVSGQLQFRFEITSSIHPDDEEISLSTEPESAQIQDSPMNNLMESGSGEPRSEAPESSESWKPEQLGEGSVPDGPGNQSIELSRPAEEAAVITEAGDQGMVSVGPEGAGELLAQVQKDIQPAPSAEELAEQLDLGEEASALLLEDGEAPASTKEEPLEEEATTQSRAGREEEEKEQEEEGDVSTLEQGEGRLQLRASVKRKSRPCSLPVSELETVIASACGDPETPRTHYIRIHTLLHSMPSAQGGSAAEEEDGAEEESTLKDSSEKDGLSEVDTVAADPSALEEDREEPEGATPGTAHPGHSGGHFPSLANGAAQDGDTHPSTGSESDSSPRQGGDHSCEGCDASCCSPSCYSSSCYSTSCYSSSCYSASCYSPSCYNGNRFASHTRFSSVDSAKISESTVFSSQDDEEEENSAFESVPDSMQSPELDPESTNGAGPWQDELAAPSGHVERSPEGLESPVAGPSNRREGECPILHNSQPVSQLPSLRPEHHHYPTIDEPLPPNWEARIDSHGRVFYVDHVNRTTTWQRPTAAATPDGMRRSGSIQQMEQLNRRYQNIQRTIATERSEEDSGSQSCEQAPAGGGGGGGSDSEAESSQSSLDLRREGSLSPVNSQKITLLLQSPAVKFITNPEFFTVLHANYSAYRVFTSSTCLKHMILKVRRDARNFERYQHNRDLVNFINMFADTRLELPRGWEIKTDQQGKSFFVDHNSRATTFIDPRIPLQNGRLPNHLTHRQHLQRLRSYSAGEASEVSRNRGASLLARPGHSLVAAIRSQHQHESLPLAYNDKIVAFLRQPNIFEMLQERQPSLARNHTLREKIHYIRTEGNHGLEKLSCDADLVILLSLFEEEIMSYVPLQAAFHPGYSFSPRCSPCSSPQNSPGLQRASARAPSPYRRDFEAKLRNFYRKLEAKGFGQGPGKIKLIIRRDHLLEGTFNQVMAYSRKELQRNKLYVTFVGEEGLDYSGPSREFFFLLSQELFNPYYGLFEYSANDTYTVQISPMSAFVENHLEWFRFSGRILGLALIHQYLLDAFFTRPFYKALLRLPCDLSDLEYLDEEFHQSLQWMKDNNITDILDLTFTVNEEVFGQVTERELKSGGANTQVTEKNKKEYIERMVKWRVERGVVQQTEALVRGFYEVVDSRLVSVFDARELELVIAGTAEIDLNDWRNNTEYRGGYHDGHLVIRWFWAAVERFNNEQRLRLLQFVTGTSSVPYEGFAALRGSNGLRRFCIEKWGKITSLPRAHTCFNRLDLPPYPSYSMLYEKLLTAVEETSTFGLE

SEQ ID NO: 29521 - protein, 1572 aa, Homo sapiens
  REGION 1..1572: note = ENSP00000407774
MLLHLCSVKNLYQNRFLGLAAMASPSRNSQSRRRCKEPLRYSYNPDQFHNMDLRGGPHDGVTIPRSTSDTDLVTSDSRSTLMVSSSYYSIGHSQDLVIHWDIKEEVDAGDWIGMYLIDEVLSENFLDYKNRGVNGSHRGQIIWKIDASSYFVEPETKICFKYYHGVSGALRATTPSVTVKNSAAPIFKSIGADETVQGQGSRRLISFSLSDFQAMGLKKGMFFNPDPYLKISIQPGKHSIFPALPHHGQERRSKIIGNTVNPIWQAEQFSFVSLPTDVLEIEVKDKFAKSRPIIKRFLGKLSMPVQRLLERHAIGDRVVSYTLGRRLPTDHVSGQLQFRFEITSSIHPDDEEISLSTEPESAQIQDSPMNNLMESGSGEPRSEAPESSESWKPEQLGEGSVPDGPGNQSIELSRPAEEAAVITEAGDQGMVSVGPEGAGELLAQVQKDIQPAPSAEELAEQLDLGEEASALLLEDGEAPASTKEEPLEEEATTQSRAGREEEEKEQEEEGDVSTLEQGEGRLQLRASVKRKSRPCSLPVSELETVIASACGDPETPRTHYIRIHTLLHSMPSAQGGSAAEEEDGAEEESTLKDSSEKDGLSEVDTVAADPSALEEDREEPEGATPGTAHPGHSGGHFPSLANGAAQDGDTHPSTGSESDSSPRQGGDHSCEGCDASCCSPSCYSSSCYSTSCYSSSCYSASCYSPSCYNGNRFASHTRFSSVDSAKISESTVFSSQDDEEEENSAFESVPDSMQSPELDPESTNGAGPWQDELAAPSGHVERSPEGLESPVAGPSNRREDWEARIDSHGRVFYVDHVNRTTTWQRPTAAATPDGMRRSGSIQQMEQLNRRYQNIQRTIATERSEEDSGSQSCEQAPAGGGGGGGSDSEAESSQSSLDLRREGSLSPVNSQKITLLLQSPAVKFITNPEFFTVLHANYSAYRVFTSSTCLKHMILKVRRDARNFERYQHNRDLVNFINMFADTRLELPRGWEIKTDQQGKSFFVDHNSRATTFIDPRIPLQNGRLPNHLTHRQHLQRLRSYSAGEASEVSRNRGASLLARPGHSLVAAIRSQHQHESLPLAYNDKIVAFLRQPNIFEMLQERQPSLARNHTLREKIHYIRTEGNHGLEKLSCDADLVILLSLFEEEIMSYVPLQAAFHPGYSFSPRCSPCSSPQNSPGLQRASARAPSPYRRDFEAKLRNFYRKLEAKGFGQGPGKIKLIIRRDHLLEGTFNQVMAYSRKELQRNKLYVTFVGEEGLDYSGPSREFFFLLSQELFNPYYGLFEYSANDTYTVQISPMSAFVENHLEWFRFSGRILGLALIHQYLLDAFFTRPFYKALLRLPCDLSDLEYLDEEFHQSLQWMKDNNITDILDLTFTVNEEVFGQVTERELKSGGANTQVTEKNKKEYIERMVKWRVERGVVQQTEALVRGFYEVVDSRLVSVFDARELELVIAGTAEIDLNDWRNNTEYRGGYHDGHLVIRWFWAAVERFNNEQRLRLLQFVTGTSSVPYEGFAALRGSNGLRRFCIEKWGKITSLPRAHTCFNRLDLPPYPSYSMLYEKLLTAVEETSTFGLE

SEQ ID NO: 29522 - protein, 138 aa, Homo sapiens
  REGION 1..138: note = ENSP00000413336
  VARIANT 1: note = Any amino acid
XPRIPLQNGRLPNHLTHRQHLQRLRSYSAGEARVQWCDLGSLQPPPPRFKQFSCLSLSSSWDYRFRFSGRILGLALIHQYLLDAFFTRPFYKALLRLPCDLSDLEYLDEEFHQSLQWMKDNNITDILDLTFTVNEEVF

SEQ ID NO: 29523 - protein, 1381 aa, Homo sapiens
  REGION 1..1381: note = ENSP00000311502
MASPRASRWPPPLLLLLLPLLLLPPAAPGTRDPPPSPARRALSLAPLAGAGLELQLERRPEREPPPTPPRERRGPATPGPSYRAPEPGAATQRGPSGRAPRGGSADAAWKHWPESNTEAHVENITFYQNQEDFSTVSSKEGVMVQTSGKSHAASDAPENLTLLAETADARGRSGSSSRTNFTILPVGYSLEIATALTSQSGNLASESLHLPSSSSEFDERIAAFQTKSGTASEMGTERAMGLSEEWTVHSQEATTSAWSPSFLPALEMGELTTPSRKRNSSGPDLSWLHFYRTAASSPLLDLSSSSESTEKLNNSTGLQSSSVSQTKTMHVATVFTDGGPRTLRSLTVSLGPVSKTEGFPKDSRIATTSSSVLLSPSAVESRRNSRVTGNPGDEEFIEPSTENEFGLTSLRWQNDSPTFGEHQLASSSEVQNGSPMSQTETVSRSVAPMRGGEITAHWLLTNSTTSADVTGSSASYPEGVNASVLTQFSDSTVQSGGSHTALGDRSYSESSSTSSSESLNSSAPRGERSIAGISYGQVRGTAIEQRTSSDHTDHTYLSSTFTKGERALLSITDNSSSSDIVESSTSYIKISNSSHSEYSSFFHAQTERSNISSYDGEYAQPSTESPVLHTSNLPSYTPTINMPNTSVVLDTDAEFVSDSSSSSSSSSSSSSSGPPLPLPSVSQSHHLFSSILPSTRASVHLLKSTSDASTPWSSSPSPLPVSLTTSTSAPLSVSQTTLPQSSSTPVLPRARETPVTSFQTSTMTSFMTMLHSSQTADLKSQSTPHQEKVITESKSPSLVSLPTESTKAVTTNSPLPPSLTESSTEQTLPATSTNLAQMSPTFTTTILKTSQPLMTTPGTLSSTASLVTGPIAVQTTAGKQLSLTHPEILVPQISTEGGISTERNRVIVDATTGLIPLTSVPTSAKEMTTKLGVTAEYSPASRSLGTSPSPQTTVVSTAEDLAPKSATFAVQSSTQSPTTVSSSASVNSCAVNPCLHNGECVADNTSRGYHCRCPPSWQGDDCSVDVNECLSNPCPSTAMCNNTQGSFICKCPVGYQLEKGICNLVRTFVTEFKLKRTFLNTTVEKHSDLQEVENEITKTLNMCFSALPSYIRSTVHASRESNAVVISLQTTFSLASNVTLFDLADRMQKCVNSCKSSAEVCQLLGSQRRIFRAGSLCKRKSPECDKDTSICTDLDGVALCQCKSGYFQFNKMDHSCRACEDGYRLENETCMSCPFGLGGLNCGNPYQLITVVIAAAGGGLLLILGIALIVTCCRKNKNDISKLIFKSGDFQMSPYAEYPKNPRSQEWGREAIEMHENGSTKNLLQMTDVYYSPTSVRNPELERNGLYPAYTGLPGSRHSCIFPGQYNPSFISDESRRRDYF

SEQ ID NO: 29524 - protein, 265 aa, Homo sapiens [sequence omitted]

SEQ ID NO: 29525 - protein, 63 aa, Homo sapiens
  REGION 1..63: note = ENSP00000417494
RKNKNDISKLIFKSGDFQMSPYAEYPKNPRSQEWGREAIEMHENGSTKNLLQMTDVYYSGAFF

SEQ ID NO: 29526 - protein, 416 aa, Homo sapiens
  REGION 1..416: note = ENSP00000298251
MKRERGALSRASRALRLAPFVYLLLIQTDPLEGVNITSPVRLIHGTVGKSALLSVQYSSTSSDRPVVKWQLKRDKPVTVVQSIGTEVIGTLRPDYRDRIRLFENGSLLLSDLQLADEGTYEVEISITDDTFTGEKTINLTVDVPISRPQVLVASTTVLELSEAFTLNCSHENGTKPSYTWLKDGKPLLNDSRMLLSPDQKVLTITRVLMEDDDLYSCMVENPISQGRSLPVKITVYRRSSLYIILSTGGIFLLVTLVTVCACWKPSKRKQKKLEKQNSLEYMDQNDDRLKPEADTLPRSGEQERKNPMALYILKDKDSPETEENPAPEPRSATEPGPPGYSVSPAVPGRSPGLPIRSARRYPRSPARSPATGRTHSSPPRAPSSPGRSRSASRTLRTAGVHIIREQDEAGPVEISA

SEQ ID NO: 29527 - protein, 391 aa, Homo sapiens
  REGION 1..391: note = ENSP00000409555
MESETEPEPVTLLVKSPNQRHRDLELSGDRGWSVGHLKAHLSRVYPERPRPEDQRLIYSGKLLLDHQCLRDLLPKQEKRHVLHLVCNVKSPSKMPEINAKVAESTEEPAGSNRGQYPEDSSSDGLRQREVLRNLSSPGWENISRPEAAQQAFQGLGPGFSGYTPYGWLQLSWFQQIYARQYYMQYLAATAASGAFVPPPSAQEIPVVSAPAPAPIHNQFPAENQPANQNAAPQVVVNPGANQNLRMNAQGGPIVEEDDEINRDWLDWTYSAATFSVFLSILYFYSSLSRFLMVMGATVVMYLHHVGWFPFRPRPVQNFPNDGPPPDVVNQDPNNNLQEGTDPETEDPNHLPPDRDVLDGEQTSPSFMSTAWLVFKTFFASLLPEGPPAIAN

SEQ ID NO: 29528 - protein, 53 aa, Homo sapiens
  REGION 1..53: note = ENSP00000456384
MESETEPEPVTLLVKSPNQRHRDLELSGDRGWSVGHLKAHLSRVYPERPRTRG

SEQ ID NO: 29529 - protein, 232 aa, Homo sapiens
  REGION 1..232: note = ENSP00000340931
MESETEPEPVTLLVKSPNQRHRDLELSGDRGWSVGHLKAHLSRVYPERPRPEDQRLIYSGKLLLDHQCLRDLLPKEKRHVLHLVCNVKSPSKMPEINAKVAESTEEPAGSNRGQYPEDSSSDGLRQREVLRNLSSPGWENISRHHVGWFPFRPRPVQNFPNDGPPPDVVNQDPNNNLQEGTDPETEDPNHLPPDRDVLDGEQTSPSFMSTAWLVFKTFFASLLPEGPPAIAN

SEQ ID NO: 29530 - protein, 390 aa, Homo sapiens
  REGION 1..390: note = ENSP00000300302
MESETEPEPVTLLVKSPNQRHRDLELSGDRGWSVGHLKAHLSRVYPERPRPEDQRLIYSGKLLLDHQCLRDLLPKEKRHVLHLVCNVKSPSKMPEINAKVAESTEEPAGSNRGQYPEDSSSDGLRQREVLRNLSSPGWENISRPEAAQQAFQGLGPGFSGYTPYGWLQLSWFQQIYARQYYMQYLAATAASGAFVPPPSAQEIPVVSAPAPAPIHNQFPAENQPANQNAAPQVVVNPGANQNLRMNAQGGPIVEEDDEINRDWLDWTYSAATFSVFLSILYFYSSLSRFLMVMGATVVMYLHHVGWFPFRPRPVQNFPNDGPPPDVVNQDPNNNLQEGTDPETEDPNHLPPDRDVLDGEQTSPSFMSTAWLVFKTFFASLLPEGPPAIAN

SEQ ID NO: 29531 - protein, 366 aa, Homo sapiens
  REGION 1..366: note = ENSP00000369118
MESETEPEPVTLLVKSPNQRHRDLELSGDRGWSVGHLKAHLSRVYPERPRPEDQRLIYSGKLLLDHQCLRDLLPKVAESTEEPAGSNRGQYPEDSSSDGLRQREVLRNLSSPGWENISRPEAAQQAFQGLGPGFSGYTPYGWLQLSWFQQIYARQYYMQYLAATAASGAFVPPPSAQEIPVVSAPAPAPIHNQFPAENQPANQNAAPQVVVNPGANQNLRMNAQGGPIVEEDDEINRDWLDWTYSAATFSVFLSILYFYSSLSRFLMVMGATVVMYLHHVGWFPFRPRPVQNFPNDGPPPDVVNQDPNNNLQEGTDPETEDPNHLPPDRDVLDGEQTSPSFMSTAWLVFKTFFASLLPEGPPAIAN

SEQ ID NO: 29532 - protein, 150 aa, Homo sapiens
  REGION 1..150: note = ENSP00000457321
MVKNVLERPEDQRLIYSGKLLLDHQCLRDLLPKVAESTEEPAGSNRGQYPEDSSSDGLRQREVLRNLSSPGWENISRPEAAQQAFQGLGPGFSGYTPYGWLQLSWFQQIYARQYYMQYLAATAASGAFVPPPSAQEIPVVSAPAPAPIHN

SEQ ID NO: 29533 - protein, 160 aa, Homo sapiens
  REGION 1..160: note = ENSP00000455094
MVKNVLERPEDQRLIYSGKLLLDHQCLRDLLPKQEKRHVLHLVCNVKSPSKMPEINAKVAESTEEPAGSNRGQYPEDSSSDGLRQREVLRNLSSPGWENISRPEAAQQAFQGLGPGFSGYTPYGWLQLSWFQQIYARQYYMQYLAATAASGAFVPPPSAQ

SEQ ID NO: 29534 - protein, 109 aa, Homo sapiens
  REGION 1..109: note = ENSP00000457095
  VARIANT 1: note = Any amino acid
XEKRHVLHLVCNVKSPSKMPEINAKVAESTEEPAGSNRGQYPEDSSSDGLRQREVLRNLSSPGWENISRPEAAQQAFQGLGPGFSGYTPYGWLQLSWFQQIYARQYYMQ

SEQ ID NO: 29535 - protein, 226 aa, Homo sapiens
  REGION 1..226: note = ENSP00000455841
  VARIANT 1: note = Any amino acid
XGQYPEDSSSDGLRQREVLRNLSSPGWENISSLAATAASGAFVPPPSAQEIPVVSAPAPAPIHNQFPAENQPANQNAAPQVVVNPGANQNLRMNAQGGPIVEEDDEINRDWLDWTYSAATFSVFLSILYFYSSLSRFLMVMGATVVMYLHHVGWFPFRPRPVQNFPNDGPPPDVVNQDPNNNLQKAPQPSQTDGVCAVAVGGFDRNGLDHLTPARLPLLDMAMMSF

SEQ ID NO: 29536 - protein, 150 aa, Homo sapiens
  REGION 1..150: note = ENSP00000457955
  VARIANT 1: note = Any amino acid
XQQAFQGLGPGFSGYTPYGWLQLSWFQQIYARQYYMQYILYFYSSLSRFLMVMGATVVMYLHHVGWFPFRPRPVQNFPNDGPPPDVVNQDPNNNLQEGTDPETEDPNHLPPDRDVLDGEQTSPSFMSTAWLVFKTFFASLLPEGPPAIAN

SEQ ID NO: 29537 - protein, 280 aa, Homo sapiens
  REGION 1..280: note = ENSP00000232424
MPADIMEKNSSSPVAATPASVNTTPDKPKTASEHRKSSKPIMEKRRRARINESLSQLKTLILDALKKDSSRHSKLEKADILEMTVKHLRNLQRAQMTAALSTDPSVLGKYRAGFSECMNEVTRFLSTCEGVNTEVRTRLLGHLANCMTQINAMTYPGQPHPALQAPPPPPPGPGGPQHAPFAPPPPLVPIPGGAAPPPGGAPCKLGSQAGEAAKVFGGFQVVPAPDGQFAFLIPNGAFAHSGPVIPVYTSNSGTSVGPNAVSPSSGPSLTADSMWRPWRN

SEQ ID NO: 29538 - protein, 186 aa, Homo sapiens
  REGION 1..186: note = ENSP00000367130
MEKKRRARINVSLEQLKSLLEKHYSHQIRKRKLEKADILELSVKYMRSLQNSLQGLWPVPRGAEQPSGFRSCLPGVSQLLRRGDEVGSGLRCPLVPESAAGSTMDSAGLGQEAPALFRPCTPAVWAPAPAAGGPRSPPPLLLLPESLPGSSASVPPPQPASSRCAESPGLGLRVWRPWGSPGDDLN

SEQ ID NO: 29539 - protein, 291 aa, Homo sapiens
  REGION 1..291: note = ENSP00000357349
MARKKRRGIIEKRRRDRINNSLSELRRLVPTAFEKQGSAKLEKAEILQMTVDHLKMLQATGGKGYFDAHALAMDFMSIGFRECLTEVARYLSSVEGLDSSDPLRVRLVSHLSTCATQREAAAMTSSMAHHHHPLHPHHWAAAFHHLPAALLQPNGLHASESTPCRLSTTSEVPPAHGSALLTATFAHADSALRMPSTGSVAPCVPPLSTSLLSLSATVHAAAAAATAAAHSFPLSFAGAFPMLPPNAAAAVAAATAISPPLSVSATSSPQQTSSGTNNKPYRPWGTEVGAF

SEQ ID NO: 29540 - protein, 337 aa, Homo sapiens
  REGION 1..337: note = ENSP00000357348
MKRPCEETTSESDMDETIDVGSENNYSGQSTSSVIRLNSPTTTSQIMARKKRRGIIEKRRRDRINNSLSELRRLVPTAFEKQGSAKLEKAEILQMTVDHLKMLQATGGKGYFDAHALAMDFMSIGFRECLTEVARYLSSVEGLDSSDPLRVRLVSHLSTCATQREAAAMTSSMAHHHHPLHPHHWAAAFHHLPAALLQPNGLHASESTPCRLSTTSEVPPAHGSALLTATFAHADSALRMPSTGSVAPCVPPLSTSLLSLSATVHAAAAAATAAAHSFPLSFAGAFPMLPPNAAAAVAAATAISPPLSVSATSSPQQTSSGTNNKPYRPWGTEVGAF

SEQ ID NO: 29541 - protein, 728 aa, Homo sapiens
  REGION 1..728: note = ENSP00000222390
MWVTKLLPALLLQHVLLHLLLLPIAIPYAEGQRKRRNTIHEFKKSAKTTLIKIDPALKIKTKKVNTADQCANRCTRNKGLPFTCKAFVFDKARKQCLWFPFNSMSSGVKKEFGHEFDLYENKDYIRNCIIGKGRSYKGTVSITKSGIKCQPWSSMIPHEHSFLPSSYRGKDLQENYCRNPRGEEGGPWCFTSNPEVRYEVCDIPQCSEVECMTCNGESYRGLMDHTESGKICQRWDHQTPHRHKFLPERYPDKGFDDNYCRNPDGQPRPWCYTLDPHTRWEYCAIKTCADNTMNDTDVPLETTECIQGQGEGYRGTVNTIWNGIPCQRWDSQYPHEHDMTPENFKCKDLRENYCRNPDGSESPWCFTTDPNIRVGYCSQIPNCDMSHGQDCYRGNGKNYMGNLSQTRSGLTCSMWDKNMEDLHRHIFWEPDASKLNENYCRNPDDDAHGPWCYTGNPLIPWDYCPISRCEGDTTPTIVNLDHPVISCAKTKQLRVVNGIPTRTNIGWMVSLRYRNKHICGGSLIKESWVLTARQCFPSRDLKDYEAWLGIHDVHGRGDEKCKQVLNVSQLVYGPEGSDLVLMKLARPAVLDDFVSTIDLPNYGCTIPEKTSCSVYGWGYTGLINYDGLLRVAHLYIMGNEKCSQHHRGKVTLNESEICAGAEKIGSGPCEGDYGGPLVCEQHKMRMVLGVIVPGRGCAIPNRPGIFVRVAYYAKWIHKIILTYKVPQS

SEQ ID NO: 29542 - protein, 723 aa, Homo sapiens
  REGION 1..723: note = ENSP00000391238
MWVTKLLPALLLQHVLLHLLLLPIAIPYAEGQRKRRNTIHEFKKSAKTTLIKIDPALKIKTKKVNTADQCANRCTRNKGLPFTCKAFVFDKARKQCLWFPFNSMSSGVKKEFGHEFDLYENKDYIRNCIIGKGRSYKGTVSITKSGIKCQPWSSMIPHEHSYRGKDLQENYCRNPRGEEGGPWCFTSNPEVRYEVCDIPQCSEVECMTCNGESYRGLMDHTESGKICQRWDHQTPHRHKFLPERYPDKGFDDNYCRNPDGQPRPWCYTLDPHTRWEYCAIKTCADNTMNDTDVPLETTECIQGQGEGYRGTVNTIWNGIPCQRWDSQYPHEHDMTPENFKCKDLRENYCRNPDGSESPWCFTTDPNIRVGYCSQIPNCDMSHGQDCYRGNGKNYMGNLSQTRSGLTCSMWDKNMEDLHRHIFWEPDASKLNENYCRNPDDDAHGPWCYTGNPLIPWDYCPISRCEGDTTPTIVNLDHPVISCAKTKQLRVVNGIPTRTNIGWMVSLRYRNKHICGGSLIKESWVLTARQCFPSRDLKDYEAWLGIHDVHGRGDEKCKQVLNVSQLVYGPEGSDLVLMKLARPAVLDDFVSTIDLPNYGCTIPEKTSCSVYGWGYTGLINYDGLLRVAHLYIMGNEKCSQHHRGKVTLNESEICAGAEKIGSGPCEGDYGGPLVCEQHKMRMVLGVIVPGRGCAIPNRPGIFVRVAYYAKWIHKIILTYKVPQS

SEQ ID NO: 29543 - protein, 290 aa, Homo sapiens
  REGION 1..290: note = ENSP00000389854
MWVTKLLPALLLQHVLLHLLLLPIAIPYAEGQRKRRNTIHEFKKSAKTTLIKIDPALKIKTKKVNTADQCANRCTRNKGLPFTCKAFVFDKARKQCLWFPFNSMSSGVKKEFGHEFDLYENKDYIRNCIIGKGRSYKGTVSITKSGIKCQPWSSMIPHEHSFLPSSYRGKDLQENYCRNPRGEEGGPWCFTSNPEVRYEVCDIPQCSEVECMTCNGESYRGLMDHTESGKICQRWDHQTPHRHKFLPERYPDKGFDDNYCRNPDGQPRPWCYTLDPHTRWEYCAIKTCET

SEQ ID NO: 29544 - protein, 285 aa, Homo sapiens
  REGION 1..285: note = ENSP00000408270
MWVTKLLPALLLQHVLLHLLLLPIAIPYAEGQRKRRNTIHEFKKSAKTTLIKIDPALKIKTKKVNTADQCANRCTRNKGLPFTCKAFVFDKARKQCLWFPFNSMSSGVKKEFGHEFDLYENKDYIRNCIIGKGRSYKGTVSITKSGIKCQPWSSMIPHEHSYRGKDLQENYCRNPRGEEGGPWCFTSNPEVRYEVCDIPQCSEVECMTCNGESYRGLMDHTESGKICQRWDHQTPHRHKFLPERYPDKGFDDNYCRNPDGQPRPWCYTLDPHTRWEYCAIKTCET

SEQ ID NO: 29545 - protein, 210 aa, Homo sapiens
  REGION 1..210: note = ENSP00000413829
MWVTKLLPALLLQHVLLHLLLLPIAIPYAEGQRKRRNTIHEFKKSAKTTLIKIDPALKIKTKKVNTADQCANRCTRNKGLPFTCKAFVFDKARKQCLWFPFNSMSSGVKKEFGHEFDLYENKDYIRNCIIGKGRSYKGTVSITKSGIKCQPWSSMIPHEHSFLPSSYRGKDLQENYCRNPRGEEGGPWCFTSNPEVRYEVCDIPQCSEGK

SEQ ID NO: 29546 - protein, 58 aa, Homo sapiens
  REGION 1..58: note = ENSP00000395468
MSSGVKKEFGHEFDLYENKDYIRNCIIGKGRSYKGTVSITKSGIKCQPWSSMIPHEHR

SEQ ID NO: 29547 - protein, 141 aa, Homo sapiens
  REGION 1..141: note = ENSP00000396307
MWVTKLLPALLLQHVLLHLLLLPIAIPYAEGQRKRRNTIHEFKKSAKTTLIKIDPALKIKTKKVNTADQCANRCTRNKGLPFTCKAFVFDKARKQCLWFPFNSMSSGVKKEFGHEFDLYENKDYIRNCIIGKGRSYKGTVS

SEQ ID NO: 29548 - protein, 118 aa, Homo sapiens
  REGION 1..118: note = ENSP00000388592
MWVTKLLPALLLQHVLLHLLLLPIAIPYAEGQRKRRNTIHEFKKSAKTTLIKIDPALKIKTKKVNTADQCANRCTRNKGLPFTCKAFVFDKARKQCLWFPFNSMSSGVKKEFGHEFDL

SEQ ID NO: 29549 - protein, 184 aa, Homo sapiens
  REGION 1..184: note = ENSP00000346164
MWVTKLLPALLLQHVLLHLLLLPIAIPYAEGQRKRRNTIHEFKKSAKTTLIKIDPALKIKTKKVNTADQCANRCTRNKGLPFTCKAFVFDKARKQCLWFPFNSMSSGVKKEFGHEFDLYENKDYIRNCIIGKGRSYKGTVSITKSGIKCQPWSSMIPHEHSGGDDCLVESTFYSIPFWGHNSAR

SEQ ID NO: 29550 - protein, 124 aa, Homo sapiens
  REGION 1..124: note = ENSP00000401568
  VARIANT 1: note = Any amino acid
XVLFGVVNTVACLDHLDPPQPPKCITALYVFAETHFDRGINDWLCKVRALFGAMNFWAIIMYNLVSLNSLKFTELVARRLLLTGFPQTTLSILFVTYCGVQLVKERERTLALEEEQKQDKEKPE

SEQ ID NO: 29551 - protein, 504 aa, Homo sapiens
  REGION 1..504: note = ENSP00000310621
MGIKTALPAAELGLYSLVLSGALAYAGRGLLEASQDGAHRKAFRESVRPGWEYIGRKMDVADFEWVMWFTSFRNVIIFALSGHVLFAKLCTMVAPKLRSWMYAVYGALAVMGTMGPWYLLLLLGHCVGLYVASLLGQPWLCLGLGLASLASFKMDPLISWQSGFVTGTFDLQEVLFHGGSSFTVLRCTSFALESCAHPDRHYSLADLLKYNFYLPFFFFGPIMTFDRFHAQVSQVEPVRREGELWHIRAQAGLSVVAIMAVDIFFHFFYILTIPSDLKFANRLPDSALAGLAYSNLVYDWVKAAVLFGVVNTVACLDHLDPPQPPKCITALYVFAETHFDRGINDWLCKYVYNHIGGEHSAVIPELAATVATFAITTLWLGPCDIVYLWSFLNCFGLNFELWMQKLAEWGPLARIEASLSVQMSRRVRALFGAMNFWAIIMYNLVSLNSLKFTELVARRLLLTGFPQTTLSILFVTYCGVQLVKERERTLALEEEQKQDKEKPE

SEQ ID NO: 29552 - protein, 504 aa, Homo sapiens; identical to SEQ ID NO: 29551
  REGION 1..504: note = ENSP00000405423

SEQ ID NO: 29553 - protein, 261 aa, Homo sapiens
  REGION 1..261: note = ENSP00000403787
MGIKTALPAAELGLYSLVLSGALAYAGRGLLEASQDGAHRKAFRESVRPGWEYIGRKMDVADFEWVMWFTSFRNVIIFALSGHVLFAKLCTMVAPKSGFVTGTFDLQEVLFHGGSSFTVLRCTSFALESCAHPDRHYSLADLLKYNFYLPFFFFGPIMTFDRFHAQVSQVEPVRREGELWHIRAQAGLSVVAIMAVDIFFHFFYILTIPSDLKFANRLPDSALAGLAYSNLVYDWVKAAVLFGVVNTVACLDHLDPPQPPK

SEQ ID NO: 29554 - protein, 231 aa, Homo sapiens
  REGION 1..231: note = ENSP00000395779
MGIKTALPAAELGLYSLVLSGALAYAGRGLLEASQDGAHRKAFRESVRPGWEYIGRKMDVADFEWVMWFTSFRNVIIFALSGHVLFAKLCTMVAPKLRSWMYAVYGALAVMGTMGPWYLLLLLGHCVGLYVASLLGQPWLCLGLGLASLASFKMDPLISWQSGFVTGTFDLQEVLFHGGSSFTVLRCTSFALESCAHPDRHYSLADLLKYNFYLPFFFFGPIMTFDRFHAQ

SEQ ID NO: 29555 - protein, 203 aa, Homo sapiens
  REGION 1..203: note = ENSP00000415351
MGIKTALPAAELGLYSLVLSGALAYAGRGLLEASQDGAHRKAFRESVRPGWEYIGRKMDVADFEWVMWFTSFRNVIIFALSGHVLFAKLCTMVAPKLRSWMYAVYGALAVMGTMGPWYLLLLLGHCVGLYVASLLGQPWLCLGLGLASLASFKMDPLISWQSGFVTGTFDLQEVLFHGGSSFTVLRCTSFALESCAHPDRHYS

SEQ ID NO: 29556 - protein, 116 aa, Homo sapiens
  REGION 1..116: note = ENSP00000413810
MGIKTALPAAELGLYSLVLSGALAYAGRGLLEASQDGAHRKAFRESVRPGWEYIGRKMDVADFEWVMWFTSFRNVIIFALSGHVLFAKLCTMVAPKSGFVTGTFDLQEVLFHGGSS

SEQ ID NO: 29557 - protein, 117 aa, Homo sapiens
  REGION 1..117: note = ENSP00000408999
MGIKTALPAAELGLYSLVLSGALAYAGRGLLEASQDGAHRKAFRESVRPGWEYIGRKMDVADFEWVMWFTSFRNVIIFALSGHVLFAKLCTMVAPKLRSWMYAVYGALAVMGTMGPW

SEQ ID NO: 29558 - protein, 700 aa, Homo sapiens
  REGION 1..700: note = ENSP00000296575
MLKMLSFKLLLLAVALGFFEGDAKFGERNEGSGARRRRCLNGNPPKRLKRRDRRMMSQLELLSGGEMLCGGFYPRLSCCLRSDSPGLGRLENKIFSVTNNTECGKLLEEIKCALCSPHSQSLFHSPEREVLERDLVLPLLCKDYCKEFFYTCRGHIPGFLQTTADEFCFYYARKDGGLCFPDFPRKQVRGPASNYLDQMEEYDKVEEISRKHKHNCFCIQEVVSGLRQPVGALHSGDGSQRLFILEKEGYVKILTPEGEIFKEPYLDIHKLVQSGIKGGDERGLLSLAFHPNYKKNGKLYVSYTTNQERWAIGPHDHILRVVEYTVSRKNPHQVDLRTARVFLEVAELHRKHLGGQLLFGPDGFLYIILGDGMITLDDMEEMDGLSDFTGSVLRLDVDTDMCNVPYSIPRSNPHFNSTNQPPEVFAHGLHDPGRCAVDRHPTDININLTILCSDSNGKNRSSARILQIIKGKDYESEPSLLEFKPFSNGPLVGGFVYRGCQSERLYGSYVFGDRNGNFLTLQQSPVTKQWQEKPLCLGTSGSCRGYFSGHILGFGEDELGEVYILSSSKSMTQTHNGKLYKIVDPKRPLMPEECRATVQPAQTLTSECSRLCRNGYCTPTGKCCCSPGWEGDFCRTAKCEPACRHGGVCVRPNKCLCKKGYLGPQCEQVDRNIRRVTRAGILDQIIDMTSYLLDLTSYIV

SEQ ID NO: 29559 - protein, 320 aa, Homo sapiens
  REGION 1..320: note = ENSP00000408587
MLKMLSFKLLLLAVALGFFEGDAKFGERNEGSGARRRRCLNGNPPKRLKRRDRRMMSQLELLSGGEMLCGGFYPRLSCCLRSDSPGLGRLENKIFSVTNNTECGKLLEEIKCALCSPHSQSLFHSPEREVLERDLVLPLLCKDYCKEFFYTCRGHIPGFLQTTADEFCFYYARKDGGLCFPDFPRKQVRGPASNYLDQMEEYDKVEEISRKHKHNCFCIQEVVSGLRQPVGALHSGDGSQRLFILEKEGYVKILTPEGEIFKEPYLDIHKLVQSGIKVGFLNFIYFCAGYVNFILVLPSSLKVFLCNKRKNLAGENKGAT

SEQ ID NO: 29560 - protein, 669 aa, Homo sapiens
  REGION 1..669: note = ENSP00000366898
MALGLQRARSTTELRKEKSRDAARSRRSQETEVLYQLAHTLPFARGVSAHLDKASIMRLTISYLRMHRLCAAGEWNQVGAGGEPLDACYLKALEGFVMVLTAEGDMAYLSENVSKHLGLSQLELIGHSIFDFIHPCDQEELQDALTPQQTLSRRKVEAPTERCFSLRMKSTLTSRGRTLNLKAATWKVLNCSGHMRAYKPPAQTSPAGSPDSEPPLQCLVLICEAIPHPGSLEPPLGRGAFLSRHSLDMKFTYCDDRIAEVAGYSPDDLIGCSAYEYIHALDSDAVSKSIHTLLSKGQAVTGQYRFLARSGGYLWTQTQATVVSGGRGPQSESIVCVHFLISQVEETGVVLSLEQTEQHSRRPIQRGAPSQKDTPNPGDSLDTPGPRILAFLHPPSLSEAALAADPRRFCSPDLRRLLGPILDGASVAATPSTPLATRHPQSPLSADLPDELPVGTENVHRLFTSGKDTEAVETDLDIAQDADALDLEMLAPYISMDDDFQLNASEQLPRAYHRPLGAVPRPRARSFHGLSPPALEPSLLPRWGSDPRLSCSSPSRGDPSASSPMAGARKRTLAQSSEDEDEGVELLGVRPPKRSPSPEHENFLLFPLSLSFLLTGGPAPGSLQDPSTPLLNLNEPLGLGPSLLSPYSDEDTTQPGGPFQPRAGSAQAD

SEQ ID NO: 29561 - protein, 600 aa, Homo sapiens
  REGION 1..600: note = ENSP00000244303
MRPAAGAARRPRCCTSWLTRCPSPAASAPTWTRPLSCASPSATCACTASAPQLELIGHSIFDFIHPCDQEELQDALTPQQTLSRRKVEAPTERCFSLRMKSTLTSRGRTLNLKAATWKVLNCSGHMRAYKPPAQTSPAGSPDSEPPLQCLVLICEAIPHPGSLEPPLGRGAFLSRHSLDMKFTYCDDRIAEVAGYSPDDLIGCSAYEYIHALDSDAVSKSIHTLLSKGQAVTGQYRFLARSGGYLWTQTQATVVSGGRGPQSESIVCVHFLISQVEETGVVLSLEQTEQHSRRPIQRGAPSQKDTPNPGDSLDTPGPRILAFLHPPSLSEAALAADPRRFCSPDLRRLLGPILDGASVAATPSTPLATRHPQSPLSADLPDELPVGTENVHRLFTSGKDTEAVETDLDIAQDADALDLEMLAPYISMDDDFQLNASEQLPRAYHRPLGAVPRPRARSFHGLSPPALEPSLLPRWGSDPRLSCSSPSRGDPSASSPMAGARKRTLAQSSEDEDEGVELLGVRPPKRSPSPEHENFLLFPLSLSFLLTGGPAPGSLQDPSTPLLNLNEPLGLGPSLLSPYSDEDTTQPGGPFQPRAGSAQAD

SEQ ID NO: 29562 - protein, 69 aa, Homo sapiens
  REGION 1..69: note = ENSP00000435532
MRPAAGAARRPRCCTSWLTRCPSPAASAPTWTRPLSCASPSATCACTASAPQGSGTRWEQGENHWMPAT

SEQ ID NO: 29563 - protein, 148 aa, Homo sapiens
  REGION 1..148: note = ENSP00000435200
MRPAAGAARRPRCCTSWLTRCPSPAASAPTWTRPLSCASPSATCACTASAPQATRMYPHFLGGAWEWNQVGAGGEPLDACYLKALEGFVMVLTAEGDMAYLSENVSKHLGLSQLELIGHSIFDFIHPCDQEELQDALTPQQTLSRRKV

SEQ ID NO: 29564 - protein, 450 aa, Homo sapiens
  REGION 1..450: note = ENSP00000434653
MRPAAGAARRPRCCTSWLTRCPSPAASAPTWTRPLSCASPSATCACTASAPQLELIGHSIFDFIHPCDQEELQDALTPQQTLSRRKVEAPTERCFSLRMKSTLTSRGRTLNLKAATWKVLNCSGHMRAYKPPAQTSPAGSPDSEPPLQCLVLICEAIPHPGSLEPPLGRGAFLSRHSLDMKFTYCDDRIAEVAGYSPDDLIGCSAYEYIHALDSDAVSKSIHTLLSKGQAVTGQYRFLARSGGYLWTQTQATVVSGGRGPQSESIVCVHFLISQVEETGVVLSLEQTEQHSRRPIQRGAPSQKDTPNPGDSLDTPGPRILAFLHPPSLSEAALAADPRRFCSPDLRRLLGPILDGASVAATPSTPLATRHPQSPLSADLPDELPVGTENVHRLFTSGKDTEAVETDLDIAQDPSTPLLNLNEPLGFHFVTQSGVQWHKHSSPQPRPPGLK

SEQ ID NO: 29565 - protein, 69 aa, Homo sapiens; identical to SEQ ID NO: 29562
  REGION 1..69: note = ENSP00000432613

SEQ ID NO: 29566 - protein, 667 aa, Homo sapiens
  REGION 1..667: note = ENSP00000300862
MDWQDHRSTTELRKEKSRDAARSRRSQETEVLYQLAHTLPFARGVSAHLDKASIMRLTISYLRMHRLCAAGEWNQVGAGGEPLDACYLKALEGFVMVLTAEGDMAYLSENVSKHLGLSQLELIGHSIFDFIHPCDQEELQDALTPQQTLSRRKVEAPTERCFSLRMKSTLTSRGRTLNLKAATWKVLNCSGHMRAYKPPAQTSPAGSPDSEPPLQCLVLICEAIPHPGSLEPPLGRGAFLSRHSLDMKFTYCDDRIAEVAGYSPDDLIGCSAYEYIHALDSDAVSKSIHTLLSKGQAVTGQYRFLARSGGYLWTQTQATVVSGGRGPQSESIVCVHFLISQVEETGVVLSLEQTEQHSRRPIQRGAPSQKDTPNPGDSLDTPGPRILAFLHPPSLSEAALAADPRRFCSPDLRRLLGPILDGASVAATPSTPLATRHPQSPLSADLPDELPVGTENVHRLFTSGKDTEAVETDLDIAQDADALDLEMLAPYISMDDDFQLNASEQLPRAYHRPLGAVPRPRARSFHGLSPPALEPSLLPRWGSDPRLSCSSPSRGDPSASSPMAGARKRTLAQSSEDEDEGVELLGVRPPKRSPSPEHENFLLFPLSLSFLLTGGPAPGSLQDPSTPLLNLNEPLGLGPSLLSPYSDEDTTQPGGPFQPRAGSAQAD

SEQ ID NO: 29567 - protein, 69 aa, Homo sapiens; identical to SEQ ID NO: 29562
  REGION 1..69: note = ENSP00000469031

SEQ ID NO: 29568 - protein, 594 aa, Homo sapiens
  REGION 1..594: note = ENSP00000471560
MRPAAGAARRPRCCTSWLTRCPSPAASAPTWTRPLSCASPSATCACTASAPQLELIGHSIFDFIHPCDQEELQDALTPQQTLSRRKVEAPTERCFSLRMKSTLTSRGRTLNLKAATWKVLNCSGHMRAYKPPAQTSPAGSPDSEPPLQCLVLICEAIPHPGSLEPPLGRGAFLSRHSLDMKFTYCDDRIAEVAGYSPDDLIGCSAYEYIHALDSDAVSKSIHTLLSKGQAVTGQYRFLARSGGYLWTQTQATVVSGGRGPQSESIVCVHFLISQVEETGVVLSLEQTEQHSRRPIQRGAPSQKDTPNPGDSLDTPGPRILAFLHPPSLSEAALAADPRRFCSPDLRRLLGPILDGASVAATPSTPLATRHPQSPLSADLPDELPVGTENVHRLFTSGKDTEAVETDLDIAQDADALDLEMLAPYISMDDDFQLNASEQLPRAYHRPLGAVPRPRARSFHGLSPPALEPSLLPRWGSDPRLSCSSPSRGDPSASSPMAGARKRTLAQSSEDEDEGVELLGVRPPKRSPSPEHENFLLFPLSLSFLLTGGPAPGSLQDPSTPLLNLNEPLGFHFVTQSGVQWHKHSSPQPRPPGLK

SEQ ID NO: 29569 - protein, 93 aa, Homo sapiens
  REGION 1..93: note = ENSP00000434700
  VARIANT 1: note = Any amino acid
XSEPPLQCLVLICEAIPHPGSLEPPLGRGAFLSRHSLDMKFTYCDDRNGDSGFSLLECQSWLCILSQMTSPLCATISSPILWNHNRTCLVQSF

SEQ ID NO: 29570 - protein, 81 aa, Homo sapiens
  REGION 1..81: note = ENSP00000432809
MALGLQRARSTTELRKEKSRDAARSRRSQETEVLYQLAHTLPFARGVSAHLDKASIMRLTISYLRMHRLCAAAGAHWTQHL

SEQ ID NO: 29571 - protein, 93 aa, Homo sapiens [sequence omitted]

SEQ ID NO: 29572 - protein, 93 aa, Homo sapiens [sequence omitted]

SEQ ID NO: 29573 - protein, 96 aa, Homo sapiens
  REGION 1..96: note = ENSP00000408289
MSTDTGVSLPSYEEDQGSKLIRKAKEAPFVPVGIAGFAAIVAYGLYKLKSRGNTKMSIHLIHMRVAAQGFVVGAMTVAFFFFRYGLFHVSGILGKT

SEQ ID NO: 29574 - protein, 107 aa, Homo sapiens
  REGION 1..107: note = ENSP00000398064
MEQKLVEEILQAITMSTDTGVSLPSYEEDQGSKLIRKAKEAPFVPVGIAGFAAIVAYGLYKLKSRGNTKMSIHLIHMRVAAQGFVVGAMTVGMGYSMYREFWAKPKP

SEQ ID NO: 29575 - protein, 1037 aa, Homo sapiens
  REGION 1..1037: note = ENSP00000336747
MDRMASSMKQVPNPLPKVLSRRGVGAGLEAAERESFERTQTVSINKAINTQEVAVKEKHARTCILGTHHEKGAQTFWSVVNRLPLSSNAVLCWKFCHVFHKLLRDGHPNVLKDSLRYRNELSDMSRMWGHLSEGYGQLCSIYLKLLRTKMEYHTKNPRFPGNLQMSDRQLDEAGESDVNNFFQLTVEMFDYLECELNLFQTVFNSLDMSRSVSVTAAGQCRLAPLIQVILDCSHLYDYTVKLLFKLHSCLPADTLQGHRDRFMEQFTKLKDLFYRSSNLQYFKRLIQIPQLPENPPNFLRASALSEHISPVVVIPAEASSPDSEPVLEKDDLMDMDASQQNLFDNKFDDIFGSSFSSDPFNFNSQNGVNKDEKDHLIERLYREISGLKAQLENMKTESQRVVLQLKGHVSELEADLAEQQHLRQQAADDCEFLRAELDELRRQREDTEKAQRSLSEIERKAQANEQRYSKLKEKYSELVQNHADLLRKNAEVTKQVSMARQAQVDLEREKKELEDSLERISDQGQRKTQEQLEVLESLKQELATSQRELQVLQGSLETSAQSEANWAAEFAELEKERDSLVSGAAHREEELSALRKELQDTQLKLASTEESMCQLAKDQRKMLLVGSRKAAEQVIQDALNQLEEPPLISCAGSADHLLSTVTSISSCIEQLEKSWSQYLACPEDISGLLHSITLLAHLTSDAIAHGATTCLRAPPEPADSLTEACKQYGRETLAYLASLEEEGSLENADSTAMRNCLSKIKAIGEELLPRGLDIKQEELGDLVDKEMAATSAAIETATARIEEMLSKSRAGDTGVKLEVNERILGCCTSLMQAIQVLIVASKDLQREIVESGRGTASPKEFYAKNSRWTEGLISASKAVGWGATVMVDAADLVVQGRGKFEELMVCSHEIAASTAQLVAASKVKADKDSPNLAQLQQASRGVNQATAGVVASTISGKSQIEETDNMDFSSMTLTQIKRQEMDSQVRVLELENELQKERQKLGELRKKHYELAGVAEGWEEGTEASPPTLQEVVTEKE

SEQ ID NO: 29576 - protein, 986 aa, Homo sapiens
  REGION 1..986: note = ENSP00000410300
MDRMASSMKQVPNPLPKVLSRRGVGAGLEAAERESFERTQTVSINKAINTQEVAVKEKHARTCILGTHHEKGAQTFWSVVNRLPLSSNAVLCWKFCHVFHKLLRDGHPNVLKDSLRYRNELSDMSRMWGHLSEGYGQLCSIYLKLLRTKMEYHTKNPRFPGNLQMSDRQLDEAGESDVNNFFQLTVEMFDYLECELNLFQTVFNSLDMSRSVSVTAAGQCRLAPLIQVILDCSHLYDYTVKLLFKLHSCLPADTLQGHRDRFMEQFTKLKDLFYRSSNLQYFKRLIQIPQLPENPPNFLRASALSEHISPVVVIPAEASSPDSEPVLEKDDLMDMDASQQNLFDNKFDDIFGSSFSSDPFNFNSQNGVNKDEKDHLIERLYREISGLKAQLENMKTESQRVVLQLKGHVSELEADLAEQQHLRQQAADDCEFLRAELDELRRQREDTEKAQRSLSEIERKAQANEQRYSKLKEKYSELVQNHADLLRKNAEVTKQVSMARQAQVDLEREKKELEDSLERISDQGQRKTQEQLEVLESLKQELATSQRELQVLQGSLETSAQSEANWAAEFAELEKERDSLVSGAAHREEELSALRKELQDTQLKLASTEESMCQLAKDQRKMLLVGSRKAAEQVIQDALNQLEEPPLISCAGSADHLLSTVTSISSCIEQLEKSWSQYLACPEDISGLLHSITLLAHLTSDAIAHGATTCLRAPPEPADSLTEACKQYGRETLAYLASLEEEGSLENADSTAMRNCLSKIKAIGEELLPRGLDIKQEELGDLVDKEMAATSAAIETATARIEGTASPKEFYAKNSRWTEGLISASKAVGWGATVMVDAADLVVQGRGKFEELMVCSHEIAASTAQLVAASKVKADKDSPNLAQLQQASRGVNQATAGVVASTISGKSQIEETDNMDFSSMTLTQIKRQEMDSQVRVLELENELQKERQKLGELRKKHYELAGVAEGWEEGTEASPPTLQEVVTEKE

SEQ ID NO: 29577 - protein, 146 aa, Homo sapiens
  REGION 1..146: note = ENSP00000414280
MMFPNPEPPPETVSINKAINTQEVAVKEKHARTCILGTHHEKGAQTFWSVVNRLPLSSNAVLCWKFCHVFHKLLRDGHPNVLKDSLRYRNELSDMSRMWGHLSEGYGQLCSIYLKLLRTKMEYHTKNPRFPGNLQMSDRQLDEAGE

SEQ ID NO: 29578 - protein, 1008 aa, Homo sapiens
  REGION 1..1008: note = ENSP00000484528
MMFPNPEPPPETVSINKAINTQEVAVKEKHARTCILGTHHEKGAQTFWSVVNRLPLSSNAVLCWKFCHVFHKLLRDGHPNVLKDSLRYRNELSDMSRMWGHLSEGYGQLCSIYLKLLRTKMEYHTKNPRFPGNLQMSDRQLDEAGESDVNNFFQLTVEMFDYLECELNLFQTVFNSLDMSRSVSVTAAGQCRLAPLIQVILDCSHLYDYTVKLLFKLHSCLPADTLQGHRDRFMEQFTKLKDLFYRSSNLQYFKRLIQIPQLPENPPNFLRASALSEHISPVVVIPAEASSPDSEPVLEKDDLMDMDASQQNLFDNKFDDIFGSSFSSDPFNFNSQNGVNKDEKDHLIERLYREISGLKAQLENMKTESQRVVLQLKGHVSELEADLAEQQHLRQQAADDCEFLRAELDELRRQREDTEKAQRSLSEIERKAQANEQRYSKLKEKYSELVQNHADLLRKNAEVTKQVSMARQAQVDLEREKKELEDSLERISDQGQRKTQEQLEVLESLKQELATSQRELQVLQGSLETSAQSEANWAAEFAELEKERDSLVSGAAHREEELSALRKELQDTQLKLASTEESMCQLAKDQRKMLLVGSRKAAEQVIQDALNQLEEPPLISCAGSADHLLSTVTSISSCIEQLEKSWSQYLACPEDISGLLHSITLLAHLTSDAIAHGATTCLRAPPEPADSLTEACKQYGRETLAYLASLEEEGSLENADSTAMRNCLSKIKAIGEELLPRGLDIKQEELGDLVDKEMAATSAAIETATARIEEMLSKSRAGDTGVKLEVNERILGCCTSLMQAIQVLIVASKDLQREIVESGRGTASPKEFYAKNSRWTEGLISASKAVGWGATVMVDAADLVVQGRGKFEELMVCSHEIAASTAQLVAASKVKADKDSPNLAQLQQASRGVNQATAGVVASTISGKSQIEETDNMDFSSMTLTQIKRQEMDSQVRVLELENELQKERQKLGELRKKHYELAGVAEGWEEGTEASPPTLQEVVTEKE

SEQ ID NO: 29579 - protein, 1068 aa, Homo sapiens
  REGION 1..1068: note = ENSP00000253083
MNSIKNVPARVLSRRPGHSLEAEREQFDKTQAISISKAINTQEAPVKEKHARRIILGTHHEKGAFTFWSYAIGLPLPSSSILSWKFCHVLHKVLRDGHPNVLHDCQRYRSNIREIGDLWGHLHDRYGQLVNVYTKLLLTKISFHLKHPQFPAGLEVTDEVLEKAAGTDVNNIFQLTVEMFDYMDCELKLSESVFRQLNTAIAVSQMSSGQCRLAPLIQVIQDCSHLYHYTVKLLFKLHSCLPADTLQGHRDRFHEQFHSLRNFFRRASDMLYFKRLIQIPRLPEGPPNFLRASALAEHIKPVVVIPEEAPEDEEPENLIEISTGPPAGEPVVVADLFDQTFGPPNGSVKDDRDLQIESLKREVEMLRSELEKIKLEAQRYIAQLKSQVNALEGELEEQRKQKQKALVDNEQLRHELAQLRAAQLEGERSQGLREEAERKASATEARYNKLKEKHSELVHVHAELLRKNADTAKQLTVTQQSQEEVARVKEQLAFQVEQVKRESELKLEEKSDQLEKLKRELEAKAGELARAQEALSHTEQSKSELSSRLDTLSAEKDALSGAVRQREADLLAAQSLVRETEAALSREQQRSSQEQGELQGRLAERESQEQGLRQRLLDEQFAVLRGAAAEAAGILQDAVSKLDDPLHLRCTSSPDYLVSRAQEALDAVSTLEEGHAQYLTSLADASALVAALTRFSHLAADTIINGGATSHLAPTDPADRLIDTCRECGARALELMGQLQDQQALRHMQASLVRTPLQGILQLGQELKPKSLDVRQEELGAVVDKEMAATSAAIEDAVRRIEDMMNQARHASSGVKLEVNERILNSCTDLMKAIRLLVTTSTSLQKEIVESGRGAATQQEFYAKNSRWTEGLISASKAVGWGATQLVEAADKVVLHTGKYEELIVCSHEIAASTAQLVAASKVKANKHSPHLSRLQECSRTVNERAANVVASTKSGQEQIEDRDTMDFSGLSLIKLKKQEMETQVRVLELEKTLEAERMRLGELRKQHYVLAGASGSPGEEVAIRPSTAPRSVTTKKPPLAQKPSVAPRQDHQLDKKDGIYPAQLVNY

SEQ ID NO: 29580 - protein, 197 aa, Homo sapiens
  REGION 1..197: note = ENSP00000446236
  VARIANT 1: note = Any amino acid
XRHPLACRRRSWRAAGEAADKVVLHTGKYEELIVCSHEIAASTAQLVAASKVKANKHSPHLSRLQECSRTVNERAANVVASTKSGQEQIEDRDTMDFSGLSLIKLKKQEMETQVRVLELEKTLEAERMRLGELRKQHYVLAGASGSPGEEVAIRPSTAPRSVTTKKPPLAQKPSVAPRQDHQLDKKDGIYPAQLVNY

SEQ ID NO: 29581 - protein, 616 aa, Homo sapiens
  REGION 1..616: note = ENSP00000291823
MSTIQSETDCYDIIEVLGKGTFGEVAKGWRRSTGEMVAIKILKNDAYRNRIIKNELKLLHCMRGLDPEEAHVIRFLEFFHDALKFYLVFELLEQNLFEFQKENNFAPLPARHIRTVTLQVLTALARLKELAIIHADLKPENIMLVDQTRCPFRVKVIDFGSASIFSEVRYVKEPYIQSRFYRAPEILLGLPFCEKVDVWSLGCVMAELHLGWPLYPGNNEYDQVRYICETQGLPKPHLLHAACKAHHFFKRNPHPDAANPWQLKSSADYLAETKVRPLERRKYMLKSLDQIETVNGGSVASRLTFPDREALAEHADLKSMVELIKRMLTWESHERISPSAALRHPFVSMQQLRSAHETTHYYQLSLRSYRLSLQVEGKPPTPVVAAEDGTPYYCLAEEKEAAGMGSVAGSSPFFREEKAPGMQRAIDQLDDLSLQEAGHGLWGETCTNAVSDMMVPLKAAITGHHVPDSGPEPILAFYSSRLAGRHKARKPPAGSKSDSNFSNLIRLSQVSPEDDRPCRGSSWEEGEHLGASAEPLAILQRDEDGPNIDNMTMEAERPDPELFDPSSCPGEWLSEPDCTLESVRGPRAQGLPPRRSHQHGPPRGATSFLQHVTGHH

SEQ ID NO: 29582 - protein, 126 aa, Homo sapiens
  REGION 1..126: note = ENSP00000367008
MPEPTKSAPAPKKGSKKAVTKAQKKDGKKRKRSRKESYSVYVYKVLKQVHPDTGISSKAMGIMNSFVNDIFERIAGEASRLAHYNKRSTITSREIQTAVRLLLPGELAKHAVSEGTKAVTKYTSSK

SEQ ID NO: 29583 - protein, 126 aa, Homo sapiens; identical to SEQ ID NO: 29582
  REGION 1..126: note = ENSP00000289316

SEQ ID NO: 29584 - protein, 126 aa, Homo sapiens
  REGION 1..126: note = ENSP00000358151
MPEPAKSAPAPKKGSKKAVTKAQKKDGKKRKRSRKESYSIYVYKVLKQVHPDTGISSKAMGIMNSFVNDIFERIAGEASRLAHYNKRSTITSREIQTAVRLLLPGELAKHAVSEGTKAVTKYTSSK

SEQ ID NO: 29585 - protein, 126 aa, Homo sapiens
  REGION 1..126: note = ENSP00000358164
MPDPAKSAPAPKKGSKKAVTKVQKKDGKKRKRSRKESYSVYVYKVLKQVHPDTGISSKAMGIMNSFVNDIFERIAGEASRLAHYNKRSTITSREIQTAVRLLLPGELAKHAVSEGTKAVTKYTSSK

SEQ ID NO: 29586 - protein, 134 aa, Homo sapiens
  REGION 1..134: note = ENSP00000445831
MPDPAKSAPAPKKGSKKAVTKVQKKDGKKRKRSRKESYSVYVYKVLKQVHPDTGISSKAMGIMNSFVNDIFERIAGEASRLAHYNKRSTITSREIQTAVRLLLPGELAKHAVSEGTKAVTKYTSSKLIGPILWK

SEQ ID NO: 29587 - protein, 917 aa, Homo sapiens
  REGION 1..917: note = ENSP00000290573
MIASHLLAYFFTELNHDQVQKVDQYLYHMRLSDETLLEISKRFRKEMEKGLGATTHPTAAVKMLPTFVRSTPDGTEHGEFLALDLGGTNFRVLWVKVTDNGLQKVEMENQIYAIPEDIMRGSGTQLFDHIAECLANFMDKLQIKDKKLPLGFTFSFPCHQTKLDESFLVSWTKGFKSSGVEGRDVVALIRKAIQRRGDFDIDIVAVVNDTVGTMMTCGYDDHNCEIGLIVGTGSNACYMEEMRHIDMVEGDEGRMCINMEWGAFGDDGSLNDIRTEFDQEIDMGSLNPGKQLFEKMISGMYMGELVRLILVKMAKEELLFGGKLSPELLNTGRFETKDISDIEGEKDGIRKAREVLMRLGLDPTQEDCVATHRICQIVSTRSASLCAATLAAVLQRIKENKGEERLRSTIGVDGSVYKKHPHFAKRLHKTVRRLVPGCDVRFLRSEDGSGKGAAMVTAVAYRLADQHRARQKTLEHLQLSHDQLLEVKRRMKVEMERGLSKETHASAPVKMLPTYVCATPDGTEKGDFLALDLGGTNFRVLLVRVRNGKWGGVEMHNKIYAIPQEVMHGTGDELFDHIVQCIADFLEYMGMKGVSLPLGFTFSFPCQQNSLDESILLKWTKGFKASGCEGEDVVTLLKEAIHRREEFDLDVVAVVNDTVGTMMTCGFEDPHCEVGLIVGTGSNACYMEEMRNVELVEGEEGRMCVNMEWGAFGDNGCLDDFRTEFDVAVDELSLNPGKQRFEKMISGMYLGEIVRNILIDFTKRGLLFRGRISERLKTRGIFETKFLSQIESDCLALLQVRAILQHLGLESTCDDSIIVKEVCTVVARRAAQLCGAGMAAVVDRIRENRGLDALKVTVGVDGTLYKLHPHFAKVMHETVKDLAPKCDVSFLQSEDGSGKGAALITAVACRIREAGQR

SEQ ID NO: 29588 - protein, 889 aa, Homo sapiens
  REGION 1..889: note = ENSP00000387140
MRLSDETLLEISKRFRKEMEKGLGATTHPTAAVKMLPTFVRSTPDGTEHGEFLALDLGGTNFRVLWVKVTDNGLQKVEMENQIYAIPEDIMRGSGTQLFDHIAECLANFMDKLQIKDKKLPLGFTFSFPCHQTKLDESFLVSWTKGFKSSGVEGRDVVALIRKAIQRRGDFDIDIVAVVNDTVGTMMTCGYDDHNCEIGLIVGTGSNACYMEEMRHIDMVEGDEGRMCINMEWGAFGDDGSLNDIRTEFDQEIDMGSLNPGKQLFEKMISGMYMGELVRLILVKMAKEELLFGGKLSPELLNTGRFETKDISDIEGEKDGIRKAREVLMRLGLDPTQEDCVATHRICQIVSTRSASLCAATLAAVLQRIKENKGEERLRSTIGVDGSVYKKHPHFAKRLHKTVRRLVPGCDVRFLRSEDGSGKGAAMVTAVAYRLADQHRARQKTLEHLQLSHDQLLEVKRRMKVEMERGLSKETHASAPVKMLPTYVCATPDGTEKGDFLALDLGGTNFRVLLVRVRNGKWGGVEMHNKIYAIPQEVMHGTGDELFDHIVQCIADFLEYMGMKGVSLPLGFTFSFPCQQNSLDESILLKWTKGFKASGCEGEDVVTLLKEAIHRREEFDLDVVAVVNDTVGTMMTCGFEDPHCEVGLIVGTGSNACYMEEMRNVELVEGEEGRMCVNMEWGAFGDNGCLDDFRTEFDVAVDELSLNPGKQRFEKMISGMYLGEIVRNILIDFTKRGLLFRGRISERLKTRGIFETKFLSQIESDCLALLQVRAILQHLGLESTCDDSIIVKEVCTVVARRAAQLCGAGMAAVVDRIRENRGLDALKVTVGVDGTLYKLHPHFAKVMHETVKDLAPKCDVSFLQSEDGSGKGAALITAVACRIREAGQR

SEQ ID NO: 29589 - protein, 282 aa, Homo sapiens
  REGION 1..282: note = ENSP00000423132
MCGRTSCHLPRDVLTRACAYQDRRGQQRLPEWRDPDKYCPSYNKSPQSNSPVLLSRLHFEKVPLGKGRRCVVLADGFYEWQRCQGTNQRQPYFIYFPQIKTEKSGSIGAADSPENWEKVWDNWRLLTMAGIFDCWEPPEGGDVLYSYTIITVDSCKGLSDIHHRMPAILDGEEAVSKWLDFGEVSTQEALKLIHPTENITFHAVSSVVNNSRNNTPECLAPVDLVVKKELRASGSSQRMLQWLATKSPKKEDSKTPQKEESDVPQWSSQFLQKSPLPTKRGT

SEQ ID NO: 29590 - protein, 354 aa, Homo sapiens
  REGION 1..354: note = ENSP00000372955
MCGRTSCHLPRDVLTRACAYQDRRGQQRLPEWRDPDKYCPSYNKSPQSNSPVLLSRLHFEKDADSSERIIAPMRWGLVPSWFKESDPSKLQFNTTNCRSDTVMEKRSFKVPLGKGRRCVVLADGFYEWQRCQGTNQRQPYFIYFPQIKTEKSGSIGAADSPENWEKVWDNWRLLTMAGIFDCWEPPEGGDVLYSYTIITVDSCKGLSDIHHRMPAILDGEEAVSKWLDFGEVSTQEALKLIHPTENITFHAVSSVVNNSRNNTPECLAPVDLVVKKELRASGSSQRMLQWLATKSPKKEDSKTPQKEESDVPQWSSQFLQKSPLPTKRGTAGLLEQWLKREKEEEPVAKRPYSQ

SEQ ID NO: 29591 - protein, 312 aa, Homo sapiens
  REGION 1..312: note = ENSP00000392966
MCGRTSCHLPRDVLTRACAYQDRRGQQRLPEWRDPDKYCPSYNKSPQSNSPVLLSRLHFEKDADSSERIIAPMRWGLVPSWFKESDPSKLQFNTTNCRSDTVMEKRSFKSGSIGAADSPENWEKVWDNWRLLTMAGIFDCWEPPEGGDVLYSYTIITVDSCKGLSDIHHRMPAILDGEEAVSKWLDFGEVSTQEALKLIHPTENITFHAVSSVVNNSRNNTPECLAPVDLVVKKELRASGSSQRMLQWLATKSPKKEDSKTPQKEESDVPQWSSQFLQKSPLPTKRGTAGLLEQWLKREKEEEPVAKRPYSQ

SEQ ID NO: 29592 - protein, 183 aa, Homo sapiens
  REGION 1..183: note = ENSP00000426276
MCGRTSCHLPRDVLTRACAYQDRRGQQRLPEWRDPDKYCPSYNKSPQSNSPVLLSRLHFEKSGSIGAADSPENWEKVWDNWRLLTMAGIFDCWEPPEGGDVLYSYTIITVDSCKGLSDIHHRMPAILDGEEAVSKWLDFGEVSTQEALKLIHPTENITFHAVSSVVNNSRNNTPECLAPVDLV

SEQ ID NO: 29593 - protein, 354 aa, Homo sapiens; identical to SEQ ID NO: 29590
  REGION 1..354: note = ENSP00000426215

SEQ ID NO: 29594 - protein, 354 aa, Homo sapiens; identical to SEQ ID NO: 29590
  REGION 1..354: note = ENSP00000374385

SEQ ID NO: 29595 - protein, 233 aa, Homo sapiens
  REGION 1..233: note = ENSP00000424594
MCGRTSCHLPRDVLTRACAYQDRRGQQRLPEWRDPDKYCPSYNKSPQSNSPVLLSRLHFEKDADSSERIIAPMRWGLVPSWFKESDPSKLQFNTTNCRSDTVMEKRSFKVPLGKGRRCVVLADGFYEWQRCQGTNQRQPYFIYFPQIKTEKSGSIGAADSPENWEKVWDNWRLLTMAGIFDCWEPPEGGDVLYSYTIITVDSCKGLSDIHHRMPAILDGEEAVSKWLDFGEVS

SEQ ID NO: 29596 - protein, 140 aa, Homo sapiens
  REGION 1..140: note = ENSP00000421895
MCGRTSCHLPRDVLTRACAYQDRRGQQRLPEWRDPDKYCPSYNKSPQSNSPVLLSRLHFEKSGSIGAADSPENWEKVWDNWRLLTMAGIFDCWEPPEGGDVLYSYTIITVDSCKGLSDIHHRMPAILDGEEAVSKWLDFG

SEQ ID NO: 29597 - protein, 340 aa, Homo sapiens
  REGION 1..340: note = ENSP00000274901
MGNVPSAVKHCLSYQQLLREHLWIGDSVAGALDPAQETSQLSGLPEFVKIVEVGPRDGLQNEKVIVPTDIKIEFINRLSQTGLSVIEVTSFVSSRWVPQMADHTEVMKGIHQYPGVRYPVLTPNLQGFHHAVAAGATEISVFGAASESFSKKNINCSIEESMGKFEEVVKSARHMNIPARGYVSCALGCPYEGSITPQKVTEVSKRLYGMGCYEISLGDTIGVGTPGSMKRMLESVMKEIPPGALAVHCHDTYGQALANILTALQMGINVVDSAVSGLGGCPYAKGASGNVATEDLIYMLNGLGLNTGVNLYKVMEAGDFICKAVNKTTNSKVAQASFNA

SEQ ID NO: 29598 - protein, 370 aa, Homo sapiens
  REGION 1..370: note = ENSP00000381654
MGNVPSAVKHCLSYQQLLREHLWIGDSVAGALDPAQTSLLTNLHCFQPDVSGFSVSLAGTVACIHWETSQLSGLPEFVKIVEVGPRDGLQNEKVIVPTDIKIEFINRLSQTGLSVIEVTSFVSSRWVPQMADHTEVMKGIHQYPGVRYPVLTPNLQGFHHAVAAGATEISVFGAASESFSKKNINCSIEESMGKFEEVVKSARHMNIPARGYVSCALGCPYEGSITPQKVTEVSKRLYGMGCYEISLGDTIGVGTPGSMKRMLESVMKEIPPGALAVHCHDTYGQALANILTALQMGINVVDSAVSGLGGCPYAKGASGNVATEDLIYMLNGLGLNTGVNLYKVMEAGDFICKAVNKTTNSKVAQASFNA

SEQ ID NO: 29599 - protein, 53 aa, Homo sapiens
  REGION 1..53: note = ENSP00000359889
MGNVPSAVKHCLSYQQLLREHLWIGDSVAGALDPAQELQSVMLMLHHGPLRKP

SEQ ID NO: 29600 - protein, 237 aa, Homo sapiens
  REGION 1..237: note = ENSP00000359887
MGNVPSAVKHCLSYQQLLREHLWIGDSVAGALDPAQETSQLSGLPEFVKIVEVGPRDGLQNEKVIVPTDIKIEFINRLSQTGLSVIEVTSFVSSRWVPQVSKRLYGMGCYEISLGDTIGVGTPGSMKRMLESVMKEIPPGALAVHCHDTYGQALANILTALQMGINVVDSAVSGLGGCPYAKGASGNVATEDLIYMLNGLGLNTGVNLYKVMEAGDFICKAVNKTTNSKVAQASFNA

SEQ ID NO: 29601 - protein, 174 aa, Homo sapiens
  REGION 1..174: note = ENSP00000424309
MGNVPSAVKHCLSYQQLLREHLWIGDSVAGALDPAQETSQLSGLPEFVKIVEVGPRDGLQNEKVIVPTDIKIEFINRLSQTGLSVIEVTSFVSSRWVPQMGINVVDSAVSGLGGCPYAKGASGNVATEDLIYMLNGLGLNTGVNLYKVMEAGDFICKAVNKTTNSKVAQASFNA

SEQ ID NO: 29602 - protein, 308 aa, Homo sapiens
  REGION 1..308: note = ENSP00000309737
MGNVPSAVKHCLSYQQLLREHLWIGDSVAGALDPAQETSQLSGLPEFVKIVEVGPRDGLQNEKVIVPTDIKIEFINRLSQTGLSVIEVTSFVSSRWVPQVAAGATEISVFGAASESFSKKNINCSIEESMGKFEEVVKSARHMNIPARGYVSCALGCPYEGSITPQKVTEVSKRLYGMGCYEISLGDTIGVGTPGSMKRMLESVMKEIPPGALAVHCHDTYGQALANILTALQMGINVVDSAVSGLGGCPYAKGASGNVATEDLIYMLNGLGLNTGVNLYKVMEAGDFICKAVNKTTNSKVAQASFNA

SEQ ID NO: 29603 - protein, 151 aa, Homo sapiens
  REGION 1..151: note = ENSP00000412924
MGNVPSAVKHCLSYQQLLREHLWIGDSVAGALDPAQETSQLSGLPEFVKIVEVGPRDGLQNEKVIVPTDIKIEFINRLSQTGLSVIEVTSFVSSRWVPQVAAGATEISVFGAASESFSKKNINCSIEESMGKFEEVVKSARHMNIPARGYL

SEQ ID NO: 29604 - protein, 39 aa, Homo sapiens
  REGION 1..39: note = ENSP00000426054
MGNVPSAVKHCLSYQQLLREHLWIGDSVAGALDPAQEKE

SEQ ID NO: 29605 - protein, 888 aa, Homo sapiens [sequence omitted]

SEQ ID NO: 29606 - protein, 888 aa, Homo sapiens [sequence omitted]

SEQ ID NO: 29607 - protein, 835 aa, Homo sapiens
  REGION 1..835: note = ENSP00000340816
MLSRLFRMHGLFVASHPWEVIVGTVTLTICMMSMNMFTGNNKICGWNYECPKFEEDVLSSDIIILTITRCIAILYIYFQFQNLRQLGSKYILGIAGLFTIFSSFVFSTVVIHFLDKELTGLNEALPFFLLLIDLSRASTLAKFALSSNSQDEVRENIARGMAILGPTFTLDALVECLVIGVGTMSGVRQLEIMCCFGCMSVLANYFVFMTFFPACVSLVLELSRESREGRPIWQLSHFARVLEEEENKPNPVTQRVKMIMSLGLVLVHAHSRWIADPSPQNSTADTSKVSLGLDENVSKRIEPSVSLWQFYLSKMISMDIEQVITLSLALLLAVKYIFFEQTETESTLSLKNPITSPVVTQKKVPDNCCRREPMLVRNNQKCDSVEEETGINRERKVEVIKPLVAETDTPNRATFVVGNSSLLDTSSVLVTQEPEIELPREPRPNEECLQILGNAEKGAKFLSDAEIIQLVNAKHIPAYKLETLMETHERGVSIRRQLLSKKLSEPSSLQYLPYRDYNYSLLGGGASSRVLADGMTRGPVVRLPRACDSAEVKAWLETSEGFAVIKEAFDSTSRFARLQKLHTSIAGRNLYIRFQSRSGDAMGMNMISKGTEKALSKLHEYFPEMQILAVSGNYCTDKKPAAINWIEGRGKSVVCEAVIPAKVVREVLKTTTEAMIEVNINKNLVGSAMAGSIGGYNAHAANIVTAIYIACGQDAAQNVGSSNCITLMEASGPTNEDLYISCTMPSIEIGTVGGGTNLLPQQACLQMLGVQGACKDNPGENARQLARIVCGTVMAGELSLMAALAAGHLVKSHMIHNRSKINLQDLQGACTKKTA

SEQ ID NO: 29608 - protein, 111 aa, Homo sapiens
  REGION 1..111: note = ENSP00000427340
MLSRLFRMHGLFVASHPWEVIVGTVTLTICMMSMNMFTGNNKICGWNYECPKFEEDVLSSDIIILTITRCIAILYIYFQFQNLRQLGSKYILGIAGLFTIFSSFVFSTVVI

SEQ ID NO: 29609 - protein, 18 aa, Homo sapiens
  REGION 1..18: note = ENSP00000409100
MLSRLFRMHGLFVASHPW

SEQ ID NO: 29610 - protein, 165 aa, Homo sapiens
  REGION 1..165: note = ENSP00000421378
  VARIANT 1: note = Any amino acid
XHEYFPEMQILAVSGNYCTDKKPAAINWIEGRGKSVVCEAVIPAKVVREVLKTTTEAMIEVNINKNLVGSAMAGSIGGYNAHAANIVTAIYIACGQMLGVQGACKDNPGENARQLARIVCGTVMAGELSLMAALAAGHLVKSHMIHNRSKINLQDLQGACTKKTA

SEQ ID NO: 29611 - protein, 115 aa, Homo sapiens
  REGION 1..115: note = ENSP00000420871
YFPEMQILAVSGNYCTDKKPAAINWIEGRGKSVVCEAVIPAKVVREMLGVQGACKDNPGENARQLARIVCGTVMAGELSLMAALAAGHLVKSHMIHNRSKINLQDLQGACTKKTA

SEQ ID NO: 29612 - protein, 520 aa, Homo sapiens
  REGION 1..520: note = ENSP00000322706
MPGSLPLNAEACWPKDVGIVALEIYFPSQYVDQAELEKYDGVDAGKYTIGLGQAKMGFCTDREDINSLCMTVVQNLMERNNLSYDCIGRLEVGTETIIDKSKSVKTNLMQLFEESGNTDIEGIDTTNACYGGTAAVFNAVNWIESSSWDGRYALVVAGDIAVYATGNARPTGGVGAVALLIGPNAPLIFERGLRGTHMQHAYDFYKPDMLSEYPIVDGKLSIQCYLSALDRCYSVYCKKIHAQWQKEGNDKDFTLNDFGFMIFHSPYCKLVQKSLARMLLNDFLNDQNRDKNSIYSGLEAFGDVKLEDTYFDRDVEKAFMKASSELFSQKTKASLLVSNQNGNMYTSSVYGSLASVLAQYSPQQLAGKRIGVFSYGSGLAATLYSLKVTQDATPGSALDKITASLCDLKSRLDSRTGVAPDVFAENMKLREDTHHLVNYIPQGSIDSLFEGTWYLVRVDEKHRRTYARRPTPNDDTLDEGVGLVHSNIATEHIPSPAKKVPRLPATAAEPEAAVISNGEH

SEQ ID NO: 29613 - protein, 520 aa, Homo sapiens; identical to SEQ ID NO: 29612
  REGION 1..520: note = ENSP00000399402

SEQ ID NO: 29614 - protein, 95 aa, Homo sapiens
  REGION 1..95: note = ENSP00000427339
MPGSLPLNAEACWPKDVGIVALEIYFPSQYVDQAELEKYDGVDAGKYTIGLGQAKMGFCTDREDINSLCMTVVQNLMERNNLSYDCIGRLEVGTE

SEQ ID NO: 29615 - protein, 48 aa, Homo sapiens
  REGION 1..48: note = ENSP00000288344
MPKRKVSSAEGAAKEEPKRRSARLSAKPPAKVEAKPKKAAAKILQTPK

SEQ ID NO: 29616 - protein, 45 aa, Homo sapiens
  REGION 1..45: note = ENSP00000395291
MPKRKVSSAEGAAKEEPKRRSARLSAKPPAKVEAKPKKAAAKVEV

SEQ ID NO: 29617 - protein, 100 aa, Homo sapiens
  REGION 1..100: note = ENSP00000370125
MPKRKVSSAEGAAKEEPKRRSARLSAKPPAKVEAKPKKAAAKDKSSDKKVQTKGKRGAKGKQAEVANQETKEDLPAENGETKTEESPASDEAGEKEAKSD

SEQ ID NO: 29618 - protein, 44 aa, Homo sapiens
  REGION 1..44: note = ENSP00000414421
MPKRKVSSAEGAAKEEPKRRSARLSAKPPAKVEAKPKKAAAKCR

SEQ ID NO: 29619 - protein, 90 aa, Homo sapiens
  REGION 1..90: note = ENSP00000370124
MPKRKVSSAEGAAKEEKPPAKVEAKPKKAAAKDKSSDKKVQTKGKRGAKGKQAEVANQETKEDLPAENGETKTEESPASDEAGEKEAKSD

SEQ ID NO: 29620 - protein, 45 aa, Homo sapiens; identical to SEQ ID NO: 29616
  REGION 1..45: note = ENSP00000396693

SEQ ID NO: 29621 - protein, 116 aa, Homo sapiens
  REGION 1..116: note = ENSP00000370123
MFEPNSPRRGGARYQWPEGAQVSSAEGAAKEEPKRRSARLSAKPPAKVEAKPKKAAAKDKSSDKKVQTKGKRGAKGKQAEVANQETKEDLPAENGETKTEESPASDEAGEKEAKSD

SEQ ID NO: 29622 - protein, 44 aa, Homo sapiens; identical to SEQ ID NO: 29618
  REGION 1..44: note = ENSP00000395787

SEQ ID NO: 29623 - protein, 354 aa, Homo sapiens
  REGION 1..354: note = ENSP00000334382
MGEQPIFSTRAHVFQIDPNTKKNWVPTSKHAVTVSYFYDSTRNVYRIISLDGSKAIINSTITPNMTFTKTSQKFGQWADSRANTVYGLGFSSEHHLSKFAEKFQEFKEAARLAKEKSQEKMELTSTPSQESAGGDLQSPLTPESINGTDDERTPDVTQNSEPRAEPTQNALPFSHSSAISKHWEAELATLKGNNAKLTAALLESTANVKQWKQQLAAYQEEAERLHKRVTELECVSSQANAVHTHKTELNQTIQELEETLKLKEEEIERLKQEIDNARELQEQRDSLTQKLQEVEIRNKDLEGQLSDLEQRLEKSQNEQEAFRNNLKTLLEILDGKIFELTELRDNLAKLLECS

SEQ ID NO: 29624 - protein, 224 aa, Homo sapiens
  REGION 1..224: note = ENSP00000282260
MGEQPIFSTRAHVFQIDPNTKKNWVPTSKHAVTVSYFYDSTRNVYRIISLDGSKAIINSTITPNMTFTKTSQKFGQWADSRANTVYGLGFSSEHHLSKVTELECVSSQANAVHTHKTELNQTIQELEETLKLKEEEIERLKQEIDNARELQEQRDSLTQKLQEVEIRNKDLEGQLSDLEQRLEKSQNEQEAFRNNLKTLLEILDGKIFELTELRDNLAKLLECS

SEQ ID NO: 29625 - protein, 177 aa, Homo sapiens
  REGION 1..177: note = ENSP00000426651
MGEQPIFSTRAHVFQIDPNTKKNWVPTSKHAVTVSYFYDSTRNVYRIISLDGSKAIINSTITPNMTFTKTSQKFGQWADSRANTVYGLGFSSEHHLSKFAEKFQEFKEAARLAKEKSQEKMELTSTPSQESAGGDLQSPLTPESINGTDDERTPDVTQNSEPRAEPTQNALPFSHRK

SEQ ID NO: 29626 - protein, 180 aa, Homo sapiens
  REGION 1..180: note = ENSP00000441587
MGSAISKHWEAELATLKGNNAKLTAALLESTANVKQWKQQLAAYQEEAERLHKRVTELECVSSQANAVHTHKTELNQTIQELEETLKLKEEEIERLKQEIDNARELQEQRDSLTQKLQEVEIRNKDLEGQLSDLEQRLEKSQNEQEAFRNNLKTLLEILDGKIFELTELRDNLAKLLECS

SEQ ID NO: 29627 - protein, 358 aa, Homo sapiens
  REGION 1..358: note = ENSP00000221222
MSTAREQPIFSTRAHVFQIDPATKRNWIPAGKHALTVSYFYDATRNVYRIISIGGAKAIINSTVTPNMTFTKTSQKFGQWADSRANTVYGLGFASEQHLTQFAEKFQEVKEAARLAREKSQDGGELTSPALGLASHQVPPSPLVSANGPGEEKLFRSQSADAPGPTERERLKKMLSEGSVGEVQWEAEFFALQDSNNKLAGALREANAAAAQWRQQLEAQRAEAERLRQRVAELEAQAASEVTPTGEKEGLGQGQSLEQLEALVQTKDQEIQTLKSQTGGPREALEAAEREETQQKVQTRNAELEHQLRAMERSLEEARAERERARAEVGRAAQLLDVSLFELSELREGLARLAEAAP

SEQ ID NO: 29628 - protein, 361 aa, Homo sapiens
  REGION 1..361: note = ENSP00000439937
MSTAREQPIFSTRAHVFQIDPATKRNWIPAGKHALTVSYFYDATRNVYRIISIGGAKAIINSTVTPNMTFTKTSQKFGQWADSRANTVYGLGFASEQHLTQFAEKFQEVKEAARLAREKSQDGGELTSPALGLASHQVPPSPLVSANGPGEEKLFRSQSADAPGPTERERLKKMLSEGSVGEVQWEAEFFALQDSNNKLAGALREANAAAAQWRQQLEAQRAEAERLRQRVAELEAQAASEVTPTGEKEGLGQGQSLEQLEALVQTKDQEIQTLKSQTGGPREALEAAEREETQQKVQDLETRNAELEHQLRAMERSLEEARAERERARAEVGRAAQLLDVSLFELSELREGLARLAEAAP

SEQ ID NO: 29629 - protein, 361 aa, Homo sapiens; identical to SEQ ID NO: 29628
  REGION 1..361: note = ENSP00000376162

SEQ ID NO: 29630 - protein, 152 aa, Homo sapiens
  REGION 1..152: note = ENSP00000469800
MSTARQQLEAQRAEAERLRQRVAELEAQAASEVTPTGEKEGLGQGQSLEQLEALVQTKDQEIQTLKSQTGGPREALEAAEREETQQKVQDLETRNAELEHQLRAMERSLEEARAERERARAEVGRAAQLLDVSLFELSELREGLARLAEAAP

SEQ ID NO: 29631 - protein, 325 aa, Homo sapiens
  REGION 1..325: note = ENSP00000471835
MSTAREQPIFSTRAHVFQIDPATKRNWIPAGKHALTVSYFYDATRNVYRIISIGGAKAIINSTVTPNMTFTKTSQKFGQWADSRANTVYGLGFASEQHLTQVPPSPLVSANGPGEEKLFRSQSADAPGPTERERLKKMLSEGSVGEVQWEAEFFALQDSNNKLAGALREANAAAAQWRQQLEAQRAEAERLRQRVAELEAQAASEVTPTGEKEGLGQGQSLEQLEALVQTKDQEIQTLKSQTGGPREALEAAEREETQQKVQDLETRNAELEHQLRAMERSLEEARAERERARAEVGRAAQLLDVSLFELSELREGLARLAEAAP

SEQ ID NO: 29632 - protein, 361 aa, Homo sapiens; identical to SEQ ID NO: 29628
  REGION 1..361: note = ENSP00000446026

SEQ ID NO: 29633 - protein, 243 aa, Homo sapiens
  REGION 1..243: note = ENSP00000472815
MSTAREQPIFSTRAHVFQIDPATKRNWIPAGKHALTVSYFYDATRNVYRIISIGGAKAIINSTVTPNMTFTKTSQKFGQWADSRANTVYGLGFASEQHLTQFAEKFQEVKEAARLAREKSQDGGELTSPALGLASHQVPPSPLVSANGPGEEKLFRSQSADAPGPTERERLKKMLSEGSVGEVQWEAEFFALQDSNNKLAGALREANAAAAQWRQQLEAQRAEAERLRQRVAELEAQAASEVT

SEQ ID NO: 29634 - protein, 150 aa, Homo sapiens
  REGION 1..150: note = ENSP00000470659
MSTAREQPIFSTRAHVFQIDPATKRNWIPAGKHALTVSYFYDATRNVYRIISIGGAKAIINSTVTPNMTFTKTSQKFGQWADSRANTVYGLGFASEQHLTQFAEKFQEVKEAARLAREKSQDGGELTSPALGLASHQVPPSPLVSANGPG

SEQ ID NO: 29635 - protein, 85 aa, Homo sapiens
  REGION 1..85: note = ENSP00000472800
MSTAREQPIFSTRAHVFQIDPATKRNWIPAGKHALTVSYFYDATRNVYRIISIGGAKAIINSTVTPNMTFTKTSQKFGQWADSRA

SEQ ID NO: 29636 - protein, 358 aa, Homo sapiens; identical to SEQ ID NO: 29627
  REGION 1..358: note = ENSP00000396154

SEQ ID NO: 29637 - protein, 328 aa, Homo sapiens
  REGION 1..328: note = ENSP00000328598
MSSYLEYVSCSSSGGVGGDVLSLAPKFCRSDARPVALQPAFPLGNGDGAFVSCLPLAAARPSPSPPAAPARPSVPPPAAPQYAQCTLEGAYEPGAAPAAAAGGADYGFLGSGPAYDFPGVLGRAADDGGSHVHYATSAVFSGGGSFLLSGQVDYAAFGEPGPFPACLKASADGHPGAFQTASPAPGTYPKSVSPASGLPAAFSTFEWMKVKRNASKKGKLAEYGAASPSSAIRTNFSTKQLTELEKEFHFNKYLTRARRIEIANCLHLNDTQVKIWFQNRRMKQKKREREGLLATAIPVAPLQLPLSGTTPTKFIKNPGSPSQSQEPS

SEQ ID NO: 29638 - protein, 30 aa, Homo sapiens
  REGION 1..30: note = ENSP00000413689
MGKQNSKLRPEVLQDLRENTEFTDHELQEW

SEQ ID NO: 29639 - protein, 193 aa, Homo sapiens
  REGION 1..193: note = ENSP00000310749
MGKQNSKLRPEVLQDLRENTEFTDHELQEWYKGFLKDCPTGHLTVDEFKKIYANFFPYGDASKFAEHVFRTFDTNGDGTIDFREFIIALSVTSRGKLEQKLKWAFSMYDLDGNGYISRSEMLEIVQAIYKMVSSVMKMPEDESTPEKRTDKIFRQMDTNNDGKLSLEEFIRGAKSDPSIVRLLQCDPSSASQF

SEQ ID NO: 29640 - protein, 193 aa, Homo sapiens; identical to SEQ ID NO: 29639
  REGION 1..193: note = ENSP00000371184

SEQ ID NO: 29641 - protein, 175 aa, Homo sapiens
  REGION 1..175: note = ENSP00000416359
MGKQNSKLRPEVLQDLRENTEFTDHELQEWYKGFLKDCPTGHLTVDEFKKIYANFFPYGDASKFAEHVFRTFDTNGDGTIDFREFIIALSVTSRGKLEQKLKWAFSMYDLDGNGYISRSEMLEIVQAIYKMVSSVMKMPEDESTPEKRTDKIFRQMDTNNDGSAGWGRGCMCTPR

SEQ ID NO: 29642 - protein, 103 aa, Homo sapiens
  REGION 1..103: note = ENSP00000388856
  VARIANT 1: note = Any amino acid
XLSVTSRGKLEQKLKWAFSMYDLDGNGYISRSEMLEIVQAIYKMVSSVMKMPEDESTPEKRTDKIFRQMDTNNDVSLGKPPMVTRCPNLPPGLALPTSSEGIF

SEQ ID NO: 29643 - protein, 193 aa, Homo sapiens; identical to SEQ ID NO: 29639
  REGION 1..193: note = ENSP00000482993

SEQ ID NO: 29644 - protein, 193 aa, Homo sapiens; identical to SEQ ID NO: 29639
  REGION 1..193: note = ENSP00000483786

SEQ ID NO: 29645 - protein, 193 aa, Homo sapiens; identical to SEQ ID NO: 29639
  REGION 1..193: note = ENSP00000478231

SEQ ID NO: 29646 - protein, 191 aa, Homo sapiens
  REGION 1..191: note = ENSP00000361935
MGKTNSKLAPEVLEDLVQNTEFSEQELKQWYKGFLKDCPSGILNLEEFQQLYIKFFPYGDASKFAQHAFRTFDKNGDGTIDFREFICALSVTSRGSFEQKLNWAFEMYDLDGDGRITRLEMLEIIEAIYKMVGTVIMMRMNQDGLTPQQRVDKIFKKMDQDKDDQITLEEFKEAAKSDPSIVLLLQCDMQK

SEQ ID NO: 29647 - protein, 119 aa, Homo sapiens
  REGION 1..119: note = ENSP00000484070
MGKTNSKLAPEVLEDLVQNTEFSEQELKQWYKGFLKDCPSGILNLEEFQQLYIKAIYKMVGTVIMMRMNQDGLTPQQRVDKIFKKMDQDKDDQITLEEFKEAAKSDPSIVLLLQCDMQK

SEQ ID NO: 29648 - protein, 191 aa, Homo sapiens; identical to SEQ ID NO: 29646
  REGION 1..191: note = ENSP00000481834

SEQ ID NO: 29649 - protein, 417 aa, Homo sapiens
  REGION 1..417: note = ENSP00000262626
MAQKEGGRTVPCCSRPKVAALTAGTLLLLTAIGAASWAIVAVLLRSDQEPLYPVQVSSADARLMVFDKTEGTWRLLCSSRSNARVAGLSCEEMGFLRALTHSELDVRTAGANGTSGFFCVDEGRLPHTQRLLEVISVCDCPRGRFLAAICQDCGRRKLPVDRIVGGRDTSLGRWPWQVSLRYDGAHLCGGSLLSGDWVLTAAHCFPERNRVLSRWRVFAGAVAQASPHGLQLGVQAVVYHGGYLPFRDPNSEENSNDIALVHLSSPLPLTEYIQPVCLPAAGQALVDGKICTVTGWGNTQYYGQQAGVLQEARVPIISNDVCNGADFYGNQIKPKMFCAGYPEGGIDACQGDSGGPFVCEDSISRTPRWRLCGIVSWGTGCALAQKPGVYTKVSDFREWIFQAIKTHSEASGMVTQL

SEQ ID NO: 29650 - protein, 417 aa, Homo sapiens; identical to SEQ ID NO: 29649
  REGION 1..417: note = ENSP00000376060

SEQ ID NO: 29651 - protein, 80 aa, Homo sapiens
  REGION 1..80: note = ENSP00000472310
MAQKEGGRTVPCCSRPKVAALTAGTLLLLTAIGAASWAIVAVLLRSDQEPLYPVQVSSADARLMVFDKTEGTWRLLCSSR

SEQ ID NO: 29652 - protein, 259 aa, Homo sapiens
  REGION 1..259: note = ENSP00000470327
MAQKEVQVSSADARLMVFDKTEGTWRLLCSSRSNARVAGLSCEEMGFLRRNRVLSRWRVFAGAVAQASPHGLQLGVQAVVYHGGYLPFRDPNSEENSNDIALVHLSSPLPLTEYIQPVCLPAAGQALVDGKICTVTGWGNTQYYGQQAGVLQEARVPIISNDVCNGADFYGNQIKPKMFCAGYPEGGIDACQGDSGGPFVCEDSISRTPRWRLCGIVSWGTGCALAQKPGVYTKVSDFREWIFQAIKTHSEASGMVTQL

SEQ ID NO: 29653 - protein, 592 aa, Homo sapiens
  REGION 1..592: note = ENSP00000359583
MRVLCAFPEAMPSSNSRPPACLAPGALYLALLLHLSLSSQAGDRRPLPVDRAAGLKEKTLILLDVSTKNPVRTVNENFLSLQLDPSIIHDGWLDFLSSKRLVTLARGLSPAFLRFGGKRTDFLQFQNLRNPAKSRGGPGPDYYLKNYEDDIVRSDVALDKQKGCKIAQHPDVMLELQREKAAQMHLVLLKEQFSNTYSNLILTARSLDKLYNFADCSGLHLIFALNALRRNPNNSWNSSSALSLLKYSASKKYNISWELGNEPNNYRTMHGRAVNGSQLGKDYIQLKSLLQPIRIYSRASLYGPNIGRPRKNVIALLDGFMKVAGSTVDAVTWQHCYIDGRVVKVMDFLKTRLLDTLSDQIRKIQKVVNTYTPGKKIWLEGVVTTSAGGTNNLSDSYAAGFLWLNTLGMLANQGIDVVIRHSFFDHGYNHLVDQNFNPLPDYWLSLLYKRLIGPKVLAVHVAGLQRKPRPGRVIRDKLRIYAHCTNHHNHNYVRGSITLFIINLHRSRKKIKLAGTLRDKLVHQYLLQPYGQEGLKSKSVQLNGQPLVMVDDGTLPELKPRPLRAGRTLVIPPVTMGFYVVKNVNALACRYR

SEQ ID NO: 29654 - protein, 534 aa, Homo sapiens
  REGION 1..534: note = ENSP00000359580
MRVLCAFPEAMPSSNSRPPACLAPGALYLALLLHLSLSSQAGDRRPLPVDRAAGLKEKTLILLDVSTKNPVRTVNENFLSLQLDPSIIHDGWLDFLSSKRLVTLARGLSPAFLRFGGKRTDFLQFQNLRNPAKSRGGPGPDYYLKNYEDDIVRSDVALDKQKGCKIAQHPDVMLELQREKAAQMHLVLLKEQFSNTYSNLILTEPNNYRTMHGRAVNGSQLGKDYIQLKSLLQPIRIYSRASLYGPNIGRPRKNVIALLDGFMKVAGSTVDAVTWQHCYIDGRVVKVMDFLKTRLLDTLSDQIRKIQKVVNTYTPGKKIWLEGVVTTSAGGTNNLSDSYAAGFLWLNTLGMLANQGIDVVIRHSFFDHGYNHLVDQNFNPLPDYWLSLLYKRLIGPKVLAVHVAGLQRKPRPGRVIRDKLRIYAHCTNHHNHNYVRGSITLFIINLHRSRKKIKLAGTLRDKLVHQYLLQPYGQEGLKSKSVQLNGQPLVMVDDGTLPELKPRPLRAGRTLVIPPVTMGFYVVKNVNALACRYR

SEQ ID NO: 29655 - protein, 480 aa, Homo sapiens
  REGION 1..480: note = ENSP00000485916
MRVLCAFPEAMPSSNSRPPACLAPGALYLALLLHLSLSSQAGDRRPLPVDRAAGLKEKTLILLDVSTKNPVRTVNENFLSLQLDPSIIHDGWLDFLSSKRLVTLARGLSPAFLRFGGKRTDFLQFQNLRNPAKSRGGPGPDYYLKNYEDEPNNYRTMHGRAVNGSQLGKDYIQLKSLLQPIRIYSRASLYGPNIGRPRKNVIALLDGFMKVAGSTVDAVTWQHCYIDGRVVKVMDFLKTRLLDTLSDQIRKIQKVVNTYTPGKKIWLEGVVTTSAGGTNNLSDSYAAGFLWLNTLGMLANQGIDVVIRHSFFDHGYNHLVDQNFNPLPDYWLSLLYKRLIGPKVLAVHVAGLQRKPRPGRVIRDKLRIYAHCTNHHNHNYVRGSITLFIINLHRSRKKIKLAGTLRDKLVHQYLLQPYGQEGLKSKSVQLNGQPLVMVDDGTLPELKPRPLRAGRTLVIPPVTMGFYVVKNVNALACRYR

SEQ ID NO: 29656 - protein, 548 aa, Homo sapiens
  REGION 1..548: note = ENSP00000359577
MRVLCAFPEAMPSSNSRPPACLAPGALYLALLLHLSLSSQAGDRRPLPVDRAAGLKEKTLILLDVSTKNPVRTVNENFLSLQLDPSIIHDGWLDFLSSKRLVTLARGLSPAFLRFGGKRTDFLQFQNLRNPAKSRGGPGPDYYLKNYEDDIVRSDVALDKQKGCKIAQHPDVMLELQREKAAQMHLVLLKEQFSNTYSNLILTARSLDKLYNFADCSGLHLIFALNALRRNPNNSWNSSSALSLLKYSASKKYNISWELGNEPNNYRTMHGRAVNGSQLGKDYIQLKSLLQPIRIYSRASLYGPNIGRPRKNVIALLDGFMKVAGSTVDAVTWQHCYIDGRVVKVMDFLKTRLLDTLSDQIRKIQKVVNTYTPGKKIWLEGVVTTSAGGTNNLSDSYAAGFLWLNTLGMLANQGIDVVIRHSFFDHGYNHLVDQNFNPLPDYWLSLLYKRLIGPKVLAVHVAGLQRKPRPGRVIRDKLRIYAHCTNHHNHNYVRGSITLFIINLHRSRKKIKLAGTLRDKLVHQYLLQPYGQEGLKSKTQRCQYCGII

SEQ ID NO: 29657 - protein, 389 aa, Homo sapiens
  REGION 1..389: note = ENSP00000384384
ARSLDKLYNFADCSGLHLIFALNALRRNPNNSWNSSSALSLLKYSASKKYNISWELGNEPNNYRTMHGRAVNGSQLGKDYIQLKSLLQPIRIYSRASLYGPNIGRPRKNVIALLDGFMKVAGSTVDAVTWQHCYIDGRVVKVMDFLKTRLLDTLSDQIRKIQKVVNTYTPGKKIWLEGVVTTSAGGTNNLSDSYAAGFLWLNTLGMLANQGIDVVIRHSFFDHGYNHLVDQNFNPLPDYWLSLLYKRLIGPKVLAVHVAGLQRKPRPGRVIRDKLRIYAHCTNHHNHNYVRGSITLFIINLHRSRKKIKLAGTLRDKLVHQYLLQPYGQEGLKSKSVQLNGQPLVMVDDGTLPELKPRPLRAGRTLVIPPVTMGFYVVKNVNALACRYR

SEQ ID NO: 29658 - protein, 149 aa, Homo sapiens
  REGION 1..149: note = ENSP00000484672
MRVLCAFPEAMPSSNSRPPACLAPGALYLALLLHLSLSSQAGDRRPLPVDRAAGLKEKTLILLDVSTKNPVRTVNENFLSLQLDPSIIHDGWLDFLSSKRLVTLARGLSPAFLRFGGKRTDFLQFQNLRNPAKSRGGPGPDYYLKNYED

SEQ ID NO: 29659 - protein, 273 aa, Homo sapiens
  REGION 1..273: note = ENSP00000264735
MVRASCRLGSARTPSPARRPPGVRASQSRGGAAGTVSAWRRWCWRWPWRTAPSDGWRLPPGCLPGTDGVVPRPPAARSAAARPRETPGHTQLPPGARRRPRLESEMAFNDCFSLNYPGNPCPGDLIEVFRPGYQHWALYLGDGYVINIAPVDGIPASFTSAKSVFSSKALVKMQLLKDVVGNDTYRINNKYDETYPPLPVEEIIKRSEFVIGQEVAYNLLVNNCEHFVTLLRYGEGVSEQANRAISTVEFVTAAVGVFSFLGLFPKGQRAKYY

SEQ ID NO: 29660 - protein, 111 aa, Homo sapiens
  REGION 1..111: note = ENSP00000414431
SVFSSKALVKMQLLKDVVGNDTYRINNKYDETYPPLPVEEIIKRSEFVIGQEVAYNLLVNNCEHFVTLLRYGEGVSEQANRAISTVEFVTAAVGVFSFLGLFPKGQRAKYY

SEQ ID NO: 29661 - protein, 397 aa, Homo sapiens
  REGION 1..397: note = ENSP00000366506
MAPNGTASSFCLDSTACKITITVVLAVLILITVAGNVVVCLAVGLNRRLRNLTNCFIVSLAITDLLLGLLVLPFSAIYQLSCKWSFGKVFCNIYTSLDVMLCTASILNLFMISLDRYCAVMDPLRYPVLVTPVRVAISLVLIWVISITLSFLSIHLGWNSRNETSKGNHTTSKCKVQVNEVYGLVDGLVTFYLPLLIMCITYYRIFKVARDQAKRINHISSWKAATIREHKATVTLAAVMGAFIICWFPYFTAFVYRGLRGDDAINEVLEAIVLWLGYANSALNPILYAALNRDFRTGYQQLFCCRLANRNSHKTSLRSNASQLSRTQSREPRQQEEKPLKLQVWSGTEVTAPQGATDRPWLCLPECWSVELTHSFIHLFIHSFANIHPIPTTCQEL

SEQ ID NO: 29662 - protein, 363 aa, Homo sapiens
  REGION 1..363: note = ENSP00000490705
MAPNGTASSFCLDSTACKITITVVLAVLILITVAGNVVVCLAVGLNRRLRNLTNCFIVSLAITDLLLGLLVLPFSAIYQLSCKWSFGKVFCNIYTSLDVMLCTASILNLFMISLDRYCAVMDPLRYPVLVTPVRVAISLVLIWVISITLSFLSIHLGWNSRNETSKGNHTTSKCKVQVNEVYGLVDGLVTFYLPLLIMCITYYRIFKVARDQAKRINHISSWKAATIREHKATVTLAAVMGAFIICWFPYFTAFVYRGLRGDDAINEVLEAIVLWLGYANSALNPILYAALNRDFRTGYQQLFCCRLANRNSHKTSLRSNASQLSRTQSREPRQQEEKPLKLQVWSGTEVTAPQGATDREFGE

SEQ ID NO: 29663 - protein, 422 aa, Homo sapiens
  REGION 1..422: note = ENSP00000489742
MAPNGTASSFCLDSTACKITITVVLAVLILITVAGNVVVCLAVGLNRRLRNLTNCFIVSLAITDLLLGLLVLPFSAIYQLSCKWSFGKVFCNIYTSLDVMLCTASILNLFMISLDRYCAVMDPLRYPVLVTPVRVAISLVLIWVISITLSFLSIHLGWNSRNETSKGNHTTSKCKVQVNEVYGLVDGLVTFYLPLLIMCITYYRIFKVARDQAKRINHISSWKAATIREHKATVTLAAVMGAFIICWFPYFTAFVYRGLRGDDAINEVLEAIVLWLGYANSALNPILYAALNRDFRTGYQQLFCCRLANRNSHKTSLRSNASQLSRTQSREPRQQEEKPLKLQVWSGTEVTAPQGATDRKPALSCTTCSSNLLSCCKSLWGLRFLQRHMGGPSEELSGEPLSEEPQKRPPQKAVRTLPSEAV

SEQ ID NO: 29664 - protein, 359 aa, Homo sapiens
  REGION 1..359: note = ENSP00000231683
MAPNGTASSFCLDSTACKITITVVLAVLILITVAGNVVVCLAVGLNRRLRNLTNCFIVSLAITDLLLGLLVLPFSAIYQLSCKWSFGKVFCNIYTSLDVMLCTASILNLFMISLDRYCAVMDPLRYPVLVTPVRVAISLVLIWVISITLSFLSIHLGWNSRNETSKGNHTTSKCKVQVNEVYGLVDGLVTFYLPLLIMCITYYRIFKVARDQAKRINHISSWKAATIREHKATVTLAAVMGAFIICWFPYFTAFVYRGLRGDDAINEVLEAIVLWLGYANSALNPILYAALNRDFRTGYQQLFCCRLANRNSHKTSLRSNASQLSRTQSREPRQQEEKPLKLQVWSGTEVTAPQGATDR

SEQ ID NO: 29665 - protein, 445 aa, Homo sapiens
  REGION 1..445: note = ENSP00000342560
MERAPPDGPLNASGALAGEAAAAGGARGFSAAWTAVLAALMALLIVATVLGNALVMLAFVADSSLRTQNNFFLLNLAISDFLVGAFCIPLYVPYVLTGRWTFGRGLCKLWLVVDYLLCTSSAFNIVLISYDRFLSVTRAVSYRAQQGDTRRAVRKMLLVWVLAFLLYGPAILSWEYLSGGSSIPEGHCYAEFFYNWYFLITASTLEFFTPFLSVTFFNLSIYLNIQRRTRLRLDGAREAAGPEPPPEAQPSPPPPPGCWGCWQKGHGEAMPLHRYGVGEAAVGAEAGEATLGGGGGGGSVASPTSSSGSSSRGTERPRSLKRGSKPSASSASLEKRMKMVSQSFTQRFRLSRDRKVAKSLAVIVSIFGLCWAPYTLLMIIRAACHGHCVPDYWYETSFWLLWANSAVNPVLYPLCHHSFRRAFTKLLCPQKLKIQPHSSLEHCWK

SEQ ID NO: 29666 - protein, 373 aa, Homo sapiens
  REGION 1..373: note = ENSP00000321482
MERAPPDGPLNASGALAGEAAAAGGARGFSAAWTAVLAALMALLIVATVLGNALVMLAFVADSSLRTQNNFFLLNLAISDFLVGAFCIPLYVPYVLTGRWTFGRGLCKLWLVVDYLLCTSSAFNIVLISYDRFLSVTRAVSYRAQQGDTRRAVRKMLLVWVLAFLLYGPAILSWEYLSGGSSIPEGHCYAEFFYNWYFLITASTLEFFTPFLSVTFFNLSIYLNIQRRTRLRLDGAREAAGPEPPPEAQPSPPPPPGCWGCWQKGHGEAMPLHRKVAKSLAVIVSIFGLCWAPYTLLMIIRAACHGHCVPDYWYETSFWLLWANSAVNPVLYPLCHHSFRRAFTKLLCPQKLKIQPHSSLEHCWKKMKKKTCL

SEQ ID NO: 29667 - protein, 200 aa, Homo sapiens
  REGION 1..200: note = ENSP00000482567
MERAPPDGPLNASGALAGEAAAAGGARGFSAAWTAVLAALMALLIVATVLGNALVMLAFVADSSLRTQNNFFLLNLAISDFLVGAFCIPLYVPYVLTGRWTFGRGLCKLWLVVDYLLCTSSAFNIVLISYDRFLSVTRAVSYRAQQGDTRRAVRKMLLVWVLAFLLYGPAPAAPRGALRGRAHSRGAPSRRRPRPRWRSA

SEQ ID NO: 29668 - protein, 307 aa, Homo sapiens
  REGION 1..307: note = ENSP00000002596
MAALLLGAVLLVAQPQLVPSRPAELGQQELLRKAGTLQDDVRDGVAPNGSAQQLPQTIIIGVRKGGTRALLEMLSLHPDVAAAENEVHFFDWEEHYSHGLGWYLSQMPFSWPHQLTVEKTPAYFTSPKVPERVYSMNPSIRLLLILRDPSERVLSDYTQVFYNHMQKHKPYPSIEEFLVRDGRLNVDYKALNRSLYHVHMQNWLRFFPLRHIHIVDGDRLIRDPFPEIQKVERFLKLSPQINASNFYFNKTKGFYCLRDSGRDRCLHESKGRAHPQVDPKLLNKLHEYFHEPNKKFFELVGRTFDWH

SEQ ID NO: 29669 - protein, 82 aa, Homo sapiens
  REGION 1..82: note = ENSP00000425673
MAALLLGAVLLVAQPQLVPSRPAELGQQELLRKAGTLQDDVRDGVAPNGSAQQLPQTIIIGVRKGGTRALLEMLSLHPDVAA

SEQ ID NO: 29670 - protein, 82 aa, Homo sapiens; identical to SEQ ID NO: 29669
  REGION 1..82: note = ENSP00000422629

SEQ ID NO: 29671 - protein, 367 aa, Homo sapiens
  REGION 1..367: note = ENSP00000261374
MAYRVLGRAGPPQPRRARRLLFAFTLSLSCTYLCYSFLCCCDDLGRSRLLGAPRCLRGPSAGGQKLLQKSRPCDPSGPTPSEPSAPSAPAAAVPAPRLSGSNHSGSPKLGTKRLPQALIVGVKKGGTRAVLEFIRVHPDVRALGTEPHFFDRNYGRGLDWYRSLMPRTLESQITLEKTPSYFVTQEAPRRIFNMSRDTKLIVVVRNPVTRAISDYTQTLSKKPDIPTFEGLSFRNRTLGLVDVSWNAIRIGMYVLHLESWLQYFPLAQIHFVSGERLITDPAGEMGRVQDFLGIKRFITDKHFYFNKTKGFPCLKKTESSLLPRCLGKSKGRTHVQIDPEVIDQLREFYRPYNIKFYETVGQDFRWE

SEQ ID NO: 29672 - protein, 162 aa, Homo sapiens
  REGION 1..162: note = ENSP00000454505
MAYRVLGRAGPPQPRRARRLLFAFTLSLSCTYLCYSFLCCCDDLGRSRLLGAPRCLRGPSAGGQKLLQKSRPCDPSGPTPSEPSAPSAPAAAVPAPRLSGSNHSGSPKLGTKRLPQALIVGVKKGGTRAVLEFIRVHPDVRALGTEPHFFDRNYGRGLDWYR

SEQ ID NO: 29673 - protein, 456 aa, Homo sapiens
  REGION 1..456: note = ENSP00000330606
MARWPAPPPPPPPPPPLAAPPPPGASAKGPPARKLLFMCTLSLSVTYLCYSLLGGSGSLQFPLALQESPGAAAEPPPSPPPPSLLPTPVRLGAPSQPPAPPPLDNASHGEPPEPPEQPAAPGTDGWGLPSGGGGAQDAWLRTPLAPSEMITAQSALPEREAQESSTTDEDLAGRRAANGSSERGGAVSTPDYGEKKLPQALIIGVKKGGTRALLEAIRVHPDVRAVGVEPHFFDRNYEKGLEWYRNVMPKTLDGQITMEKTPSYFVTNEAPKRIHSMAKDIKLIVVVRNPVTRAISDYTQTLSKKPEIPTFEVLAFKNRTLGLIDASWSAIRIGIYALHLENWLQYFPLSQILFVSGERLIVDPAGEMAKVQDFLGLKRVVTEKHFYFNKTKGFPCLKKPEDSSAPRCLGKSKGRTHPRIDPDVIHRLRKFYKPFNLMFYQMTGQDFQWEQEEGDK

SEQ ID NO: 29674 - protein, 605 aa, Homo sapiens
  REGION 1..605: note = ENSP00000359873
MALPACAVREFEPPRQPERGAPVRTTCPRRHSRVEAELAASRPGSVAASVRAGPPRGVSHGFHTRPLLDKPRKASSSLAGAACAPLFALLSRGRRRRMHVLRRRWDLGSLCRALLTRGLAALGHSLKHVLGAIFSKIFGPMASVGNMDEKSNKLLLALVMLFLFAVIVLQYVCPGTECQLLRLQAFSSPVPDPYRSEDESSARFVPRYNFTRGDLLRKVDFDIKGDDLIVFLHIQKTGGTTFGRHLVRNIQLEQPCECRVGQKKCTCHRPGKRETWLFSRFSTGWSCGLHADWTELTSCVPSVVDGKRDARLRPSRNFHYITILRDPVSRYLSEWRHVQRGATWKASLHVCDGRPPTSEELPSCYTGDDWSGCPLKEFMDCPYNLANNRQVRMLSDLTLVGCYNLSVMPEKQRNKVLLESAKSNLKHMAFFGLTEFQRKTQYLFEKTFNMNFISPFTQYNTTRASSVEINEEIQKRIEGLNFLDMELYSYAKDLFLQRYQFMRQKEHQEARRKRQEQRKFLKGRLLQTHFQSQGQGQSQNPNQNQSQNPNPNANQNLTQNLMQNLTQSLSQKENRESPKQNSGKEQNDNTSNGTNDYIGSVEKWR

SEQ ID NO: 29675 - protein, 645 aa, Homo sapiens
  REGION 1..645: note = ENSP00000429473
MALPACAVREFEPPRQPERGAPVRTTCPRRHSRVEAELAASRPGSVAASVRAGPPRGVSHGFHTRPLLDKPRKASSSLAGAACAPLFALLSRGRRRRMHVLRRRWDLGSLCRALLTRGLAALGHSLKHVLGAIFSKIFGPMASVGNMDEKSNKLLLALVMLFLFAVIVLQYVCPGTECQLLRLQAFSSPVPDPYRSEDESSARFVPRYNFTRGDLLRKVDFDIKGDDLIVFLHIQKTGGTTFGRHLVRNIQLEQPCECRVGQKKCTCHRPGKRETWLFSRFSTGWSCGLHADWTELTSCVPSVVDGKRDARLRPSRWRIFQILDAASKDKRGSPNTNAGANSPSSTKTRNTSKSGKNFHYITILRDPVSRYLSEWRHVQRGATWKASLHVCDGRPPTSEELPSCYTGDDWSGCPLKEFMDCPYNLANNRQVRMLSDLTLVGCYNLSVMPEKQRNKVLLESAKSNLKHMAFFGLTEFQRKTQYLFEKTFNMNFISPFTQYNTTRASSVEINEEIQKRIEGLNFLDMELYSYAKDLFLQRYQFMRQKEHQEARRKRQEQRKFLKGRLLQTHFQSQGQGQSQNPNQNQSQNPNPNANQNLTQNLMQNLTQSLSQKENRESPKQNSGKEQNDNTSNGTNDYIGSVEKWR

SEQ ID NO: 29676 - protein, 645 aa, Homo sapiens; identical to SEQ ID NO: 29675
  REGION 1..645: note = ENSP00000359870

SEQ ID NO: 29677 - protein, 605 aa, Homo sapiens; identical to SEQ ID NO: 29674
  REGION 1..605: note = ENSP00000384013

SEQ ID NO: 29678 - protein, 277 aa, Homo sapiens
  REGION 1..277: note = ENSP00000491722
MLFLFAVIVLQYVCPGTECQLLRLQAFSSPVPDPYRSEDESSARFVPRYNFTRGDLLRKVDFDIKGDDLIVFLHIQKTGGTTFGRHLVRNIQLEQPCECRVGQKKCTCHRPGKRETWLFSRFSTGWSCGLHADWTELTRCVPHIWNWEQSFSISYNRWRIFQILDAASKDKRGSPNTNAGANSPSSTKTRNTSKSGKNFHYITILRDPVSRYLSEWRHVQRGATWKASLHVCDGRPPTSEELPSCYTGDDWSGCPLKEFMDCPYNLANNRQCACSPT

SEQ ID NO: 29679 - protein, 300 aa, Homo sapiens
  REGION 1..300: note = ENSP00000351035
MKFLLDILLLLPLLIVCSLESFVKLFIPKRRKSVTGEIVLITGAGHGIGRLTAYEFAKLKSKLVLWDINKHGLEETAAKCKGLGAKVHTFVVDCSNREDIYSSAKKVKAEIGDVSILVNNAGVVYTSDLFATQDPQIEKTFEVNVLAHFWTTKAFLPAMTKNNHGHIVTVASAAGHVSVPFLLAYCSSKFAAVGFHKTLTDELAALQITGVKTTCLCPNFVNTGFIKNPSTSLGPTLEPEEVVNRLMHGILTEQKMIFIPSSIAFLTTLERILPERFLAVLKRKISVKFDAVIGYKMKAQ

SEQ ID NO: 29680 - protein, 256 aa, Homo sapiens
  REGION 1..256: note = ENSP00000423775
MKFLLDILLLLPLLIVCSLESFVKLFIPKRRKSVTGEIVLITGAGHGIGRLTAYEFAKLKSKLVLWDINKHGLEETAAKCKGLGAKVHTFVVDCSNREDIYSSAKKTTKAFLPAMTKNNHGHIVTVASAAGHVSVPFLLAYCSSKFAAVGFHKTLTDELAALQITGVKTTCLCPNFVNTGFIKNPSTSLGPTLEPEEVVNRLMHGILTEQKMIFIPSSIAFLTTLERILPERFLAVLKRKISVKFDAVIGYKMKAQ

SEQ ID NO: 29681 - protein, 312 aa, Homo sapiens
  REGION 1..312: note = ENSP00000278353
MESALPAAGFLYWVGAGTVAYLALRISYSLFTALRVWGVGNEAGVGPGLGEWAVVTGSTDGIGKSYAEELAKHGMKVVLISRSKDKLDQVSSEIKEKFKVETRTIAVDFASEDIYDKIKTGLAGLEIGILVNNVGMSYEYPEYFLDVPDLDNVIKKMININILSVCKMTQLVLPGMVERSKGAILNISSGSGMLPVPLLTIYSATKTFVDFFSQCLHEEYRSKGVFVQSVLPYFVATKLAKIRKPTLDKPSPETFVKSAIKTVGLQSRTNGYLIHALMGSIISNLPSWIYLKIVMNMNKSTRAHYLKKTKKN

SEQ ID NO: 29682 - protein, 57 aa, Homo sapiens
  REGION 1..57: note = ENSP00000490749
MAPRAGFRPKVVSEQRLLVSSSPSRPAPPPGFIHSLFSFTKLSQVVLMELENHMQKS

SEQ ID NO: 29683 - protein, 164 aa, Homo sapiens
  REGION 1..164: note = ENSP00000436582
MESALPAAGFLYWVGAGTVAYLALRISYSLFTALRVWGVGNEAGVGPGLGEWAEEKFKVETRTIAVDFASEDIYDKIKTGLAGLEIGILVNNVGMSYEYPEYFLDVPDLDNVIKKMININILSVCKMTQLVLPGMVERSKGAILNISSGSGMLPVPLLTIYSAT

SEQ ID NO: 29684 - protein, 103 aa, Homo sapiens
  REGION 1..103: note = ENSP00000490822
MESALPAAGFLYWVGAGTVAYLALRISYSLFTALRVWGVGNEAGVGPGLGEWADDTIGTAWHGGKIQRGYSEHFIWQWHAPCPTLDHLFCNQDFCRFLLSVPP

SEQ ID NO: 29685 - protein, 98 aa, Homo sapiens
  REGION 1..98: note = ENSP00000379052
MESALPAAGFLYWVGAGTVAYLALRISYSLFTALRVWGVGNEAGVGPGLGEWAVVTGSTDGIGKSYAEELAKHGMKVVLISRSKDKLDQVSSEISNYT

SEQ ID NO: 29686 - protein, 111 aa, Homo sapiens
  REGION 1..111: note = ENSP00000490003
MESALPAAGFLYWVGAGTVAYLALRISYSLFTALRVWGVGNEAGVGPGLGEWAGESDAAPRPRSRGGPDQAWAVMTSSGVCSWPSPPQLSSFSGSCAPRAPPGSLGCLLLA

SEQ ID NO: 29687 - protein, 276 aa, Homo sapiens
  REGION 1..276: note = ENSP00000490421
MESALPAAGFLYWVGAGTVAYLALRISYSLFTALRVWGVGNEAGVGPGLGEWAVVTGSTDGIGKSYAEELAKHGMKVVLISRSKDKLDQVSSEIMNNVGMSYEYPEYFLDVPDLDNVIKKMININILSVCKMTQLVLPGMVERSKGAILNISSGSGMLPVPLLTIYSATKTFVDFFSQCLHEEYRSKGVFVQSVLPYFVATKLAKIRKPTLDKPSPETFVKSAIKTVGLQSRTNGYLIHALMGSIISNLPSWIYLKIVMNMNKSTRAHYLKKTKKN

SEQ ID NO: 29688 - protein, 178 aa, Homo sapiens
  REGION 1..178: note = ENSP00000490701
MEPVSRPAASSVTRCPPWFAPFVTGSTDGIGKSYAEELAKHGMKVVLISRSKDKLDQVSSEIKEKFKVETRTIAVDFASEDIYDKIKTGLAGLEIGILVNNVGMSYEYPEYFLDVPDLDNVIKKMININILSVCKMTQLVLPGMVERSKGAILNISSGSGMLPVPLLTIYSATKTFVD

SEQ ID NO: 29689 - protein, 732 aa, Homo sapiens
  REGION 1..732: note = ENSP00000216281
MPEETQTQDQPMEEEEVETFAFQAEIAQLMSLIINTFYSNKEIFLRELISNSSDALDKIRYESLTDPSKLDSGKELHINLIPNKQDRTLTIVDTGIGMTKADLINNLGTIAKSGTKAFMEALQAGADISMIGQFGVGFYSAYLVAEKVTVITKHNDDEQYAWESSAGGSFTVRTDTGEPMGRGTKVILHLKEDQTEYLEERRIKEIVKKHSQFIGYPITLFVEKERDKEVSDDEAEEKEDKEEEKEKEEKESEDKPEIEDVGSDEEEEKKDGDKKKKKKIKEKYIDQEELNKTKPIWTRNPDDITNEEYGEFYKSLTNDWEDHLAVKHFSVEGQLEFRALLFVPRRAPFDLFENRKKKNNIKLYVRRVFIMDNCEELIPEYLNFIRGVVDSEDLPLNISREMLQQSKILKVIRKNLVKKCLELFTELAEDKENYKKFYEQFSKNIKLGIHEDSQNRKKLSELLRYYTSASGDEMVSLKDYCTRMKENQKHIYYITGETKDQVANSAFVERLRKHGLEVIYMIEPIDEYCVQQLKEFEGKTLVSVTKEGLELPEDEEEKKKQEEKKTKFENLCKIMKDILEKKVEKVVVSNRLVTSPCCIVTSTYGWTANMERIMKAQALRDNSTMGYMAAKKHLEINPDHSIIETLRQKAEADKNDKSVKDLVILLYETALLSSGFSLEDPQTHANRIYRMIKLGLGIDEDDPTADDTSAAVTEEMPPLEGDDDTSRMEEVD

SEQ ID NO: 29690 - protein, 854 aa, Homo sapiens
  REGION 1..854: note = ENSP00000335153
MPPCSGGDGSTPPGPSLRDRDCPAQSAEYPRDRLDPRPGSPSEASSPPFLRSRAPVNWYQEKAQVFLWHLMVSGSTTLLCLWKQPFHVSAFPVTASLAFRQSQGAGQHLYKDLQPFILLRLLMPEETQTQDQPMEEEEVETFAFQAEIAQLMSLIINTFYSNKEIFLRELISNSSDALDKIRYESLTDPSKLDSGKELHINLIPNKQDRTLTIVDTGIGMTKADLINNLGTIAKSGTKAFMEALQAGADISMIGQFGVGFYSAYLVAEKVTVITKHNDDEQYAWESSAGGSFTVRTDTGEPMGRGTKVILHLKEDQTEYLEERRIKEIVKKHSQFIGYPITLFVEKERDKEVSDDEAEEKEDKEEEKEKEEKESEDKPEIEDVGSDEEEEKKDGDKKKKKKIKEKYIDQEELNKTKPIWTRNPDDITNEEYGEFYKSLTNDWEDHLAVKHFSVEGQLEFRALLFVPRRAPFDLFENRKKKNNIKLYVRRVFIMDNCEELIPEYLNFIRGVVDSEDLPLNISREMLQQSKILKVIRKNLVKKCLELFTELAEDKENYKKFYEQFSKNIKLGIHEDSQNRKKLSELLRYYTSASGDEMVSLKDYCTRMKENQKHIYYITGETKDQVANSAFVERLRKHGLEVIYMIEPIDEYCVQQLKEFEGKTLVSVTKEGLELPEDEEEKKKQEEKKTKFENLCKIMKDILEKKVEKVVVSNRLVTSPCCIVTSTYGWTANMERIMKAQALRDNSTMGYMAAKKHLEINPDHSIIETLRQKAEADKNDKSVKDLVILLYETALLSSGFSLEDPQTHANRIYRMIKLGLGIDEDDPTADDTSAAVTEEMPPLEGDDDTSRMEEVD

SEQ ID NO: 29691 - protein, 52 aa, Homo sapiens
  REGION 1..52: note = ENSP00000451400
  VARIANT 1: note = Any amino acid
XVETFAFQAEIAQLMSLIINTFYSNKEIFLRELISNSSDVNLWVVEQKLSYT

SEQ ID NO: 29692 - protein, 174 aa, Homo sapiens
  REGION 1..174: note = ENSP00000450712
MPEETQTQDQPMEEEEVETFAFQAEIAQLMSLIINTFYSNKEIFLRELISNSSDALDKIRYESLTDPSKLDSGKELHINLIPNKQDRTLTIVDTGIGMTKADLINNLGEPMGRGTKVILHLKEDQTEYLEERRIKEIVKKHSQFIGYPITLFVEKERDKEVSDDEAEEKEDKEE

SEQ ID NO: 29693 - protein, 80 aa, Homo sapiens
  REGION 1..80: note = ENSP00000452241
MPPCSGGDGSTPPGPSLRDRDCPAQSAEYPRDRLDPRPGSPSEASSPPFLRRCLRKPRPKTNRWRRRRLRRSPFRQKLPS

SEQ ID NO: 29694 - protein, 100 aa, Homo sapiens
  REGION 1..100: note = ENSP00000489370
MPPCSGGDGSTPPGPSLRDRDCPAQSAEYPRDRLDPRPGSPSEASSPPFLRRAPVNWYQEKAQVFLWHLMVSGSTTLLCLWKQPFHVSAFPVTASLAFRQ

SEQ ID NO: 29695 - protein, 724 aa, Homo sapiens
  REGION 1..724: note = ENSP00000360709
MPEEVHHGEEEVETFAFQAEIAQLMSLIINTFYSNKEIFLRELISNASDALDKIRYESLTDPSKLDSGKELKIDIIPNPQERTLTLVDTGIGMTKADLINNLGTIAKSGTKAFMEALQAGADISMIGQFGVGFYSAYLVAEKVVVITKHNDDEQYAWESSAGGSFTVRADHGEPIGRGTKVILHLKEDQTEYLEERRVKEVVKKHSQFIGYPITLYLEKEREKEISDDEAEEEKGEKEEEDKDDEEKPKIEDVGSDEEDDSGKDKKKKTKKIKEKYIDQEELNKTKPIWTRNPDDITQEEYGEFYKSLTNDWEDHLAVKHFSVEGQLEFRALLFIPRRAPFDLFENKKKKNNIKLYVRRVFIMDSCDELIPEYLNFIRGVVDSEDLPLNISREMLQQSKILKVIRKNIVKKCLELFSELAEDKENYKKFYEAFSKNLKLGIHEDSTNRRRLSELLRYHTSQSGDEMTSLSEYVSRMKETQKSIYYITGESKEQVANSAFVERVRKRGFEVVYMTEPIDEYCVQQLKEFDGKSLVSVTKEGLELPEDEEEKKKMEESKAKFENLCKLMKEILDKKVEKVTISNRLVSSPCCIVTSTYGWTANMERIMKAQALRDNSTMGYMMAKKHLEINPDHPIVETLRQKAEADKNDKAVKDLVVLLFETALLSSGFSLEDPQTHSNRIYRMIKLGLGIDEDEVAAEEPNAAVPDEIPPLEGDEDASRMEEVD

SEQ ID NO: 29696 - protein, 724 aa, Homo sapiens; identical to SEQ ID NO: 29695
  REGION 1..724: note = ENSP00000325875

SEQ ID NO: 29697 - protein, 724 aa, Homo sapiens; identical to SEQ ID NO: 29695
  REGION 1..724: note = ENSP00000360609

SEQ ID NO: 29698 - protein, 724 aa, Homo sapiens; identical to SEQ ID NO: 29695
  REGION 1..724: note = ENSP00000481908

SEQ ID NO: 29699 - protein, 641 aa, Homo sapiens
  REGION 1..641: note = ENSP00000408907
MAKAAAIGIDLGTTYSCVGVFQHGKVEIIANDQGNRTTPSYVAFTDTERLIGDAAKNQVALNPQNTVFDAKRLIGRKFGDPVVQSDMKHWPFQVINDGDKPKVQVSYKGETKAFYPEEISSMVLTKMKEIAEAYLGYPVTNAVITVPAYFNDSQRQATKDAGVIAGLNVLRIINEPTAAAIAYGLDRTGKGERNVLIFDLGGGTFDVSILTIDDGIFEVKATAGDTHLGGEDFDNRLVNHFVEEFKRKHKKDISQNKRAVRRLRTACERAKRTLSSSTQASLEIDSLFEGIDFYTSITRARFEELCSDLFRSTLEPVEKALRDAKLDKAQIHDLVLVGGSTRIPKVQKLLQDFFNGRDLNKSINPDEAVAYGAAVQAAILMGDKSENVQDLLLLDVAPLSLGLETAGGVMTALIKRNSTIPTKQTQIFTTYSDNQPGVLIQVYEGERAMTKDNNLLGRFELSGIPPAPRGVPQIEVTFDIDANGILNVTATDKSTGKANKITITNDKGRLSKEEIERMVQEAEKYKAEDEVQRERVSAKNALESYAFNMKSAVEDEGLKGKISEADKKKVLDKCQEVISWLDANTLAEKDEFEHKRKELEQVCNPIISGLYQGAGGPGPGGFGAQGPKGGSGSGPTIEEVD

SEQ ID NO: 29700 - protein, 476 aa, Homo sapiens
  REGION 1..476: note = ENSP00000393259
MAKAAAIGIDLGTTYSCVGVFQHGKGERNVLIFDLGGGTFDVSILTIDDGIFEVKATAGDTHLGGEDFDNRLVNHFVEEFKRKHKKDISQNKRAVRRLRTACERAKRTLSSSTQASLEIDSLFEGIDFYTSITRARFEELCSDLFRSTLEPVEKALRDAKLDKAQIHDLVLVGGSTRIPKVQKLLQDFFNGRDLNKSINPDEAVAYGAAVQAAILMGDKSENVQDLLLLDVAPLSLGLETAGGVMTALIKRNSTIPTKQTQIFTTYSDNQPGVLIQVYEGERAMTKDNNLLGRFELSGIPPAPRGVPQIEVTFDIDANGILNVTATDKSTGKANKITITNDKGRLSKEEIERMVQEAEKYKAEDEVQRERVSAKNALESYAFNMKSAVEDEGLKGKISEADKKKVLDKCQEVISWLDANTLAEKDEFEHKRKELEQVCNPIISGLYQGAGGPGPGGFGAQGPKGGSGSGPTIEEVD

SEQ ID NO: 29701 - protein, 641 aa, Homo sapiens
  REGION 1..641: note = ENSP00000382915
MAKAAAIGIDLGTTYSCVGVFQHGKVEIIANDQGNRTTPSYVAFTDTERLIGDAAKNQVALNPQNTVFDAKRLIGRKFGDPVVQSDMKHWPFQVINDGDKPKVQVSYKGDTKAFYPEEISSMVLTKMKEIAEAYLGYPVTNAVITVPAYFNDSQRQATKDAGVIAGLNVLRIINEPTAAAIAYGLDRTGKGERNVLIFDLGGGTFDVSILTIDDGIFEVKATAGDTHLGGEDFDNRLVNHFVEEFKRKHKKDISQNKRAVRRLRTACERAKRTLSSSTQASLEIDSLFEGIDFYTSITRARFEELCSDLFRSTLEPVEKALRDAKLDKAQIHDLVLVGGSTRIPKVQKLLQDFFNGRDLNKSINPDEAVAYGAAVQAAILMGDKSENVQDLLLLDVAPLSLGLETAGGVMTALIKRNSTIPTKQTQIFTTYSDNQPGVLIQVYEGERAMTKDNNLLGRFELSGIPPAPRGVPQIEVTFDIDANGILNVTATDKSTGKANKITITNDKGRLSKEEIERMVQEAEKYKAEDEVQRERVSAKNALESYAFNMKSAVEDEGLKGKISEADKKKVLDKCQEVISWLDANTLAEKDEFEHKRKELEQVCNPIISGLYQGAGGPGPGGFGAQGPKGGSGSGPTIEEVD

SEQ ID NO: 29702 - protein, 476 aa, Homo sapiens; identical to SEQ ID NO: 29700
  REGION 1..476: note = ENSP00000372880

SEQ ID NO: 29703 - protein, 641 aa, Homo sapiens; identical to SEQ ID NO: 29699
  REGION 1..641: note = ENSP00000404524

SEQ ID NO: 29704 - protein, 476 aa, Homo sapiens; identical to SEQ ID NO: 29700
  REGION 1..476: note = ENSP00000415927

SEQ ID NO: 29705 - protein, 641 aa, Homo sapiens; identical to SEQ ID NO: 29699
  REGION 1..641: note = ENSP00000364802

SEQ ID NO: 29706 - protein, 476 aa, Homo sapiens; identical to SEQ ID NO: 29700
  REGION 1..476: note = ENSP00000477378

SEQ ID NO: 29707 - protein, 641 aa, Homo sapiens; identical to SEQ ID NO: 29699
  REGION 1..641: note = ENSP00000406359

SEQ ID NO: 29708 - protein, 476 aa, Homo sapiens; identical to SEQ ID NO: 29700
  REGION 1..476: note = ENSP00000410693

SEQ ID NO: 29709 - protein, 641 aa, Homo sapiens; identical to SEQ ID NO: 29699
  REGION 1..641: note = ENSP00000403530

SEQ ID NO: 29710 - protein, 641 aa, Homo sapiens; identical to SEQ ID NO: 29699
  REGION 1..641: note = ENSP00000364801

SEQ ID NO: 29711 - protein, 641 aa, Homo sapiens; identical to SEQ ID NO: 29699
  REGION 1..641: note = ENSP00000375399

SEQ ID NO: 29712 - protein, 642 aa, Homo sapiens
  REGION 1..642: note = ENSP00000402651
GMAKAAAIGIDLGTTYSCVGVFQHGKVEIIANDQGNRTTPSYVAFTDTERLIGDAAKNQVALNPQNTVFDAKRLIGRKFGDPVVQSDMKHWPFQVINDGDKPKVQVSYKGETKAFYPEEISSMVLTKMKEIAEAYLGYPVTNAVITVPAYFNDSQRQATKDAGVIAGLNVLRIINEPTAAAIAYGLDRTGKGERNVLIFDLGGGTFDVSILTIDDGIFEVKATAGDTHLGGEDFDNRLVNHFVEEFKRKHKKDISQNKRAVRRLRTACERAKRTLSSSTQASLEIDSLFEGIDFYTSITRARFEELCSDLFRSTLEPVEKALRDAKLDKAQIHDLVLVGGSTRIPKVQKLLQDFFNGRDLNKSINPDEAVAYGAAVQAAILMGDKSENVQDLLLLDVAPLSLGLETAGGVMTALIKRNSTIPTKQTQIFTTYSDNQPGVLIQVYEGERAMTKDNNLLGRFELSGIPPAPRGVPQIEVTFDIDANGILNVTATDKSTGKANKITITNDKGRLSKEEIERMVQEAEKYKAEDEVQRERVSAKNALESYAFNMKSAVEDEGLKGKISEADKKKVLDKCQEVISWLDANTLAEKDEFEHKRKELEQVCNPIISGLYQGAGGPGPGGFGAQGPKGGSGSGPTIEEVD

SEQ ID NO: 29713 - protein, 641 aa, Homo sapiens; identical to SEQ ID NO: 29699
  REGION 1..641: note = ENSP00000393087

SEQ ID NO: 29714 - protein, 642 aa, Homo sapiens; identical to SEQ ID NO: 29712
  REGION 1..642: note = ENSP00000387691

SEQ ID NO: 29715 - protein, 641 aa, Homo sapiens; identical to SEQ ID NO: 29699
  REGION 1..641: note = ENSP00000375391

SEQ ID NO: 29716 - protein, 642 aa, Homo sapiens; identical to SEQ ID NO: 29712
  REGION 1..642: note = ENSP00000442789

SEQ ID NO: 29717 - protein, 840 aa, Homo sapiens
  REGION 1..840: note = ENSP00000302961
MSVVGIDLGFQSCYVAVARAGGIETIANEYSDRCTPACISFGPKNRSIGAAAKSQVISNAKNTVQGFKRFHGRAFSDPFVEAEKSNLAYDIVQLPTGLTGIKVTYMEEERNFTTEQVTAMLLSKLKETAESVLKKPVVDCVVSVPCFYTDAERRSVMDATQIAGLNCLRLMNETTAVALAYGIYKQDLPALEEKPRNVVFVDMGHSAYQVSVCAFNRGKLKVLATAFDTTLGGRKFDEVLVNHFCEEFGKKYKLDIKSKIRALLRLSQECEKLKKLMSANASDLPLSIECFMNDVDVSGTMNRGKFLEMCNDLLARVEPPLRSVLEQTKLKKEDIYAVEIVGGATRIPAVKEKISKFFGKELSTTLNADEAVTRGCALQCAILSPAFKVREFSITDVVPYPISLRWNSPAEEGSSDCEVFSKNHAAPFSKVLTFYRKEPFTLEAYYSSPQDLPYPDPAIAQFSVQKVTPQSDGSSSKVKVKVRVNVHGIFSVSSASLVEVHKSEENEEPMETDQNAKEEEKMQVDQEEPHVEEQQQQTPAENKAESEEMETSQAGSKDKKMDQPPQAKKAKVKTSTVDLPIENQLLWQIDREMLNLYIENEGKMIMQDKLEKERNDAKNAVEEYVYEMRDKLSGEYEKFVSEDDRNSFTLKLEDTENWLYEDGEDQPKQVYVDKLAELKNLGQPIKIRFQESEERPKLFEELGKQIQQYMKIISSFKNKEDQYDHLDAADMTKVEKSTNEAMEWMNNKLNLQNKQSLTMDPVVKSKEIEAKIKELTSTCSPIISKPKPKVEPPKEEQKNAEQNGPVDGQGDNPGPQAAEQGTDTAVPSDSDKKLPEMDID

SEQ ID NO: 29718 - protein, 475 aa, Homo sapiens [sequence omitted]

SEQ ID NO: 29719 - protein, 699 aa, Homo sapiens [sequence omitted]

SEQ ID NO: 29720 - protein, 839 aa, Homo sapiens
  REGION 1..839: note = ENSP00000422482
MSVVGIDLGFLNCYIAVARSGGIETIANEYSDRCTPACISLGSRTRAIGNAAKSQIVTNVRNTIHGFKKLHGRSFDDPIVQTERIRLPYELQKMPNGSAGVKVRYLEEERPFAIEQVTGMLLAKLKETSENALKKPVADCVISIPSFFTDAERRSVMAAAQVAGLNCLRLMNETTAVALAYGIYKQDLPPLDEKPRNVVFIDMGHSAYQVLVCAFNKGKLKVLATTFDPYLGGRNFDEALVDYFCDEFKTKYKINVKENSRALLRLYQECEKLKKLMSANASDLPLNIECFMNDLDVSSKMNRAQFEQLCASLLARVEPPLKAVMEQANLQREDISSIEIVGGATRIPAVKEQITKFFLKDISTTLNADEAVARGCALQCAILSPAFKVREFSITDLVPYSITLRWKTSFEDGSGECEVFCKNHPAPFSKVITFHKKEPFELEAFYTNLHEVPYPDARIGSFTIQNVFPQSDGDSSKVKVKVRVNIHGIFSVASASVIEKQNLEGDHSDAPMETETSFKNENKDNMDKMQVDQEEGHQKCHAEHTPEEEIDHTGAKTKSAVSDKQDRLNQTLKKGKVKSIDLPIQSSLCRQLGQDLLNSYIENEGKMIMQDKLEKERNDAKNAVEEYVYDFRDRLGTVYEKFITPEDLSKLSAVLEDTENWLYEDGEDQPKQVYVDKLQELKKYGQPIQMKYMEHEERPKALNDLGKKIQLVMKVIEAYRNKDERYDHLDPTEMEKVEKCISDAMSWLNSKMNAQNKLSLTQDPVVKVSEIVAKSKELDNFCNPIIYKPKPKAEVPEDKPKANSEHNGPMDGQSGTETKSDSTKDSSQHTKSSGEMEVD

SEQ ID NO: 29721 - protein, 839 aa, Homo sapiens; identical to SEQ ID NO: 29720
  REGION 1..839: note = ENSP00000296464

SEQ ID NO: 29722 - protein, 531 aa, Homo sapiens
  REGION 1..531: note = ENSP00000427305
MSVVGIDLGFLNCYIAVARSGGIETIANEYSDRCTPACISLGSRTRAIGNAAKSQIVTNVRNTIHGFKKLHGRSFDDPIVQTERIRLPYELQKMPNGSAGVKIPSFFTDAERRSVMAAAQVAGLNCLRLMNETTAVALAYGIYKQDLPPLDEKPRNVVFIDMGHSAYQVLVCAFNKGKLKVLATTFDPYLGGRNFDEALVDYFCDEFKTKYKINVKENSRALLRLYQECEKLKKLMSANASDLPLNIECFMNDLDVSSKMNRAQFEQLCASLLARVEPPLKAVMEQANLQREDISSIEIVGGATRIPAVKEQITKFFLKDISTTLNADEAVARGCALQCAILSPAFKVREFSITDLVPYSITLRWKTSFEDGSGECEVFCKNHPAPFSKVITFHKKEPFELEAFYTNLHEVPYPDARIGSFTIQNVFPQSDGDSSKVKVKVRVNIHGIFSVASASVIEKQNLEGDHSDAPMETETSFKNENKDNMDKMQVDQEEGHQKCHAEHTPEEEIDHTGAKTKSAVSDKQDRLNQTL

SEQ ID NO: 29723 - protein, 813 aa, Homo sapiens
  REGION 1..813: note = ENSP00000425645
MKPILLFMERACISLGSRTRAIGNAAKSQIVTNVRNTIHGFKKLHGRSFDDPIVQTERIRLPYELQKMPNGSAGVKVRYLEEERPFAIEQVTGMLLAKLKETSENALKKPVADCVISIPSFFTDAERRSVMAAAQVAGLNCLRLMNETTAVALAYGIYKQDLPPLDEKPRNVVFIDMGHSAYQVLVCAFNKGKLKVLATTFDPYLGGRNFDEALVDYFCDEFKTKYKINVKENSRALLRLYQECEKLKKLMSANASDLPLNIECFMNDLDVSSKMNRAQFEQLCASLLARVEPPLKAVMEQANLQREDISSIEIVGGATRIPAVKEQITKFFLKDISTTLNADEAVARGCALQCAILSPAFKVREFSITDLVPYSITLRWKTSFEDGSGECEVFCKNHPAPFSKVITFHKKEPFELEAFYTNLHEVPYPDARIGSFTIQNVFPQSDGDSSKVKVKVRVNIHGIFSVASASVIEKQNLEGDHSDAPMETETSFKNENKDNMDKMQVDQEEGHQKCHAEHTPEEEIDHTGAKTKSAVSDKQDRLNQTLKKGKVKSIDLPIQSSLCRQLGQDLLNSYIENEGKMIMQDKLEKERNDAKNAVEEYVYDFRDRLGTVYEKFITPEDLSKLSAVLEDTENWLYEDGEDQPKQVYVDKLQELKKYGQPIQMKYMEHEERPKALNDLGKKIQLVMKVIEAYRNKDERYDHLDPTEMEKVEKCISDAMSWLNSKMNAQNKLSLTQDPVVKVSEIVAKSKELDNFCNPIIYKPKPKAEVPEDKPKANSEHNGPMDGQSGTETKSDSTKDSSQHTKSSGEMEVD

SEQ ID NO: 29724 - protein, 646 aa, Homo sapiens
  REGION 1..646: note = ENSP00000437125
MSKGPAVGIDLGTTYSCVGVFQHGKVEIIANDQGNRTTPSYVAFTDTERLIGDAAKNQVAMNPTNTVFDAKRLIGRRFDDAVVQSDMKHWPFMVVNDAGRPKVQVEYKGETKSFYPEEVSSMVLTKMKEIAEAYLGKTVTNAVVTVPAYFNDSQRQATKDAGTIAGLNVLRIINEPTAAAIAYGLDKKVGAERNVLIFDLGGGTFDVSILTIEDGIFEVKSTAGDTHLGGEDFDNRMVNHFIAEFKRKHKKDISENKRAVRRLRTACERAKRTLSSSTQASIEIDSLYEGIDFYTSITRARFEELNADLFRGTLDPVEKALRDAKLDKSQIHDIVLVGGSTRIPKIQKLLQDFFNGKELNKSINPDEAVAYGAAVQAAILSGDKSENVQDLLLLDVTPLSLGIETAGGVMTVLIKRNTTIPTKQTQTFTTYSDNQPGVLIQVYEGERAMTKDNNLLGKFELTGIPPAPRGVPQIEVTFDIDANGILNVSAVDKSTGKENKITITNDKGRLSKEDIERMVQEAEKYKAEDEKQRDKVSSKNSLESYAFNMKATVEDEKLQGKINDEDKQKILDKCNEIINWLDKNQTAEKEEFEHQQKELEKVCNPIITKLYQSAGGMPGGMPGGFPGGGAPPSGGASSGPTIEEVD

SEQ ID NO: 29725 - protein, 500 aa, Homo sapiens
  REGION 1..500: note = ENSP00000437189
MSKGPAVGIDLGTTYSCVGVFQHGKVEIIANDQGNRTTPSYVAFTDTERLIGDAAKNQVAMNPTNTVFDAKRLIGRRFDDAVVQSDMKHWPFMVVNDAGRPKHKKDISENKRAVRRLRTACERAKRTLSSSTQASIEIDSLYEGIDFYTSITRARFEELNADLFRGTLDPVEKALRDAKLDKSQIHDIVLVGGSTRIPKIQKLLQDFFNGKELNKSINPDEAVAYGAAVQAAILSGDKSENVQDLLLLDVTPLSLGIETAGGVMTVLIKRNTTIPTKQTQTFTTYSDNQPGVLIQVYEGERAMTKDNNLLGKFELTGIPPAPRGVPQIEVTFDIDANGILNVSAVDKSTGKENKITITNDKGRLSKEDIERMVQEAEKYKAEDEKQRDKVSSKNSLESYAFNMKATVEDEKLQGKINDEDKQKILDKCNEIINWLDKNQTAEKEEFEHQQKELEKVCNPIITKLYQSAGGMPGGMPGGFPGGGAPPSGGASSGPTIEEVD

SEQ ID NO: 29726 - protein, 646 aa, Homo sapiens; identical to SEQ ID NO: 29724
  REGION 1..646: note = ENSP00000432083

SEQ ID NO: 29727 - protein, 493 aa, Homo sapiens
  REGION 1..493: note = ENSP00000404372
MSKGPAVGIDLGTTYSCVGVFQHGKVEIIANDQGNRTTPSYVAFTDTERLIGDAAKNQVAMNPTNTVFDAKRLIGRRFDDAVVQSDMKHWPFMVVNDAGRPKVQVEYKGETKSFYPEEVSSMVLTKMKEIAEAYLGKTVTNAVVTVPAYFNDSQRQATKDAGTIAGLNVLRIINEPTAAAIAYGLDKKVGAERNVLIFDLGGGTFDVSILTIEDGIFEVKSTAGDTHLGGEDFDNRMVNHFIAEFKRKHKKDISENKRAVRRLRTACERAKRTLSSSTQASIEIDSLYEGIDFYTSITRARFEELNADLFRGTLDPVEKALRDAKLDKSQIHDIVLVGGSTRIPKIQKLLQDFFNGKELNKSINPDEAVAYGAAVQAAILSGDKSENVQDLLLLDVTPLSLGIETAGGVMTVLIKRNTTIPTKQTQTFTTYSDNQPGVLIQVYEGERAMTKDNNLLGKFELTGMPGGMPGGFPGGGAPPSGGASSGPTIEEVD

SEQ ID NO: 29728 - protein, 646 aa, Homo sapiens; identical to SEQ ID NO: 29724
  REGION 1..646: note = ENSP00000227378

SEQ ID NO: 29729 - protein, 410 aa, Homo sapiens
  REGION 1..410: note = ENSP00000433316
MVNHFIAEFKRKHKKDISENKRAVRRLRTACERAKRTLSSSTQASIEIDSLYEGIDFYTSITRARFEELNADLFRGTLDPVEKALRDAKLDKSQIHDIVLVGGSTRIPKIQKLLQDFFNGKELNKSINPDEAVAYGAAVQAAILSGDKSENVQDLLLLDVTPLSLGIETAGGVMTVLIKRNTTIPTKQTQTFTTYSDNQPGVLIQVYEGERAMTKDNNLLGKFELTGIPPAPRGVPQIEVTFDIDANGILNVSAVDKSTGKENKITITNDKGRLSKEDIERMVQEAEKYKAEDEKQRDKVSSKNSLESYAFNMKATVEDEKLQGKINDEDKQKILDKCNEIINWLDKNQTAEKEEFEHQQKELEKVCNPIITKLYQSAGGMPGGMPGGFPGGGAPPSGGASSGPTIEEVD

SEQ ID NO: 29730 - protein, 627 aa, Homo sapiens
  REGION 1..627: note = ENSP00000433584
MSKGPAVGIDLGTTYSCVGVFQHGKVEIIANDQGNRTTPSYVAFTDTERLIGDAAKNQVAMNPTNTVFDAKRLIGRRFDDAVVQSDMKHWPFMVVNDAGRPKVQVEYKGETKSFYPEEVSSMVLTKMKEIAEAYLGKATKDAGTIAGLNVLRIINEPTAAAIAYGLDKKVGAERNVLIFDLGGGTFDVSILTIEDGIFEVKSTAGDTHLGGEDFDNRMVNHFIAEFKRKHKKDISENKRAVRRLRTACERAKRTLSSSTQASIEIDSLYEGIDFYTSITRARFEELNADLFRGTLDPVEKALRDAKLDKSQIHDIVLVGGSTRIPKIQKLLQDFFNGKELNKSINPDEAVAYGAAVQAAILSGDKSENVQDLLLLDVTPLSLGIETAGGVMTVLIKRNTTIPTKQTQTFTTYSDNQPGVLIQVYEGERAMTKDNNLLGKFELTGIPPAPRGVPQIEVTFDIDANGILNVSAVDKSTGKENKITITNDKGRLSKEDIERMVQEAEKYKAEDEKQRDKVSSKNSLESYAFNMKATVEDEKLQGKINDEDKQKILDKCNEIINWLDKNQTAEKEEFEHQQKELEKVCNPIITKLYQSAGGMPGGMPGGFPGGGAPPSGGASSGPTIEEVD

SEQ ID NO: 29731 - protein, 223 aa, Homo sapiens
  REGION 1..223: note = ENSP00000435908
MTVLIKRNTTIPTKQTQTFTTYSDNQPGVLIQVYEGERAMTKDNNLLGKFELTGIPPAPRGVPQIEVTFDIDANGILNVSAVDKSTGKENKITITNDKGRLSKEDIERMVQEAEKYKAEDEKQRDKVSSKNSLESYAFNMKATVEDEKLQGKINDEDKQKILDKCNEIINWLDKNQTAEKEEFEHQQKELEKVCNPIITKLYQSAGGMPGGMPGGFPGGGAPP

SEQ ID NO: 29732 - protein, 150 aa, Homo sapiens
  REGION 1..150: note = ENSP00000435019
MTKDNNLLGKFELTGIPPAPRGVPQIEVTFDIDANGILNVSAVDKSTGKENKITITNDKGRLSKEDIERMVQEAEKYKAEDEKQRDKVSSKNSLESYAFNMKATVEDEKLQGKINDEDKQKILDKCNEIINWLDKNQTAEKEEFEHQQKE

SEQ ID NO: 29733 - protein, 312 aa, Homo sapiens
  REGION 1..312: note = ENSP00000432884
MNPTNTVFDAKRLIGRRFDDAVVQSDMKHWPFMVVNDAGRPKVQVEYKGETKSFYPEEVSSMVLTKMKEIAEAYLGKTVTNAVVTVPAYFNDSQRQATKDAGTIAGLNVLRIINEPTAAAIAYGLDKKVGAERNVLIFDLGGGTFDVSILTIEDGIFEVKSTAGDTHLGGEDFDNRMVNHFIAEFKRKHKKDISENKRAVRRLRTACERAKRTLSSSTQASIEIDSLYEGIDFYTSITRARFEELNADLFRGTLDPVEKALRDAKLDKSQIHDIVLVGGSTRIPKIQKLLQDFFNGKELNKSINPDEAVAYG

SEQ ID NO: 29734 - protein, 168 aa, Homo sapiens
  REGION 1..168: note = ENSP00000436762
MSKGPAVGIDLGTTYSCVGVFQHGKVEIIANDQGNRTTPSYVAFTDTERLIGDAAKNQVAMNPTNTVFETKSFYPEEVSSMVLTKMKEIAEAYLGKTVTNAVVTVPAYFNDSQRQATKDAGTIAGLNVLRIINEPTAAAIAYGLDKKVGAERNVLIFDLGGGTFDVSI

SEQ ID NO: 29735 - protein, 187 aa, Homo sapiens
  REGION 1..187: note = ENSP00000435154
MSKGPAVGIDLGTTYSCVGVFQHGKVEIIANDQGNRTTPSYVAFTDTERLIGDAAKNQVAMNPTNTVFDAKRLIGRRFDDAVVQSDMKHWPFMVVNDAGRPKVQVEYKGETKSFYPEEVSSMVLTKMKEIAEAYLGKTVTNAVVTVPAYFNDSQRQATKDAGTIAGLNVLRIINEPTAAAIAYGLDK

SEQ ID NO: 29736 - protein, 183 aa, Homo sapiens
  REGION 1..183: note = ENSP00000431641
MSKGPAVGIDLGTTYSCVGVFQHGKVEIIANDQGNRTTPSYVAFTDTERLIGDAAKNQVAMNPTNTVFDAKRLIGRRFDDAVVQSDMKHWPFMVVNDAGRPKVQVEYKGETKSFYPEEVSSMVLTKMKEIAEAYLGKTVTNAVVTVPAYFNDSQRQATKDAGTIAGLNVLRIINEPTAAAIAY

SEQ ID NO: 29737 - protein, 178 aa, Homo sapiens
  REGION 1..178: note = ENSP00000436183
MSKGPAVGIDLGTTYSCVGVFQHGKVEIIANDQGNRTTPSYVAFTDTERLIGDAAKNQVAMNPTNTVFDAKRLIGRRFDDAVVQSDMKHWPFMVVNDAGRPKVQVEYKGETKSFYPEEVSSMVLTKMKEIAEAYLGKTVTNAVVTVPAYFNDSQRQATKDAGTIAGLNVLRIINEPTA

SEQ ID NO: 29738 - protein, 171 aa, Homo sapiens
  REGION 1..171: note = ENSP00000434415
MSKGPAVGIDLGTTYSCVGVFQHGKVEIIANDQGNRTTPSYVAFTDTERLIGDAAKNQVAMNPTNTVFDAKRLIGRRFDDAVVQSDMKHWPFMVVNDAGRPKVQVEYKGETKSFYPEEVSSMVLTKMKEIAEAYLGKTVTNAVVTVPAYFNDSQRQATKDAGTIAGLNVLR

SEQ ID NO: 29739 - protein, 137 aa, Homo sapiens
  REGION 1..137: note = ENSP00000434565
MSKGPAVGIDLGTTYSCVGVFQHGKVEIIANDQGNRTTPSYVAFTDTERLIGDAAKNQVAMNPTNTVFDAKRLIGRRFDDAVVQSDMKHWPFMVVNDAGRPKVQVEYKGETKSFYPEEVSSMVLTKMKEIAEAYLGK

SEQ ID NO: 29740 - protein, 132 aa, Homo sapiens
  REGION 1..132: note = ENSP00000434851
MSKGPAVGIDLGTTYSCVGVFQHGKVEIIANDQGNRTTPSYVAFTDTERLIGDAAKNQVAMNPTNTVFDAKRLIGRRFDDAVVQSDMKHWPFMVVNDAGRPKVQVEYKGETKSFYPEEVSSMVLTKMKEIAE

SEQ ID NO: 29741 - protein, 679 aa, Homo sapiens
  REGION 1..679: note = ENSP00000297185
MISASRAAAARLVGAAASRGPTAARHQDSWNGLSHEAFRLVSRRDYASEAIKGAVVGIDLGTTNSCVAVMEGKQAKVLENAEGARTTPSVVAFTADGERLVGMPAKRQAVTNPNNTFYATKRLIGRRYDDPEVQKDIKNVPFKIVRASNGDAWVEAHGKLYSPSQIGAFVLMKMKETAENYLGHTAKNAVITVPAYFNDSQRQATKDAGQISGLNVLRVINEPTAAALAYGLDKSEDKVIAVYDLGGGTFDISILEIQKGVFEVKSTNGDTFLGGEDFDQALLRHIVKEFKRETGVDLTKDNMALQRVREAAEKAKCELSSSVQTDINLPYLTMDSSGPKHLNMKLTRAQFEGIVTDLIRRTIAPCQKAMQDAEVSKSDIGEVILVGGMTRMPKVQQTVQDLFGRAPSKAVNPDEAVAIGAAIQGGVLAGDVTDVLLLDVTPLSLGIETLGGVFTKLINRNTTIPTKKSQVFSTAADGQTQVEIKVCQGEREMAGDNKLLGQFTLIGIPPAPRGVPQIEVTFDIDANGIVHVSAKDKGTGREQQIVIQSSGGLSKDDIENMVKNAEKYAEEDRRKKERVEAVNMAEGIIHDTETKMEEFKDQLPADECNKLKEEISKMRELLARKDSETGENIRQAASSLQQASLKLFEMAYKKMASEREGSGSSGTGEQKEDQKEEKQ

SEQ ID NO: 29742 - protein, 102 aa, Homo sapiens
  REGION 1..102: note = ENSP00000421892
  VARIANT 1: note = Any amino acid
XTQVEIKVCQGEREMAGDNKLLGQFTLIGIPPAPRGVPQIEVTFDIDANGIVHVSAKDKGTGREQQIVIQSSGGLSKDDIENMVKNAEKYAEEDRRKKRFPK

SEQ ID NO: 29743 - protein, 163 aa, Homo sapiens
  REGION 1..163: note = ENSP00000429475
  VARIANT 1: note = Any amino acid
XDLTKDNMALQRVREAAEKAKCELSSSVQTDINLPYLTMDSSGPKHLNMKLTRAQFEGIVTDLIRRTIAPCQKAMQDAEVSKSDIGEVILVGGMTRMPKEICKKKKNEPGKKRSWTRWMPHILRNPRGRVQWLTPVIPALWEAKAGGSRGSADCTGSFWQSPK

SEQ ID NO: 29744 - protein, 100 aa, Homo sapiens
  REGION 1..100: note = ENSP00000421311
  VARIANT 1: note = Any amino acid
XVLLHLSAMISASRAAAARLVGAAASRGPTAARHQDSWNGLSHEAFRLVSRRDYASEAIKGAVVGIDLGTTNSCVAVMEGAGECRRCQNHPFSCGLYSRW

SEQ ID NO: 29745 - protein, 42 aa, Homo sapiens
  REGION 1..42: note = ENSP00000423759
MISASRAAAARLVGAAASRGPTAARHQDTHWLVTESVFSFLG

SEQ ID NO: 29746 - protein, 38 aa, Homo sapiens
  REGION 1..38: note = ENSP00000420944
MISASRAAAARLVGAAASRGPTAARHQIRSNQGSSCWY

SEQ ID NO: 29747 - protein, 95 aa, Homo sapiens
  REGION 1..95: note = ENSP00000425598
MEGKQAKVLENAEGARTTPSVVAFTADGERLVGMPAKRQAVTNPNNTFYATKRLIGRRYDDPEVQKDIKNVPFKIVRASNGDAWVEAHGKLYSPS

SEQ ID NO: 29748 - protein, 62 aa, Homo sapiens
  REGION 1..62: note = ENSP00000423098
MEGKQAKVLENAEGARTTPSVVAFTADGERLVGMPAKRQAVTNPNNTFYATKRLIGRRYDDP

SEQ ID NO: 29749 - protein, 205 aa, Homo sapiens
  REGION 1..205: note = ENSP00000248553
MTERRVPFSLLRGPSWDPFRDWYPHSRLFDQAFGLPRLPEEWSQWLGGSSWPGYVRPLPPAAIESPAVAAPAYSRALSRQLSSGVSEIRHTADRWRVSLDVNHFAPDELTVKTKDGVVEITGKHEERQDEHGYISRCFTRKYTLPPGVDPTQVSSSLSPEGTLTVEAPMPKLATQSNEITIPVTFESRAQLGGPEAAKSDETAAK

SEQ ID NO: 29750 - protein, 186 aa, Homo sapiens [sequence omitted]

SEQ ID NO: 29751 - protein, 37 aa, Homo sapiens
  REGION 1..37: note = ENSP00000405285
MPKLATQSNEITIPVTFESRAQLGGPEAAKSDETAAK

SEQ ID NO: 29752 - protein, 573 aa, Homo sapiens
  REGION 1..573: note = ENSP00000373620
MLRLPTVFRQMRPVSRVLAPHLTRAYAKDVKFGADARALMLQGVDLLADAVAVTMGPKGRTVIIEQSWGSPKVTKDGVTVAKSIDLKDKYKNIGAKLVQDVANNTNEEAGDGTTTATVLARSIAKEGFEKISKGANPVEIRRGVMLAVDAVIAELKKQSKPVTTPEEIAQVATISANGDKEIGNIISDAMKKVGRKGVITVKDGKTLNDELEIIEGMKFDRGYISPYFINTSKGQKCEFQDAYVLLSEKKISSIQSIVPALEIANAHRKPLVIIAEDVDGEALSTLVLNRLKVGLQVVAVKAPGFGDNRKNQLKDMAIATGGAVFGEEGLTLNLEDVQPHDLGKVGEVIVTKDDAMLLKGKGDKAQIEKRIQEIIEQLDVTTSEYEKEKLNERLAKLSDGVAVLKVGGTSDVEVNEKKDRVTDALNATRAAVEEGIVLGGGCALLRCIPALDSLTPANEDQKIGIEIIKRTLKIPAMTIAKNAGVEGSLIVEKIMQSSSEVGYDAMAGDFVNMVEKGIIDPTKVVRTALLDAAGVASLLTTAEVVVTEIPKEEKDPGMGAMGGMGGGMGGGMF

SEQ ID NO: 29753 - protein, 234 aa, Homo sapiens [sequence omitted]

SEQ ID NO: 29754 - protein, 221 aa, Homo sapiens
  REGION 1..221: note = ENSP00000412717
MLRLPTVFRQMRPVSRVLAPHLTRAYAKDVKFGADARALMLQGVDLLADAVAVTMGPKGRTVIIEQSWGSPKVTKDGVTVAKSIDLKDKYKNIGAKLVQDVANNTNEEAGDGTTTATVLARSIAKEGFEKISKGANPVEIRRGVMLAVDAVIAELKKQSKPVTTPEEIAQVATISANGDKEIGNIISDAMKKVGRKGVITVKDGKTLNDELEIIEGMKFDR

SEQ ID NO: 29755 - protein, 48 aa, Homo sapiens
  REGION 1..48: note = ENSP00000390404
MLRLPTVFRQMRPVSRVLAPHLTRAYAKDVKFGADARALMLQGKNSDY

SEQ ID NO: 29756 - protein, 175 aa, Homo sapiens
  REGION 1..175: note = ENSP00000414446
MKTCWTREQLQGKRQGEVVKGKQGGEYRHPDPARQAGWQETEMLRLPTVFRQMRPVSRVLAPHLTRAYAKDVKFGADARALMLQGVDLLADAVAVTMGPKGRTVIIEQSWGSPKVTKDGVTVAKSIDLKDKYKNIGAKLVQDVANNTNEEAGDGTTTATVLARSIAKEGFEKISK

SEQ ID NO: 29757 - protein, 94 aa, Homo sapiens
  REGION 1..94: note = ENSP00000396460
MLRLPTVFRQMRPVSRVLAPHLTRAYAKDVKFGADARALMLQGVDLLADAVAVTMGPKGRTVIIEQSWGSPKVTKDGVTVAKSIDLKDKYKNIG

SEQ ID NO: 29758 - protein, 83 aa, Homo sapiens
  REGION 1..83: note = ENSP00000402478
MLRLPTVFRQMRPVSRVLAPHLTRAYAKDVKFGADARALMLQGVDLLADAVAVTMGPKGRTVIIEQSWGSPKVTKDGVTVAKS

SEQ ID NO: 29759 - protein, 58 aa, Homo sapiens
  REGION 1..58: note = ENSP00000412227
MLRLPTVFRQMRPVSRVLAPHLTRAYAKDVKFGADARALMLQGVDLLADAVAVTMGPK

SEQ ID NO: 29760 - protein, 573 aa, Homo sapiens; identical to SEQ ID NO: 29752
  REGION 1..573: note = ENSP00000340019

SEQ ID NO: 29761 - protein, 261 aa, Homo sapiens
  REGION 1..261: note = ENSP00000474534
MAGQAFRKFLPLFDRVLVERSAAETVTKGGIMLPEKSQGKVLQATVVAVGSGSKGKDFYNWPDESFDEMDSTLAVQQYIQQNIRADCSNIDKILEPPEGQDEGVWKYEHLRQFCLELNGLAVKLQSECHPDTCTQMTATEQWIFLCAAHKTPKECPAIDYTRHTLDGAACLLNSNKYFPSRVSIKESSVAKLGSVCRRIYRIFSHAYFHHRQIFDEYENETFLCHRFTKFVMKYNLMSKDNLIVPILEEEVQNSVSGESEA

SEQ ID NO: 29762 - protein, 858 aa, Homo sapiens
  REGION 1..858: note = ENSP00000318687
MSVVGLDVGSQSCYIAVARAGGIETIANEFSDRCTPSVISFGSKNRTIGVAAKNQQITHANNTVSNFKRFHGRAFNDPFIQKEKENLSYDLVPLKNGGVGIKVMYMGEEHLFSVEQITAMLLTKLKETAENSLKKPVTDCVISVPSFFTDAERRSVLDAAQIVGLNCLRLMNDMTAVALNYGIYKQDLPSLDEKPRIVVFVDMGHSAFQVSACAFNKGKLKVLGTAFDPFLGGKNFDEKLVEHFCAEFKTKYKLDAKSKIRALLRLYQECEKLKKLMSSNSTDLPLNIECFMNDKDVSGKMNRSQFEELCAELLQKIEVPLYSLLEQTHLKVEDVSAVEIVGGATRIPAVKERIAKFFGKDISTTLNADEAVARGCALQCAILSPAFKVREFSVTDAVPFPISLIWNHDSEDTEGVHEVFSRNHAAPFSKVLTFLRRGPFELEAFYSDPQGVPYPEAKIGRFVVQNVSAQKDGEKSRVKVKVRVNTHGIFTISTASMVEKVPTEENEMSSEADMECLNQRPPENPDTDKNVQQDNSEAGTQPQVQTDAQQTSQSPPSPELTSEENKIPDADKANEKKVDQPPEAKKPKIKVVNVELPIEANLVWQLGKDLLNMYIETEGKMIMQDKLEKERNDAKNAVEEYVYEFRDKLCGPYEKFICEQDHQNFLRLLTETEDWLYEEGEDQAKQAYVDKLEELMKIGTPVKVRFQEAEERPKMFEELGQRLQHYAKIAADFRNKDEKYNHIDESEMKKVEKSVNEVMEWMNNVMNAQAKKSLDQDPVVRAQEIKTKIKELNNTCEPVVTQPKPKIESPKLERTPNGPNIDKKEEDLEDKNNFGAEPPHQNGECYPNEKNSVNMDLD

SEQ ID NO: 29763 - protein, 115 aa, Homo sapiens
  REGION 1..115: note = ENSP00000408991
DEKYNHIDESEMKKVEKSVNEVMEWMNNVMNAQAKKSLDQDPVVRAQEIKTKIKELNNTCEPVVTQPKPKIESPKLERTPNGPNIDKKEEDLEDKNNFGAEPPHQNDSCGIVNSY

SEQ ID NO: 29764 - protein, 860 aa, Homo sapiens
  REGION 1..860: note = ENSP00000487365
MATAAVLRGPAAHWVESFQKAREEGSGSGTWRGRWRRRSVISFGSKNRTIGVAAKNQQITHANNTVSNFKRFHGRAFNDPFIQKEKENLSYDLVPLKNGGVGIKVMYMGEEHLFSVEQITAMLLTKLKETAENSLKKPVTDCVISVPSFFTDAERRSVLDAAQIVGLNCLRLMNDMTAVALNYGIYKQDLPSLDEKPRIVVFVDMGHSAFQVSACAFNKGKLKVLGTAFDPFLGGKNFDEKLVEHFCAEFKTKYKLDAKSKIRALLRLYQECEKLKKLMSSNSTDLPLNIECFMNDKDVSGKMNRSQFEELCAELLQKIEVPLYSLLEQTHLKVEDVSAVEIVGGATRIPAVKERIAKFFGKDISTTLNADEAVARGCALQCAILSPAFKVREFSVTDAVPFPISLIWNHDSEDTEGVHEVFSRNHAAPFSKVLTFLRRGPFELEAFYSDPQGVPYPEAKIGRFVVQNVSAQKDGEKSRVKVKVRVNTHGIFTISTASMVEKVPTEENEMSSEADMECLNQRPPENPDTDKNVQQDNSEAGTQPQVQTDAQQTSQSPPSPELTSEENKIPDADKANEKKVDQPPEAKKPKIKVVNVELPIEANLVWQLGKDLLNMYIETEGKMIMQDKLEKERNDAKNAVEEYVYEFRDKLCGPYEKFICEQDHQNFLRLLTETEDWLYEEGEDQAKQAYVDKLEELMKIGTPVKVRFQEAEERPKMFEELGQRLQHYAKIAADFRNKDEKYNHIDESEMKKVEKSVNEVMEWMNNVMNAQAKKSLDQDPVVRAQEIKTKIKELNNTCEPVVTQPKPKIESPKLERTPNGPNIDKKEEDLEDKNNFGAEPPHQNGECYPNEKNSVNMDLD

SEQ ID NO: 29765 - protein, 814 aa, Homo sapiens
  REGION 1..814: note = ENSP00000369768
MSVVGLDVGSQSCYIAVARAGGIETIANEFSDRCTPSVISFGSKNRTIGVAAKNQQITHANNTVSNFKRFHGRAFNDPFIQKEKENLSYDLVPLKNGGVGIKVMYMGEEHLFSVEQITAMLLTKLKETAENSLKKPVTDCVISVPSFFTDAERRSVLDAAQIVGLNCLRLMNDMTAVALNYGIYKQDLPSLDEKPRIVVFVDMGHSAFQVSACAFNKGKLKVLGTAFDPFLGGKNFDEKLVEHFCAEFKTKYKLDAKSKIRALLRLYQECEKLKKLMSSNSTDLPLNIECFMNDKDVSGKMNRSQFEELCAELLQKIEVPLYSLLEQTHLKVEDVSAVEIVGGATRIPAVKERIAKFFGKDISTTLNADEAVARGCALQCAILSPAFKVREFSVTDAVPFPISLIWNHDSEDTEGVHEVFSRNHAAPFSKVLTFLRRGPFELEAFYSDPQGVPYPEAKIGRFVVQNVSAQKDGEKSRVKVKVRVNTHGIFTISTASMVEKVPTEENEMSSEADMECLNQRPPENPDTDANEKKVDQPPEAKKPKIKVVNVELPIEANLVWQLGKDLLNMYIETEGKMIMQDKLEKERNDAKNAVEEYVYEFRDKLCGPYEKFICEQDHQNFLRLLTETEDWLYEEGEDQAKQAYVDKLEELMKIGTPVKVRFQEAEERPKMFEELGQRLQHYAKIAADFRNKDEKYNHIDESEMKKVEKSVNEVMEWMNNVMNAQAKKSLDQDPVVRAQEIKTKIKELNNTCEPVVTQPKPKIESPKLERTPNGPNIDKKEEDLEDKNNFGAEPPHQNGECYPNEKNSVNMDLD

SEQ ID NO: 29766 - protein, 115 aa, Homo sapiens
  REGION 1..115: note = ENSP00000473512
MSVVGLDVGSQSCYIAVARAGGIETIANEFSDRCTPSVISFGSKNRTIGVAAKNQQITHANNTVSNFKRFHGRAFNDPFIQKEKENLSYDLVPLKNGGVGIKSPPSLQMLRGDLC

SEQ ID NO: 29767 - protein, 782 aa, Homo sapiens
  REGION 1..782: note = ENSP00000396090
MATAAVLRGPAAHWVESFQKAREEGSGSGTWRGRWRRRSVISFGSKNRTIGVAAKNQQITHANNTVSNFKRFHGRAFNDPFIQKEKENLSYDLVPLKNGGVGIKVMYMGEEHLFSVEQITAMLLTKLKETAENSLKKPVTDCVISVLGTAFDPFLGGKNFDEKLVEHFCAEFKTKYKLDAKSKIRALLRLYQECEKLKKLMSSNSTDLPLNIECFMNDKDVSGKMNRSQFEELCAELLQKIEVPLYSLLEQTHLKVEDVSAVEIVGGATRIPAVKERIAKFFGKDISTTLNADEAVARGCALQCAILSPAFKVREFSVTDAVPFPISLIWNHDSEDTEGVHEVFSRNHAAPFSKVLTFLRRGPFELEAFYSDPQGVPYPEAKIGRFVVQNVSAQKDGEKSRVKVKVRVNTHGIFTISTASMVEKVPTEENEMSSEADMECLNQRPPENPDTDKNVQQDNSEAGTQPQVQTDAQQTSQSPPSPELTSEENKIPDADKANEKKVDQPPEAKKPKIKVVNVELPIEANLVWQLGKDLLNMYIETEGKMIMQDKLEKERNDAKNAVEEYVYEFRDKLCGPYEKFICEQDHQNFLRLLTETEDWLYEEGEDQAKQAYVDKLEELMKIGTPVKVRFQEAEERPKMFEELGQRLQHYAKIAADFRNKDEKYNHIDESEMKKVEKSVNEVMEWMNNVMNAQAKKSLDQDPVVRAQEIKTKIKELNNTCEPVVTQPKPKIESPKLERTPNGPNIDKKEEDLEDKNNFGAEPPHQNGECYPNEKNSVNMDLD

SEQ ID NO: 29768 - protein, 390 aa, Homo sapiens
  REGION 1..390: note = ENSP00000358963
MEEPGAQCAPPPPAGSETWVPQANLSSAPSQNCSAKDYIYQDSISLPWKVLLVMLLALITLATTLSNAFVIATVYRTRKLHTPANYLIASLAVTDLLVSILVMPISTMYTVTGRWTLGQVVCDFWLSSDITCCTASILHLCVIALDRYWAITDAVEYSAKRTPKRAAVMIALVWVFSISISLPPFFWRQAKAEEEVSECVVNTDHILYTVYSTVGAFYFPTLLLIALYGRIYVEARSRILKQTPNRTGKRLTRAQLITDSPGSTSSVTSINSRVPDVPSESGSPVYVNQVKVRVSDALLEKKKLMAARERKATKTLGIILGAFIVCWLPFFIISLVMPICKDACWFHLAIFDFFTWLGYLNSLINPIIYTMSNEDFKQAFHKLIRFKCTS

SEQ ID NO: 29769 - protein, 471 aa, Homo sapiens
  REGION 1..471: note = ENSP00000367959
MDILCEENTSLSSTTNSLMQLNDDTRLYSNDFNSGEANTSDAFNWTVDSENRTNLSCEGCLSPSCLSLLHLQEKNWSALLTAVVIILTIAGNILVIMAVSLEKKLQNATNYFLMSLAIADMLLGFLVMPVSMLTILYGYRWPLPSKLCAVWIYLDVLFSTASIMHLCAISLDRYVAIQNPIHHSRFNSRTKAFLKIIAVWTISVGISMPIPVFGLQDDSKVFKEGSCLLADDNFVLIGSFVSFFIPLTIMVITYFLTIKSLQKEATLCVSDLGTRAKLASFSFLPQSSLSSEKLFQRSIHREPGSYTGRRTMQSISNEQKACKVLGIVFFLFVVMWCPFFITNIMAVICKESCNEDVIGALLNVFVWIGYLSSAVNPLVYTLFNKTYRSAFSRYIQCQYKENKKPLQLILVNTIPALAYKSSQLQMGQKKNSKQDAKTTDNDCSMVALGKQHSEEASKDNSDGVNEKVSCV

SEQ ID NO: 29770 - protein, 110 aa, Homo sapiens
  REGION 1..110: note = ENSP00000482708
FNSGEANTSDAFNWTVDSENRTNLSCEGCLSPSCLSLLHLQEKNWSALLTAVVIILTIAGNILVIMAVSLEKKLQNATNYFLMSLAIADMLLGFLVMPVSMLTILYGEWH

SEQ ID NO: 29771 - protein, 387 aa, Homo sapiens
  REGION 1..387: note = ENSP00000441861
MQFLKSAKQKPNYYHIMLVEDQEEGTLHQFNYCERCSESQNNKCISCVDPEDKWYRWPLPSKLCAVWIYLDVLFSTASIMHLCAISLDRYVAIQNPIHHSRFNSRTKAFLKIIAVWTISVGISMPIPVFGLQDDSKVFKEGSCLLADDNFVLIGSFVSFFIPLTIMVITYFLTIKSLQKEATLCVSDLGTRAKLASFSFLPQSSLSSEKLFQRSIHREPGSYTGRRTMQSISNEQKACKVLGIVFFLFVVMWCPFFITNIMAVICKESCNEDVIGALLNVFVWIGYLSSAVNPLVYTLFNKTYRSAFSRYIQCQYKENKKPLQLILVNTIPALAYKSSQLQMGQKKNSKQDAKTTDNDCSMVALGKQHSEEASKDNSDGVNEKVSCV

SEQ ID NO: 29772 - protein, 471 aa, Homo sapiens; identical to SEQ ID NO: 29769
  REGION 1..471: note = ENSP00000437737

SEQ ID NO: 29773 - protein, 458 aa, Homo sapiens
  REGION 1..458: note = ENSP00000361019
MVNLRNAVHSFLVHLIGLLVWQSDISVSPVAAIVTDIFNTSDGGRFKFPDGVQNWPALSIVIIIIMTIGGNILVIMAVSMEKKLHNATNYFLMSLAIADMLVGLLVMPLSLLAILYDYVWPLPRYLCPVWISLDVLFSTASIMHLCAISLDRYVAIRNPIEHSRFNSRTKAIMKIAIVWAISIGVSVPIPVIGLRDEEKVFVNNTTCVLNDPNFVLIGSFVAFFIPLTIMVITYCLTIYVLRRQALMLLHGHTEEPPGLSLDFLKCCKRNTAEEENSANPNQDQNARRRKKKERRPRGTMQAINNERKASKVLGIVFFVFLIMWCPFFITNILSVLCEKSCNQKLMEKLLNVFVWIGYVCSGINPLVYTLFNKIYRRAFSNYLRCNYKVEKKPPVRQIPRVAATALSGRELNVNIYRHTNEPVIEKASDNEPGIEMQVENLELPVNPSSVVSERISSV

SEQ ID NO: 29774 - protein, 458 aa, Homo sapiens; identical to SEQ ID NO: 29773
  REGION 1..458: note = ENSP00000276198

SEQ ID NO: 29775 - protein, 248 aa, Homo sapiens
  REGION 1..248: note = ENSP00000361018
MVNLRNAVHSFLVHLIGLLVWQSDISVSPVAAIVTDIFNTSDGGRFKFPDGVQNWPALSIVIIIIMTIGGNILVIMAVSMEKKLHNATNYFLMSLAIADMLVGLLVMPLSLLAILYDYVWPLPRYLCPVWISLDVLFSTASIMHLCAISLDRCISSYPCDWTEGRRKGVREQHDVRAQRPKFRSYWVLRSFLHTADDYGDYVLPDHLRSAPTSFDVTARPHRGTAWTKSGFPEVLQEEYGRGRELCKP

SEQ ID NO: 29776 - protein, 357 aa, Homo sapiens
  REGION 1..357: note = ENSP00000287907
MDLPVNLTSFSLSTPSPLETNHSLGKDDLRPSSPLLSVFGVLILTLLGFLVAATFAWNLLVLATILRVRTFHRVPHNLVASMAVSDVLVAALVMPLSLVHELSGRRWQLGRRLCQLWIACDVLCCTASIWNVTAIALDRYWSITRHMEYTLRTRKCVSNVMIALTWALSAVISLAPLLFGWGETYSEGSEECQVSREPSYAVFSTVGAFYLPLCVVLFVYWKIYKAAKFRVGSRKTNSVSPISEAVEVKDSAKQPQMVFTVRHATVTFQPEGDTWREQKEQRAALMVGILIGVFVLCWIPFFLTELISPLCSCDIPAIWKSIFLWLGYSNSFFNPLIYTAFNKNYNSAFKNFFSRQH

SEQ ID NO: 29777 - protein, 480 aa, Homo sapiens
  REGION 1..480: note = ENSP00000357980
MQIPRAALLPLLLLLLAAPASAQLSRAGRSAPLAAGCPDRCEPARCPPQPEHCEGGRARDACGCCEVCGAPEGAACGLQEGPCGEGLQCVVPFGVPASATVRRRAQAGLCVCASSEPVCGSDANTYANLCQLRAASRRSERLHRPPVIVLQRGACGQGQEDPNSLRHKYNFIADVVEKIAPAVVHIELFRKLPFSKREVPVASGSGFIVSEDGLIVTNAHVVTNKHRVKVELKNGATYEAKIKDVDEKADIALIKIDHQGKLPVLLLGRSSELRPGEFVVAIGSPFSLQNTVTTGIVSTTQRGGKELGLRNSDMDYIQTDAIINYGNSGGPLVNLDGEVIGINTLKVTAGISFAIPSDKIKKFLTESHDRQAKGKAITKKKYIGIRMMSLTSSKAKELKDRHRDFPDVISGAYIIEVIPDTPAEAGGLKENDVIISINGQSVVSANDVSDVIKRESTLNMVVRRGNEDIMITVIPEEIDP

SEQ ID NO: 29778 - protein, 221 aa, Homo sapiens
  REGION 1..221: note = ENSP00000412676
GKLPVLLLGRSSELRPGEFVVAIGSPFSLQNTVTTGIVSTTQRGGKELGLRNSDMDYIQTDAIINYGNSGGPLVNLDGEVIGINTLKVTAGISFAIPSDKIKKFLTESHDRQAKGKAITKKKYIGIRMMSLTSSKAKELKDRHRDFPDVISGAYIIEVIPDTPAEAGGLKENDVIISINGQSVVSANDVSDVIKRESTLNMVVRRGNEDIMITVIPEEIDP
